United States Patent Application Publication US 2017/0114356 A1 - sequence listing, part 80

SEQ ID NO: 123350 - DNA, 759 bp, Zea Mays
tgcctcgtagcattatgtcgcagccttgcccgcccaaccgtcgtctacacttgctctcgcctcaccgctgctcgccgagcacgcctggcacgctcaccgccagcgcagccgccgtctcgcgcttggcgtgtggagcaaccgtcgcgcactcggagtcccagtcgctgtgccgagccggagttctcgtccacactcgcgccgcgtcagccaagtgacacccgtcgtgctcttgctcctgcgttgttcgtcatgcacagcatcacaggtgagaatcctctgccctcccctctatccctctccattttgcgacgtcacagcttagcttcgcgccgttggccgccggcgtgcgtcgtcggctggcgaggtcgtggccctgtgcaaggcccctcccctcccccactcggccatgacgcagcctgtgtggcaccttgcctagccttgagcatggccgcctagggccggccggccagccgccccatcccctgtcggcgaaccccgcccctgctggtgctgcgcgagctcatgccgccatgcgatgcgagttgaagaaaactgctccttggatgcgtgagaagataaaaccgcatgggctccactgcatgctgccatgctggtttcccacgattcgtgagtttgaagaaaccgcatgtgagccccgccggcatgcacatgcacgcgtgcggcgcgctccacatccgagcccgcgcttgatactatgcggctgcaagcacagtgtctccccgcgtggctagctcctcg

SEQ ID NO: 123351 - DNA, 516 bp, Zea Mays
atggctggagctccagcgagcagcaacagagcagggtacaaccagggagatgggtgccaagtagccgagttggagcaccatggcacgcaggaaggcaggccgggcgcggcagcaggcgcgacaccagggagcgagcagggcgtcgcggcatggacgagggaggagctcatggacaagagagttccagcaggcagaggggcaccgcagccatggatggggctgtacgggaaacaaggaacgtcgatctggagcaaggagaagggaggggcgccgcgagctggggcaatccaggagcgggggcgccatggggagcttggcaaggagggggctccggccatggatggagccgagcgggagcaaggagaaggaggcgccatggctgggcatagggaagatggacgagcagaggaacgccgagcagggagttccggccagcagagggagctggagtctgccgtgcggaagaagacgacgtgcagccagaagataaggagctgctgcgtagaaatatcctag

SEQ ID NO: 123352 - DNA, 937 bp, Zea Mays
atagcttcataagtgagagcgtcgccaacaaattaaagttaatgccatcgatcacttggatgtgaatatgttttgtatgcacatcgtcttctctgcttgttccaattctctgcaaatctgctcagtctaccaaataatttcgcaaaacatctctttatatgatccaaatgcaatgtcatatatatatgtaggctctctactgcatgcatgctacacattcatggaaatgtttcataaaaacctgtgcagttggaatatataaatcagaacatgcatggaggcagagttgtaaagttacagctttatggagctctcgctagctagctccatgcatgggacgacacgacgatcagtggcatgcatgtgtcctgctttgatgtatgaggaaacaaggggaaggagacaactactcatgaaccttaacttttggcctagctagccttccgatcgaaaaaacaaaatatatatgacatctgttcgtagatggcagcagtatttatttatttgcatctatatatcgagatagatagtccataatcttcaggccaaagggtgagcatatttttatctgtttactcctaatagcttgtagtctgcccccaatcgaaaagaacacatgtagatgtagagcagtagtatctttgagattactgcccttggttctaatttgtggaaattaacatatagaactagctagaaacacttgtttgtgtacgatcattgatcgatttatgagcaaaatcatttgatactcaggagatatatatgcagactgatcatacatatgagaccaccgttaattagatggggatttggccaacaaatctcttagattaagatgaactagaaacaaagaagtcatgtctaggagagagaaaggtaagcaaaagagaagataagaagatccttcatgcatgcgaaaagggatagcgatgat

SEQ ID NO: 123353 - DNA, 1205 bp, Zea Mays
acaacagatacagtttaagagcctgatgtgtaccaccacttcttagttttggatcacgcgttactcagtactatgactgagctttaacccaaagctgttaaactacttaaattaagaatatggaagttcagttaatctgtggccttttggttctatcattggaataaaacctggagaaacatttcaacaccagcttaggtcttgcatatttagaaccctgacttgagaaagctggatcattttgcggtaaagttgtttgtaaaactctagaaagcagtatgcgtggtaattttagccaaaaaagagatttgtcagattcaattattagtgtgcctatgtgcatatattgtgaaggtcaaagcatgtcttttctgttataacttcaatcataatttagtatgtgcaggctgataatgacccaattgcaccatccaggggaattcctagagatgatatcaaggcaaataagaactgtctacttatagtaacaccacagggtggccatcttggatgggtagcaggcgacgaagctccattcggatgtccttggacagacccaatagtgatggaatatctagaacatctcgagaatgagaaggactctagtaccaaaaataacacatcctatgagggtgtttcagaggcatcagtatcccatctaactgtgcatggccaaagataataatatctctcttctcatagtactcattcgccacattatgttttatatggaaatagtttagtagagttcatttagccgtgttgtctgctgctgcctgctggttaattgagtacatggctcttcgtctacaggtctagtggtctacacatgtgcgagaagatttctgtgtcaaataagatgtctggttctgagatcaaaatagaacatgcgttatccaattgttcgttcttagggggtttcactttcatcccgtgtttgaaagggattctctgtaaatgcatgagctgttacggagttggcctttgtatccctcttctgcaacgcgtgaaagttgatggcgatgagcacggcagtgcatcatgtaaatttgacaatgtcattcagcgcaaaaaaaaaaaaaccccccgaaaaatgtgttggaagagtttttgtgtgcgcatgctaacaaatatctcatgtggtaaacatcatcttggattaacatatggcaatgtgatgaaatagtaacagttgttgaaatttt

SEQ ID NO: 123354 - DNA, 1931 bp, Zea Mays
gagagacagtcagacagcagctcgaacctcgaaaagcaggagagtccaaagccgaatggacaactggcaacaaatcaacagagccacagaggaaatgaatccgatagccaccgccgccctcacgccatcctcatttttcgcctcaaaccgccgcttcgcccctcgcctccgctccgtcctccccgccgctgccatgtcttacgccgccgtatccgcctccgccccaagccccagctccggcactggggaacaggtgaaggcggccccgctcccgcactcgaccctcgagatcgcgggcgcccgccggggcctcctctcaggcttcgccagcctccgcgccccgtaccgtgccttccccgtactcgcgtcgaaccgacacgtcgagaccatcttcgctgcgctcacgcgatcgctccccgccgttaagctgcggcgcgagtgcctccgcgcccctgacgacggagccgtcgcgctcgactgggtctctggcgacgaccgtgtgcttccgaatgatgctccggtgcttatactcttgcctggtcttacaggtggaagtgatgatacatatgtaaggcatatgcttatgagagctagaagcaagggatggcgtgttgtggtgtttaatagccgtggatgtgcagatagtcctgtgactacacccaagttctattctgcttcatttacaggggatctccgccaagttattggtcatattttaggacgttatcctcagtccaatgtctatgctaccggttggtctcttggagcgaatattcttgtgcgctaccttggcgaggaaactgataaatgccctttatctggcgcggtctccttgtgcaatccttttaatttggtaattgcagatgaagatttccacaaaggatttaacaacgtttatgataaagcattggctagggctttgacgactatatttaagaagcatgctctccttttcgaagggctggagggtgaatatgatatacccaaggcagcgaatgcaagaactgttagagattttgatgaggggttaacccgagtttcatttggtttcaagtcagtggatgattattactccaattcaagcagctcggattctatcaaggatgtttgcatacccttactgtgcatacaggctgataatgacccaattgcaccatccaggggaattcctagagatgatatcaaggcaaataagaactgtctacttatagtaacaccacagggtggccatcttggatgggtagcaggcgacgaagctccattcggatgtccttggacagacccaatagtgatggaatatctagaacatctcgagaatgagaaggactctagtaccaaaaataacacatcctatgagggtgtttcagaggcatcagtatcccatctaactgtgcatggccaaagataataatatctctcttctcatagtactcattcgccacattatgttttatatggaaatagtttagtagagttcatttagccgtgttgtctgctgctgcctgctggttaattgagtacatggctcttcgtctacaggtctagtggtctacacatgtgcgagaagatttctgtgtcaaataagatgtctggttctgagatcaaaatagaacatgcgttatccaattgttcgttcttagggggtttcactttcatcccgtgtttgaaagggattctctgtaaatgcatgagctgttacggagttggcctttgtatccctcttctgcaacgcgtgaaagttgatggcgatgagcacggcagtgcatcatgtaaatttgacaatgtcattcagcgcaaaaaaaaaaaaaccccccgaaaaatgtgttggaagagtttttgtgtgcgcatgctaacaaatatctcatgtggtaaacatcatcttggattaacatatggcaatgtgatgaaatagtaacagttgttgaaatttt

SEQ ID NO: 123355 - DNA, 2038 bp, Zea Mays
gagagacagtcagacagcagctcgaacctcgaaaagcaggagagtccaaagccgaatggacaactggcaacaaatcaacagagccacagaggaaatgaatccgatagccaccgccgccctcacgccatcctcatttttcgcctcaaaccgccgcttcgcccctcgcctccgctccgtcctccccgccgctgccatgtcttacgccgccgtatccgcctccgccccaagccccagctccggcactggggaacaggtgaaggcggccccgctcccgcactcgaccctcgagatcgcgggcgcccgccggggcctcctctcaggcttcgccagcctccgcgccccgtaccgtgccttccccgtactcgcgtcgaaccgacacgtcgagaccatcttcgctgcgctcacgcgatcgctccccgccgttaagctgcggcgcgagtgcctccgcgcccctgacgacggagccgtcgcgctcgactgggtctctggcgacgaccgtgtgcttccgaatgatgctccggtgcttatactcttgcctggtcttacaggtggaagtgatgatacatatgtaaggcatatgcttatgagagctagaagcaagggatggcgtgttgtggtgtttaatagccgtggatgtgcagatagtcctgtgactacacccaagttctattctgcttcatttacaggggatctccgccaagttattggtcatattttaggacgttatcctcagtccaatgtctatgctaccggttggtctcttggagcgaatattcttgtgcgctaccttggcgaggaaactgataaatgccctttatctggcgcggtctccttgtgcaatccttttaatttggtaattgcagatgaagatttccacaaaggatttaacaacgtttatgataaagcattggctagggctttgacgactatatttaagaaggatttgaacaaaatttaggcatgctctccttttcgaagggctggagggtgaatatgatatacccaaggcagcgaatgcaagaactgttagagattttgatgaggggttaacccgaggtttgcagcaacgtctaacccaactgtactagctgtaatttctatagtttcctgttcacattcaagaggacacttcaatggtttgcagtttcatttggtttcaagtcagtggatgattattactccaattcaagcagctcggattctatcaaggatgtttgcatacccttactgtgcatacaggctgataatgacccaattgcaccatccaggggaattcctagagatgatatcaaggcaaataagaactgtctacttatagtaacaccacagggtggccatcttggatgggtagcaggcgacgaagctccattcggatgtccttggacagacccaatagtgatggaatatctagaacatctcgagaatgagaaggactctagtaccaaaaataacacatcctatgagggtgtttcagaggcatcagtatcccatctaactgtgcatggccaaagataataatatctctcttctcatagtactcattcgccacattatgttttatatggaaatagtttagtagagttcatttagccgtgttgtctgctgctgcctgctggttaattgagtacatggctcttcgtctacaggtctagtggtctacacatgtgcgagaagatttctgtgtcaaataagatgtctggttctgagatcaaaatagaacatgcgttatccaattgttcgttcttagggggtttcactttcatcccgtgtttgaaagggattctctgtaaatgcatgagctgttacggagttggcctttgtatccctcttctgcaacgcgtgaaagttgatggcgatgagcacggcagtgcatcatgtaaatttgacaatgtcattcagcgcaaaaaaaaaaaaaccccccgaaaaatgtgttggaagagtttttgtgtgcgcatgctaacaaatatctcatgtggtaaacatcatcttggattaacatatggcaatgtgatgaaatagtaacagttgttgaaatttt

SEQ ID NO: 123356 - DNA, 1959 bp, Zea Mays
gagagacagtcagacagcagctcgaacctcgaaaagcaggagagtccaaagccgaatggacaactggcaacaaatcaacagagccacagaggaaatgaatccgatagccaccgccgccctcacgccatcctcatttttcgcctcaaaccgccgcttcgcccctcgcctccgctccgtcctccccgccgctgccatgtcttacgccgccgtatccgcctccgccccaagccccagctccggcactggggaacaggtgaaggcggccccgctcccgcactcgaccctcgagatcgcgggcgcccgccggggcctcctctcaggcttcgccagcctccgcgccccgtaccgtgccttccccgtactcgcgtcgaaccgacacgtcgagaccatcttcgctgcgctcacgcgatcgctccccgccgttaagctgcggcgcgagtgcctccgcgcccctgacgacggagccgtcgcgctcgactgggtctctggcgacgaccgtgtgcttccgaatgatgctccggtgcttatactcttgcctggtcttacaggtggaagtgatgatacatatgtaaggcatatgcttatgagagctagaagcaagggatggcgtgttgtggtgtttaatagccgtggatgtgcagatagtcctgtgactacacccaagttctattctgcttcatttacaggggatctccgccaagttattggtcatattttaggacgttatcctcagtccaatgtctatgctaccggttggtctcttggagcgaatattcttgtgcgctaccttggcgaggaaactgataaatgccctttatctggcgcggtctccttgtgcaatccttttaatttggtaattgcagatgaagatttccacaaaggatttaacaacgtttatgataaagcattggctagggctttgacgactatatttaagaaggatttgaacaaaatttaggcatgctctccttttcgaagggctggagggtgaatatgatatacccaaggcagcgaatgcaagaactgttagagattttgatgaggggttaacccgagtttcatttggtttcaagtcagtggatgattattactccaattcaagcagctcggattctatcaaggatgtttgcatacccttactgtgcatacagtatgtgcaggctgataatgacccaattgcaccatccaggggaattcctagagatgatatcaaggcaaataagaactgtctacttatagtaacaccacagggtggccatcttggatgggtagcaggcgacgaagctccattcggatgtccttggacagacccaatagtgatggaatatctagaacatctcgagaatgagaaggactctagtaccaaaaataacacatcctatgagggtgtttcagaggcatcagtatcccatctaactgtgcatggccaaagataataatatctctcttctcatagtactcattcgccacattatgttttatatggaaatagtttagtagagttcatttagccgtgttgtctgctgctgcctgctggttaattgagtacatggctcttcgtctacaggtctagtggtctacacatgtgcgagaagatttctgtgtcaaataagatgtctggttctgagatcaaaatagaacatgcgttatccaattgttcgttcttagggggtttcactttcatcccgtgtttgaaagggattctctgtaaatgcatgagctgttacggagttggcctttgtatccctcttctgcaacgcgtgaaagttgatggcgatgagcacggcagtgcatcatgtaaatttgacaatgtcattcagcgcaaaaaaaaaaaaaccccccgaaaaatgtgttggaagagtttttgtgtgcgcatgctaacaaatatctcatgtggtaaacatcatcttggattaacatatggcaatgtgatgaaatagtaacagttgttgaaatttt

SEQ ID NO: 123357 - DNA, 1621 bp, Zea Mays
gagagacagtcagacagcagctcgaacctcgaaaagcaggagagtccaaagccgaatggacaactggcaacaaatcaacagagccacagaggaaatgaatccgatagccaccgccgccctcacgccatcctcatttttcgcctcaaaccgccgcttcgcccctcgcctccgctccgtcctccccgccgctgccatgtcttacgccgccgtatccgcctccgccccaagccccagctccggcactggggaacaggtgaaggcggccccgctcccgcactcgaccctcgagatcgcgggcgcccgccggggcctcctctcaggcttcgccagcctccgcgccccgtaccgtgccttccccgtactcgcgtcgaaccgacacgtcgagaccatcttcgctgcgctcacgcgatcgctccccgccgttaagctgcggcgcgagtgcctccgcgcccctgacgacggagccgtcgcgctcgactgggtctctggcgacgaccgtgtgcttccgaatgatgctccggtgcttatactcttgcctggtcttacaggtggaagtgatgatacatatgtaaggcatatgcttatgagagctagaagcaagggatggcgtgttgtggtgtttaatagccgtggatgtgcagatagtcctgtgactacacccaagttctattctgcttcatttacaggggatctccgccaagttattggtcatattttaggacgttatcctcagtccaatgtctatgctaccggttggtctcttggagcgaatattcttgtgcgctaccttggcgaggaaactgataaatgccctttatctggcgcggtctccttgtgcaatccttttaatttggtaattgcagatgaagatttccacaaaggatttaacaacgtttatgataaagcattggctagggctttgacgactatatttaagaagcatgctctccttttcgaagggctggagggtgaatatgatatacccaaggcagcgaatgcaagaactgttagagattttgatgaggggttaacccgagtttcatttggtttcaagtcagtggatgattattactccaattcaagcagctcggattctatcaaggatgtttgcatacccttactgtgcatacaggctgataatgacccaattgcaccatccaggggaattcctagagatgatatcaaggcaaataagaactgtctacttatagtaacaccacagggtggccatcttggatgggtagcaggcgacgaagctccattcggatgtccttggacagacccaatagtgatggaatatctagaacatctcgagaatgagaaggactctagtaccaaaaataacacatcctatgagggtgtttcagaggcatcagtatcccatctaactgtgcatggccaaagataataatatctctcttctcatagtactcattcgccacattatgttttatatggaaatagtttagtagagttcatttagccgtgttgtctgctgctgcctgctggttaattgagtacatggctcttcgtctacaggtacgttccctgtaatttagttttggtcctaagtttgtattatgatgttcttccatcaatatttgttaacttctgcagtgcc

SEQ ID NO: 123358 - DNA, 123 bp, Zea Mays
atgttacaggtcaatatgaatcatctcttttttttggtactcatgggtccgcgaactgcaatggtaaatatttacatggtcactcgggcatgtagatttccttttctgaaaattctcctctaa

SEQ ID NO: 123359 - DNA, 285 bp, Zea Mays
agggatccgtggttatgggccataacacaccaccaccggtgataccagcaccaggaggagcttatgcaggggagggagctactacaggagagaatccaaacccgttacacgacttcgtcaacgagtttttcgcttctggaggtagtggtcacaactccaacgaccccgatatgtgatggtttgagttttgtgccgaattgtgagtttgttttatgttgtaatggactatttgtgaaatgtgatgttgtatttgtgagctgtgatgtggtgaaccatttgtgaact

SEQ ID NO: 123360 - DNA, 2189 bp, Zea Mays
acgcttccatttacctccgtccctatcagcttcctcgcttccctatgcctacgagaaagagagaagcgtgggctaattcctctgtgtttcccagcttcctgttcaccatggactcgagggagtgcatcgtcccgtcaaacaatcctgctccaatcttttgacgtcttcgctgggcctgtgccgcctccccgtacccgccgttcctgcaccgtcaaaccgccagccaagagtccatttttttttcttatcaaaagtttgcgtttgatcggtttcgtttctaagagctgcgcgagatgtccttgttccgggaagggaggaaacgagaggctctgttcctgtcgcgattgttggaggacctcaccatagtttgaggcggtgaggtggaggcgatagagaagacgagacaagaagcagccgccaggagctgagctgaggccctgccgccgtcttgccccaactccaagcgatgtcttgcttccgctgcttcagcggctgcaggaccaagaggggcaagggcgagaagcgccgggaggggtcgacggcgccggcgtccccggcggccgcctcgttcccgtccaccgtctccacgggcgcgccatccaacctcaccttctccacggcgtcgtcggccgtcgtcacgagccactccgaggactccagcgcggtcatgcggccggaggcgaccaagtcatcgggctcggcctcggtgtcgtcggcgcggagcatcccggagctgtacgaggagaggggagccagcagcctccgggagttcgggttccgggagctccgggccgccaccagcgacttcagccgcctgctcaaggtcggcgagggcggcttcgggagcgtttacaagggcgtcgtccgccttcctggcgggcccgccggcggcacggtagttgccataaaaaaactcaatcccaatggtcatcagggccacaagcaatggttggcagaagtccatttcctgggggttgttgagcacccaaatctcgtcaggctcattggctactgcgctgctcaaggcgagcgaggtccgctgaggctactggtctacgagttcatgacgaacaagaccctggacgatcatctattcaataaagcataccccgtccttccatgggacatcaggttggagatagcgctggatgccgctgagggattgctgtacctccatgagggattggaagttcaggtcatatatcgcgatttcaaagcttcaaatgtcctgctggacgaggagtttagagcgaaactttcagatttcggattggcaagggaagggccatcagctggtgatacccacgtctctacagcagttatggggaccttgggctatgcagctccagattatgtcgagacaggccatctcactacaaaaagtgatgtgtggagctttggagtagttctatatgagatcctcactggacgtcgctcaatagagaggaaccggcccaagaacgagcagaaacttctggaatgggtcaggctgtatcccgttgaaagcaagcagttcagcaagattatagatgcaaggcttgagggccactactctaagcagggcactagaaaaattgccaagttggccaatagttgccttgcaaagcacagaagggaccgtccaacgatgagagaagtggtcgagagcctgaaacaagcaatgcagcacaaggagttggatgggaaagcaggggctttgaatgagacttcaccaccagaggaaatgtctggaaaaccaagcacagaggatgttgccgtggcatcagcaaggcggaggatgcttcatttggctgccctaggtgagaatgcaaacagcattgcgaggaggagattcatgttcatgaggactgcggcttctccaactcctacgtaattttgagttgtagttgtgatcttttctctctctttttgaacaaatgtgatcttttcttttgactttgtactttttgaagtggttatgaaggtaggatcattggggatgttttcaccatgtcatgtataaatctattagatggccagacattgtttttttacttgtgttctttgtataggtagggtagatctgagacccaagagttactatgtaaaaaggtttcactgctataaggatcataggtgtgaaatgtaattcagttctctatgtttgactgcaactttgaacatcataagggtagatagtattaaaggtg

SEQ ID NO: 123361 - DNA, 216 bp, Zea Mays
atggcagatgaggagcatccagagatgatagaggaggcctccgaggtggatcatgattcaactcttgatgagcttggagatggagaggacactcaagatgatcaagctgtagaggaacaagggaaagacattgtgcttggaagtgcccttacatacccttgtgagggcactgaccgagattataaatatggatatagatacttaaatatgccttaa

SEQ ID NO: 123362 - DNA, 2630 bp, Zea Mays
cgagctttaggttcagagcacctcgcctcattccatcccacgtcaagctagatctgccggctctaggcttagaacacatccggataatggtggatgcatcgttctttctgttcgtcgtaagcagttctttgtatcaagtgagatggcagtgacgactcggtaaaattcaagctcaacagaccaaatcacaggtctctctctacatgagatcgatctgtatgccgattttcccgctgaactgagccatctaatttttctctgcttatttgctattcggaatattttctctctacatgaaatccccgtttgctttttttccccatcggagggtggaacatattgttgcgatgaggataccaagctccctcttctgaaagcagtgaggacacttgccggcagaatcgaaccaataaccttattgccaccactgagtaacagcagatctccaatcttgttttgtttgtttttcttggtccgtattttggctttggatggtgaagatctactgatgcataatccaacacttgatccgatgccggcttctgccgagcgtgtgatgcacggacatctctgcatctgaatccttgacatcttttgctgtaatggttttcattgttttggtctctctcggtgcttttgacgttgtgtcgttgaactgtcctttttttaccctttgtatcaaatgatgaaacatcagaacaatcttaggacaccttctgacacaatgctggtagcactgtgagtgagaaggcaattctttgctgatggtactgcaaccactccatgattctgcccttcattttcgtttttgtctctctggtcttcagcattgattgctcgagatagttatctttacaaccttgcattgccacctgatctgtacataagccaatgatgattagctattacatctggaattaccgtcagatttactcgtgacgaaaatcgtctggctttctgaggcatattaagtgtatacgtatcatacttaaatctgatcgtgtagacgtagttgcagtccaataatcccaatgaggatctcaagaccgaccgataggaagtgccgtttgacactgtaagcaacagctgcttcctccggctgcaggtgtctatcctccgaccataacctttgtggtttggtctgggatggagcacccatctgtggttcttggattctggctgtggtgtgtgatttaaatcgggtctctgagggattagagcaactattcaatacctttcagtttgtgaactgtaatgaaatggaatttgggcctgatgccacgtctctgttaaccacggcattgaccagagatgctatgattgggccgaaacgaagttttttttaacgtttcacgtgttgataggaacctgggactgcttctctatctgtccgcagggccggttaatgtgattataatgtcatgcgccattttttttgaattttgtttggatgcatagtgtatggcgatgatgaaaaagctaaggcttgtttctcaacattcgcagtagccgcccaagagctttcgccttgccgggcttgagagctagtgctgttaattccttccttggatgtctgagccatacatatttctgtttgtggtttgtttctcttaattccagttggtgcttatggtgcaaagcaacagtaagtttttctgcgtaagatttgttatttgatttggccgaataacttcgagaaccatacagactaatctgtgtatggtgtgcccgatgatgatagaagtcaaggcttgtttctctacattcgcagttgccgcctaagagctttcgccctgccaggcttgagagctaatgctgctaattccttccttggatgtctgagggcacaataatgccagataattttgctttgaaatctgtttaactgttgttaccctggttttatagttttaattattaaattttattttatttgaaggatttgtaagagtatgcaggctttgtgggaagattttataagaacatgcgaggttcgtttgaagaatttaactggtttctatggataaaagccagcttgtgtggactgtttcatctgcaatctctgtagaagcaaccaacagagtacggattaaaagccaagtgaatagactgtatgatgtaaattctgttgtagatcttcataggtcccattgttaacactataaatatgttaatcctccatgcggctttcctaaaaactttatccagttgtttacgctacttcaccgaacttactgtagcctctcccaccaagtacaatgacatgttcatgaagctgaaaaacttaacaatcagtgagtgttcagaatcatcatgcatgttacatgctctgctttggtggaggatgaaaaccaacggacagcttgacattggccggatcactgaacttctgctgttgcctgatttcagaatggatcatggatttgagcattgatggagtacagccaaatccaccgttactggcatccaacgcttgtgcttaccgaccaaaacaataaaaaacagacgcagaatcggtctaagaaataggatagacactgctgccttctctgatctcatatcaaaattctctgatactgtaatctcaaaaattctgctgccttctcagaatccggaaatataagctcaaa

SEQ ID NO: 123363 - DNA, 114 bp, Zea Mays
cttgtccctccctccatttgtgttggggacttgttctcaaatgctatgaattaagaacaaggcaacataaaatgttaaatgttaatgcccttcgtccaacgaagcattattccc

SEQ ID NO: 123364 - DNA, 1272 bp, Zea Mays
ctcaatcctcaagcggccatcgtcgtcaaccttatcatgcacagttgacaccaaaagcagagagagatagagagagagcgcgatccactccatcctgcaagttttctgtcccgcccacccaacaccaagaacaattaaacgctttgatcgatagatcaatatcagtcgctagcgcgcgcatacgcagacgacgcgaaggcatatatggagggaggccagctggggacttgccttcctagcttcctcgtgccggatcactacgccttccctcttccgctcccgccgctacaacttcctagtagccaaccgaacaacaagcctttccagatgccgtttgacgacgtccaggaagaggccgggaaccacgccgggatgctctcctcctccgaccactgtggactatacccgctgcagtcactgcccttcggcagtagcgcctccggcggcgccggcgcggcagcgtgcggtgggaagcctacggccgtcggtttcatgcccagctgtagtgctgtcggcgctgaggaggtctgcacctcggtggcgcctactactaatggttgcaacgagagtaatagcgcatggtggaaggcctcagcagcggagagagggaagatgaaggtgaggaggaagatgagggaaccgaggttttgcttccagaccagaagcgacgtggatgtactggatgatggctacaagtggaggaagtacggccagaaggttgtcaagaacagcctccatccaaggagctatttccggtgcactcacagcaactgccgcgtgaagaaacgggtggagcggctgtcgacggactgccgcatggtgatgaccacgtacgagggccgccacacgcactctccctgcagcgacgacgcttcctccggcgaccacaccgattgcttcagctccttctgaacaccacgtacttgatttgattaaagctgccggcgaatttaatttcgcagttaacttctgaattcaagcggcgatcagttggtgatctcgatcgatcttcagttaattttgcggccgggatggatgacagaacacgatgaatccgtgtcacatgcatgcatatgtcatgtgtaccactactcgtgtaatcgatcgatgtgatcatccgccgccgtgcaaatgatccattccatcggttgattatgcagtcatgtagtagtattatatcaaaaaaaaaagctacactttttgttcactttgcttgttttattttatctgtgtatgctatatatataccctgctgctacagcgggggtttct

SEQ ID NO: 123365 - DNA, 762 bp, Zea Mays
ctcaatcctcaagcggccatcgtcgtcaaccttatcatgcacagttgacaccaaaagcagagagagatagagagagagcgcgatccactccatcctgcaagttttctgtcccgcccacccaacaccaagaacaattaaacgctttgatcgatagatcaatatcagtcgctagcgcgcgcatacgcagacgacgcgaaggcatatatggagggaggccagctggggacttgccttcctagcttcctcgtgccggatcactacgccttccctcttccgctcccgccgctacaacttcctagtagccaaccgaacaacaagcctttccagatgccgtttgacgacgtccaggaagaggccgggaaccacgccgggatgctctcctcctccgaccactgtggactatacccgctgcagtcactgcccttcggcagtagcgcctccggcggcgccggcgcggcagcgtgcggtgggaagcctacggccgtcggtttcatgcccagctgtagtgctgtcggcgctgaggaggtctgcacctcggtggcgcctactactaatggttgcaacgagagtaatagcgcatggtggaaggcctcagcagcggagagagggaagatgaaggtgaggaggaagatgagggaaccgaggttttgcttccagaccagaagcgacgtggatgtactggatgatggctacaagtggaggaagtacggccagaaggttgtcaagaacagcctccatccaagaatcatactactcccataa

SEQ ID NO: 123366 - DNA, 681 bp, Zea Mays
caaatgtgagctgactgaaggatctagttatattacttccaaatgttagttcaatgtttcgacttttgttgttcagaaaatgatcgagcttttgacgttatctactgcataaccttcaatctgatggatcagcaaaatggcttgacatatgcatgctatttacatggacttcaatacggtcatgaaatatacacggcgtcagctagaaagggagctgttgattgaagatattcagaggattgaggacatgccgtcatacaggcttctgggccggtagctatgaagaaactgaaatcttaacatgactacatgctgcaaggcttgggatgcttaacggattgcaacctgtatcgacaaacggcgccaatcatgaaatgtagatgcatatgtatccttgtgttttaggtacttgtgggttgtggcctttggtaacctgatcgaaatatactaggtagttttttttttttttttttttgctgatgatagaatgccacgtagggtaactgaagtgtctgatcagctgccatggcaaaagtttgtagggtgtgtaaagtgtaatcacaatgtggtcgttgttcatcatacgacgaaaggaagtgttcctatagggttgtcgttgtaaacaggaggatttgggaaagctgatctgagttgtatcccatttgataagaggctaggcgc

SEQ ID NO: 123367 - DNA, 1232 bp, Zea Mays
tgccacagtgccataagtgagtgttgccccgtcaatgtcgctggagccaagaaaagcaaggcaaactgcaaagccactctctttcctcctcggcctctggcttcctcccctcccgacttctcctccaaatcgctgcctttttgttagtttttttttctattttgcttcctctcagttcttggaaggaaaggcggctgcaatgggaggtagcggaacgctgatctcggtgtaccccgatgagctcaccttcctgtttgagctggagaagccgtgctattgcaatctcaaggtggtgaacaacagcgagcaccacgtcgcattcaaggtcaaaacgacatcaccgaggaagtattttgtccggccgaacgcgagcatcgtccagccatgggattcttgcacaataacgattacgctgcaggcacagaaagagtacccaccagatatgcaatgcaaggacaagttcttgattcagagcaccaaggtggctgccagcaccgacatggatgagatcccccctgatacgttcaacaaggaaaccgacaaggtaatcgaggaaatgaagctcagggttgtttacacgttacctagtggtggaggttcagatgactctagcgtatcgtctttaggaagccggagcttcaaagcagcgtctgacgatctgatgatgctgaagaatgcaagcatcgaagagatccagacaattcagcgggtgaaggaagaaagagataacatgcttcagcaaaaccagcaaatgcaacgtgaattggatgtgcttcggaggcgtaggagccgcaaaggtgacgcaggtttctccttgacgtttgctgcgtttgctgggctaataggtgtcctggtggggctcctgatgagcctcatcttctcttcgccgccggttgatgcataagatgcgagaaaaaggttgcagcctatggaagcattaattgttcagaccgacatggggagaaagctcgctcggcaaaagaagaagatgaaacttttgtctagtctccattttcattcttttgttgtttgcaccgtagttatatgaaacgatgataacgggttgcagatctttgatctttccacccgtgcttggttcatcctccatttgtatttgcccctcgttttcttattctttctgtatagtaagtatatcaggacggaagctgtatccattcagcgatttgggtagtgaggaactagtccaggagtatcaagaaagagcgttgatc

SEQ ID NO: 123368 - DNA, 759 bp, Zea Mays
atgggcttacacacccgcgagccgagctgtgaaggaggggctagaactggagcgcaccgcggtgccagcgccctaagcttcggggaggatgccacaagggacacacgtggaggaggaggctcccagtgccggcgctgtagaggaggaccagaggaggaggaagacgccctcgtggcggaagtggcggagcggccaggcggcgtggccgaaggcgcagcggtccttgccgcagccgcccttgggagagggggtcgaggggacgggcggaaagggaaggagatagaactgcatactcttcctcgagaccgggagcgcctcctcggtgagctcctcaacctgcctcttggtacgccaccctctgttacagatgcgccaccaccgcaggcttcgccgcgacgggcgagaccaggtctattgctgcgtactcctcctcgagaccgggaacacgagcggcgccaccacaccgcgccggtgatggtgaaagggcgaggatggctgggcgaccgcggcggccttgacgagcgccgagctggccatgaccatggacgcagtgaccttggcgcgcgtgaggcgggggcgctgcatctcggcggggagcacgaagtagatctgcgtcgcatggagctccttcccgggggcgaccagcaagcaggacagacgcgctccggcgcaggcgcgcgggagacatcggccacggacgacgcggtccaggttcggtgccgtctccggtgggcggaagggacgacgtgtgaggattag

SEQ ID NO: 123369 - DNA, 433 bp, Zea Mays
cttcttttgaacatcacttttgccatggcaatctctcatgtgtcatgctgttctctcctagaatgactcaaagatgagctctttcccttttcttttccacagatgacctgatttacctcccaataggaatgtacttgagggagaacaagggccgcaaccttaaggattagataacaatgcctcccaaaactctagttctcttcacaagaagaagcgagggattgaaagggaaaggcaggaaaacaacatggcataacccaaaaaaagcaaagtgcaataaaaagcaagcatggctcagcagcttgctttggttctactctcccccttggcctcgacccctccattataggtccttcaaaagcacagcagaatcgggcaaagcaaaagaatgcccccagaggcggccaggaacagaacaagaagcaagaatact

SEQ ID NO: 123370 - DNA, 423 bp, Zea Mays
atggggatggagtggaagcagaaggtgagccttttcgacgtggtcgatgagacctccgtatccaccaatcttggtcgcgccgcctccaacggcgtcgccgccactgcgactgggggcaactcgtatgttagccggtggaatgggtggcccacacgaatggcacttcgagatcctcgagaagcgtcgtgcgttccctgtatggattcattctaccatgcttcaactgaggagcagtctaagcatgtgcaacactacaactttgatcaccttggatctgtttatatgggagttgacttttgcatgaagctctttgcagtgtctattgttcaaagagctgatgaactgcaaacaatgcttatggagatggtaaagcaagacaataggcgccaattaagtgcaaagggtgaattgaaggaactttag

SEQ ID NO: 123371 - DNA, 882 bp, Zea Mays
tcaccgcactcagtggtgcccacagctaaagccttgtgcaaaattatcattaagctgtcatcaatcatcatggctgccattacggcaggtctgctggtactcctcgctgctgccgtcgccgctccggcgcacgccacggactacacggtcggcgactcgtccgggtggagcagcggcgtggactacgccacctgggcgagcggcaagaccttcgctgctggggacaacctagtgttccagtacagcgcgatgcacacggtggtggaggtgagctccgcggactacggcgcgtgctcggccagcaactccatccagtcctacagcgaccagaacaccaagatcgcgctcacagcgcccggcacgcgctacttcatctgcggcaccccgggccactgcggcaacggcatgaagctcgccgtcacggtcgccgctgggaccgccaccaccaccccggcgtcatccccgcccgccgctgactcgcctccagagacagccacgccgtccgggtctacgcccacggcaacgacgtcgccgtcggcgcccacgacgaagcccacctcgagcagcactggcgctgcctgcggtggggaggcccggctcgctatgggcgttttggcctgggccgcgggcctcgccgggctcgccctgatgggttaggcaagaggcagtgctgtttccgttccatgcttttcctgttgcaggcttttgtggcccgttgtgtttaatctgaattcacgtctatggtctatgctcgattctggcttgttcgagactcccgctgtatacatgtacggctatccttgaatccttcatgctggacctgtcccagcggtctgcaatatgtcatagataacgatatgctatggctatttaatcgttcta

SEQ ID NO: 123372 - DNA, 1493 bp, Zea Mays
aaaaatcacaacgaaaaaacatgccctaacataagagcaaaaaaatcctttagatacaatatatgatgctctatttggatgtcgatatcgaggaacatggacttgaattaggtttaataataaatcagtcgtgatattaaaataacatataattccaaactctattatttagatataactattggtctttaaaattgtgtggtctaattacacgggagagaggaagcttctagttataacccaatgctaggaaattgagtttatgatttcaaatcttacattcatgtgcaacaaaataacagaatttatgaaagttgatttcaattcctatttccgtgtaccattttatacacccgtttagtatataaaagtaaaaattcatatcgttgtcacggcccacgggcgtcaggtcagaggtcacgcgacaacctgccatgccgacacagaaatgaatgtgcgtgctgtgttgaaacttgaaagagaaagacagcatgcaatgaaacacgagtttgcattacaaccatctcgctcctcgcaaacccattccacgtcgattgatgaagcagtgattattctgacgcactgttctccgctgcgtgcagctgacacggttccagggcgacgggggatacgccgtcggcgtgagctgcagcctgatgctgtgcgacccgctgtcgctggcgcggttcctgttgtcgtgggcgcgcacgcacgcggcgatcaaggcccggaacaaggccgccaccatcccgatgatgcggtacgcgggctacttccagcgccccaacaccatgacccgccgcatcaagtccgtcccgctcgacgccttcgccgccgacggcgtcggcaccgacaccgacaccgtgctcttcagagcctccggggcgcccgaccaccgcgcgctcgccggggcctgcgttggcgaggccagagacaggctcggcgcggccgaggtgccgcggttcacgctcctcgtcgtcgctagagacggtgtcggggacaacccgagagcgatgactgttgagacgtacgccgcggatagcctgttggtccccggcggctccactggcgacaagcctgaggttgcgcaatggcaggacctcgggctggaggagtttgcgctcagggagagcaagcccgtgcacgtgtcctgcagcatcgtgacttccggggatgaagggctcgtcatcgtgatgcccgatggcaaaggatttctggtcacggtgactgtccgcctgtccgaatttgttaagatttagtttttattgagaagtatttatattgagagctttgtgtattttaatttaattttcaagaccataagttcgaagccctgacttacggcgtcgaggtaatacgtctgagcgccgtgctcagcgatgtcaagtgtagcaccatgatggataaaccgatgatacggtaggcagcttgatgttgtggcatgttgtgctcataaatcctcggcttgcttaagcaagtttgttctctcacct

SEQ ID NO: 123373 - DNA, 1411 bp, Zea Mays
gctctgctaagtgccaagtgccaacgccctctttcgcaccgttccacggaatcatccaccaccgggcaccggcagtcacagcgcacctcactgaaattggaacagagaacatggcggccgccgcgcccgcgtgccacgtccatatcgaggccctgcagacggcgctgccgacgcgcgcggtggagcccgggcgggcgcgccccgtggccgtggccgcgcccgcgctcgtcgctggcgctgccctgcagcgccgagcccgcgttgtgctctactaccgcgcagccgccgacgcgtcggcgccgtggagcccggaggaggctctcctggcgaaggagtcgctgagcgaggccgtggccgaccacccggagatggcaggccgcctccggcgccgcgcggacgggttgtgggaggtgaagctcaacgacacgggcgtcaggctcgtcctggccaccgtggaggccgcggtcgacgacttcgtcggcgccggcgtcagcgagcaggaccgcaagcgcagggaagccgctctcgcgccgtggaccgacgtggacgccgacgatcccgatatgtgcgccctctgcttcgttcagctgacacggttccagggcgacgggggatacgccgtcggcgtgagctgcagcctgatgctgtgcgacccgctgtcgctggcgcggttcctgttgtcgtgggcgcgcacgcacgcggcgatcaaggcccggaacaaggccgccaccatcccgatgatgcggtacgcgggctacttccagcgccccaacaccatgacccgccgcatcaagtccgtcccgctcgacgccttcgccgccgacggcgtcggcaccgacaccgacaccgtgctcttcagagcctccggggcgcccgaccaccgcgcgctcgccggggcctgcgttggcgaggccagagacaggctcggcgcggccgaggtgccgcggttcacgctcctcgtcgtcgctagagacggtgtcggggacaacccgagagcgatgactgttgagacgtacgccgcggatagcctgttggtccccggcggctccactggcgacaagcctgaggttgcgcaatggcaggacctcgggctggaggagtttgcgctcagggagagcaagcccgtgcacgtgtcctgcagcatcgtgacttccggggatgaagggctcgtcatcgtgatgcccgatggcaaaggatttctggtcacggtgactgtccgcctgtccgaatttgttaagatttagtttttattgagaagtatttatattgagagctttgtgtattttaatttaattttcaagaccataagttcgaagccctgacttacggcgtcgaggtaatacgtctgagcgccgtgctcagcgatgtcaagtgtagcaccatgatggataaaccgatgatacggtaggca

SEQ ID NO: 123374 - DNA, 797 bp, Zea Mays
gctctgctaagtgccaagtgccaacgccctctttcgcaccgttccacggaatcatccaccaccgggcaccggcagtcacagcgcacctcactgaaattggaacagagaacatggcggccgccgcgcccgcgtgccacgtccatatcgaggccctgcagacggcgctgccgacgcgcgcggtggagcccgggcgggcgcgccccgtggccgtggccgcgcccgcgctcgtcgctggcgctgccctgcagcgccgagcccgcgttgtgctctactaccgcgcagccgccgacgcgtcggcgccgtggagcccggaggaggctctcctggcgaaggagtcgctgagcgaggccgtggccgaccacccggagatggcaggccgcctccggcgccgcgcggacgggttgtgggaggtgaagctcaacgacacgggcgtcaggctcgtcctggccaccgtggaggccgcggtcgacgacttcgtcggcgccggcgtcagcgagcaggaccgcaagcgcagggaagccgctctcgcgccgtggaccgacgtggacgccgacgatcccgatatgtgcgccctctgcttcgttcaggtatgacgcgcgtgttgtgtgatcctcggatccgtggcgcgcggcaacaaaatccacgatcacgtcacctgttccattttttcaaaggactgatcgcgtgttttgtcgcacttgacattactcaggtaatacttgataattactaatctattctattcttgtgtccaatcgttggcgttgttcggtatatcggtttattttcctagggtg

SEQ ID NO: 123375 - DNA, 95 bp, Zea Mays
ccttatatcttgtgtctcgtgtgtttcctctgtcatgcttatgggaagggagacgggtcttctacagcttcttgcgtctctactgctgatgggag

SEQ ID NO: 123376 - DNA, 255 bp, Zea Mays
atgtttgcccatgcaaaccttccactcggtgcagcccagcggaagcgaaaggaaaagaggcccgtattctgccaaagaaaatccatccatcacagtacacttcacttctttgaaagagccatgacgttgaagttcatcgagttagggttctctgcaattctagctttgatgacttttgcagcatcctgcaacaaggtttcaggtgatgaagggccatgggatgtgggttgtgattttcgtccatcaagctcataa

SEQ ID NO: 123377 - DNA, 1747 bp, Zea Mays
aaccttctcggcgcgcagctcctctgtctacctcgcctccagctccactacatacgctagctagctcgcgcagctgcagcagcagcttagcaagcaaagaatgggggccgcctcgtcgcgggaaggggacgcggcgcgcgagcacacgaggcggtgccgggagcggcggcggctgatgcgggaggccgcgcgcctgcggcaccacctggcggcctcgcacgccgcctacctccggtcgctcggcgtcgtggcgtccgcgctcacgcgcttcgcggtcggcgagccgctcccggtgtccgaccacaccccgcccgccgtgctcgcgcaccgcccggtcgtcgccccctccacgccgccgccgctgctccgcgccatcgaccagccgcagcgcgaggaggcgcggggcggcgcttctgccggcgtcggcgtcggcagcggcagcgccggtgctgctgcaggggaggacatgatgaggatggtggtcaggcaccggagcctcgcggaggtcgcggcggggctggaggagtacttcctcaaggccagcgtcgccggagacacggtgtccagcctgcttgaggccagttccaccgccgagttcaacggtggctcacacagcttcttgggcgccctctgctgcctttcggcgccagcgcttgaccgcgtcgacagcatgggcagccggcagaggcacagcgccaccttgcagcagctcctggcgtgggagaagaagctctacaaggatgtcaaggccagggagaaactgcagatacgacacgacaagaagctcgccgcgctgcgggaccaggagtacagccggaaggtcgacgtggacatccagaagctcaaggcggcgtgggacagggcgcgcgcgcagctcgaggcagcctcccagtccgcggacgcggcctcggcctccatcgcccagctccgcgacacccgcctcgcgcgccagctcctggagctctgccacgccacgctcgacatgtggcgggcgatgcggcagcaccacggggcgcagagcctgttcgcgcagcagctgcgcgggctgagcagccgcacgtccatggaccccacgaccgagatccaccaccaggccacgcgggcgctcgaggccgccatggccgcctgggccgcggccatggcacacatggcgaagcaccagcgcgactacgtccacgccatccacggctggctcaagctcacgctgacgctgacgcctgtcgacgccgccgaggcctctcccctggccgcggagctcaccgcgttcgtcgagcggtgggggaaggtgctcgaccgcgtgaactgcgtcgacgtgctcaaggcgatcaagagcttcgcgggcgcggccgcgcgatccacgcgctccagagcgacgagctgcgggtggcgcggcgcgtcaggcagtactcccgttgagacgagctactacgactcgtacctgcccggggtcatgtcgatgtggcactgggggaggccggcgtggagggaccacctgcaggcgcgcgacgccggcaacgaggtggctcagcgcagggacgagatcgcggcttgccggaagatggtggaggacgagatgcggaggcatgccaaggccatcgacgccacgaggacggccacgatcaccggcgtgcaagggaagctgcctgccgttttccagtccatggccgcgttctcggcgtcgcttgcgaattcgctggaggacgcatgcaaggctccacagcagaacaccaacgacatgcagtcgtag

SEQ ID NO: 123378 - DNA, 1297 bp, Zea Mays
aacaaattatatatccatcgcttatcagacctatcgagtatcagcttacattacattatatatccatcgcttccaagacctcaaaatgcatgagcaggctgcgaggtctgccctcgaaatacagcttctcagacagcacaagcctcccctcgctcctccgggcctcgtccgcgagtacctggaccatcgcgtccttctcctcccggatccacgggcggctcggatcacaccactgcctcggggtaccgtggagggcgaagcggaggctcttgtcgccggcgcgtacgacgtgctcgcgtatcctcccgatcaccgcgcggtcggccacgtacgctccggcgcggttgaggccggcgtccacgtagtggagctcggagatacttgacagcaggtcgtcgctgctccgagtaggagcccccaggagaagaaggtcgttctgggtcggatggggtggtggacctggacctgctgctgctggtcgtggaacgtcggccgccgccgcctggttcgttgatcctgatgccccccaccgagaaagttccgtcacgagctggttcaccaccactccacccttgctgaagccaaggatgatagtcctagccggtggatggtaggatggagggtgctggttgccagccgaatccttcgccgacaaccccgggacttgattctgtatctcaccaatgctgcgtgcaaggatgttggcaacaccggcggcggcggggaagccagtggggtcataccccttggggtctccagcggcgtcgacggtcggaacgagctctcggtacaccgcaaacggcccagcaaagcgcgcggcgtcgaccacccacgcgttggcctccccagggagcttcccggcgaggaccccagccaggtgggcggcgtcagagagccgctcgatcaccggatcgcccgtgccgcggacgcggtcgcccgtgaaaaggatcgcgttgactcgtggaacctgcttccatcggaatagttcaggctccgtaggcgagtctgtcgggcagaaggctagtgtgtctgaaaaaactctgagaagaggaaaagggaacgcgcgggggcagagttttgggccttacggcgagcgttttggctggcgagaggaggagcgaggcagcgacgcggaagaggggtccgcctctggagagtgggacgtagacgacgccggtccaccggtccatggccccggcggcgaggttgccgggagtggagaggcctggagggagaggagagacggggggaggaggttggttgggggtggaccggtggagagggaaaagatcttgtt

SEQ ID NO: 123379 - DNA, 1818 bp, Zea Mays
atggaaggtccaccattaccgtggcaggcgtcacttggtacttcgggcaggcgtatgaatggagtttttctccaacttctcgtcgctgctggacggcggcggctacctcatcttgcacggctctcgcctcaccggcgacggcgggaaggacaaagcggcggcggatttgggttcttgtctcccaaattcaattcctccccgaatctaatcgccgacgtcgctaccacggatcaccgtggaaccctgagtctgtcgcgggtttcgcgggttttggcatgctatagccgccagcctgcagcagcgatcgtctcggtcttgggcccccggactagccatgtcatggggacggttcagcttcactcctcagcaggggcccacgctgaccggcgaacgcgggtgttccctgctcacaagcccgcgcctcgcaacgtggtggtcatcaatgaggacgatgatggcgatgttatcattatggagcacgcagttgcacgagaatcagcttctgcggcggcggcactaggatccgaagcgaggaaagggggtggctcctctggtgatgtgatcaacatagatgatgatgaagatgagaaatatggtaccagaggggataaagcaggtcctagcatgtcccgtgcctctgggtctccagtagcgatgaccccaggccggggttctcctaggaaccgatatgggtttgattgctcgtatgacagctctgagagcaatttgaccaaaggatgggactctgacactgatgatggctctgattgtgagattttggatgacacgactggtacagcctgggagatgtgggagacggctgcttccagaaaaaagccacctcatggtgtcgacgagtgtgaggatggtggtgctactgcattcacgtcatgtgctgggttggagacacaaccaggtaaatactctgagcatctctttggtgttgaatgccatccaaaagagagtatgtcttggtcttacagtgttgcaagcaagtatggctctcaaaatagtagtgacagtacaaaagaaagccctgggcatgctcaaagcagttctggcactgaaaaggatgtccatggcccttctgtaccaaatactgaagaatgctctaatggagatttttccagtacaaatggtaaagaaagagcaaaaaatcgaaatgacagtggaaaggatatccctactgaatgccatctcaatgctaacatatctcgaagttttagcgatgcccgtaaggaaggtcttcaaaataataccggcaggtcaaaggatcaccatgaccagttttcagcaccaaatgtcaaagaatgttcaatggttggttctgaaaaagcttcaagaggggttcaattacctcgccctgatgaaagctctgcctataacttcacccctgcaaataggttttttttttctggaatcttgtcagtggataggaacgatggaagtcctccaatttttgtcagtactcctgaaaaggttgatgagaaaatacctgaagatgtatattcacaaaaggatccatcaccacctgaagcttcctacaacacaaatttttattctgctcaagataatggtctggccaagggtaaggatttgcttcaggatcctaaggaattaggacagtttgcttcagtgatcggtgaacgtgaaaaacacaaagaatctgttgagtacaagcgagcagcagaggaggaatgggcttcaagacatcggcaattacaaatacaggtacaattaccaccatctaggagcccaaatcgccatggccacggcacgagagcaaactccaccgccgacgccacggcacctcgctga

SEQ ID NO: 123380 - DNA, 1913 bp, Zea Mays
aagcccctcgaaaagaaaaggtggccaacaaagaacaataggaagcaggaagctaccctctctctctctctccccgcacgtcagtctcatcagtcgcacccacagcagtgataaaaggctcgagacgaggcgacaagaatctctcacaagaacacctctgctctgcccgtatcctccttgctagctccttgccttgccttgcctttgccttccctccgcgcgaggagaagagccagcggacggacggagcacaggaaagccggacggacggacggagccggacgcgcgagatggagatggcgggggcggccgaagcggacacgccgtcgcaggagccggtgcgcacgggccggagcaacaccatcctgctccccatcggcggcatcctcctggcctacctgctctaccgcttcctccgcccgcgcctccgcggcctgcgcctcgacctgcccgcctggctgcgctgccgccgcgcgccgaccggcgggggcgccgtgctgccctacttcgcgcccatcgccgaccgcctcggcgccgtcgcgctgccgtacctcggcgccttcgccggcccgcaggcggcgctcctcaggttccccggcggggaggcgctgtcggtggccgccatcctcgaggcgcccggggaggtcgtcgccaagtccgcgcacagcacgctgtaccgcgccgccgtgcgctccggggaggccgccgtgctgctgaggttcgtgcgccccgcgtgcgccgacgaggccttcgccgccgccgccgcgcggcggatcggcgccgtccgccaccccaacctcgtgccgctccgcgcggtgtacgtcggccccaggggcgagaagctgctcgtctaccccttctacgccgccggctcgctccaacgcttcttgcaagaggggatcgcggagtcgcaaagatggagcatagtgtgcaagctctccatcggcatcgccagggggctagaccacctgcacacgggcctggacaagccgatggtccacggcaacctcaagacgagcaacgtgctcctggacgccagctacgacgagtgcagggtgtcggactacgggctgcacctgctgctgagccccgccgcggcgcaggaggcgctggaggccgccgcggcgcaggggtacggggcgcccgagctggccaaggcgcgggacgccacgcgggagagcgacgtgtacagcctcggggtggtcctgctggagctgctggcaaccgcgcccgcgggcggcgacggcgtcggcgacggcatcctcctcctccctgcctcctcctcctcctccttcaagaacctggtcctcgagcgcaagatctccgacgcgttcggctcgtctgggcttgctaggcagtgcaggagcggggcggggaaggagaggagcctgggcgcgttcttcgagctggccacggcgtgctgcagcccgtcgccgtcgctgagacccagcgccaggcaggtactccagaggctccaggagatcgcgcggtgaatggatgcgaggaccgactggcgactatacatacatactgagtgtctgcgttgatcggtctgcgaaaagtgtcctcctgccccccagccaggatagatgatgaacccaacaacgtgtttcgtggtgggcggtttgaacccctgtgctgtacagtttcaccgggagcagacagcagaggtggtggtggtggtggtcatcgctgctagatgaacaagcatcactactagactgtgtgtctttgagtttgttcctcaaagtggaaacgtacgatcgtggagtacctgccctgaaaatatgtaaaaatgcttgtagtgatattagtgaacagggtacgtgttgtatttcgataacacgttacagagaaaatcgtggaatgttcctttccagacgcgtataaaacggtagtgtttttgtcgtcga

SEQ ID NO: 123381 - DNA, 1608 bp, Zea Mays
ctccactgttgctttgcagacaagcttcgcctcgggcaccgcgtgctttatcgcctggccacaaagcaaggaatccaaagcaaaggcaacggccaagttcgcagccagggttacagccaaaccacggcgatccgccgatcctattatcccaaaaccacaacacaagaacgggaagcgtgcatgcacacgcacgagcacgaacctgagctgtagcgccctctcgctcgctccccgcgcgcaatggccagcgtagccccaggtcccatgcaaaccagccatgcctcacggcggccgatccctacagctacaggccccgtgcccgtggccgtgcttctcgccgccgccgccgtcggcctcctcgcgctgctgccgtcgctggccgaggccgtgtgggaggtgccgcacctcttcctcctcggcgccgtcatctccttcggcgtcttcacgcagaggaacagcgacgccgacggccgcaacaaggacagctcactggcgtggagcgcgcggtgccaccccgatgcccccctcgtcgtgatcgcggatcacacggcgccgagcgacgacgacgacaacgacgactacgggctggaactggaagaaggcgcacgagagacgccgctttcgttgccggtgcggaggctgaagcctgcgcctgcgcctgtggcgcaggagtccgaaaccgccggcggccatgccagcgatggtttcggtgaggagacgacggatagccgtgctgcgtctccgtcttcggggtttagggccggcacgcgcgccgtcccttcgccgccgccctctgctcttgacgacgacgacgaccggggcgtttctcagcctgcacggccgctcttcagaaaggccagcaccgactgggatgtggacgccgccgccgacgacgggtcgtccgacgagatgacacccgtgtcgtcagaaaggtcgtcggtccgtgccgacttcgccgcttgtgccagtggctatagcgatagcgacagcgatggcgacggcacgcctgtggatttgaagctggcggagaaggcggaggcgggcggggaggaggaagtggaccggaaggccgacgagttcatcgccaagttcaggcagcagatcaggctccagaggcactagctgggcggccatgcatggcgtggcgtgtgcatgctctgctgagtcctgagctgagcatgcaccgacacacaaattacaaataccactgctggtgctggtccagcacgaagggagaacgcagcagtagtttgttcatctacgtctatgacaccagcatgtttcctgtatcattttgctgttttttttttttgggttgttgctccggtttcaacaaggagccggaaacatgttttctgtatcgttttaggtctttgttcggttaatcctattacctatgaattggatgagattggaaaaattaagaaagaactttgacttgtttggaatttaaactcactcaatctcactcaatccacatggattgagagctaaccaaacaagttcctactgttttttttcttcgacagggagtcggaccggaaacatggtctagaattctagatgaatgcatattgagcactgctcttttgttttcccagtgcattt

SEQ ID NO: 123382 - DNA, 2228 bp, Zea Mays
aagcaactatttttttccgtgttcttctctcctcttccgctccccaccgaaagcataaacagcacaccggcaacgggaaaggaagggataccgacgcgagcacgcgccgagcaacgtctcgaaaaggccatgcaggacggcggcgaggtgctgttcctggacggcgtcggggaggtcgccgtcaccatcggccgcaacggcctctctgcacggcccctccacccggaactgatctcttcatgttggtcgtccattacactgcagcctaaattagacagcaaaatcaacttttcagatgtttatgccatagagatgcttgataagggtcgtatctgtgggccttggaatacaaagactgctattcaaggcaagaaaaatattgagatgcaccggtttgtcgtacatgggattaccagaagaaggaaacacccttctccgtgggtaccttgtgaatatatttttggtcacaaagacttgaagatctgcaaagattggtttcagcatctcatttcgtgcataaacaatgaaagtggtagaccaaagaacttaatggtatttgttcatccattgtgtggaaaaggtagaggggtcagtaactgggaaacagtgtatccgttatttgctagagcaaagataaaaacaaaggtgatagtgacagagagagcagggcatgcatatgacacactatcatcattatcagatatagaactgaaggcatttgatggtgttgttgcagtgggtggcgacggtctatttaatgaaattctgaatgggatacttagttctaggcacaaggtttcatatcccccaactcctgaggggtttggatatgttggaagcagtgataactgtgaagaacagacaagaaattgggttaactttagtaaacccacaccagattctgggaatgccgtgtttctagggaatccaagtaaatgtgatgaccaagaacctcttctttcaacttcacatcctaccgagctagagataccatcaaattctactaaagaaccatgtattggagatcaggataacccagtttccttcccaaatgactggtttaggcttggcataattccttctggctcaactgatgctattgttctcagcacaactggggagagagatcctgtcacctctgctctgcttattattcttggcagaaaggtgtcacttgatatagctcaagtcgttagatggaaaactagcccaacagctgaggttttgcctactgtacgctatgctgcttcatttgcaggttatggcttttatggagaagttatcagggagagcgaaaagtaccggtggatgggtcctgcacgttatgacttttctggaacaatggtctttctgaagcacaggtcatatggggcaaaggttgcttttctcgatactccatacactcattcgcttacagcatcagcacaggatgatataactggagcacaaccactacaatctcgttggaagaaacctcgcaaaataatctgcagaacaaattgctttgtatgcaaagaggcttcaacatctggacaaaatccagaagatgttgcagacaactccagaacaatatgcgagaaccagaagtgggtctggtccgaaggacatttcctcagcgtcggtgcagctgtcatttcatgtcgtaacgaaagagcccctgatggcctggtagctgacgcacacctttcggatggttttcttcatctcttgctcataagagactgccctcttcccctttacttgtggcatctaacacaatttaccaagaagggttcagatcccctgtccttcaagttcgttgagcatcacaagacacaagcgtttacctttatctcatcacatgacgaaagtgtttggaacttggatggagagatgtttcaggcatgtgaggtatctgtccaagcgtgccgggggcttgtcaacttctttgcttcggggccagagctgtagtaatgatactcgtaagttcctctttgcatgaacgaaggatgccaggagttcatattttttatttagagagtcccttatttcgacatgttgacatgttgacatgttgtgatgttgtacactcttatttgtattttagtggagacctagaacactttgttgatagatatactgttaatatttgttgatagctatgtggcatggaaactacaacccatttgtgctatagaatagaggaacaaaaggttttgattgaattaatgaagtaaaagtttactttc

SEQ ID NO: 123383 - DNA, 2992 bp, Zea Mays
aagcaactatttttttccgtgttcttctctcctcttccgctccccaccgaaagcataaacagcacaccggcaacgggaaaggaagggataccgacgcgagcacgcgccgagcaacgtctcgaaaaggccatgcaggacggcggcgaggtgctgttcctggacggcgtcggggaggtcgccgtcaccatcggccgcaacggcctctctgcacggcccctccacccggtatgccccagccccgtgatgacatccatgtcccttcgccgttttggaatcgctcaaggcttccttcagatcctactggtttaaacctcatctggagtctggacgcttgattgaaagggttttgtgcgtgcttgagtcggaatgtgtgacagggctggatatttgttgctctgggtgctcgatcgaagagattggaagatgataggaaggcggtgagaagatgaccagatgagtatggttccccaaccaccgtcactatacttggtttataattgggagaggattcacgaaaaagtggatggaaactctgagtttgcataatgcacatgatcactgtcttgggcagtctaggtatctgtacaacctaccagaagaggctgctttaggtgcttgcgatatgagtgctttgttggctgaaagacatccttttgcaagagaagaaaacatgcaaatcctagttaagtactccaaactagaaacagaatcctcatctgtgtctgaaggttagcctgataaatggttttaagggagtgcccttggaatatgtgtggtcagcaccattgcatagatcaccaagtggaaagataacaccactgatatgatatgtgccaccgagccgcacatataatcatcacaccggattgatggggattaaatccctttctattcaaatttgactagcaatccctccaatccactcctaaccgacacaagcctgtaatgtgctcaaattgccttttttttacaggaactgatctcttcatgttggtcgtccattacactgcagcctaaattagacagcaaaatcaacttttcagatgtttatgccatagagatgcttgataagggtcgtatctgtgggccttggaatacaaagactgctattcaaggcaagaaaaatattgagatgcaccggtttgtcgtacatgggattaccagaagaaggaaacacccttctccgtgggtaccttgtgaatatatttttggtcacaaagacttgaagatctgcaaagattggtttcagcatctcatttcgtgcataaacaatgaaagtggtagaccaaagaacttaatggtatttgttcatccattgtgtggaaaaggtagaggggtcagtaactgggaaacagtgtatccgttatttgctagagcaaagataaaaacaaaggtgatagtgacagagagagcagggcatgcatatgacacactatcatcattatcagatatagaactgaaggcatttgatggtgttgttgcagtgggtggcgacggtctatttaatgaaattctgaatgggatacttagttctaggcacaaggtttcatatcccccaactcctgaggggtttggatatgttggaagcagtgataactgtgaagaacagacaagaaattgggttaactttagtaaacccacaccagattctgggaatgccgtgtttctagggaatccaagtaaatgtgatgaccaagaacctcttctttcaacttcacatcctaccgagctagagataccatcaatggtttcattttgcagattctactaaagaaccatgtattggagatcaggataacccagtttccttcccaaatgactggtttaggcttggcataattccttctggctcaactgatgctattgttctcagcacaactggggagagagatcctgtcacctctgctctgcttattattcttggcagaaaggtgtcacttgatatagctcaagtcgttagatggaaaactagcccaacagctgaggttttgcctactgtacgctatgctgcttcatttgcaggttatggcttttatggagaagttatcagggagagcgaaaagtaccggtggatgggtcctgcacgttatgacttttctggaacaatggtctttctgaagcacaggtcatatggggcaaaggttgcttttctcgatactccatacactcattcgcttacagcatcagcacaggatgatataactggagcacaaccactacaatctcgttggaagaaacctcgcaaaataatctgcagaacaaattgctttgtatgcaaagaggcttcaacatctggacaaaatccagaagatgttgcagacaactccagaacaatatgcgagaaccagaagtgggtctggtccgaaggacatttcctcagcgtcggtgcagctgtcatttcatgtcgtaacgaaagagcccctgatggcctggtagctgacgcacacctttcggatggttttcttcatctcttgctcataagagactgccctcttcccctttacttgtggcatctaacacaatttaccaagaagggttcagatcccctgtccttcaagttcgttgagcatcacaagacacaagcgtttacctttatctcatcacatgacgaaagtgtttggaacttggatggagagatgtttcaggcatgtgaggtatctgtccaagcgtgccgggggcttgtcaacttctttgcttcggggccagagctgtagtaatgatactcgtaagttcctctttgcatgaacgaaggatgccaggagttcatattttttatttagagagtcccttatttcgacatgttgacatgttgacatgttgtgatgttgtacactcttatttgtattttagtggagacctagaacactttgttgatagatatactgttaatatttgttgatagctatgtggcatggaaactacaacccatttgtgctatagaatagaggaacaaaaggttttgattgaattaatgaagtaaaagtttactttc

SEQ ID NO: 123384 - DNA, 751 bp, Zea Mays
ctttaaatattcagaaactagtgcaaattggatttattcctgcagttctctgtttgcaaattcgttacctaataatgatctaattggccccgtgctaagtaagtccagtagcttttctaggaaaaacaagcagttcactattcttattgtatttgatggaattgttctgtaggttttgttacatagaatatatttttaatctgcaggcatctaacacaatttaccaagaagggttcagatcccctgtccttcaagttcgttgagcatcacaaggtagatataccttttatcctgcttaatctcttgtggttgaatctaatagagctttccttatctgcagacacaagcgtttacctttatctcatcacatgacgaaagtgtttggaacttggatggagagatgtttcaggcatgtgaggtatctgtccaagcgtgccgggggcttgtcaacttctttgcttcggggccagagctgtagtaatgatactcgtaagttcctctttgcatgaacgaaggatgccaggagttcatattttttatttagagagtcccttatttcgacatgttgacatgttgacatgttgtgatgttgtacactcttatttgtattttagtggagacctagaacactttgttgatagatatactgttaatatttgttgatagctatgtggcatggaaactacaacccatttgtgctatagaatagaggaacaaaaggttttgattgaattaatgaagtaaaagttta

SEQ ID NO: 123385 - DNA, 1333 bp, Zea Mays
aagcaactatttttttccgtgttcttctctcctcttccgctccccaccgaaagcataaacagcacaccggcaacgggaaaggaagggataccgacgcgagcacgcgccgagcaacgtctcgaaaaggccatgcaggacggcggcgaggtgctgttcctggacggcgtcggggaggtcgccgtcaccatcggccgcaacggcctctctgcacggcccctccacccggaactgatctcttcatgttggtcgtccattacactgcagcctaaattagacagcaaaatcaacttttcagatgtttatgccatagagatgcttgataagggtcgtatctgtgggccttggaatacaaagactgctattcaaggcaagaaaaatattgagatgcaccggtttgtcgtacatgggattaccagaagaaggaaacacccttctccgtgggtaccttgtgaatatatttttggtcacaaagacttgaagatctgcaaagattggtttcagcatctcatttcgtgcataaacaatgaaagtggtagaccaaagaacttaatggtatttgttcatccattgtgtggaaaaggtagaggggtcagtaactgggaaacagtgtatccgttatttgctagagcaaagataaaaacaaaggtgatagtgacagagagagcagggcatgcatatgacacactatcatcattatcagatatagaactgaaggcatttgatggtgttgttgcagtgggtggcgacggtctatttaatgaaattctgaatgggatacttagttctaggcacaaggtttcatatcccccaactcctgaggggtttggatatgttggaagcagtgataactgtgaagaacagacaagaaattgggttaactttagtaaacccacaccagattctgggaatgccgtgtttctagggaatccaagtaaatgtgatgaccaagaacctcttctttcaacttcacatcctaccgagctagagataccatcaaattctactaaagaaccatgtattggagatcaggataacccagtttccttcccaaatgactggtttaggcttggcataattccttctggctcaactgatgctattgttctcagcacaactggggagagagatcctgtcacctctgctctgcttattattcttggcagaaaggtgtcacttgatatagctcaagtcgttagatggaaaactagcccaacagctgaggttttgcctactgtacgctatgctgcttcatttgcagggtattttactgcctctaatcctctatgagatagtacaactatgcggtgcatttcctctgcacaatttgtctttt

SEQ ID NO: 123386 - DNA, 2826 bp, Zea Mays
ccacaagaaaccgcacaactaggatgggtgacgcccagcaatactcgaccctctccaaatatatattggagcataatacgctcattcgaagattttttgcaactcctcaaggctaccaagggctcgaaactaccttcctgatcaagccattttttatccatcccgtcgcgcgaagcctgttagattgcgcgcggtgcaggcgaggagaccgcgccgtcgaagaacgaagacaacctctgtttccggccggcgatgaggaacccgccgggaaggcacctcctccgcctcaccaaccgcgcagtgcgctcttcttcttcctcctcgtcggcgcccggcgccggccccggcgcctccacctcggccgcgtccccacgcccgcgcgccatcgcggacgggcggcccctgcgcgccagctccccgcccccgccttccgcggtcgccgccgccgccgccgcgtactgggagtcccgcgcgctccgccgcgacggggaggagggcgactgggaggaggtcgtcgccggggtccccggtaccggggagatggaggaaggagaggagtacagggtggtgttctggtgcccgcccaccatagacgaggtcaccggcgcagtcaccagcatacaggaggtatttgagaatcctcttggactggattcagatacaactgacagacaaacagcactgctgtctgcatcaggacattcatctggcaattcatcaggatcagatgactggattgaacctgctgcctatgttcttaactcaactgctcttctttcaagggaacataggagtgttttggatgcttttcgtctgttgcaaaaggatcccaccgttcagaaaatggttatgtctttgtcatgcgataaggctgtttgggatgctgtcatgaataatgaggcagttcaagatttcaggagacctttacatgatggaaaagaaagcgatagaaagggaaacactggtggtcctgctgaagtgcttaagtgggtcctggaaagtgcccaggcaaaaataattgaattcattgagaatgctatgaagataatcaacatgttgatccaccctgaagaggatgaagacaagccagatgcatacagcgatgcagttaaggtgtcgttcatgctcacgatattcgtcttcatcgtggtggacattgctcgtaccaattatgaacgttgggataacaaagtgtggtgaggagaaattctggcattctacaagctcgtctgtatatacatcggttggaattgttttgtagaatacaccaagcttcataggttacacaaaaaaaattacctatactttggttgtatcatttaaccctggcagatcagacatgggaatgttgttgttctgggtcatatttacgcttcctagtccagcgtcagaaaaattatgtttgcagtccttcatttgaaggatatacagtactaactgttgaaatggccagcataataaaattatttgtataataaataaagttacatgctgactttgatttgattcgttccttgaacaacataaatctcagatatctcatggaaagacacttatatttggttgagtttaaaagctcatatttcgtttgcgaaaaaacagaccgttgggtgcgttgtgcaaaacaattccaaccgatgtcaatgtgtcgcacaaaccccctcttgcaaacaaataacaaggcagctttatccggtgatcatggtgccggtgccctcgtccgtgaggatctcgagcagcagcgagtgcgggacgcggccgtcgatgatgctggcggtgcgcaccccctgggcgatggcacggatgcagcactccaccttgggaatcatcccgccgccgaccttctcctcggccaccatccgtctcaccccggcgacgtccacctccctcaccaggctccctggatcatcgcggtccgccagtatgccggacacgtccgtgaggagcagaagcttctcggctcccaccgctgccgcgatctccccggcggcggtgtcggcgttgatgttgtaagcctgcccggcctcgtcggccgctacggtggcgatgaccgggatgtgcccggacgcgatgatggggtggagtacggcggggtccacgcgcgtcacttcgccgacgaagccgagggaggcggcgtcaggggagggccgcgcggtgaggaggcgcgcgtccttgccgcacagcccgacggcggtggcacccgcgaggctgatgagggacacgagctgcttgttgaccttgcccacaagcaccatctccacgacctccatggtgaccgcgtcggtgacgcggagcccgttgcggaactgaggctccacgccgacgcgcgccagccaggagttgatctcgggcccgccgccgtggacgagaatggggcggaggccgacgcaagacagcaggaccaggtcgcggatcaccgacgcctgcagctccggcgacttcatcgccgcgccaccgtacttgaccaccaccgtcttgcccttgaacctctggatgaacgggagcgcctccgacagcacgtccacgcggctcagtgccgccgcagcgcccgctgcaggtgacgccggtgtgggctgcgccgccgccaccgaggcggcggagacccggagaccgccgctgcggtgggacgccgacggggtcagggccacaacgcggtttgcgttcaggctatgcttcggggtcagcgtggaggcggcggcgagggaggggtggagcttcgtgagcggcatggtttggaacggggggtcgttatgttcgatgaaatgcctcgccttgggcgtatgcggaaacgagcttgttgctcggcactggaagtgtgccgctgcg

SEQ ID NO: 123387 - DNA, 1290 bp, Zea Mays
atgcaacacgaagaagtgtgcgatactactacctgcggtgaaggcaatggtcgaggaggtgaggaagaactcgagatggaggggcactcgttgatgaggatgaagaggagggatcacttgctgctcactgacggcgccggcgccggcgccggggcggggcctcttgcggtgcagacgccgatggagcccatggagttcctgtcgcggtcgtggagcgtgtcggcgtcggagatctccaaggtgctggctggcggcgtcggcgggaggcggagctccaacttcgtcgtcgaccgcctgtccgggatgctcatgccggagacgctcgcgctcgcagcctcctcctcctccgccggcaccaacaacatcagcccccgcaagcgcaccctcaggagcaggagcgcgatctccgcgcaccaggtccaccacacggtccacgcgatcggcaagtggttccaccactgggacgcgggcagcagcaaggtggacaaggcccgcgccgagcgggcgcgcgtgcacgccgcggtctccgtggcgagcgtggcggccgcggtcgccgccgtggccgtggccgcgggcgcgagccccgaggtggacgtcaccgacgacggcgccaggatggggagcgcgctggcgtccgcgacgcagctgctggcgtcgcactgcgtcgaggccgccgagctcgcgggggccgaccacgaccaggtggcgtccgccgtggagaccgcggtcgacgtgcggagcccaggggatctgctcaccctcaccgccgcagcggccacagctctcagaggggccgcggcgatgcggcacagggcgcagcgggaggcgaggagcagggcggccgtagcgccgtacgacaaggcctgcagctaccgcgcggacgtctggtgcaaggaaggcgcgctcctcaaacgcaaccgcaaaggcaagcgcgctctgcactggaagcaggtggccgtgtacatcagcaagaagtcgcaggtgatagtgaagctgaagagcaagcacatcggcggcgccttctccaagaagaagaaaggcgtcgtctacggcgtctacgacgacatcccggcgtggccggcgcgcgagggcgtcgccgcgcaaagctcggcgccggagacgtgccacttcgggctgaggacggcgcatggcctgctcgagttccagtgcgaaagcagggcacagaggcgggactgggtggaggcggtgaaggacctgatccggcaggtggccggcgggactgctctgctcgagcactccttcgagtcgctaaggctgagcgcgtcttga

SEQ ID NO: 123388 - DNA, 1283 bp, Zea Mays
aaatgttttgtgacgattatccccgcaccgtccagagtactctaacccacaagttgaggccgccctgcagcccatcagacgaggacgcgcgcgtgtataaaagctgactggactcccagcgtctgtcagcgaagccgaagcagcagccaattcgctcgagttcagatcgagcgcgcgccaagcaagtcttccggccggccgcgaagagcgcaatcaagcaagacaagatggtgaagctcgccttcggaagcgtcggcgactccttcagcgccacctccatcaaggcctacgtggccgagttcatcgccaccctcctcttcgtcttcgccggcgtcggttccgccatcgcctacgggcaactgacgaatggcggcgcgctggacccggcgggcctggtggcgatcgcgatcgcgcacgcgctggcgctgttcgtgggcgtgtccgtcgcggcgaacatctcgggcggccacctgaacccggccgtgacgttcgggctggccgtgggcggccacatcaccatcctgacgggcgtcttctactgggtggcccagctgctgggcgccaccgtggcgtgcctgctcctcgggttcgtcacccacggcaaggccatcccgacgcacgccgtcgcgggcatcagcgagctggaaggcgtcgtgttcgaggtcgtcatcaccttcgcgctcgtctacaccgtgtacgccaccgccgccgaccccaagaagggctcgctcggcaccatcgcgcccatcgccatcggcttcatcgtcggcgccaacatcctcgccgcggggcccttcagcggcggctccatgaaccccgcccgctccttcggccccgccgtcgccgcgggcgacttcgccggaaactgggtctactgggtcggcccgctcgtcggcggcggcctcgctggcctcgtctacggcgacgtcttcattggcggctcctaccagcaggtcgcggaccaggactacgcctaatttattcaccactccatctccgctctggatgaatggattcaaaaccgtcgtcgtttgcttttgctcctcgccacgttcaattaatggttgtgtatgcatgtatgtgccaatatgatgtgcctttgccctggtccattcatttccctttcttttttcggggtgaaatagatgtaaagatctcgtcttgcctgccgtactcgcgctgtgttgggaaaaattggttttcgttccaagtttgtttacgcatggatttcttggctcctttatggttttgattcacgtctgccccgtaagtctatttctcaa

SEQ ID NO: 123389 - DNA, 710 bp, Zea Mays
attccagtccacacgagctagctagctaggacacccgcgcccccgtccgcgcgccgcgccgatatcgatggccggcagtaccactaccaccgccgtgtgctccatgtgcggcgatgtcgggttccccgacaagctcttccgctgcgcgcgctgccgccgccgcttccagcactcctactgcaccaactactacggcgacgcggccccggcccaggcgggcgccggcgtgtgcgactggtgcctccgcgacgacgtcggcggcgggacgaagaagcggcagcactcttcggcgtcggcggcggcatgcggcggcaagcagccgcaccggcaggcggaagaagaagaagaagaagaagcagcagcagcaggctggaggaggagcgcgcagcatcagccagcgtcgtcgtcgtcgttcccgcccagcggcgggtgcagcaaggtcaccggcggcagcgagcacgccgagggcggccggaggccccgccggtacaagctcctcaaggacgtgctgtgctagcgagccgccggctagctagctagccagccgccagccagccaggtgctcgtacgtcgtcctcgtcgtactatgtatgtacaaaacaatgcttgctaattagtagtatagtgtttagttattatgcatgcatgcatgtgcacaataattaagtaccgccagctgcccttgtcgagcgggactttttttcctgtga

SEQ ID NO: 123390 - DNA, 780 bp, Zea Mays
cataacccacaggtcttaattttctagtcagagtactaatgttacttgaaccatataggctgaaaaagaaagaagccgatattgatgattggcagaggaagaagaccataaaggccaggcagaagatgagaagcgctgagttgaagctggagaagaagagagcggaaatcgcagaaaagatgcaaaaggcaataaagcgtgcacaaaaaaaggctgataagaagaaagtcaaggagcaggtagccactaaagttcagattgatggtgttgagagagcattggataagatgtcaaggacaggaaaactcccctggtcactggcttttctgtgatccagctcttcgtatgtgcctgtcctagataagctggtttgccgaactgtggaagctactggtggtggcagcatggcaagagcaatacgagtgaaatcagctgctaaatgattgaaatcggcaaattgcgtattaaggaaaagagaagaggatatgctggtgattgaccattctttggcaatgaaagttttggcttatgtaacactatgatttgtttgaggcaatagttactagcaatcgaacactgtttttgaacacgacatggataactcgaggtgaattttttggtacattactgtatgttgtccgataactcttctagtgttctgacatctgagacaaacattcttgatccttacagctgtgctgtgatagtgtacatcacttcaactttgtgagtatgatgcgatgaacaaatgaacaatgctatgcttattcatatttgttt

SEQ ID NO: 123391 - DNA, 1835 bp, Zea Mays
caaagagtagacgcaacggcacaacgcaagcgcgcgctctgcaactaaccaagaagaggggagaggcaaagcgcagagcgaagccaagaagatggccgcggctgccgccgtcccggacggcgtctcctcctgcgggagcaccaacatgcgccgcgccgaccaccttcctcagctcccgattccgctgccctgcatgggcgagcccaccgccgcctcccgcgtctcgccgggctcctccccggcccgctccgaggcctcgcgaggcgccccctgctacaacgccgacgccgagccggacccggacccggagccggagcccgaggcgtccgtggggcggagcacgcagatgctgctcgcgatggccgccatgggcgggcacggcgggcactacggccgccgcccggcctcgtcctacggcagctgcgccgcgtggagcgccgggtcgctcaccaggcaccgccccgcatcgccgtccccgatctgcagccccgcgaacagccacgacggcggcggcgaggaggaggaggaccgcgaaccgcacggcggtgacgacgcctcctcgtttgtcacgccacgggtggaagaagagcaaggcaggaccagagcagatttcatgaatccttctgctatgccacggaatatcagactgcagacacccaggcacccttctctgctggataggagagttgaaggcgccaatcaaatgcctccgagattcatccacaagaccacaccagctagatttatgcgccgagttcgctcctcacgtaatttccgacagcgcgtggatgcattagatgctaccaatgaatggagattgcccaaagtcagtgaaggggatgacgagggaggtgataaaaaagactggcagagcaataccgtgtcatctcgcgtatcttcagcccgtgattggaattttgagtctgacggtgcctatcagggtagcaatcgtagtgatcgtgcatttggcgattcagatggtgagaactgtccagttgaagtgcaaaggacagagagatggaccccgagctccgtgttaaaaccccaaggcaatttagtccatgctaagttggttgcctggaaggatgcgcagattgcaaagctcatagaaaagctgaaaaagaaagaagccgatattgatgattggcagaggaagaagaccataaaggccaggcagaagatgagaagcgctgagttgaagctggagaagaagagagcggaaatcgcagaaaagatgcaaaaggcaataaagcgtgcacaaaaaaaggctgataagaagaaagtcaaggagcaggtagccactaaagttcagattgatggtgttgagagagcattggataagatgtcaaggacaggaaaactcccctggtcactggcttttctgtgatccagctcttcgtatgtgcctgtcctagataagctggtttgccgaactgtggaagctactggtggtggcagcatggcaagagcaatacgagtgaaatcagctgctaaatgattgaaatcggcaaattgcgtattaaggaaaagagaagaggatatgctggtgattgaccattctttggcaatgaaagttttggcttatgtaacactatgatttgtttgaggcaatagttactagcaatcgaacactgtttttgaacacgacatggataactcgaggtgaattttttggtacattactgtatgttgtccgataactcttctagtgttctgacatctgagacaaacattcttgatccttacagctgtgctgtgatagtgtacatcacttcaactttgtgagtatgatgcgatgaacaaatgaacaatgctatgcttattcatatttgttt

SEQ ID NO: 123392 - DNA, 1112 bp, Zea Mays
cctaaagtcatcccaatccaattacgccacgcctgcgccgccagcccgccacatctgtcacaccgcccaaagttcggagggaagtcctcaacgacgtcgcggccatttgcagctcggacgatggcgtccaattccgcggccccggctgccgccgacgggggcgacgacctcgaccagctcctcgacagcgcgctcgacgacttcaccagcctcgacctctccgcatctgccgcccccaaaagcgccggtgaggcatcggggtcaggatcgggaggcaaggggccggtgaaggggctggggctggggcttccggaccccaaggtgccgaagcggcgcgcggggaagcagccaccgccgaggggcgcgtgcgccaaagaggcgcttgaggagctgacgcgcgagacgcgggaggctgtgcgcgagctcgagacggccactgggggtgttccgtcactggacgatgacgccatgatggaggagttcgtcaaacagttcgaggagttcgcaggggcacaggatatggactccattgttgaaacaatgatgcagcagcttttgtccaaggagattcttcatgagcccatgaaggacattgtggaaaaatatccaaaatggctggaggataataaaaacaagataagcaaagaagaatatgagcgttataataatcagctagaactcatggtgaagcttattgaggtctatgaaaatgatcctgagaacatgactaagatttttgacatcatgcaaaacatgcaagaatgtggtcagccccccagtgatcttgtccaagatactgtacctgatctggatctgagcaagttgggacagctgtctcctgagatgcttgaatcagcaccaaattgttgcgtaatgtgaagacaaaaaacattccacttgggattcaattccatgaagtttcttagcctgtacgaaccgcctcccccctttctggcttgagtagattcaagataatttccatctggataatctgtaaagccttgcaaatatataatgggctcaatgttctttctggttctttctgttatttttctgtaacactcccgtcgttcctatatacataccttacgtgtcgaagccccttacgtttt

SEQ ID NO: 123393 - DNA, 1122 bp, Zea Mays
atgcatccggtggctgcgcgtggcgccccgcactggctgcgcggcctgctatcggaggagttcttcgacgcatgcgccgcgcacccgggggagcgcaagaacgacaagaaccacttctgcgtcgactgcgccgcgccgctgtgccgccactgcctcccgcacgaacacgtccacgacgtcctccagatctggaagtacgcgtcctgcttcgtcgtgcgcatcgacgacctgaagctgttcgactgcaccggcatccagtcgcacacggtgagcgaccatgaggtggtgttcctgaacgagcgtacggcgaggaagcggtccacgagcgccgagaacccctgcgccgcgtgcgcgcgaccgctcctccccggccacgactactgttcactcttctgcaagccgcgccgccgcagcccaaaaccatatctcccttcccgtaattccagccgtcgcgtgcgcactaaattcgagttgaagctccaccgcctcatactcaacggcggcttggccggtcccggcgcctccgccgaagacgtcgccgacgccctccgcgtcccctacctggagttccgccgccagaagcgtggccccttcgtcgcctccgtccgccgcgctctcacctccatccccatcccctccccatcctcctctgactcctccgacgatggctcctccggctcccgccgccgcggccaccacgacgcccacgccaccaccgcctcctcctccacctccgtatccgacgccgttgcccacccgtcgccaccagcccctgcctacgacgtcaccaagtccatgctccgctcccagtacgccgcgcagacgcccaagcggggccagcagctggagatcgaggtcgcggcggagaaactgcgccgcctcatcacggccgacggtggcggcggaggcgatgccaagccggaggccgccccgtcttctgaagggttcggcagaggggaagtcatatctagggtgtctggaggggttgttgacatgcatttgagaaaggttaggcaccttgatacttctaaaaagagtgaatttcacaagttattgcaactgaaagatgaactatcaatccatgtcaactcaagcaagagatatggaacacaactcaagtaa

SEQ ID NO: 123394 - DNA, 82 bp, Zea Mays
ttttttttctttcatgttttcaaatttaaattcaagtttgattctaatttaaatatcaggtttgcactcaaatacaacaacc

SEQ ID NO: 123395 - DNA, 319 bp, Zea Mays
gctcagcacttgaagccggtgggcacggtcctgccgcagtagttgaggatgaggctgagatcgataggcaggttgaggttgatgccgaggatttggcccttgatggcggtgcagaggcagacggcggcctccaggtcgacgagaccctccagcagcgggcagcacggctccgcgggcggcacgcccaccttcgccttgatgaggcccagcacgttggcgcacacgccaagcttgagcgcgtcgcgggggcacctgccgaacgacgacggcgtgggcgtgggcggcgagcaggcgctggctacgcccagcaccaccaggt

SEQ ID NO: 123396 - DNA, 874 bp, Zea Mays
ctctttcagggccttgaaatctcgccctcgttgcggtcgtccacatccttttctctcctcctcgccggcccaacctgattgttcttcaaccaagaggaagaaaggaaggaagggaccggaagcatcagccatgtcgaactcggcgtcgggaatggccgtctgtgatgaatgcaagctcaagttccaggagctcaaggcaaagaggagcttccgcttcatcgtgttcaagatcaacgagaacgtgcagcaggtggtggtggacaggctgggggggccaggagagagctacgacgccttcacggcctgcttccccgccaacgagtgccgctacgccgtgttcgattttgacttcgtcactgacgagaactgccagaagagcaagatcttctttatctcttgggccccggatacatcgagggtgagaagcaagatgctgtacgcgagctccaaggaccggttcaagagggagctggatggcattcaggtggagctacaagcaaccgacccgagcgaaatgagcatggacatcgtcaagtcgcgagccctctgaaacagccccggccgctgcacctgcacgctgcaggggcgcatcggctcctgcatgcccgtgggtcgtcgaatccttgcttgtgtgttgggaacggtcttgtgttttcgtgtccttgttttcctggaagcaaaagccctgcattctgtatgagactgtatgccattttccatctttttctctccccatatctctgccctagtcctgctaccgctgtagactagaacttatttggtgtttgatctcgtggcattgtcgagtcttttatgtgtctatgcaatgctacttgtgaatgttacaaaatgaagaggggtctaagattaattt

SEQ ID NO: 123397 - DNA, 2486 bp, Zea Mays
gagaccagtctctcccttccaactagagagttgtcgtctgctgcagggatggccggcgtcctgccgaggtttggccccttcggccctctgccgccatcggatgagttcgggatcagggagacgagaccccgtctcgccggcaggcgggccggcgggtacgacctcgtggagcggatggagtacctgtacgtgcgcatcctcaaggcgcgggacctcaagtggactggcagcttcgacccgctcgcggaggtgaagctcgggagctactcctgcgccacgcggcacatcgagaagacgacgagcccggagtggaacgacgtgttcgcgttctcgcgggagaggatccaggcctcgttcctggacgtcgtggtcaagggcaagggcttcgccaaggacgacttcgtcggccgcctgcgcttcgacctggccgacgccccgctccgcgtgccgcccgacagcgcgctcgcgccgcagtggtaccacgtcttcgacaagaaggcggagcgcgggggcgaggtgatgatggccgtgtggttcggcacgcaggccgacgagtgcttcccgctggcggtgcacgccgacgccgcgttcgccgtggacgccaagctggccgcgcacatccgctgcaagcagtacaccgtgccgcgcctctggtacgtgcgcgtcaatgtcatcgaggcccgcgacatcgcattcgcggacaaggcgcgcgtcggcgaggtcttcgtgcgctccaggatcgccgcgcaggtgcacaagaccaggacgtgcgtcgcccgcctgcccacgtgcggctggaacgaggaccacatgttcgtcgccgccgagccgttcgaggaccacctcatcctctccgtcgaggaccgcgtcaaggtcgacaaggaggaggtcattggccatgtccacatcccattcaaagaattcgaacggcggtgggacgcccgcccgattcgcccaagatggtttaatctggtgcggccagaaggagccgccaaaatcgacaagttctctgccaagatatgcgtccggctgtgcctcgagggcggatacagagtgctgacagagccggtccactacctgagcgacgtccggccggcggcgagggagctgtggcaccacaggccgcccattggcctcatcgagctcggcatccacaacgcgttcggcctgagctccgttcgcacgcgcgacggccggggctcctgcgacgcctactgcgtggccaagtacggcgtcaagtggttccgcacgcagaccgtcatcgacagcctcgcgccgcggttccaccagcagtgcttctgggacgtgcacgaccactgcaccgtgctcaccgtcgccgtcttccacaactgccagataggcgacaagggtggcctcgtgaccggcgaccccgtcaaggacatcctcctcggcaaggtgcgcatccggctctcgacgctcgagaccgggcgcatctacacgcacgcgtaccctctcgtctccctccacggcggcggcatcaagaagatgggcgagctccagctcgccgtgcgcttctcgagcacgtcgacgctgggcctgctccagacgtacgcgcagccacacctgccgccgatgcactaccactccccgctgtccatcgtgcaccaggagacgctgcggcgggaggcggtgtcgctcatcgcgcaccggctgggccggatggacccgccgctgcggcgggagtgcatcgagcacctctgcgaggcgcactcgcaccggtggagcatgcgccgcagcaaggcccacttcttccgcctcatggcggcgctggcgcccctgttcacggggctcaggtggttcgtcgacgtctgtcactggaagaacccgtccaccaccgtcgcggtccacatcatctacgccatgctggtgtgctgccccaacctcatcatgcccaccttcttcatgtacaagttcctcatcggcctctggaactaccggcgccggccgaggcacccgtggcacgtcgacaccaaggtgtcgcacgccgagatggcgcacctggacgagctggacgaggagttcgacgacttcccgacggcgcgtcgtcccgaggtgatccgcatgcggtacgacaggctgaggagcctcggggcgcggatacaggagatggtcggcgacgttgcggcccacgccgagcgtgcgcggtgcgcgatgacgtggcgcgacccccgcgccacggccatgtacctgctggcgtgcctgttccttgcggtcaccaccctcctggcaccgttccaggcggtggcgctgctcacggggttctacgtgatgcggcacccgacgctccggcagaggctgcccgacgtgccggcgaacttcttccggcgactgccatgcaaggtcgattgcctgctttgattgcggatcaaatgatgtttcagtccgtaatttgatattttattgttagcaccgttcgactcttcaattctataaatgttgatctagtatacaattcctccgtttat

SEQ ID NO: 123398 - DNA, 1456 bp, Zea Mays
catctcgtcgactttgtaacaggatcgctgcacgtacggcattcggcatcacgatctcgtgaaagatcgtgaggcattctcctgaagttattaggctcagttggactgtgaacagatgtcgagcaagtctgacaacggaaccaatgagcagttggtggacgaatattatgaccaagacgaggacgacctaggtgacttcattgtgtatagcgacgacgacgatgagtcgttgaagcacaagcagcaccagcaggagatggaggatgagcaacagcaggaggatgagatggaacagcagcagcaggaggatgagatggaagaggaaatcgaagaggaggtagaggttgaggaagaagaggaggcaccagttgggcagcaagagatcctcagcctgagggagcagttaaaggaggaaatcagaaggaagaacgcggcaatggtccccagcgctcacaaacctgatttatcgtcaccatccaagaaccagacgatgccaaccgtcaatgacggatacggcaccttctttgggccatcaaagccagtgcttgctcgccgagtcatcgaagaagggtgttcatcatcgatgatgaaagatctacagaatataccgtcgtccaaaagagatgtttccttggcttcgaagatgcgaccaggtgcggttcagaatgtgcagaaacaaaagtttgttagcgaggagaaaagaaaggccgacacactccgaaagaatcgagattactcgtgtctgttctcagatgatgctgatactcacccccctactgaagaggctcaagatggtgggccggtgaatgccaggaaaggcacagctcaacctgccacattatctctcggaaagaaggctcatgcagaaagaaaaggcactatagcttctggtagaaacagcctgcctaataacttgaagaagaaatctccaggtttgctatcatcctcgaaaagccaagagctgcagccgtcactccataacaagaggctgcaggcatcgattcctggccagaaactgcggcagcaatcgcagagtcatcagaggccgcaaggcaatggacgtcagccaccgttgcaaggtcgacgtctacaaggtcagctcattggtcagaacagatcggctgcgcaaaacgcgagattgaaatcagcacaaaaacagctcatccattcctcagaattcaaggcctctcgtggagtagaaaagtatacagtaaaaagaaggaaatccagtgatgacagacaaataatgcatagctatcacaaatttgctggcagcgacgatgaagacgagagtgacatggaagctgattttgctagcatacaaagggaagaaagaagaagcgcggcacttgcaaggagagaggacgaggagcagctccggttgatcaaggaggaagagaggcgcgagcgcgcgaacaagagaaaaagagcagcacaaaaggagagtaggagttag

SEQ ID NO: 123399 - DNA, 2043 bp, Zea Mays
cacgaacaccgtcaccacacggcgcacccaaacatggccgctccgaccaccgccgtcgacaccaccgccccgcctcctcctcctcccacggcagagcccgcggctgcacccgcaccggatcaaaaggtgtctccgcctcctcctgcccctcagcctgataccgctgctcccccgcccgttcccgcgccagcgccgaggaagcggggttgcacacctccgaatgctacaagatccgtgccgtcgtcgccgacctgcgtgtccgcttcgtccaggtttgccaagctactgatttccgcaacacggatgcagctcgtgagattttgaaaggtcaatgagccatggggcccaggtggagagccataccaagtctacaagtgccaaggaccagacaaaagagccagcacagaaaatatttcagaaacgtgaaacgaggtcaaaaaggctatcttcctcctggttactggagtctggagatcccctcctgtgattgctcacgtcaccggtttgatgttgccggcggccatgggtgtgacattgactcagttgtgtccttggtgctgatccatgccagtgctgatcaggctgttgcagtgagcgaaagggcctctagcttagttggtgctagagttggttaggtggtctagtctaagtagcactcctcaagtcctgaattcgacttctagtggaaatgaattttaggctgaggttaaaaaaatctcctcgtctgtcccacgctaaagcacaggtctaagatccggacccagtcgcggtgacctgcatggggaaggtcatgtacatgagaaggtcttcttaatgtaatggccgaggcctgtcttacccccgcccgtaggtcgagtttttaggctgttgctgtgaaggccatttaggttgaaatgttgtccttttaatacttggcatagcaatggaggtgaggacgtcaggtgaaggagagccattctatttagtcttactaaaaattgtagcaatcatgaagcgtaaatagtcgggtcagttgagaggggtctgcaggcccttggaacttggtggtcttggtattcataatttggaagcgctaggctggtctttgaacatgcgcaaggacggagggaccatggagagaattgcagtttaaggttcactcaactgtggcagctctctttgctgcatcggtggtgaccattgttggagatggagtactttcttttcgactgataagtggttgcatgggcagttcctctccattcttgctccagcactggttggtgcaattcctcaacgattggttaaaatgagaacagtttaggacgccctgcaacattcactttggattggtgacatccaagggcatttgtcagtctaggtcctaagcgactttctctggctttgggatgtgctgcaagacttccatcttcaaccaggagtggcagatcaccattcctggagcttgaccgcttcgggatcatattcatctagatcggcttaccaagccttcttcatgggggcgataagttttgatccgtctagccggatttggcacagctgggcccctgcgagatcaagaggaggaagatataaaccacttgctatttcagtgtgtcttctcaaggacggtctggattgaaatgcttaacctgattcattacccgcatttgagtcctgggccggaggaccacttgctgcaagattggtggcgtgcggtggagagcaaggtgccaaagtatcaaaaaagggcataaactccttaattattcttgtagcttggtgtatttgcaaagctaggaatgcctgcatctttgatgaagcctctcctagggttcctgatgttgttcaaaacataaggatgaggctgaaatctggtgcagggctggtgctaagggacttgctgcaatctggtcaggttagtgtggggtgtggggtccctttttctttctgtaatgggtgtttgctagtgtgtgtgttcttgccctcctgggcttttgtacttcggtccattttggaacttctctccttaatataatgatgcacaactctcccgtccgttcg

SEQ ID NO: 123400 - DNA, 561 bp, Zea Mays
atgatgatgccgagcgagtacacgtcggaccgcggggtgagctcgccggtggacaggaactccgggtccatgtacgcgaaggtccccttcggggtggtcgtcctgtgcagcttcgtggtggcgacgggcatggtggtagtggtggtggactggctcatcatcagcaggcggcagatgccgaagtcccctagtttgctcaccaggttggcgtccagcaggatgttgcccggcttgaggtcgccgtgcactaccgggtgcggcctgttcgagtggaggaagatgagcgccgagcacatctcgcagatgatcctggtgcgcacctgccatgtcagcggcggcgtgtcgttggtgcacgccagccggtcctccaggctcccgttggggaggtactcgtacaccaggccgagcgcctcccggcacgcccctatcagtgtcacgaggtttggatgccgcactctaccgagaacagcaacctcttggttgaactctgacgggccttgcatgctttccggatccagcagcttcacagcgacggctgtgttgcggaggaagcctctgtag

SEQ ID NO: 123401 - DNA, 796 bp, Zea Mays
gttccctttctccatcgcttcctccaccatctcaccgatcccttgctgcgatcgccctgtcagtaggcgaaggatggtgacgccgaacgagttcacgtcggaccacagcatgagctccgctgccgacttgaatccaccgccctgctccgtgtagcggagtgttcccttactacggtctgctgctgaagggcggcttcgcaggctggtggccgttatgtcgtcttcaccaccacctagaagaaggcagcagatgcccaagcctcccagcttgctgacgaaattggcgtcaaggaggatgtttcccaggttcagatcgccgtgaacgatcggatatggcttgtgtgagtggatgaaggccaaggctgagcatatctccccgacgatccttgtgcgcgccttccatgtcagaggcggcatgcttttcttgcacgagagccaatcctcgagactgccgtttgggaggaattcggacaccagcgcgaagtcgtcgggacatactcctaccagcgtgacaatgttaggatgcctcaccctactgaggacagcaacctgcaggagcgagtgagtagtgatgtcactgctcgttcgaaaaagggggcggtaagaacttgaaggtctttaatctgcacgagcaatcaccacttccatgaccacctgtgatttgtattaaggaccaatggtgcagaaaaggaagaagaaaacataccctttgaagcggcgcgttgcttttttcaggtgatgcaagtatggcaggaaggctttcatttgcttccctggggagagttcttgtttaatg

SEQ ID NO: 123402 - DNA, 692 bp, Zea Mays
ctattaggagcgtatggctttcgaaatgcagagctgcacgagaccaggccggccgtagggagaagcgcagtagtagtgccgcagaagctgaccgcgcggggctgcagcagcgcaggccgcgtcacgcccgccgcccgtgccacgcgcgccacacacgtacgtaccccaccgggccgcggccgtcgcgcctgcatctgcatgtgccgactgatgtgcgctgggcggcgccaccagctaccgcgccgtcgtcgtcagacgtcagcctgccgtggccgtggagggtccgttccgtcgccttgcgtccgccacgtcaccatccaagccactgccgtttttttttagaaaaaaaataattcgtggtggtggaagtggtggtctggtggaaccatgggaccatggtgtttggaattttggatatggccaggccagccaaagcagttcaaatgattggctcggctgcattcattcacaccatataaaaaaaggtcatcggcaggatttactttagacactgtctggctcacgtactcggggcggtggtggtggttgttagaaaacgaggtatttatcagttttaatttaagtctgaaaacaagtgtgatgtatgtgatgatatgtatgtgcatgtgtgtatgactattcgtataagcagtaaacaacagtaaacatatgcacaaatacgaagaacataa

SEQ ID NO: 123403 - DNA, 700 bp, Zea Mays
gagcatatgtagagcccaggtacctcgctctacaacatcaaggattatctcgtcattcataagagttaaaggcattttcttcagtctttcactattaagacacaatttcatgctgcaaagatattcaattgatgatattgatgacgatatataagggatatcactcttgagccacataagcttgatgaagagattgttgaatctaatcttgagcttgaagcaaacttcgtacagtataactatgatgatcgaccacaaaaggtacttcattctcttgccacaaacatgtttagcgacaagggagatgagctgctaagtctgtttttacatggaagatgggaaatggacagaaacagtgaacatgaagaagggtgtgctagatggaaaggaaaccggtcaagctgatcgaataagaagtctcttaactactccaaatccatccatgaaatggagaagattaatgctaagccacttcaaaaaaaaggttgggtctagtcattgttgtctctatactagcaaagggaatgcggagatacatctcgagaagaaaaaggcaatgatatggaggtgttttgtctttcattgataaaaaattagaaatgagtaggtgatgaatgtcacatgaatatatttatctatttcaaattgaaaccaactttgttattgtactggcttttgttcataataaaaacacagaagg

SEQ ID NO: 123404 - DNA, 3836 bp, Zea Mays
cagattcctcccgcctacgctcgcgggcctctcctgcccgcccgatttcgcctcgaagctcgtcgtcgcgggtgtgctttttcttcgtgccgatttgctgcgcctcgtcgccggcgacctcggcgcttgcaggcggccaggtgcagcaggacaggtctgcttccacagacttcttcgttgtttcgcaggtggcgcccacctccaccttctcttctctgccgccgccctgctctagtggttccggacctggggtggagcggagatccacccgggcttcgattgctttcgtcgtcttgttggctttggggtggagacgacactaagttggaatttttatcacacaaggaagcaagaacaggaaaaattcacatttcagtgttgcactctgtggagggttcattgtcagttcaccaaaatactacagtactggagggtttttgttgaagtgctcctcatgttcaccatctctaaattgtcataggctcagtctgcatgatcttgctatgagtgcatagataaatcatctccgtatctgtgttcagtatgccaccatggtggggaaaatcttcatccaaagaagtgaagaagactgccaaagaaaacctcattgacacatttcagcgtctcataagttcaaatgaacaaaagggaagcaaaaaatcacgaggtagtcgtagacatggtaaagacacagctggtgacaaaggttgctggtctactgcccaatcccgctcaacatccccttcaaaagaagtctctcggtgtcagagctttgcagcagatagaccacatgcacaaccacttcctcttcctaaatcacgtgctagggtgtcgcgttcttcttctgatattaccaactcaaagtccactttggaaaagcatggaaaaggacaactgcttccactccccccaattcagcctaaaaaaacacctgaggctactgaacctgttactgaagtagctactgcttctgtctccagcaactgttctattgatagtgatgatcctggtgattctcggcttcagatccctgtgggaaatgagactgaaaatgcgactagaatcactgcaacaagtagttcaagtgttgtgcacaaagagcgttctagtgccatcaccagaaagaacaccaaggaagttgcaaagccaaacaatgtttttctcagtaaccaaatcctgtcaacatctccaagaggtaccgttgctgatggttatcaatccaatttacagagcccccgacagattgccctggagagtgctccgaatagtttgatgtcaagcccttctcgaagcccaagaattatatgtcctgatcagattccaacttcagctttttgggcagtaaagcctcatactgacgtaactttccttgggtctggtcaatgctccagtccaggttctggtcagacatctgggcataattcagtgggaggagatatgttaggcccgatcttttggcagcctagccgaggtagcccagagtgttcaccaattccaagcccaagaatgacaagtcctggtccaagttctagggtgcatagtggaagtgtctctcctttgcatccaagagctggaggggtcactcctgagtctccaacaaatcgacatgctgaagggaacaagaagcaaacccacagattgccacttccaccattaagcattgctaatagttctacctttttgccaaacagctctaccccagctagccctatatctcgtagtcctggtagaacagagaatccaccgagtcctggttcacggtggaagaagggaaaactgattggccgtgggacatttggccatgtatatgctggttttaacagtgacaaaggtgaaatgtgtgcgatgaaggaggttactcttttctcagatgatcctaaatcaaaagaaagtgcaaaacagctgtgccaggaaatatcacttctgagccgactgcagcacccaaacattgtgcgatactatggatctgaaactgttgatgataagctttacatatacctggagtatgtttctggtggatctatacataagcttctccaagagtatggtcagtttggtgaacaggccattcgcagttatactaaacaaatacttttgggcctagcttttttgcatgcaaagaatacagtacacagagacatcaaaggtgcaaacatattggtagaccctaatggccgtgtaaagcttgctgactttgggatggcaaaacatatcaatgggcagcagtgccctttctcatttaagggtagcccatactggatggctcctgaggttataaaaaatgctagtggatgtaaccttgcagttgatatatggagtttaggatgcacagtcctagagatggctacttcaaaaccaccatggagccaatatgaagggattgccgcaatgtttaagataggaaacagtaaggagcttccgccaataccggatcacctctcagaagagggtaaagacttcataagacagtgcttacaacgtgatccatccagccgtccaacagcagtggatcttttgcagcatccatttgtaggaaatgcaccaccacttgaaaaatcatctgcctctaatccactggaacagttgacgactatatcatgcagaacaaattggaaggtggttgagcatgccagaaatatgtcctcgcttggtttggaaggccgataccaatcaattttgcagagaagagctgccaaattttctttgccaaatagtgatatccgtatacagagtaatatatcttgtcccgtatctccatgtggaagtcctcttctaagatcaagatctccacaacatcaaaatggtagaatgtcgccttctccaatttctagccccagaactacttcgggtgcttcaactcctctgactggtggtagtggagctgttcctttaaaccacctgaggcaaccagcttacagaaacgagggcttcacagtcacatcaagaggttttgatgaccacatacctagccggcttgttgatccagtacatggacgttttattcgggtgcagcaactttctgcgggtcgtcaggagagggtggtctctgaagctgacattctgagctctcaatttggaaagatgagacatgcaaacgtgtgggatccgcatgatagaccgttgccttctgagagatcctctcagcagtgttttggggatcatgcgaagctaaaaccttcgctggacttgaggtctggccctctgcaccctgggcgcaaccatggccattgattctctaagcaaaagttaatggagtcgtgtctatgtgatagctagtggtcctaagctggttcactgaaacctttaattgtatcatagaagaagacatgttcgttaattatttcagttgctgacagttggcagtggataaagattctccaatgtcaatcccatattcccattactctaaaaaagatgagacatgccctaccaggaagaggggatgttgtatactagactgtccagataccgaagggaccccaaagcagtgactcttgaacctgtatactcttttactctcgtcgtgccgacaacaatttagttctcgttttcttatgggtttggaaggccattgtacagagggggggaactctcaacaagaaaaatccagattagaaggcacaggagaaagcaagtgagccattcaccaaccttttttcccttttttttttcttttcaagtcttagcagatacatatatgccggctgctcgctgtaaagtgctgattcagctgtggctgtgataccggttcaatccgttaaacgtgtccgttactctgggaaaaatcatgtgaagagtctaatcgttaatcgaattaactggtgcagttcgaaacc

SEQ ID NO: 123405 - DNA, 1683 bp, Zea Mays
cggcacggttccaattcgtgtagggcgtgcccgggccgggctggctcggctatacttgtagcggacggacggactgaaacggaccggcttcttgtgccaggcaaaaaacgaggatcccaagttcccttcacaaactgcagggggaggcgaacctcgtgcagcgcggccatggcgaagcagggggcgaagaagatgaaggacgagaacaagaagcgcttggacttactcctgcgcatcatcctcatatccaacgtgaagcttagaagaattggaccaactatttgaagaggcgaaactagttggactaaatatttgaagtatctcgtgctcaatttttttttgactctttcctgtaaggccggaagggaataacaccctgcctagaactggatctgggatgccactttgccgtggcgggaataaaattccctgaggataaaactaggcggagaattagcttaatttagcttggctcagtggaattactcatctgttcctctggtagtcgcctatagtagcactgttgtgatgtcaggactcatgaggttaattgagaactatgacatggtcctgaacgactaaaaaaatgtagtgatggatttctaatactttattgcaatccacaaatggcagaagatagcaaattgatgaacctaacagttgagagctcatgttaggggggaaaacatccccgcccagtaccttttgttttgcaccgctctaatcctatacattttgttatttaattcggttggtttcttaaatttttttgtggtgtcttatttatcatgcaatttttagtgatacattatgttattcaatatgactaactttgttgatgtttccatctatttgcatttgccttgacctgctcgtaagtacgccatcagctaatttgggtttataagaactaactcatatatgtttcattgttctacaggttatttacatagtggtgaggatggctataatgcattcatccttcacctggaagcattggattggccttatggtaacatcggccggatattttcttccatataagcaactcgccagtatggcaaagccagtttactctgataacggagaactactggatggtggcttcgatttgagcactggtggggtttgcgagtatttatatgatgtgatctacatcactgtctttgtgcaattgatgtctatcatttctgaaaaattttggtggacatatttagtgattccagcttttgctggatacaagatttccggcttgttgagaggagcatttttcagtggtggctcagagggtgaagttgaagatgagaagacccgaaagaaaagggagaagatggagaagaaggcatctagggggaagatgatcaaaactaggactcgctgatgtgacatctgtggcctgttgcttgaaagttaggttaggttggtttatcatagctgtccgaccgagttccaaactgtttgtcaatatttatatcgtgaatttgttatagcgttcagcgacaacttgtttgaacttttaaacagctagtattatgtaggaaaaatgccagctaatctccaacatgtccgatcaataagaatttcatgtgtaatttctgacttttttacccataattcaaacatcaacattgtggcatagcaaatgggaaatcgtgacacacaatagtgtacttttcacagaaa

SEQ ID NO: 123406 - DNA, 995 bp, Zea Mays
cggcacggttccaattcgtgtagggcgtgcccgggccgggctggctcggctatacttgtagcggacggacggactgaaacggaccggcttcttgtgccaggcaaaaaacgaggatcccaagttcccttcacaaactgcagggggaggcgaacctcgtgcagcgcggccatggcgaagcagggggcgaagaagatgaaggacgagaacaagaagcgcttggacttactcctgcgcatcatcctcatatccaacgttatttacatagtggtgaggatggctataatgcattcatccttcacctggaagcattggattggccttatggtaacatcggccggatattttcttccatataagcaactcgccagtatggcaaagccagtttactctgataacggagaactactggatggtggcttcgatttgagcactggtggggtttgcgagtatttatatgatgtgatctacatcactgtctttgtgcaattgatgtctatcatttctgaaaaattttggtggacatatttagtgattccagcttttgctggatacaagatttccggcttgttgagaggagcatttttcagtggtggctcagagggtgaagttgaagatgagaagacccgaaagaaaagggagaagatggagaagaaggcatctagggggaagatgatcaaaactaggactcgctgatgtgacatctgtggcctgttgcttgaaagttaggttaggttggtttatcatagctgtccgaccgagttccaaactgtttgtcaatatttatatcgtgaatttgttatagcgttcagcgacaacttgtttgaacttttaaacagctagtattatgtaggaaaaatgccagctaatctccaacatgtccgatcaataagaatttcatgtgtaatttctgacttttttacccataattcaaacatcaacattgtggcatagcaaatgggaaatcgtgacacacaatagtgtacttttcacagaaa

SEQ ID NO: 123407 - DNA, 763 bp, Zea Mays
gccgctttctccgcctccactcgcgggcctcctcccgggctgcccctcctccgcccccgcggccccgcccccgtcctctcctcggcgcgacaccgttgccgcccccagacccttccccgttgctggttgctgtctctcccgcacgcagccttgtgaacaagccccagcgggccgagcagacgaggagcaaaggagcgagcggagagagaggagtaggcagcggccgtcgacagcacctggcggaaaggcggcggagcagacgcacatcccagcggtggtgcggtagtaagttgcttgctgggaggtttcacatggattgaccattacttggcattaagttgttcttcaatggcgtatttcatggatttacgggctttcatcctgcgtacacatgtcttgaagctttatagacaggcattgcgtatcactcaccgagccccggtacatgctcgagatgagttgaggcagaccgcaagggccgagtttgagaaatatcgccattgtgatgacaaacaaaagattaggtttttgattagtgaagggaagcagagactaaaaggtcttgatgaactgcttgacatgacagggaacagctaatctgagttgcatctttgtctttgcttctgcaatcagctcgctccagaaaccattcctgatatgtaaacaactacattgtttgaaaaaaaaatgttttgataaggaacaacactatatgaacaattttttgtgccttttttataataatataatgtgaatgttttcc

SEQ ID NO: 123408 - DNA, 574 bp, Zea Mays
atggcgtccaggtgcttcttccccagggacgcgtccgccgccgccgacggccggcaccagcagtcgaaggccgcggcggaggccctcgagcagctgcgccacggcggccgcctcctgtcccgggaggacgtgggcggcgcggtgcgcgtcaggatcgtcgtcagcaggcgcgagctcaagcagatggtcgcggcgctcggcgacgacgacggcgctggcgcggcggcggcggcggccagcagcgagcgccgccaccggcagcgtggcgcgggcgcgggcgcgggagcggggccgggcgccgagcagaggctgcagtcgctgcggcggcgcagcgcgcggagggcggccgaggcggcgcgccggacgatgcaggcgggcggggagtgggagcccggcctgcagagcatccccgaggaggtttactagctagtaatctctgcttcactaattatgggttgggttgggtacgttttgatcactgcctcgctgctaagtgctactagtagtagatgcgtgtgtgtgtacagcgctgtttttgctctggaccctcgttatcatgggttccattccaatg

SEQ ID NO: 123409 - DNA, 711 bp, Zea Mays
tttttttagttacatagacaaacacctctgagctgtctcgctcctactactgcctactggcgttaccagatcgaaggatagacgggcgatccatggagctggaggctgctgccgcgccggctacgtgcaggagggacgggcggaggctggtgaggtgcccgcggctgcagctggacaccgagacggccacggccatcgagcgttccacgggggagagcgtcgccgccgagggcgcgatgcgcgtcaagatcgtgctcagcaagcagcagctcaagcaggtggcggcggccgtcgccgccgccgggagcggcggcgccttcgccgggctgccgccggcgctggagcagctcgtcagcgtgctgaagcgccgccagcacgccaggaagcagcaggctgctgcggccgacgcggtggctgctgccggaaggcgccggggccgctggtcgccggcgctgcagtgcatcccggaggagtgcttttagctagagctaggcgtgcgtgcgtacgtacgtttgtgtagtactctgtattctagctacattctgcttgtatatagctagctagctagctttccccaaattttcgggctcttcttccttgggtcgcgttcgcgacgtgccgatcgattgggccaaaatgagcgtccgatggttgcatcacaaatttgaaatgtcacttgtttcaatctggcatttgccactacttggaccg

SEQ ID NO: 123410 - DNA, 1654 bp, Zea Mays
acagtttgcatttccactttcatccgtcagactcagacatcgcagtcaccgcgcacccaagtgctgcaaaccacatctaaccccaatcctcccaaattctccaccgccatggctctctcctccctcttcatcatcctccccgtccccaaggtcccctactccaactactcccgccgcttgctcactgcccgggcgtcctctgacgctcccgctgcctctgcgtcattcgacctgcgccgctattggacctctctgatcgccgatgtggagtccgaactcgacgccgcgatgcccatgcagcctccggagagcatccactccgccatgcggtacgcggtgctcccgggcgccggcaaggagggagccgccaaacgggcgccccccgtgctctgcgtcgccgcgtgcgagctcctcggcgccccgcgcgcggccgcactccccgccgccgccgcgctggagatgctccacgcggcgtcgctcgtgcacgacgacctgccctgcttcgacgcagcccccacgcgacgcgggcgcccatccacgcacgcggcgtacggcaccgacatggccgtcctcgcgggcgacgctctcttcccgctcgcctacacccacgtcatctcccacaccccgtgcccggacccggtcccccacgccgtcctcatgcgcgtcctcgcggagctcgctcgtgcggtcggatccaccggcatggcggccggtcagttcctcgatctggccggcgctaccgcccttggcgaggccgaggtcatgcaggtcctgacgaagaagttcggcgagatggccgagtgctccgccgcctgcggcgccatgctcggtggggcccggcccgacgaggaggccgcgttgcggcgctacggccgcaccatcggcgtcctgtacgagctcgtggacgacatccggagcgcatcgggaaacggcaagatgaggagcaacgccagcgtcctgcgttcgctggggatggaccgcgcgctcggcattgtggaggagctcaaggctcaggccaagacagaggctgacaggttctcggataagtacggcgatcgggtgctgcctttatacagcttcgtggactacgcggtggagagagggtttgagctccaggatgcagcggcaactctgtagagtggacgatcgctgttgctactgaaaattggaggcttcgagctagtgagatgtacatggcctaggaatttggtgagagctttatctggcatagatctaatccctattttatctagatgttctgaagctcgtaattcgggggatggttcataatggagaattgttatcccggcattagatgtttagaacttgaaattgggtttgatacttgtagtaagctaataaatctaagtggtaaatgctcatgcaaccactcggttcttctgctgtttaagtttggatgagttcaccaccatggtggatagacagattaagctcttagatgaaactgaaaaacatctgttttttttaggttttcgaatgagaagtgtaaggttcacctcgccaaacctacttttctgaattttgattgtgcaagaagttcagattttcgtatacaatacaaggtatttcgtcacattacattgccaatttgaattctgcaagttcaggacctccgtatacaacaggtttctcg

SEQ ID NO: 123411 - DNA, 1246 bp, Zea Mays
gcagtgcaacttgagctcatgcattgacaccaaaatctatcggaacaagcaaaaaaaaaaaagagcagaagcacacgggggctatgggaaaatgacaagctaaggaaaaaaagaatggcacatctcatcatgaccatcaccagtcactggcacaaaaccctagctatatttactagtaagtactatgcaaaacatattcgagcagtattcaagtgtatagttgtgcaaggattgaaacagctgtttacttgtatatatcttctttcttctcatccctggcccctggcgtcatggtcagatattgcagacgactcccttagtcccttcaaagattcaggaacaggtctgcatctgcatgcgaagatagaaagaagaaagcatgaactgcggggttagacctccgaagaagaacttggctgcctgcgcgcgcaaaagaaggcaaaaatagtggatccggaagaagggaggaggggagaactatctcttccatccccagaagcagaaggccaaaaccatggtcggctgcctcagagcagcagactagattaggcttattggaatagaacggatcagataacgtaccatatgtagctaagagcctaagaaaacaagctagaaccggccggccgggcacgcctcgatcgacatcaatcaaacaaacaggcccatcaaatgaacacacgcaagaaaaggcagcaaaacgaaggcgtttccggcacaggtgatgatcaaatctaacgtagctcttacttatgtcatgcgggctttacaaagggaggcctacgcagctccattggcagtatgcccacctccaaacaaacaaaaaaagcaaactttctgcaagatcgtcaagaagggaggtggacagaatgccaaggaactctcagtaagcgccaccctttgataagcgcacatggccgccactactagttcctttgcttgctccgagcgatccactcacagaccacagctgctgcggctcttgctgcactgtaatgtatgtgctgctttacggggcgcgctatttatagagggagtggagctagggttgcggcttttgtgggattccatggaggggggagagggatgagggatgggcatgcagatcagatggatgggaattgtgcttttcttggtctccgtgtgtgagatctgaaggattcgatatgagacgatggcttcaagcagatctacctgtttctctctccccatgcctatagatctactagtggaggtgctacttctg

SEQ ID NO: 123412 - DNA, 106 bp, Zea Mays
ctattatttgaaggatacttttacctggtattgtgcgaagagcagggcttcctcttcgccggcagcctcgccgggggagcggacaggcacagcctcgggtataagc

SEQ ID NO: 123413 - DNA, 1131 bp, Zea Mays
atggccaaccggcggacgggccccctatccgtgctggtggccaccgtgtgcctgctcgtgctcgtggcaacgaacgcggaggccagcaggcactcgcggcttgtccccgcggcgttcgtgttcggcgactccacggtggacgtgggcaacaacaactgcctcaacgtcaccgccgcggccagagccaactacccgcagtacggcatcgacttccccgggtccaagccgaccgggcggttcagtaacggcttcaacacggcagacctgctagctcgaggcctcggcttcaccaagagcccgccggcttacctctccctgtcggagaagggcatccggtctcacatgtgcaagggcatcagcttcgcgtcggcagggtccgggctcttggactcgaccggcagagtactgtttggcgaggtgatccccatgtccgtccagctggagcacttctcgggggttgttgaccgcatggtcaagctctcgggtcagaggaagaccgccgctctcctccgcaagtccatctttttcatcagcaccggcagcaacgacatgttcgagtactccgcgtcgtcccgtgccgacgacgacgacgacgaagcgttcttgggtgccctggtcgatgcctacaagcactacatcatgtcgctgtacgaaatgggcgcgaggaagttcagcgtcatcagcatcccgccgctggggtgcatcccgtcgcagaggctgcgccggctgaagcagctgggaacgcagggctgcttcgacccgctcaacgacctgtcgctcagctcctacccgatgctcgcggggatgctgcagcagctcagcgaccagctgcccggcatggcctactccctcgccgacgcctacgcgatggtctccttcgtcttccaaaacccgcggaccgaggcctggaacttcacggacctggaggccgcgtgctgcggcggtggcccgttcggggcggcgctcgcgtgcaacgagacggcgccggtgtgcgccgaccgcgacgagtacctgttctgggacgccaaccatccctcgcaggccgtctcggccatcgccgcgcagacgatcttcgccggcaaccagaccttcgtcaaccccgtcaacgtcagggagctcgcgatgctgtga

SEQ ID NO: 123414 - DNA, 1412 bp, Zea Mays
aaaaaaaattgaacccataaattactagtagtacgtagcagctctaccaatgaatctgccttgtacatgcacaatcacaagctggagaattgtgctgggaacatgtccatctcctggcggtgctaaaaaaactaaaaagtgtttcgttcaactccatcagccgtgaacatgggcttcaagcgcagccccccgccgttcctcgccgtggccaacaagaccaacaggcaggtcttccgaggtctcctgggagtgaacttcgcctctgcaggatcaggcatcctcgacacgacggggagctccatcatcccgctgagcaagcaggtggagcagttcgcctccgtgcggcgcaacatctcgtcgcgcgtcggcaacgggtctgctgctgccgacgccctgctgtcgcggtccctgttcctcgtcagcaccggcggcaacgacctgttcgccttcttcgcgcggaacagcacgccgtcggacgccgacaagcggcggttcgtcgccaacctcgtcgcgctgtaccagaaccatgtgaaggctctgtacgtgctcggggctcggaagttcgccgtgatcgacgtcccgccggtcgggtgctgcccctacccgaggagcctgcacccgctgggcgcctgcatcgacgtgctcaacgagctggcgcgcgggttcaacgagggcgtcagggcggccatgcacggcctcggcgtgagcttccaggggctcaggtactccgtcgggagctcccacgccgtcgtgcagagcatcatgaagcaccctcaaaggctggggttcaaggacgtgacgaacgcgtgctgcgggtcgggccggttcaacggcaagtccgggtgcacgcccaacgcgacgctgtgcgacaaccgacaccagtacctgttctgggacctgctgcaccccacgcacgccgcctccaagatcgccgccgccgccatctacaacggctcgctccacttcgccgcgccgatgaacttcaggcagctggccgaagacgaccggtgctagctagctagcacagctagagctagcacgaggacgtagggacgtgtctctgttctctgctgcggactgtggtgaatatggtcgttggtgtgtagaggacgacggatgcgtgcatggctgctgtgttcgctgtatgtttctcgaccgtggtttggtttagatgatgatgaccgacgccgccggcgtagtttggactgtgaacgaatttacatcatgctgctgcagaggtacgggtgtaccgtgtacgtgacatcgtctacacctctcctggacaactttaactgaatctttttttacgcgtcctcgactaaaaattccggagagcgcgcccagaaatacctggtgtaggagccagtgagagcgtcacgctcacgccctttggatccgagcgcaggctctaa

SEQ ID NO: 123415 - DNA, 1676 bp, Zea Mays
ccgtgccgatccatctcggctgaccctttctttcccaaagccgagcagcgaccagcgaccagcgagggtgccactcaccgcccgccccccagtaccccactcactagctagctagctagctgcgcactacgagtccggcgatcacagcccggcaggccggccatggccaccgtgcccgtcctagtcgtcctgcatgttctgctactcgctgctgcggccgcctgcgccgcggcgggggggagtagcagcaaggtgccggcgctctacgtgttcggcgactccacggcggacgtgggcacgaacaactacttgccgggcggcgccgaagtgccgcgtgccaacttcccccacaacggcgtcgacttccccacggcgcgccccaccggcaggttcagcaacgggtacaacggcgtcgacttcttggccgtgaacatgggcttcaagcgcagccccccgccgttcctcgccgtggccaacaagaccaacaggcaggtcttccgaggtctcctgggagtgaacttcgcctctgcaggatcaggcatcctcgacacgacggggagctccatcatcccgctgagcaagcaggtggagcagttcgcctccgtgcggcgcaacatctcgtcgcgcgtcggcaacgggtctgctgctgccgacgccctgctgtcgcggtccctgttcctcgtcagcaccggcggcaacgacctgttcgccttcttcgcgcggaacagcacgccgtcggacgccgacaagcggcggttcgtcgccaacctcgtcgcgctgtaccagaaccatgtgaaggctctgtacgtgctcggggctcggaagttcgccgtgatcgacgtcccgccggtcgggtgctgcccctacccgaggagcctgcacccgctgggcgcctgcatcgacgtgctcaacgagctggcgcgcgggttcaacgagggcgtcagggcggccatgcacggcctcggcgtgagcttccaggggctcaggtactccgtcgggagctcccacgccgtcgtgcagagcatcatgaagcaccctcaaaggctggggttcaaggacgtgacgaacgcgtgctgcgggtcgggccggttcaacggcaagtccgggtgcacgcccaacgcgacgctgtgcgacaaccgacaccagtacctgttctgggacctgctgcaccccacgcacgccgcctccaagatcgccgccgccgccatctacaacggctcgctccacttcgccgcgccgatgaacttcaggcagctggccgaagacgaccggtgctagctagctagcacagctagagctagcacgaggacgtagggacgtgtctctgttctctgctgcggactgtggtgaatatggtcgttggtgtgtagaggacgacggatgcgtgcatggctgctgtgttcgctgtatgtttctcgaccgtggtttggtttagatgatgatgaccgacgccgccggcgtagtttggactgtgaacgaatttacatcatgctgctgcagaggtacgggtgtaccgtgtacgtgacatcgtctacacctctcctggacaactttaactgaatctttttttacgcgtcctcgactaaaaattccggagagcgcgcccagaaatacctggtgtaggagccagtgagagcgtcacgctcacgccctttggatccgagcgcaggctctaa

SEQ ID NO: 123416 - DNA, 1356 bp, Zea Mays
ctcccgtcccgacgccgtccacagcagcagcagtaccgaacctcgaggcaccagccacgtcggaaccaggccgccccacctggtctgtttagttggaaagccatctgtactgtacgtttttcgccgatcatggaggatgagaggaacacccagcagcaccagggcggtgagcaggcccaggaccaggagaacgaggtgaaggacaggggactcctggacagccttctcggcaggaacaagcacgacgaccaggagaagaagaaccagcaggaggaggaggagctcgcgaccggcatggagaaggtcacggtggctgagcccgaccacaaggaggagggacacgaggccgccgagaagaaggacagccttctcgccaagctgcaccgcaccagctccagttccagctcgtcgagcgacgacgaggaagaggaggtgatcgatgagaacggcgaaattgtcaagaggaagaagaagggccttaaggagaaggtcaaggagaagctggcggcccacaaggcccacgatgagggcgaccaccaccagccgggcgtacctgccccggcgcccgcaccgcccgtggcggtggacacgcatgctcaccaccaggagggagagcacaagccgcacttcccggcgccggcgcctcccccgcacgtggagacgcaccaccccgtcgtcgtccacaagatcgaggacgacgacacgaagactcagaccccaccacaggcaccggaggaggagaagaaaggcctgctggacaagatcaaggagaagctacccggtggccacaagaagccggaagacgctgctgccgccgccgccgcgccggccgtccacgcgccaccgccgccggcgccccacgccgaggtcgacgtcagcagcccggatggcaagaagggcttgctgggcaagatcatggacaagatacccggctaccacaagagctcgggtgaagaagaccgcaaggacgccgccggcgagcacaagaccagctcctaaggtcgcagcgtgtgcgtgtccgtcgtacgttctggccggccgggccttgggcgcgcgatcagaagcgttgcgttggcgtgtgtgtgcttctggtttgctttaattttaccaagtttgtttcaaggtggatcgcgtggtcaaggtccgtgtgctttaaagacccaccggcactggcagtgagtgttgctgcttgtgtaggctttggtacgtatgggctttatttgcttctggatgttgtgtactacttgggtttgttgaattattatgagcagttgcgtattgtaattcagctgggctacctggacattgttatgtattaataaatgctttgctttcttctaaagatctttaagtgct

SEQ ID NO: 123417 - DNA, 748 bp, Zea Mays
ctcccgtcccgacgccgtccacagcagcagcagtaccgaacctcgaggcaccagccacgtcggaaccaggccgccccacctggtctgtttagttggaaagccatctgtactgtacgtttttcgccgatcatggaggatgagaggaacacccagcagcaccagggcggtgagcaggcccaggaccaggagaacgaggtgaaggacaggggactcctggacagccttctcggcaggaacaagcacgacgaccaggagaagaagaaccagcaggaggaggaggagctcgcgaccggcatggagaaggtcacggtggctgagcccgaccacaaggaggagggacacgaggccgccgagaagaaggacagccttctcgccaagctgcaccgcaccagctccagttccagctcggtgagttcgtcgtaaaacatgatctgctgctagctagtttaattgactccgccttcggatcagtaagctaataaaccggcttctcactgcgatcgtggtgcctgcgcgcatgcagtcgagcgacgacgaggaagaggaggtgatcgatgagaacggcgaaattgtcaagaggaagaagaagggccttaaggagaaggtcaaggagaagctggcggcccacaaggcccacgatgagggcgaccaccaccagccgggcgtacctgccccggcgcccgcaccgcccgtggcggtggacacgcatgctcaccaccaggagggagagcacaagccgcacttcccg

SEQ ID NO: 123418 - DNA, 1022 bp, Zea Mays
tttttcccaattcccaccacttgagcagaagctgcacaaccaagagccaacagagcaacgcccaggcacacacgacacgaaccaggcagctgcggagggaggaaccctagcggaacaggtgacggcggcgcgctaccggtgacgggggatacggcggcatcgtcccctcctccatccccggcgcggcggcgccagcagccggcctgcaggctgtttgaagagctcgccatttaatctcaatggaagccaagtttttccgtttcctgaagctcgttggggtcggcttcaaagcgaggtcagagagccaaggccgtgagttgttccttaaactgggcttcagccatgaggtgcagttcaccgctcctccagctgtccgtgtcttctgcttcaaacccaacataatctgctgcaccggcatcgataaggacagggtgcaccagttcgccggcgccatccggagctctaaggctccagaggtgtacaaggggaaggggatcctgtacattgacgaggttatcaagctgaagcccggaaagaagcgaaaaaataagtgacgatccgaaggcgttacaactttgtctctgtcttttaaccccatgcttcgcatttgtagtgatctggatctggggtctgctgtgttgtgttgtgtacttgcgttgtgctacacagatcaccattatcttacctttacctcagctgcatgtaggaccatgagtgggaataagttaccagtttgttgatatgagctggaacgttgctttgcgaattggattggattaccgagtgggatgttttgtttcaaacttgaagtctttcaatagattgttgcaaatcaagtgtgaactgtgaacatgacccgagaactgaagctaggactgcttgggcacccaatacccaaatttaaaccattatccatcttattagatcgtatagataatttctatgtatatatctggccaaactatcctgtacggctgtacaaagtagccgctcatgaaaattgtactccagctgtttcaaaa

SEQ ID NO: 123419 - DNA, 1589 bp, Zea Mays
gtctgccaggtaggacccgccggaacggatcccctgcttcttctaccgaaaatccgaaatcggcgccggtgaccttcccgtggcccttgtacaaaactgacccccgtcggagcaccgccatcggatgcgacggagacggcgtcaatggcgtcctcatctgctgtcgagcccagtttccgcctctctgatcgagagaggaggtcatcgctgggactcagattcacggtgctcctgatgcacgtcatgttcgttggcgctgtcttcatcctcgatccgactctcgactggcgaatccacgaggagccgtggtatatagggttgtatggagtgctggttctgctcacgctagtgcaatacttctacacagctggctcatctccagggtatgttattgatgtaatgagagctggttccatgatgcatgcaaccttcgtcaacactgctgctctttcaaagcagtcaaattcaagaaatggaaacacaaattctccaacgagtcatgctcaactacagaaacttagcgcgatgactcctacatcatgggcacagatggttgtggatctttatcctccagggtcaaacagcagggattggacttgcactcactgcagggttgttcagccacctcgtactcggcactgccatgactgtgataaatgcgtccttcaatttgatcatcactgcatatggcttggaacatgcattggcaaaaagaaccattgtcgtttttggtggtacatatctgaagaaacaatcttgtgtatctggactgctgttctctacattgagtcattgcgtttagatgtcgacaaggcctggtggaaggattttgtcggtgtgatcctgttggcagtgcttatctttatcctgatattcctactactattgtggttgtttcattcgtacattgctgtaacaaatcaaacaacctacgaagttgccagaaggaagcgaatattctacctaaggggagtacctgaaagagtccacccattcagtagaggcatatgcagaaatctctatgacttctgctgttctagccagaagggatatattctggaagctgtgcccccaagggaggagctggaagctagagctgctcgttacacgtgccgagacgtcatttgctgccgttgctgctgatagctgtactaccatagcattgtgcccatatagccagttccactgttctttgttcaaacctttcgttaatggaagcaaattttagtgacctgcggccgttagtgaactctcggagttcactatttgtgcatatgtcatttaaacagtgagaaaaatgtgtgccctttggtccagctgttcacagtttgtctgtaaaattctgtgtggccttgcatccaaataggttttcaggacaggtagaattgatctgcacattcgaggtctggttggtaatttcggaatttagtctaccgttttaaagcctttcttatttgtgttactagcgaaatattttatttatcttgataggtttttgtaacgttgtactgatacatcatgtggtactatttgcataatttgttgtttcggcattttagatgatgaatatagctgcaggctgtaaagca

SEQ ID NO: 123420 - DNA, 1308 bp, Zea Mays
gtctgccaggtaggacccgccggaacggatcccctgcttcttctaccgaaaatccgaaatcggcgccggtgaccttcccgtggcccttgtacaaaactgacccccgtcggagcaccgccatcggatgcgacggagacggcgtcaatggcgtcctcatctgctgtcgagcccagtttccgcctctctgatcgagagaggaggtcatcgctgggactcagattcacggtgctcctgatgcacgtcatgttcgttggcgctgtcttcatcctcgatccgactctcgactggcgaatccacgaggagccgtggtatatagggttgtatggagtgctggttctgctcacgctagtgcaatacttctacacagctggctcatctccagggtatgttattgatgtaatgagagctggttccatgatgcattggcaaaaagaaccattgtcgtttttggtggtacatatctgaagaaacaatcttgtgtatctggactgctgttctctacattgagtcattgcgtttagatgtcgacaaggcctggtggaaggattttgtcggtgtgatcctgttggcagtgcttatctttatcctgatattcctactactattgtggttgtttcattcgtacattgctgtaacaaatcaaacaacctacgaagttgccagaaggaagcgaatattctacctaaggggagtacctgaaagagtccacccattcagtagaggcatatgcagaaatctctatgacttctgctgttctagccagaagggatatattctggaagctgtgcccccaagggaggagctggaagctagagctgctcgttacacgtgccgagacgtcatttgctgccgttgctgctgatagctgtactaccatagcattgtgcccatatagccagttccactgttctttgttcaaacctttcgttaatggaagcaaattttagtgacctgcggccgttagtgaactctcggagttcactatttgtgcatatgtcatttaaacagtgagaaaaatgtgtgccctttggtccagctgttcacagtttgtctgtaaaattctgtgtggccttgcatccaaataggttttcaggacaggtagaattgatctgcacattcgaggtctggttggtaatttcggaatttagtctaccgttttaaagcctttcttatttgtgttactagcgaaatattttatttatcttgataggtttttgtaacgttgtactgatacatcatgtggtactatttgcataatttgttgtttcggcattttagatgatgaatatagctgcaggctgtaaagca

SEQ ID NO: 123421 - DNA, 1190 bp, Zea Mays
ccaagtgtgttaaaaaactgtgtaaaaatctgacaatgaatttgtggtatatttgattatatttctcagtgtaattagagctactagaagatttgctcttcacatcattgcttgccagtggtttatttagcaatttataacactcaaagatccatttatgatcatgaaggttatttgtgccttacgaatcctctaatacttaatatgctgatcggttgatgagtaactgattagcaattcagtgggacctctctcttgcaaagtaaacttctgctattttatttgttcagaactgttcctccaaaatccaatggtgtgctaatttcaactatcatgtctttaaaaaatccccatatcttgttgcttctgataatcagagttaaagttttgctaccaacatctttttgcagccacctcgtactcggcactgccatgactgtgataaatgcgtccttcaatttgatcatcactgcatatggcttggaacatgcattggcaaaaagaaccattgtcgtttttggtggtacatatctgaagaaacaatcttgtgtatctggactgctgttctctacattgagtcattgcgtttagatgtcgacaaggcctggtggaaggattttgtcggtgtgatcctgttggcagtgcttatctttatcctgatattcctactactattgtggttgtttcattcgtacattgctgtaacaaatcaaacaacctacgaagttgccagaaggaagcgaatattctacctaaggtatatcgctgtaggagcgacgcagtttgtgactggtatatttttgtattgttaagatacgccaaccattgtggttgtgtactgcttgtaggggagtacctgaaagagtccacccattcagtagaggcatatgcagaaatctctatgacttctgctgttctagccagaagggatatattctggaagctgtgcccccaagggaggagctggaagctagagctgctcgttacacgtgccgagacgtcatttgctgccgttgctgctgatagctgtactaccatagcattgtgcccatatagccagttccactgttctttgttcaaacctttcgttaatggaagcaaattttagtgacctgcggccgttagtgaactctcggagttcactatttgtgcatatgtcatttaaacagtgagaaaaatgtgtgcccttt

SEQ ID NO: 123422 - DNA, 1397 bp, Zea Mays
gtctgccaggtaggacccgccggaacggatcccctgcttcttctaccgaaaatccgaaatcggcgccggtgaccttcccgtggcccttgtacaaaactgacccccgtcggagcaccgccatcggatgcgacggagacggcgtcaatggcgtcctcatctgctgtcgagcccagtttccgcctctctgatcgagagaggaggtcatcgctgggactcagattcacggtgctcctgatgcacgtcatgttcgttggcgctgtcttcatcctcgatccgactctcgactggcgaatccacgaggagccgtggtatatagggttgtatggagtgctggttctgctcacgctagtgcaatacttctacacagctggctcatctccagggtatgttattgatgtaatgagagctggttccatgatgcatgcaaccttcgtcaacactgctgctctttcaaatcaaattcaagaaatggaaacacaaattctccaacgagtcatgctcaactacagaaacttagcgcgatgactcctacatcatgggcacagatggttgtggatctttatcctccagggtcaaacagcagggattggacttgcactcactgcagggttgttcagccacctcgtactcggcactgccatgactgtgataaatgcgtccttcaatttgatcatcactgcatatggcttggaacatgcattggcaaaaagaaccattgtcgtttttggtggtacatatctgaagaaacaatcttgtgtatctggactgctgttctctacattgagtcattgcgtttagatgtcgacaaggcctggtggaaggattttgtcggtgtgatcctgttggcagtgcttatctttatcctgatattcctactactattgtggttgtttcattcgtacattgctgtaacaaatcaaacaacctacgaagttgccagaaggaagcgaatattctacctaaggtatatcgctgtaggagcgacgcagtttgtgactggtatatttttgtattgttaagatacgccaaccattgtggttgtgtactgcttgtaggggagtacctgaaagagtccacccattcagtagaggcatatgcagaaatctctatgacttctgctgttctagccagaagggatatattctggaagctgtgcccccaagggaggagctggaagctagagctgctcgttacacgtgccgagacgtcatttgctgccgttgctgctgatagctgtactaccatagcattgtgcccatatagccagttccactgttctttgttcaaacctttcgttaatggaagcaaattttagtgacctgcggccgttagtgaactctcggagttcactatttgtgcatatgtcatttaaacagtgagaaaaatgtgtgcccttt

SEQ ID NO: 123423 - DNA, 1036 bp, Zea Mays
gcatatggaagttgacacttttggatccagccctactaattcaggcaaggaaaatggttgtgttgctccacatacacctgtcctggagttcacaagaaccaacaaaaatacagagctaaagctgaagggtcatgcaagaaatattcatttcctcttctacttggactctgatacagctttgtctgtagctgctgaaatggttgaacaattggagttagcagactgcgatgttaccttcattgctgattttattgatcttttgatagtgaatcttattccgggttggagacctgtaaatgatgcggcaacaaactcgtatacgcaatctgaaagtgaacttgcaatcacttcccataacaatctatcgaagttggtgcctgattatgcattaattgatggtatgatgcatccaaaagatgtgaatgtatcaactggttttcttgattctgtatcaagtgcaactaatataggaggatcaccatgctctgaaggttcggtcatttctgtacagcgtgctgagagtttcaaaagtgtgagtgactatgagcctgaggattatggtactatggactgtggtgggtacaaagagggaatcagtaaagaaaattgcagccatgttgtagatgatggatcgaggttaattttccatacagatcaagatcacttctcttggagttggccaatggccagcagtgcttcgatcatctactcctgataatcaggatgtgctgaatggggagcttgtcttgattgaacctcagtttggttgagatgaattgacaagggtgcgagaagaggctatggaaggagctcgaaataagtgggttgccagataaatgatgtttttgttcaaatctggcatttcatctgaacaatcataagctatgttcgatttatgttagaagtgtaagaaactatactgatcttttttagttaaaacataatatataggtagattgtcgtgaaatcttgtttttttgcaatcgctgacaatcagactaataaaaagtcgtgaaaattatataaaaagttaaaa

SEQ ID NO: 123424 - DNA, 2644 bp, Zea Mays
gaacatccccacgcaaggcccaagcgcccaactatcatttctccctctctcccacctttccctccccaccaccacctacctacctctttattcgccgtcgcctaccacctccccctcctctccgtgcagacctccgctccgcaccaccaatccgtcgtaaccctagcccagcctggtctcggctggccccgctccgttcatgtgcggcaccaccgcctccccgtgttcgtagtagccgccgcggggaatttccctcccatgggttccgcatacgcccctgagaggacgccgatcgagggagaatgaggtgctgcatctgccgcgtatcctccgccgggtgccgggccatgggcgttgcgggacgggcgaacccgacgtcgtcgctgcgcagccgacgctgcctccgcatgcggccgtcgtacgccccgttctccgagcccttcactgaacgcccggcacccgccgccccgtcctccccttcatcccccgctgctgcgcctagggcgtaggagccgcgggcggaccgccgatatctccgtcgatctcgctggctcctctctctctctgcttcctctctctctccctctcgctcgtagagtcagttgattgtcggggctgatccggaatggaggtgtttggttgtggggatggggtggtcgatgctgaattcgcggaagtagatccaactgggcgatacatgcgctataatttgattttggggaggggagctttcaagactgtttacaaggcatttgatgaggtcgaaggtattgaagttgcatggaatcaaatcaacgtagatgaggtgatgcagtgtccagataatctagacaggctctacagagaagttcatcttttgaagtctctcaagcatggaaatgttatgaagttttattattcgtggattgatgaccagaataagactattaatgtcatcacagagctgttcacgtctggaagtctcaggctttaccgtcagaaacatccacatgttaacttgaaggcaataaagaattgggcaaggcagattcttcatgggttggattacctgcatagccaccaacctccaattatccatagagacttgaagtgtgataatatttttgttaacggaaaccatggggaagttaagattggagatcttggactagctacggtaatgcaaacacctagggctaggagtgttattggtactccagaattcatggcacctgaactttatgatgaaagttatgatgaactagttgatatatactcatttggaatgtgcttgttggagatctttactcttgaatatccatacagtgaatgtacaaatccagctcagatttttaaaaaagtatccacaggtgttaaacctgctgcattggctaagatttctgatcctcaagtaaagcagttcattgagaaatgtttagttcctgcttctgagaggtcgtctgccaaagaactcttgcaagacccatttctttgtcctgacaatgcacatgattctgctggcactaagtttacatctccagcacctaataaaacagtagatatggtgtctttgcatatggaagttgacacttttggatccagccctactaattcaggcaaggaaaatggttgtgttgctccacatacacctgtcctggagttcacaagaaccaacaaaaatacagagctaaagctgaagggtgagaaacttgataacaactctgtctcactggttttgcgaatagctgatttgtctggtcatgcaagaaatattcatttcctcttctacttggactctgatacagctttgtctgtagctgctgaaatggttgaacaattggagttagcagactgcgatgttaccttcattgctgattttattgatcttttgatagtgaatcttattccgggttggagacctgtaaatgatgcggcaacaaactcgtatacgcaatctgaaagtgaacttgcaatcacttcccataacaatctatcgaagttggtgcctgattatgcattaattgatggtatgatgcatccaaaagatgtgaatgtatcaactggttttcttgattctgtatcaagtgcaactaatataggaggatcaccatgctctgaaggttcggtcatttctgtacagcgtgctgagagtttcaaaagtgtgagtgactatgagcctgaggattatggtactatggactgtggtgggtacaaagagggaatcagtaaagaaaattgcagccatgttgtagatgatggatcgaggttaattttccatacagatcaagatcacttctcttggagttggccaatggccagcagtgcttcgatcatctactcctgataatcaggatgtgctgaatggggagcttgtcttgattgaacctcagtttggttgagatgaattgacaagggtgcgagaagaggctatggaaggagctcgaaataagtgggttgccagataaatgatgtttttgttcaaatctggcatttcatctgaacaatcataagctatgttcgatttatgttagaagtgtaagaaactatactgatcttttttagttaaaacataatatataggtagattgtcgtgaaatcttgtttttttgcaatcgctgacaatcagactaataaaaagtcgtgaaaattatataaaaagttaaaa

SEQ ID NO: 123425 - DNA, 813 bp, Zea Mays
atggttctgcagccacgccgaaatcctcctctgccccaaaatctcgtcggcctggctatgattaaagaactgccagggagaccgaggaaggaagaaggagttaaggagaaaagcagcatcgggaacaacaccgctgttctcgtccaccccctcgacgacactaagactagtgcgaaggacaaggccagcgtgatgtatgtgaaggacaaggaggggtgggtgctgattcactccatgacgatctccggctcggtgggaggacaagggagcttcaagttcagagtgttgcattgggatagagttatgtgctattcttctgtaacgtctttcttttgcttgtatgtccagcagaccgaagtaattgcagcagttgcagctgagggtttgtctcccgaagaagcaaaaattcaagcagagaatgctgctcatctctcagtagcactagcagagaatgcaatagttattctgatgcttgtggaagatcatctgagatcacaagctcaacatttttgcacatcccttacaggtgatagcatcacatcgtccacatcaatgacttcattggttgcgagtcggtcaaattcttttagcacagctggtaaagaacccatggctgctggggtctcaagacgggcatctttgtccagtgatgcttgtggccttcctctggatgtctggacaccagtgacacatctccaagctggtgcaagatatgaggatgccaaattcttttataagatggatacacaaagagattttctgaattctgaggccaacttagtggtattatttttcatgaaaaacttggcatga

SEQ ID NO: 123426 - DNA, 2522 bp, Zea Mays
atggatagacagaccatccgcggcgccgaggcagggacccgggcaagcatgagcgatcccggtgctttccccaataaatcctgcgcttttcgggaaagaaccctgaaccccagcgccgagaggaagaggagggatctcgtcgacacgccgtcgggaacgcgccccccgttccctcgccgctgccccgacacggtgccattctcgcccgaatcggcgaatccctcccaccgcttcgcctataaatctccccctctatggccctaatcctcccgtacaacagtgcccagtgcccaccgcggcagatcttcgatgcctccaagggcgatggaggaggacggcggctccggcagcgacagcatggagttcgtcgcgggagcggagactggcgctggtgtaggcacaagcgccggcaggaaccgcggtgtgggtgcaggaccagcgcaggcggtggcggcggcacgaagctgccgcatgtgctgcaaaagagtttcggcgaggtgcaagggattctggagcacaaccgcgtcctgatttaggagatcagctagaaccaggagacgcgcgacgcggacggcctcagccgcaacgtggcgctaatctgggagctcaacactaatatcgcccgcgtcgtggacatctacggcgacatgtcaggctccttcgcccgcgccgtcgccaccaagaaagacgccgcaggctacaagtcgggccctaaggggccatggcatccgagttggcgttggacggcggctgcgggatggggaacagcgaccctccgtcggctgtgagtgagcccatgagaccacccagagccccgccctgcaccgccccaacgaccgtggtcaccgcggcctcgatgtggatgggctgcttcgccatccatgcacggaacctggcctcaatcgcttttacgcggccgctccactcctctagagggttactaccgccgcgcaatccgcgagccatcggcactgacggcgaggtcttcaatgccacgaccgaattcccccttcccttgccgtccgccatctccttgcaacctcgcgtctgccactccctctcgagtctcgatggccactgtgccactcttcattatcccctcggaatcttcttcgcttaaccccttagcaaatcatcatgcggtcctcctcgcacggccggcccaacgtttcgtttcattaggcccagctagacggggggagcacgcggagagaagggcggggcagtctacactaacgtcttaatagttagtagagatttatttaaacatgatccaaaatcatatattcccctccaaaggaactcaaccgtggaacataacaaggtaaacacacaccagtagtcagcgcaccttcggatcgagccaaaccaatactgaactagacatgtggcgatgccatcgttgtcagtatggcggatcccacgatgcacctcacaaagatttgaatgcgtggcggcacgccactggagttggtatgattcaaagtgggactgtgtcggtccaaaacgagaaccctggagctgatatgacttagtgtgtgtgtatatataatatactaggtgtgtgcccgtgcgttgcaacgggagtacgctgggatgagcatcgacacatatctgatcgaatcttatatttccttggggtctggagaaagttcgctcggaagccaaacatgttaagacctgagcatgtgttacccttgtgcctcatcagcacactgttccgcgcttgtatgagtctaatttgcatgcctcgggcatagcctctcaccatctattcactataatatatagaatccgtgtgataaacattatcaatatcgcacaaactattttaaagagtcaatatagaatttttgataataggcaaatatgtcgacaatcgtacattaatctaatcctttttagcgatattgataagtctttgttgtatgtttgcagggttgacatagcgacatgaattgtcctcgtaacttaacagttcaatcacaaagttacttcgaaaaatctttgcatcctacacacaaagacataagagaacaaaacgtcaaatttatattatgtacctgaaatgtatgtttgaacatgaaacaaacgtactccactcaccctatcaaatttcattcgtctatcatttccccacatgaccatagattgtagaacgaagtagctggtattaacactatagaataatgtttgaccaactatattatatacatggttatcatagaaaaaatttaagctgttgagaacttggtattgagaaaatacccttttaagtcaattggaacaccagaccgaattgtatgttcccacttaaaaatatcctctacccatccagaatgtttcttgttgtaagcaatcttatatttctttgaggccctgataattgcttccgcaaacctcttgtatggcatgtgtttacaccaatcttagccattgatgcttcgtcccaaataatgagcgacgctttctgtagcaaagagcgacccatgctaacaaatagtcgagttctagtgatgact

SEQ ID NO: 123427 - DNA, 1848 bp, Zea Mays
atggatagacagaccatccgcggcgccgaggcagggacccgggcaagcatgagcgatcccggtgctttccccaataaatcctgcgcttttcgggaaagaaccctgaaccccagcgccgagaggaagaggagggatctcgtcgacacgccgtcgggaacgcgccccccgttccctcgccgctgccccgacacggtgccattctcgcccgaatcggcgaatccctcccaccgcttcgcctataaatctccccctctatggccctaatcctcccgtacaacagtgcccagtgcccaccgcggcagatcttcgatgcctccaagggcgatggaggaggacggcggctccggcagcgacagcatggagttcgtcgcgggagcggagactggcgctggtgtaggcacaagcgccggcaggaaccgcggtgtgggtgcaggaccagcgcaggcggtggcggcggcacgaagctgccgcatgtgctgcaaaagagtttcggcgaggtgcaagggattctggagcacaaccgcgtcctgatttaggagatcagctagaaccaggagacgcgcgacgcggacggcctcagccgcaacgtggcgctaatctgggagctcaacactaatatcgcccgcgtcgtggacatctacggcgacatgtcaggctccttcgcccgcgccgtcgccaccaagaaagacgccgcaggctacaagtcgggccctaaggggccatggcatccgagttggcgttggacggcggctgcgggatggggaacagcgaccctccgtcggctgtgagtgagcccatgagaccacccagagccccgccctgcaccgccccaacgaccgtggtcaccgcggcctcgatgtggatgggctgcttcgccatccatgcacggaacctggcctcaatcgcttttacgcggccgctccactcctctagagggttactaccgccgcgcaatccgcgagccatcggcactgacggcgaggtcttcaatgccacgaccgaattcccccttcccttgccgtccgccatctccttgcaacctcgcgtctgccactccctctcgagtctcgatggccactgtgccactcttcattatcccctcggaatcttcttcgcttaaccccttagcaaatcatcatgcggtcctcctcgcacggccggcccaacgtttcgtttcattaggcccagctagacggggggagcacgcggagagaagggcggggcagtctacactaacgtcttaatagttagtagagatttatttaaacatgatccaaaatcatatattcccctccaaaggaactcaaccgtggaacataacaaggtaaacacacaccagtagtcagcgcaccttcggatcgagccaaaccaatactgaactagacatgtggcgatgccatcgttgtcagtatggcggatcccacgatgcacctcacaaagatttgaatgcgtggcggcacgccactggagttggtatgattcaaagtgggactgtgtcggtccaaaacgagaaccctggagctgatatgacttagtgtgtgtgtatatataatatactaggtgtgtgcccgtgcgttgcaacgggagtacgctgggatgagcatcgacacatatctgatcgaatcttatatttccttggggtctggagaaagttcgctcggaagccaaacatgttaagacctgagcatgtgttacccttgtgcctcatcagcacactgttccgcgcttgtatgagtctaatttgcatgcctcgggcatagcctctcaccatctattcactataatatatagaatccgtgtgataaacattatcaatatcgcacaaactattttaaagagtcaatatag

SEQ ID NO: 123428 - DNA, 606 bp, Zea Mays
ggaactaggtgtaagcctaattccctttcacctagccgtgacgcacccggacccttccgcggggtctatgaggtccgcatcaaccgcccggcgcagcgcaacgcgctgagcccagtcgcgttcgcggagatcccacgcgccatgtctctgctggactgtgccccctcggcgcgcgccgtggtgctgtccgctgcggttccgcacttctgcgcgggcatcgagctcgggggccccggggacccgctgtccgccgcctccgcctccgccgatcccgtggccgccgcggaggggctccgccgcatggtcctcgacatgcaggcggcgctcacggccattgagcggtgccaaaagctcgtcgtcgcggcggtgcacggcgcctgcatcgacgacgacggcgacctcgtggccgcctgcgacatcaggtgctgctccagggacgcctccttcgtgctcaaggaggtggacatggccatcgtcgccgacctcggcgcgctgcagcgcctcccgcggatcgtcggctacggcaacgctgctgacctcgcgctcaccggacgcaagatcaccgccatgaaggctaaggagatggggttggtgaaagggaaatgt

SEQ ID NO: 123429 - DNA, 1367 bp, Zea Mays
atggatgcggcgcagtggcatcaggggccgctagggctaggcaagcccatggaggagatgctcatggctggaaacgccgcgaatccaaacccaccgccagctgctgcgccctcggcacccggggcccagacccagaggggtggtggcgctcctcctcccgctgcgggtgcggcagcgcctagggctggcgcgaccggaggggcggcgccggcgggcacggagcggcggccgcggccgcagaaggagaaggcgctcaactgcccgcggtgcaactccaccaacaccaagttctgctattacaacaactacagcctgcagcagccgcgctacttctgcaagacctgccgccgctactggaccgagggcggctcgctccgcaacgtcccggtgggcggcggctccaggaagaacaagcgcagctcgtcctcggccgcctcctccacctccgcggcgatgtccggcacggtctccgtgaagaaccccaagctggtgcacgagggcgcgcaccacgacctcaacctggctttccctcaccacaacaacggccgcgctctgcagccaccggagttcccgtcgtcgttcccgagcctggagagcagcagcgtgtgctaccccggacccgccatgctgggcaacggcgccgccggcaggggcatgggcgcgctctcggctatggagctgctcaggagcaccggctgctacgtccccctgcagcacgttcagctagggatgcccgccgagtacgcagcacccgcgggattcacgcttggcgagttccgcattcccccgccgccgccgccgcagtctcagagtgtgctcgggttctcgctggacacgcacggcacggggggttacagcgccggcgggttgcaggagagcgcggtgggcaggatgctcttccccttcgaggacttgaagccggcggtgaccacagctggcggcggtgcaagcaacgacggagctgatcatcgtcaaaacgaccacaggaaagatcaagctgcaggcgacggcagcagcgtcaccggtggccacgagactccagggttctggagcaatagcttgatcggaaatggcagcagcaatggtggtggaggcccttggtaaggcggcgcggcatgcatggctcatgcacgcgcgcgccgttgtcagcatgcggagatagggatagagtcatagagacaaggatccaagttatcaagagggtacggtggaggaggtgattagtgttcacatatatggcgtttgatttttctctggttgtttaatttttctcggatcttcgtgttcttgtgtgtaaatcgacttgggggggctaacacagcaggatatacagattgttaaggtggtgaaccggtgatttacagcta

SEQ ID NO: 123430 - DNA, 1395 bp, Zea Mays
ctcgctagatatttcggccagccgtggcaccacattctccagcggcaaggcaagtacaagcggcggaaccgtgcgtcatccacaccctcggcaggccgttgtgcgagccgatctacccgatggacgatctggcggcgctggcgcgcggcgaggggtggacggaggagcggcacgcgacgttcctcgaccgcctggagctctccttcgtccagcaggtgctcggcggcaccgacgtgcgccaggcgtcccgtaggctcggtgtccggccggcgccgcgggaagaaggctggcgcggccaggtcctgtccccgctcccgctcgaccgaccactacccgacagcgccgtggagtccaaccggtcgggcctggccgcagctcggcgacgcgaggcaaacgacgcgcgccgccagcccgtggacccagctgcaggttggtgaaggtgaagcctgtcgcacgcgcttgcctttggtattgcaaggtggaaatgtacgcgtccagtcacttgtttccgtgcataagtagcgttggacggcagatgtttcaagtggcaaaattccaaaaaaaaaaattctgaacagttgattgcaagccctgagctgtttatatcttctgaaacaggaagcgtttccgtctcgcgccaatgttgttcttgtaataatcagtatgacgctgactgtctagcagcttgacttgttagctctttgctacgatttcactgtagggtcttgcctaaataattcaaagatccatggatttataaaatgtggacgcctcctttattttagatcaatttaaaattttgaatccagctactgacatctttcctgtttgcttggtttgtagtttttttgtgacaaactcctgaacaaactagcaggtcagattcaggatgaactcaaacatagttcctatctatgaacataaggtccattcttttcttgttcttgtttgccgacgtggagtttgttggtggcattgttttcttgtttcttttctttttcatgtaaatagtctcttgggactatttgttcacattttcttctgtatgtcaacagaaagaggtactcccagtgccagtacgttaaaaaaaattcttcttgtatggggggatgttttgtatgcatttgttaatctctgactccatgtcatattcacatcgtggtttggtgatgtgttagttcatttacaatcaatacctggtatttttatagtttctgaatgcccggggagggggagggatttctcacgtagattgaattcaaagtaaaccttagttgcgtggttacatgaatataacgttgctagtctcaacctacagcctagacaagaagatgtgaaagattgacatgctttattcatcaatgtcacgtgttagaaaataaaatagacatagat

SEQ ID NO: 123431 - DNA, 1342 bp, Zea Mays
tgattttgctgtataatttgaaccttcgaacaagatgtttgacagatatgtgattttgatagactaagtaagatagagtctgttagtctgcatttgtcgttaagccacctacggaagtctaactactggtatattctgcatatttggctatatgtggactaacttggtggctagtttcttgtattttattatgcattgctcagattgcattgtttggcttcatatatgccagtgtacacattaatttttcattgattccaaaaaataaataattttttgtctataagcttaagctccatacttcatcacattgaattatctgctgcctgctgaattcatcacacatattgtttctatttcttaatcccatttaccggctattttttgttaatatttttaacatgtaaactaccaactatgtcctctttgccgtcttgcagtatagctaaacatctggagtctgctaacacaatgttctcatttgtgtggtggataattggattttattgggtatctgctggtggagaagttcttacccgtgatgcgcctcaactttactggctttgcatcgtatttttggcgtttgatgttttctttgtcgtcttctgtgtggctttggcctgcatcattggtattgctgtttgttgctgccttccttgtatcatagcaattttatatgcagtgtcggatcaggagggagcatctgaagatgacattcgtcaaattccaaaatacaaatttcggaagatggaagagcctgaaaagcagtctgttggtgtgcctggatcttctggtggaataatgatagaatgtggaaccaatcaacctattgaaaaagtacttgcagctgaagatgcggagtgctgcatttgcctctcagcttatgatgatggcgcagagctccgtgaactcccttgtggccaccattttcattgtgtttgcatcgataaatggctgcacatcaatgccacgtgccccctatgcaagtacaatgttcgaaaaaacagcagcagcagtggcagcgaagaagtataaatctctatacgagaatattgagaattcatacccaacagttctggcttctcgcagcaaattttttatcccataatcccatgagttcgcattcgtatctgtggcagtgtgatgaagaaaatgatccatgtaaattctcttgttcgtaatacggctatagcaataattctgtgtcaactttgctcgtgctgttctcggtgtgtttagatttttatagtatgtgtacttgttatagaatttctgtagagcagcttgtttgtgtagtctaatgttttataataatcatactagcagtacatgttcttgctca

SEQ ID NO: 123432 - DNA, 1826 bp, Zea Mays
ttcttttaattctcactttttcctatcttatgttgttacgcgagaacggaattatgttttataacttttttctcgaatgttaaaaagtagagacaatcccatatataccatcggaatttatacttatttttatgtgccattggccacatatatcatacacaaataatatcccttagattataaaatctgatgacatacaatttatttttacttaaaaaaatattgactcatacctcgtcatctctgctttggctcttcactgcttcccgagacccgagggtccaatttacgcgagggggagaaagaggctacacggaaccacgcgctcacggagtcacggctcatcttcggaccttccccagttccccgcgatatcgctagggtttccgcgatggcgacacttcgctccccgagcccccgcggagacgttctcctcgactcggcgccgctcctcggtggtgtcgggcggcgccgcgcgggcgcgctgcgccggccgtctctccggggcgcggcgcggctgctgcggcgtggcgggcgccgagcgatgcgggagccgtcactgctggtgcgggaggccgcggcggagcagctggaggaacggcaggcggattgggcctactcccgccccgtggtggcgctcgacttcctttggaacctcgccttcatcctcgtctccgccgtcgtgctcgtgctcagccaccacgagagcccctccatgccgcttcgtttctggatcgctgggtacaccgcccagtgcgtcgtccacatggtctgcgttgccatcgagtatcgtttgcgatacggccagctcggcgggtcgccaattcctgtcgacgaggagagcggaagtggtagtgcatcatcgtcctccagcgacgacgacagagagcacggctcccatagtcgaagtggtgactgcctcagtatagctaaacatctggagtctgctaacacaatgttctcatttgtgtggtggataattggattttattgggtatctgctggtggagaagttcttacccgtgatgcgcctcaactttactggctttgcatcgtatttttggcgtttgatgttttctttgtcgtcttctgtgtggctttggcctgcatcattggtattgctgtttgttgctgccttccttgtatcatagcaattttatatgcagtgtcggatcaggagggagcatctgaagatgacattcgtcaaattccaaaatacaaatttcggaagatggaagagcctgaaaagcagtctgttggtgtgcctggatcttctggtggaataatgatagaatgtggaaccaatcaacctattgaaaaagtacttgcagctgaagatgcggagtgctgcatttgcctctcagcttatgatgatggcgcagagctccgtgaactcccttgtggccaccattttcattgtgtttgcatcgataaatggctgcacatcaatgccacgtgccccctatgcaagtacaatgttcgaaaaaacagcagcagcagtggcagcgaagaagtataaatctctatacgagaatattgagaattcatacccaacagttctggcttctcgcagcaaattttttatcccataatcccatgagttcgcattcgtatctgtggcagtgtgatgaagaaaatgatccatgtaaattctcttgttcgtaatacggctatagcaataattctgtgtcaactttgctcgtgctgttctcggtgtgtttagatttttatagtatgtgtacttgttatagaatttctgtagagcagcttgtttgtgtagtctaatgttttataataatcatactagcagtacatgttcttgctca

SEQ ID NO: 123433 - DNA, 1833 bp, Zea Mays
ctggacattggaaaagcgagtactactctgctccgcttctttcagagacgttctttttgtgtcggaaattttgcgcaggtggcgagctggggcgcgtacctgctgtcgcgggacatcctggccatgtcgttcgcgccgcgggactctcacgaggcgcaggtgcagttcgcgctggagcgaggcgtgccggccatgatcggcgtgctcgcgtccaaccgcctcacctacccggcccgcgccttcgacatggcgcactgctcccgctgcctcatcccctggcaactctacgatggactgtacctgatcgaggtcgaccgggtgctgcgtcccggagggtactggatcctgtccgggccgccgatcaactggaacaagtactggaaggggtgggagcggaccaaggaggacctcaacgccgagcagcaggccatcgaggccgtcgccaggagcctctgctggaccaaggtcaaggaggccggcgacatcgccgtctggcagaagccctacaaccacgccggctgcaaggcctccaagtcgtcccggcccttctgctcgcgcaagaaccctgacgcggcatggtacgacaagatggaggcctgcataacgccgctgccggagatctccaaggccagcgacgtcgccggcggcgcggtgaagagatggccgcagcggctcacggccgtgccgcccagggtctcccgcggcactgtcaggggcgtcacggccaggtcgttcgcgcaggacacggagctgtggcggaggagggtccggcactacaagtcggtggccagccagctcgagcagaaggggcggtaccgcaacgtgctggacatgaacgcgcgcctgggcgggttcgccgcggcgctggcgctggccggcgacccgctgtgggtcatgaacatggtcccgaccgtggcgaacgcgaccacgctcggggccatctacgagcgcggcctcatcggaagctaccaggactggtgcgagggcatgtctacctacccgaggacctacgacctcatccatgcggattcggtgttcaccctgtacaaggacaggtgtgagatggaccgcatcctcctggagatggacaggatcctgaggcccaggggcacggtgatcgtcagggaagacgtggacatgctggtgaaggtcaagagcctggcggacgggatgaggtgggagagccagatcgtcgaccacgaagacggcccgctcgtcagggagaagatcctcctggtcgtcaagacgtactggactgcccaggaccaagaccagtagcaggaccggacttgtcaagcgaagttcagcaatgttgataagcatttttcttgcttcgaattgcattggatcgccatttctagctccttgagctagtagtgttctctgtttgtttgctgttccttttggactgtacttgctcagataggaaatttgtatcctaaggccttgttcggttattcccaatacacatggattggatgggattggaaaaaattcttaagaagtttgacttgtgtgggattcaaacccatccaatcccactcaatccacatggattgagagctaaccgaacaagccctaaggtgtaacagggggaaatggaagggcttaggtaaaacccctggcccctgcaaagtttttttttgttttccttcaattgcgaaattgtggcaagtggtaaatagaaagtcactgttgcgagtcatcccggataagcacagctgggttcgttctagcattacagttttgttgtatgcaatcccccccttcccttcagatcttatttatgtgctgtgtttgtgctggattcaaggtttcagatctatttatgat

SEQ ID NO: 123434 - DNA, 3179 bp, Zea Mays
gccagtagactagtagagtagtactctgcctttctggggtggctttgcgcggtaccgacgtaccgtcgcggtcggcagtaaaaaggaccccgttgcgttgagatgaaagattgacgagtacctgcggcagtgtacaaagagcacacagggtactgtacacggtttgattggcgcgggctggggtgtaccgccgctgcagccaggcggacccgacccacgtgcgccaccgccagccagccagcagcctgccccgtccccttgcctgccttgcccagtaggtgcgacgtcacggtggaaaccaaaaatctagcccgtactagatcttcttcgtatagccattgtttatacttttcgcctcggcgaatgtttccaaaccagcgccgcgccgcgctcctttttcgtttcctcgaaagggtcagccagccaagacagacaaacagaggaacgtgaggaagatgcggcatgtcacgtgacatgacacgagcgccgagattgggatggatggcgtcacgggctcaacaaatccattcaattccccccgtctaccctgccctggataggtggaatggggaaacccgacgactgatgcagtgtgtttagactctgtgctcgtgtcacacgcactctcgccaccgtgtctgtgccagtagtagtagtcgtagctccagctcagctattgtccctgctaatcacctcccgtaactgtcagcacccgtccaaatctactactcctacaatagtcctattatacaaaactcatcagctcatgcccaggagagcgcacgctcttaagcagcgggcggcagtggcacggagcacactccccagtccccagtcccccgctgggagcggcagccagcacgaggcaggagcagcgcgagggcaggcgccatgggggtccggtcggcggccacaaagctgcacatcccaccatccgccgcccgccgacccacgttcctgccattcgtggccgtcctcctcctctgctctgcctcctatctcatcggcgtctggcagcacggcggcttcgccactccatccgacaaacccgccgccgtctccaccgctacggccgtcgcctgcaccaacgtcgccgccgccccgaagaggaggacccggtccggcgccagctccccgtccctcgacttctccgcgcgccacgcggccgcggcggacgacgcgctcgacgctagcaccgccaccgccgcctcctcggccgcgccgcggaggtcgtcgtacccggcgtgccccgccaggtactccgagtacacgccgtgcgaggacgtggagcggtcgctgcggttcccgcgggaccgtctggtgtaccgcgagcggcactgcccggcgtcggagcgggagcggctgcggtgccttgtgcccgcgccgcccgggtaccgcaccccgttcccgtggcccgccagccgcgacgtcgcctggttcgccaacgcgccgcacaaggagctcaccgtcgagaaggcggtgcagaactggatccgcgtcgacggcgacaggctcaggttccccggcggcgggaccatgttccccaacggcgccgacgcctacatcgacgacattgccaagctcgtcccgctccacgacggctccatccgcaccgcgctcgacaccggatgcggggtggcgagctggggcgcgtacctgctgtcgcgggacatcctggccatgtcgttcgcgccgcgggactctcacgaggcgcaggtgcagttcgcgctggagcgaggcgtgccggccatgatcggcgtgctcgcgtccaaccgcctcacctacccggcccgcgccttcgacatggcgcactgctcccgctgcctcatcccctggcaactctacgatggactgtacctgatcgaggtcgaccgggtgctgcgtcccggagggtactggatcctgtccgggccgccgatcaactggaacaagtactggaaggggtgggagcggaccaaggaggacctcaacgccgagcagcaggccatcgaggccgtcgccaggagcctctgctggaccaaggtcaaggaggccggcgacatcgccgtctggcagaagccctacaaccacgccggctgcaaggcctccaagtcgtcccggcccttctgctcgcgcaagaaccctgacgcggcatggtacgacaagatggaggcctgcataacgccgctgccggagatctccaaggccagcgacgtcgccggcggcgcggtgaagagatggccgcagcggctcacggccgtgccgcccagggtctcccgcggcactgtcaggggcgtcacggccaggtcgttcgcgcaggacacggagctgtggcggaggagggtccggcactacaagtcggtggccagccagctcgagcagaaggggcggtaccgcaacgtgctggacatgaacgcgcgcctgggcgggttcgccgcggcgctggcgctggccggcgacccgctgtgggtcatgaacatggtcccgaccgtggcgaacgcgaccacgctcggggccatctacgagcgcggcctcatcggaagctaccaggactggtgcgagggcatgtctacctacccgaggacctacgacctcatccatgcggattcggtgttcaccctgtacaaggacaggtgtgagatggaccgcatcctcctggagatggacaggatcctgaggcccaggggcacggtgatcgtcagggaagacgtggacatgctggtgaaggtcaagagcctggcggacgggatgaggtgggagagccagatcgtcgaccacgaagacggcccgctcgtcagggagaagatcctcctggtcgtcaagacgtactggactgcccaggaccaagaccagtagcaggaccggacttgtcaagcgaagttcagcaatgttgataagcatttttcttgcttcgaattgcattggatcgccatttctagctccttgagctagtagtgttctctgtttgtttgctgttccttttggactgtacttgctcagataggaaatttgtatcctaaggtgtaacagggggaaatggaagggcttaggtaaaacccctggcccctgcaaagtttttttttgttttccttcaattgcgaaattgtggcaagtggtaaatagaaagtcactgttgcgagtcatcccggataagcacagctgggttcgttctagcattacagttttgttgtatgcaatcc

SEQ ID NO: 123435 - DNA, 3350 bp, Zea Mays
gccagtagactagtagagtagtactctgcctttctggggtggctttgcgcggtaccgacgtaccgtcgcggtcggcagtaaaaaggaccccgttgcgttgagatgaaagattgacgagtacctgcggcagtgtacaaagagcacacagggtactgtacacggtttgattggcgcgggctggggtgtaccgccgctgcagccaggcggacccgacccacgtgcgccaccgccagccagccagcagcctgccccgtccccttgcctgccttgcccagtaggtgcgacgtcacggtggaaaccaaaaatctagcccgtactagatcttcttcgtatagccattgtttatacttttcgcctcggcgaatgtttccaaaccagcgccgcgccgcgctcctttttcgtttcctcgaaagggtcagccagccaagacagacaaacagaggaacgtgaggaagatgcggcatgtcacgtgacatgacacgagcgccgagattgggatggatggcgtcacgggctcaacaaatccattcaattccccccgtctaccctgccctggataggtggaatggggaaacccgacgactgatgcagtgtgtttagactctgtgctcgtgtcacacgcactctcgccaccgtgtctgtgccagtagtagtagtcgtagctccagctcagctattgtccctgctaatcacctcccgtaactgtcagcacccgtccaaatctactactcctacaatagtcctattatacaaaactcatcagctcatgcccaggagagcgcacgctcttaagcagcgggcggcagtggcacggagcacactccccagtccccagtcccccgctgggagcggcagccagcacgaggcaggagcagcgcgagggcaggcgccatgggggtccggtcggcggccacaaagctgcacatcccaccatccgccgcccgccgacccacgttcctgccattcgtggccgtcctcctcctctgctctgcctcctatctcatcggcgtctggcagcacggcggcttcgccactccatccgacaaacccgccgccgtctccaccgctacggccgtcgcctgcaccaacgtcgccgccgccccgaagaggaggacccggtccggcgccagctccccgtccctcgacttctccgcgcgccacgcggccgcggcggacgacgcgctcgacgctagcaccgccaccgccgcctcctcggccgcgccgcggaggtcgtcgtacccggcgtgccccgccaggtactccgagtacacgccgtgcgaggacgtggagcggtcgctgcggttcccgcgggaccgtctggtgtaccgcgagcggcactgcccggcgtcggagcgggagcggctgcggtgccttgtgcccgcgccgcccgggtaccgcaccccgttcccgtggcccgccagccgcgacgtcgcctggttcgccaacgcgccgcacaaggagctcaccgtcgagaaggcggtgcagaactggatccgcgtcgacggcgacaggctcaggttccccggcggcgggaccatgttccccaacggcgccgacgcctacatcgacgacattgccaagctcgtcccgctccacgacggctccatccgcaccgcgctcgacaccggatgcggggtggcgagctggggcgcgtacctgctgtcgcgggacatcctggccatgtcgttcgcgccgcgggactctcacgaggcgcaggtgcagttcgcgctggagcgaggcgtgccggccatgatcggcgtgctcgcgtccaaccgcctcacctacccggcccgcgccttcgacatggcgcactgctcccgctgcctcatcccctggcaactctacggtacgcacgcacgcacggcacggcactctctctctctctctgtgttcaaaacgcttagctcagcactcggcaccgaacgcggcgtgcagatggactgtacctgatcgaggtcgaccgggtgctgcgtcccggagggtactggatcctgtccgggccgccgatcaactggaacaagtactggaaggggtgggagcggaccaaggaggacctcaacgccgagcagcaggccatcgaggccgtcgccaggagcctctgctggaccaaggtcaaggaggccggcgacatcgccgtctggcagaagccctacaaccacgccggctgcaaggcctccaagtcgtcccggcccttctgctcgcgcaagaaccctgacgcggcatggtacgacaagatggaggcctgcataacgccgctgccggagatctccaaggccagcgacgtcgccggcggcgcggtgaagagatggccgcagcggctcacggccgtgccgcccagggtctcccgcggcactgtcaggggcgtcacggccaggtcgttcgcgcaggacacggagctgtggcggaggagggtccggcactacaagtcggtggccagccagctcgagcagaaggggcggtaccgcaacgtgctggacatgaacgcgcgcctgggcgggttcgccgcggcgctggcgctggccggcgacccgctgtgggtcatgaacatggtcccgaccgtggcgaacgcgaccacgctcggggccatctacgagcgcggcctcatcggaagctaccaggactggtgcgagggcatgtctacctacccgaggacctacgacctcatccatgcggattcggtgttcaccctgtacaaggacaggtgtgagatggaccgcatcctcctggagatggacaggatcctgaggcccaggggcacggtgatcgtcagggaagacgtggacatgctggtgaaggtcaagagcctggcggacgggatgaggtgggagagccagatcgtcgaccacgaagacggcccgctcgtcagggagaagatcctcctggtcgtcaagacgtactggactgcccaggaccaagaccagtagcaggaccggacttgtcaagcgaagttcagcaatgttgataagcatttttcttgcttcgaattgcattggatcgccatttctagctccttgagctagtagtgttctctgtttgtttgctgttccttttggactgtacttgctcagataggaaatttgtatcctaaggccttgttcggttattcccaatacacatggattggatgggattggaaaaaattcttaagaagtttgacttgtgtgggattcaaacccatccaatcccactcaatccacatggattgagagctaaccgaacaagccctaaggtgtaacagggggaaatggaagggcttaggtaaaacccctggcccctgcaaagtttttttttgttttccttcaattgcgaaattgtggcaagtggtaaatagaaagtcactgttgcgagtc

SEQ ID NO: 123436 - DNA, 720 bp, Zea Mays
gttcatgagccgaaatgctcccttgagcaccggcaattaattggcgggcggagccgctgcaaatatctccgcagctccaaatctgaacagtttaccatttctttacagaatacaatgacaatacatcaaaaaaagaaagaaaagcccaaaggcaggtaccgagactgcgaaagggaaccgctatgctacagctcgaaatgtacaaagaatgctgctacacaccaggcccgtcctgttcctgtacccccaaccaactaccgtgctgcaggacgaacagcccagccagctagcatggtttctgcaacgccggattccttctgacgcctgacaggagtatagtagcttcaccacagtctcaaccttgtaccctcctcattgtctctgtggctggatctcgatgatcacctccaacgattcctgcgaggctgggctgttctgtctgcctccagcacgatcgcgatggatcgggagtatccaatggggcgatctattgactgggctgccggcatgtcccagtatctgagggagtggggtacggagaggggatgctgtaggtttcgcgccaggctggtccttcaatgagacgcggcatattgggcaggtagtctgtttctgcaaccatacatctatgcattcgagatggaagttgtgttggcatgtaggcattatacgcagtatctctttatcgctgtattcacctaaacatatggagcacctgcc

SEQ ID NO: 123437 - DNA, 97 bp, Zea Mays
gtatgctagacatgatgtacactatcaactgtacatatatgacttaatgagacagagactacagagggagtcatcatttgaaaatgatcttatagag

SEQ ID NO: 123438 - DNA, 155 bp, Zea Mays
aagaaccccgactgcatcgtcgtcttcaagttctgcacccacttttcaggctgcaagtccaccaattcggtctcatctgcgacaacctcgacgcagccaacaagttcgagcccaattacaggcttatcacggagtacactaatattgctcctacc

SEQ ID NO: 123439 - DNA, 1143 bp, Zea Mays
atattttttttatcttaaacccctactcaatcttatcctcttctcattcttctttctccctcccatgtcttccaccaggaccgaagtcgtgcgccgccgcccgcctccaccggcgcgcccgctgcgaccgaccccgacccgccctcttggcagcggacagcggagttcaccactcttggcgaagcgaaatccaccgtacaccgctgcctccctctccctgtctcgtcgaaccagccgagcaagccaacgcacacccagcgatcctcgtcgtgcgtcctcctcccccacggagggaaggatggcttggtccgaggacatggcggaagccgacgagatggagagcaggggtgtgcagagctcggctagcccgtgtcgccgccacaagcgggagattggagacgacgacgacgacacggaggaggagggctagcccgtcccaccgccacaagcgagagatcggagatggcgaggacgcggaggcctcggcgtcgttgtcggcgtccgccgcagtcctccccgcggccgaggtcgagcagatcaagcgggagatttagactatgaagttgatcaaacatcccaatatggtccaactgcatgaggttatggcgagcagaacgaagatatacatggtccttgaatttgttgatggaggtgagctattcgataagatcgtcaattctggaaggctaggagaggatgaatctaggatatattttcatcaacttataaatgcaattgattattgccatagccgaggagtgtaccatagagacctgaagccacagaatttgcttctggattcaaatggagctcttaaagtttcaaacttcggcctaagtgcatttgcaccacaaacaaatgtatgatctctagtcagtaactagaaacaaatgtactatctaggcactctgtgtcacgcatgtgacccggtcccggattcatgacccatagtcatacgagtgtaccctctttctaaccatccaagcactccatgtcatgtatgttgtacccagaatgcacgatccatagtcatatgagttagaacaacccacatagtactggatgatgagatgtgtcttattatgactatggatgagacttttgtgatgtaattaatgagactatggatttaaatactgttat

SEQ ID NO: 123440 - DNA, 83 bp, Zea Mays
gaagatctcaatgttctttagtatttgattcccattttttcgttaattattttgctacagtcagcttgcaattttggtgtctg

SEQ ID NO: 123441 - DNA, 296 bp, Zea Mays
ttgcgtatggtttcataaaataattaccagagtcctaaatctctggtaagggagagagtgacatttggatatatcctagtcacatcactcttcattttcagaacacaataagctctctcatgacagcaatgatgactgaagagtcatataagcaaagtacaagaggtcttcgagaaatatataccaggctcataataaaggtaaacagagcagttcaatgggctgcttcattgggcgaaacataaatataatgcatttgtgagaccttattctctgccaaactacatgaaaattcc

SEQ ID NO: 123442 - DNA, 957 bp, Zea Mays
atctccagttgcagatgctcacttcggcttggcgcaaataattccggcacacaaaaaaaaaacgcaaggatttctcggttcctcttcctcctcgcgcagtcgcgctccccacttcaccgagcatcccgaaaaaaagctcggccactgcgccatctcgcccaccaagcaccagccaccagcagcggcgccatggccaccgcgccctacgcctcctccctcttcctggcttcctcccccatctcaactgcgccacgagccagcgccgggtccttccctccctccgcgcagccgttctccatgcgcctccggcctaggccgtcaccagccgtcgcggccgccgtccaggcggagcaccagcccgcggtggccgcgacgccgaagccgcccgcgctaccgttccgcgtgggccacggcttcgacctccaccgcctggagcccaacctcccgctcatcatcggcggcatcgacatcccccacgaccgcggctgcgaggctcactctgacggagacgtgctgctgcactgcgtggtggacgcgattctcggcgcgctggggctgccggacatcgggcagattttcccggattccgacccccgttggaagggcgccgattcttcggtgttcatgagggaagctgtgaaattgatgcatgaagcaggctacgagctgggcaaccttgatgctacgctgatcttgcaaaaaccaaaaattagcccgttcaaggagacaatcagattgaatctgtgcaacctacttggggcagatccatctgtggtcaatctcaaggccaaaacgcacgagaaagttgacagtctaggggaaaacaggagcatagctgctcataccgtagttctcctgatgcggaagtagaaaaaaaaacaaatagtacctaattgtatcgtgctacaagaaaaaggtcgttaagttatacttgcccttgttaaatgctctagccag

SEQ ID NO: 123443 - DNA, 1828 bp, Zea Mays
accacgcgaaacgaagcgaagaaaacgccggcgcccccgcagccagacgctggaagcgccggaacgaacgaacgcgcggcgccaccacccacatcactgccctgccgtcgtagcccagccccacccacccagcgccgcccgcccacgccaccacgcggaccgcagccgcgccgcagctgctcacacacacagggcaacagacgcctcctccatccccacgcgagcggacgacacgacgcggccatcgccgcacgttgagatcccctccgctcctcctctcgatggtctccgccagcgcgccgccgccgccgccgcaggcccagtccgacgcggccgggtcgggggaggaagccagcaagaaggtgcggaagccgtacaccatcaccaagtcgcgggagagctggacggagcaggagcacgacaagttcctcgaggccctgcagctctttgaccgtgactggaagaagatagaggcttttgttggctccaagaccgtcatccagattaggagtcacgcacaaaagtactttttgaaggttcagaaaaatggaaccagtgaacatgtcccacctccacgaccaaagcgaaaagctgcccatccatatcctcagaaagcttccaagaatgattcatcttccatacataggaactctggcatgaatgtgtctgtttcttcatggcctcataggtctatcccgcaagctgttgcttcatcgatggtgaaagaagatttaggtgctggaacactaggtccaaacaatttttgctcaagcagtactgaaggccctccaagaacttggcaacctggtgaaacaaatggtccaataaatcaaattccgtcactccgccttatgccggattttgcgggagtgtacagcttcttaggtagtgttttcgatccaagcacaagtgatcatctgcagaaactgaaggagatgaatccaattgatgttgagacggcgctgttgttgatgaggaatctctccatcaatttgaccagtcctgattttgaagatcaaaggaaattgttgtctttatatagcgcttctgatggacctgagctagggagctccaggagttcggctctagcaacgagtgcacctttcatgattaagggtggatagtgtggccaggtctgtccgcatataatttcagttggacagacctcaggatggtgccctggcgtagcaccgatgagtgacgaaggaggcgcctgcaccttttcgcttctcgctagcttcatgactgctgattgtgtaagggtgcggccatgaaaggtgagattggtctgcggtcatgaaaggtgagattggtctgcggcctgatgtgtatataaaatttttgccacgaaggaggcgcctgcacctatcccaaaagctcggccatctagggcattggatgctgcttcagttcagataatcaaggctgtccttggaaatgggacgagaggaaagatcccttccccattcgttgagttcagttctctgattggtttcttgctgccctcttgatacggggacctgtgcgccatgtggccgtctcgctgtttatgtgggcaagtttcacttgaggagttgagagggcttgaggcgatcgtggttttgtagagcaacgagtgcaccttccgaatattccttgttcctgtgtgaatcgtctatattgcatcaggcgtcgttgccattgtgtaaaagggaaataaaatcacaatgtaaaggatacactaccatttgaattgtattcagtatcgaagcaacctggcgacgagttcattgcaagggtggatatgttatttgaagtggcctttccaaatgctttcggtttattagtt

SEQ ID NO: 123444 - DNA, 1857 bp, Zea Mays
accacgcgaaacgaagcgaagaaaacgccggcgcccccgcagccagacgctggaagcgccggaacgaacgaacgcgcggcgccaccacccacatcactgccctgccgtcgtagcccagccccacccacccagcgccgcccgcccacgccaccacgcggaccgcagccgcgccgcagctgctcacacacacagggcaacagacgcctcctccatccccacgcgagcggacgacacgacgcggccatcgccgcacgttgagatcccctccgctcctcctctcgatggtctccgccagcgcgccgccgccgccgccgcaggcccagtccgacgcggccgggtcgggggaggaagccagcaagaaggtgcggaagccgtacaccatcaccaagtcgcgggagagctggacggagcaggagcacgacaagttcctcgaggccctgcagctctttgaccgtgactggaagaagatagaggcttttgttggctccaagaccgtcatccagattaggagtcacgcacaaaagtactttttgaaggttcagaaaaatggaaccagtgaacatgtcccacctccacgaccaaagcgaaaagctgcccatccatatcctcagaaagcttccaagaatgaaccaaactatggtctcaagacagattcatcttccatacataggaactctggcatgaatgtgtctgtttcttcatggcctcataggtctatcccgcaagctgttgcttcatcgatggtgaaagaagatttaggtgctggaacactaggtccaaacaatttttgctcaagcagtactgaaggccctccaagaacttggcaacctggtgaaacaaatggtccaataaatcaaattccgtcactccgccttatgccggattttgcgggagtgtacagcttcttaggtagtgttttcgatccaagcacaagtgatcatctgcagaaactgaaggagatgaatccaattgatgttgagacggcgctgttgttgatgaggaatctctccatcaatttgaccagtcctgattttgaagatcaaaggaaattgttgtctttatatagcgcttctgatggacctgagctagggagctccaggagttcggctctagcaacgagtgcacctttcatgtaaggattaagggtggatagtgtggccaggtctgtccgcatataatttcagttggacagacctcaggatggtgccctggcgtagcaccgatgagtgacgaaggaggcgcctgcaccttttcgcttctcgctagcttcatgactgctgattgtgtaagggtgcggccatgaaaggtgagattggtctgcggtcatgaaaggtgagattggtctgcggcctgatgtgtatataaaatttttgccacgaaggaggcgcctgcacctatcccaaaagctcggccatctagggcattggatgctgcttcagttcagataatcaaggctgtccttggaaatgggacgagaggaaagatcccttccccattcgttgagttcagttctctgattggtttcttgctgccctcttgatacggggacctgtgcgccatgtggccgtctcgctgtttatgtgggcaagtttcacttgaggagttgagagggcttgaggcgatcgtggttttgtagagcaacgagtgcaccttccgaatattccttgttcctgtgtgaatcgtctatattgcatcaggcgtcgttgccattgtgtaaaagggaaataaaatcacaatgtaaaggatacactaccatttgaattgtattcagtatcgaagcaacctggcgacgagttcattgcaagggtggatatgttatttgaagtggcctttccaaatgctttcggtttattagtt

SEQ ID NO: 123445 - DNA, 1784 bp, Zea Mays
accacgcgaaacgaagcgaagaaaacgccggcgcccccgcagccagacgctggaagcgccggaacgaacgaacgcgcggcgccaccacccacatcactgccctgccgtcgtagcccagccccacccacccagcgccgcccgcccacgccaccacgcggaccgcagccgcgccgcagctgctcacacacacagggcaacagacgcctcctccatccccacgcgagcggacgacacgacgcggccatcgccgcacgttgagatcccctccgctcctcctctcgatggtctccgccagcgcgccgccgccgccgccgcaggcccagtccgacgcggccgggtcgggggaggaagccagcaagaaggtgcggaagccgtacaccatcaccaagtcgcgggagagctggacggagcaggagcacgacaagttcctcgaggccctgcagctctttgaccgtgactggaagaagatagaggcttttgttggctccaagaccgtcatccaggagtcacgcacaaaagtactttttgaaggttcagaaaaatggaaccagtgaacatgtcccacctccacgaccaaagcgaaaagctgcccatccatatcctcagaaagcttccaagaatgaaccaaactatggtctcaagacagattcatcttccatacataggaactctggcatgaatgtgtctgtttcttcatggcctcataggtctatcccgcaagctgttgcttcatcgatggtgaaagaagatttaggtgctggaacactaggtccaaacaatttttgctcaagcagtactgaaggccctccaagaacttggcaacctggtgaaacaaatggtccaataaatcaaattccgtcactccgccttatgccggattttgcgggagtgtacagcttcttaggtagtgttttcgatccaagcacaagtgatcatctgcagaaactgaaggagatgaatccaattgatgttgagacggcgctgttgttgatgaggaatctctccatcaatttgaccagtcctgattttgaagatcaaaggaaattgttgtctttatatagcgcttctgatggacctgagctagggagctccaggagttcggctctagcaacgagtgcacctttcatgtaaggattaagggtggatagtgtggccaggtctgtccgcatataatttcagttggacagacctcaggatggtgccctggcgtagcaccgatgagtgacgaaggaggcgcctgcaccttttcgcttctcgctagcttcatgactgctgattgtgtaagggtgcggccatgaaaggtgagattggtctgcggtcatgaaaggtgagattggtctgcggcctgatgtgtatataaaatttttgccacgaaggaggcgcctgcacctatcccaaaagctcggccatctagggcattggatgctgcttcagttcagataatcaaggctgtccttggaaatgggacgagaggaaagatcccttccccattcgttgagttcagttctctgattggtttcttgctgccctcttgatacggggacctgtgcgccatgtggccgtctcgctgtttatgtgggcaagtttcacttgaggagttgagagggcttgaggcgatcgtggttttgtagagcaacgagtgcaccttccgaatattccttgttcctgtgtgaatcgtctatattgcatcaggcgtcgttgccattgtgtaaaagggaaataaaatcacaatgtaaaggatacactaccatttgaattgtattcagtatcgaagcaacctggcg

SEQ ID NO: 123446 - DNA, 1143 bp, Zea Mays
actcccttaagaacagctcgacgctcacctgtctagtctagctcgtgcatgccgccctgagcgccactgcacagacgcgcagagacagacattgcgactttgcgagagacaaaacctcccagataacgcccgcgcgctccccgatggcgtcgtcgtgccagaacgtggagattcccggcaagccgacggagacggggacggcgctgctggagacggcgacgggcaccatccaggggttcgcgccgctgagccagatccaccagcacctgtgcgcgttccacttctacgcggacgacatggggcggcaggtggaggcgcaccacttctgcgcgcacctgaacgaggacgtgcggcagtgcctcatcttcgacgggcccggcgccggcgcgcgcctcatcggcgtggagtacatcgtctccgagacggtgttcctgacgctgcccgacgccgagaagccgctgtggcacacgcacgagttcgaggtgaagggcggggtgctgttcatgccgggggtgcccggcgtggtggagcgccgggacctggagaaggtgtgcaagacctacggcaagaccatccacttctggcaggtggaccgcggcgacgcgctcccgctcggcctcccgcagatcatgatggtgctcacccgcgagggccagcttcggcaggacctcgctgactgtgtggagaagaagttcggtgtctccttccagaaggagagggagaaccgggcgtacatgagcggaccggagcatggtatccacccgctagcgaacgctaccggcaagggcctgaggaccgagatccgtgaggtcgatttgccggcgagtactaccgccggcgccgggagggtcttcacttgatcgccgtatcgtgtgttgccgcggcgggtctgcgtaatgtagactatatagacggtgcttggtttggtctgtagttcgtgagtacgtgctcaatcgtttgtgttctcttaagacacgaactactgttcatatgaactttgaattttcgcataataagagatggcgctctactaataatttgtgtcaaaaccgttttggttgaactcttggatttaggatgggataatgaatttcatacagtttgcatatattaatgccaaatatctcctagaaacttgtcctt

SEQ ID NO: 123447 - DNA, 1428 bp, Zea Mays
gccgatgtttccgcgttgctcccccgcactcctgctcggctgctccgctcgccgcttttatatgcggcctggcccggctcagttggtcagtcctcgacgcacgcccgcgcgcctcggcaaaccaccgcgcccgccagccatactgagctccgccctggttccattccacccagagaggctccaagattgacgccgcgaccacgatgggcttccctgtggggtactcggactcggagacgctgctcccgcgcgtgctgctgcaggcgctcctcctcctgggccacctccaccgcttcctcctctgggccttccacgccgtggggctcggcgacctgatcgacctcggctgcaactacccgccgccgccgccctccgcgtccacggcggcggcggcgcaggagggccgcgacgtggcggccccgctgcggcactggcggccggagttcaggcccgtcccggcggtgcgcatcgaggaggcgctccccgtggtgcggttcgacgagcttgccgccgcggcgcgcggcgacggctacggcgactgtgactgtgactgcgcggtgtgcctcgacggcatcggcggcggcgacgaggtgcggcggctcggcaactgccgccacgccttccaccgcgcctgcctcgaccgctggatggcgcacggccagcgcacctgcccgctctgtcgcgcgccgctcgtccccggcgccgcggccgccggggatccctgggccgaagcgccgtggctcgacgcggccgactacgacgtgctgccctacccgtccacgcctctgctgatggtgcccaccccgacgctgctgcggcctcacgagctgctgctggtcgccggcctgggcggcggcttccagtgagcttctgcgtgtgcgtggctggtgtttgggcagcaggccacgcgaatccggtccgtggcaaggcgaaaaacgtcctcatgtcatgtgcggtgcggcacaccccgcccggtcggtcagacgcgtgaccgccgccatacctgctcgtccttcactcaacaactctgcagcagtcgtttgatcgtgtctccgtcggtgaaaagagaaaccaacggcagaggagggcgcgccctggtttttacagcggctgcggctcccaacttcccaacaagtgagaaaaaaagaagaagaggcgaaacatactaagaccagccctagaaaactagctagccaagtactatgttgatctgtaggccgctttggcgattccgtcttccaaacctgtggagttgtgaatccttttgcagattaaagtaaagttcgttagcaagaactctattagatcccgtgcggtctgcctcatcaatttgtgttgcgccatgcattccgcatcaatcagtcactcgaatccttatcccccgacaaatcgaactcggtaatatctctatgatttccacccggttta

SEQ ID NO: 123448 - DNA, 2271 bp, Zea Mays
ggaattgaatgtgcacggccggtttttcgctccgggattccgtgttatttcatttcatcctcctgcacggtagattcccattccctcttgtcatcctcctcctctcgctcgctgggcctgcctgccctgcctgcctgctcccgtgccgtgtctccgcagctcttgcttgctccgggcttcgccggcggcatggagcccgctggcgcgccgtggtgcgaccctggccgtgggtacggcgccggatcggccgcggaggcgccgacgctgaagggacaacaaccgcaacagctgctgctgacgccgccgcgacaggacggcgcggcgctgaagaggagccttggcgacgtggagaggtggcagcaggcgctgtacctgcgcgcggtgaggcagcgcgtcgcggtcgcggcgcagtcgcagatggcgcacccgccgaccgacgtcgggcccgtgctggcgggggctaccgcctcgccggcctcgtatggtttctccaggccgccttcgtcgccctttgccgggctctcgccgcagccgtcgtcgacgctgtcgtcgctcaccacggcctcgcacgtggagacgccgccgctactgcagcggcatacggtggcggccagagagctggtgttgttgcaggagctggagaagcacctactagacgacggcgacggcgaggccgaagcgacggggagtgcttgcggctccacggtcaccagctctgcgtggggggacacgatacaggagctcaactccctcaccgcggcgcctctggcgtctctacccaacaactacagcaacaccgtgcctgccatgtcaaggtctcctccgtcgaactcctcgtcgtccacggcttcgtcggcagcgtcgagctcgccggcggcctcgacgacagcctcgtcgaggcagctgctgtccgaggccgcggccgccgtcgccgacggcaaccacgcggccgcggccgcccacctcgcggtcctgaagaccgccgcgaacccgcgcggggacgcggagcagaggctggtggccatgatggcgggcgccctgtcgtctcgcatccgacgcccacccgcgtctcaccagcacctcgcgggcctatgcggcgccgagcagcgcgcggaatggcagctgctgcagcacgtctccccctgcttcggcctcgccctccacggcgccaacctcgccatcctcgacgccgtggccgaccagcgcgccatccacctgatcgacttcgacgtcagcgtcgcgcagcacaccgccctcatcgactccctcgccagccgccgcgtggccggcacgtgcctcaaggtcacggccgtcaccgacccgacgtcgccgttcacgccggctctggcgcaggcgctggcggccacgggccagcggctcaaggagcacgcccggcaggcaggggtggagttccggttcagagcggtcagctgcgtcgccggagaggtcgaggcgtccaggtcgaggctcgggtgcgacgagacaggggaggcgctggtggtgaacctggcgttcgccctctcgcgcgtcccggacgagagcgtgtccccggccaacccgcgcgacgcgctcctccggggcgtgcgcggcctgcgcccgcgcgtggtgacgctggtggagcaggagctcggcgcgaacacggcgcctctggcggcgcggttcgccgacgcgtgcgcgcactacggcgcggtgctggagtcgctggacgcgaccctggggcgcgacagcgcgcagagggcccgcgccgaggcggccctggcgagcaaggcggccaacgccgtggcgcgtgagggccccgaccgggtggagcggtgcgaggtgttcggcaagtggcgcgcccggttcggcatggccgggctgcggcccgtggcgatcggccagggcgtcgccgaccgcgtaaagggacggctaggtcccgcagcacgtccgggattcgacgtgaagctggacagcggccggctcgcgatcgggtggatggggcgcgtggtcaccgtcgcctccgcctggcgttagccgtacgtagcacccctagtgatgagctaatcatcagctcccggttatcgacgcctatcattcagagtacctcaggaacagccgttgtgcaaccacgaacgaatgcctagtagttgtaacaataatctctctaattttttacggcaactggtcgttgaatattgtactagtagtagtggtaatgggttttcttcatggccactgctagttggatatttttgtagtagtgcatcattcgtggttgctatccgactatct

SEQ ID NO: 123449 - DNA, 1184 bp, Zea Mays
gacttgtccaccatatcctctccagctttccgctccgcccttgtcgctcgtccagccaccgtgcccgtgcccgtgccgccgagaattctatccagaagcaagcaacaagagcccacccccgcttcgcgcgctctttcgtgccaggcaaacacagagcacagctatctgctcgtgtcccggtccgtccaactcgctcgctcgctcaatccactgatgatggggatcccgctggtgtgctactgcctcgccgtgcccaagccggtcatcgccttctgcaggctgctcagcgccgtcagggacgccgccctgctgatgctggccgtggtggggctgtgccgcttcccgcccgacggcgcggtggacgccggccaccagcccggcgaggtgaaggcccggctccccgccgtggagtacggccagctcctggccgagcacgacgagcagcagcagtccggcgaccacgactgcgacggggacgccgcgtcgtcggattgcatcgtgtgcctcgagacgctggaggcggcggacgaggtgcggcggctgggcaactgcgcgcacgccttccaccgcgcctgcatcgaccgctggatcgacctcggccgcgcgacctgcccgctctgccgctccgacctcctgccgcgcgcgccgggctgggccagccggctcggcctgggccggctcacgcgcgttcggtgaggaggaccgtcttccagggcagtttttaatttgtctattggatgatggggcgcggacaggttagcgacggcgatcgcccgggtggtataacagctgctctgcctgccatcagccaaccgctaatctacgggggggcttcattagtacgtaaaaggcgcctcacacttggtatacgtaaaagatatactagttattaatacgttaaaggattgagtatacggcacctagatgtttcatttgtacacgattttaatttcagtctctcctcgaccatataatagtaattaaattagttcgtcaacttattgtgcaacttggtgagcttagcagcagcaagtttgcgcaactggcagtgatgaataatttagcaaccaacttgaatcctcttatcatgatcatctcgtctcgtgttgggaaccgcttgctaaacacgagcgtgggtgtaaataaagtgccgaaacagtctgatttagactttttcttcgatc

SEQ ID NO: 123450 - DNA, 272 bp, Zea Mays
cattaaagatgcaaatgtgttattattgagtataaatagatgatgtttataaaattcctttacagcaatttcaacgaggaaacccggagaacttgaccgaagctgcattgtatggcatagtcgaggacctctgcacattcatattgaaagaggtcattcccgcagaaggaaaatatcacgatacttccgggacattagctttgccagagttcagaatactaacagaaattagtagattatctcttagccgagatagttattagaacttaggt

SEQ ID NO: 123451 - DNA, 1834 bp, Zea Mays
cttcctaatgattcaagcttgattcgtaataaggtctgttatccagttgatgacatcacaaggcgcgcaaaaatgcacactggttataagatatggtattaacaataaacgtacaaagaaagtagccacaggccttgcgatcccaggacgcaagttccatggaaacgatattccagaggattattgcaaagtagaagtgacgacggttgcccaaggatccgaggaagacatgttagacatccctgggcctgaaggtatcgagaaacttggacaagctatcaagaattttatcctttggcctcgaagggatgtcgaattgattgattggtcgaattcgtcgcaggcccaaccgtctcctccttctcaaattgctgttcctattgtacatccttcacctcctcaaacttcacatgctgctcctcatcctttttctgacccaccgtctccaccacaagcatcaccattcagggctccaccaccttctcctccccatcctcttggtgacccactgtctacgccatcaaagaaatctaaacttcctatatcaaaattggtgtccccgtatcagaaaaagaagagtaaagctactactgctggcacagttcggtttttgaaagggattggacggagcctcacgtcacaaactgttgatttggccgagcacgaggagtctgcaaaaaaggctgaggcattggccgcaaagataaagaagccaactaaggcagattacaaaaacgtgcctaaaaaatatgtgtcgggcagacctctgctacctcttgagaaactaagaaaggtcccggctggtgttaaaaggttgcatgactggtacatgcgggcatcatcggttggcatcgacaccattagtgtgcatataccagaccatgcttttattggttcggaccaaaaggtcgttgttacattcgaggacatgtggttaatgatgaaccttcagagactcgatgtgcaacttgtaacgatgtttggattaatgcaacatgatcaacaggagatcctttacggtaccaagcccaatgctagtgccagtaaaagggttgggtatctcaacccaatacttatatccgaggaaagccacacttttagaatagggaaagacaacgatgaattacggggaaagacggacgaagaagttgagaagcgtataaaggatatgaagaaggattttgaagctcgatacgccacctacataggacatgcaatgcttcaatttcaagacagggaagccataatggccccgtacaactttaaggaccactggatatgcttcctcatttatcctaaggttggaaaggtgctggtgctcgactccttgaacttcgacccttcgacatatgcagaattcctcagcaccttagagctggcttatagattctataagatgagaggtggaaagtacgacccgtcgaaaaaaggcgtgccactagacatccatcatcattggccgataagtatgtgattttatgaatacatatcatacacaatgttgaaactaaataaccaatctcccgttatgtagtgccacaagcaaccacaaggatcggtcctatgtggattctatgcgtgcgagttcatgagagtgaacggacgatacatcacgaaccctgacaagcaatttcaacgaggaaacccggagaacttgaccgaagctgcattgtatggcatagtcgaggacctctgcacattcatattgaaagaggtcattcccgcagaaggaaaatatcacgatacttccgggacattagctttgccagagttcagaatactaacagaaattagtagattatctcttagccgagatagttattagaacttaggt

SEQ ID NO: 123452 - DNA, 177 bp, Zea Mays
atggcgtcgacggagcaggaggtggcggtcgacgcggccgccgtcgtggaggaagtgacgcgacagcagggcaaagggtgcggcgtcgcaggaggaggggatactgttgtgtcctcgaggaacatcgacattgcctggagcaaggcggatgaagctgattcagtcacgatcttttag

SEQ ID NO: 123453 - DNA, 590 bp, Zea Mays
ctccagcgactgtcatcgcagcagaacctagcttgctacgtagcagccagtgcagtggatcggaggcaagaagcaggcggcggaagcaaattaaaggaagggaggagcaagaaataccagaggaagcaagcgtagcgtagtagacctctacctctcataactgcttctggtaagcggaagaagctatggaccagttcgccgcgagccggagattctctagaaatgatggggcggacgaggagcaggaggatgtgtccaattccatgcgcgagatctctttcatgccgggggccgcgtcatcttcggcggcagcttccgcgtccgcctcgggaagcagctgcgcccccttccgctccgcgtcggcggatggcgccggagcgtcggggagcggcggcgacggcgacggctcgggagacgtggagaaggagcacatgttcgacaaggtggtgacgccgagcgacgtggggaagctcaacaggctggtcatcccgaagcagcacgcggagaagtacttcccgctcgacgcgcgggctggagtgcagtggcatgatcttggctcactgcaacctctgcctcctgggttcaagtga

SEQ ID NO: 123454 - DNA, 1074 bp, Zea Mays
atggccgccggcgagaatggatgcgcaaacgatttctccaagtatgaggaattggtggcgtcgtccctcccagcataccaacagggcatcgggagctccccgtaccggaagtacgaaggcttctggtacccggagcacctgctggcgccgacactgatgatgcgggacacgttcgtcgcccgcccggccgacgtcatcctcgccacaactcccaagtcgggcacgacgtggcttaaagcgctcgtctactgcgtcgtgcaccgcggccatcacgcgccggccgacgagcgccacccgctccgggcctccagcccgcacgacgtggtcccgttcctgcactccatctacgaggaccaccgctcggcgtcgcccggcccgctcctcgaagggatgccgtcgccgcgcgtcctggctgtgcacgcgccgctcacggccctgccggcgtcggtgcgggagtccgggtgccgcgtcgtctacctgtgccgagaccccaaggacgctttcgtctcgctccgccactacctcgacgagatcaagcctaagggtgctgccatgacgccgttcgccgaggcgttcgacctgttctgcgacggcgtgtcaccgttcggaccggtgtgggacaacatggccgagtactggaacgagagcgtggcgcggccggaggaggtgatgttcctccggtacgaggacctgaaggaggacactgtggggagcgtgaggcgcctggctgcgtttctcggctgtccgttcaccgacgaggaggcagagagagtcgtccctgtggccattgtggagctgtgccaccttggacaagatgaggagcgtcgaggtgtggatcgcattctgttgtttcaaatgcgtcctgcttctggtgtttcaactcggcgtctcggccttctgttcttcctaatcggcttcggctcggctccgattgccttagcccaagctgccaagcatgctgtggtttcgttgccacacggtatacgtgcctttgttttggtccttttggcgctaggccttctaagaataaaagtcccttatcatcacttgctatacaatacatgtgtgatgtaa

SEQ ID NO: 123455 - DNA, 1079 bp, Zea Mays
atttatagttggtatagaaaatgatattttatagtggtagtgggatatagggggaatatttaggggaaaccgttgcgggagaggaaaaaataggggaaaaaatagggggagaaagtgatatagggggaaaaatttagaggtaacggttgcggatagtcttatcccctcccagtcccaatcgcgacggcacccatttatacctgtcgtccctgcctgctctggccacactgtgtcacagcgctgctatttctctatctggcctgctctgatccttgcttgcgtttcgcgtcccgtctgatcttctcgggaagatcatggaggcctacttgtttttccacagcgggagggcgcacgaggtcgcgtgcgcggagcaggaggaggacatcggctcgccgtcggattccgagtccccgtccacgtccacgtcgagggagtccgcgggctcctcgtcggagctcgatgacgacgccagctcctccggctcggaccgcttcgagatgtccgccctcatgacgcagctccccctcaagaggggcctgtccaggttcttcgacggcaagtcgcagtccttcgcctcggtcgccgccgtggggtccctggaggacctggccaagccggcccggaagcgcctcaagccgtcgcggagctgcggcggcgccctcgacgcgcaccgcggacgcctcctctcgccgcgcaggcactggaccaagcccgccgccgcgtccggcgccaggaagacggccgcgaggagcggcgggttgtcggtgctcacggccgtcgcgccgagaatgccgccgccggtgcgaggcctgaggacgtggccgccaaggttctcatcgttaattgagccacggatcagcctgcctgagctcgacattgacgcacgccttcacgtcacggggtgcgctgtcgcaggcacagctacgcatcagcgcatccacccgtgcctgaactaacagccaaatcaatggcatgctcgtattctcttctgtttcccaatgcgtttgtgatctttgcagaatgcagactgacctttttgtaatgaaaatccacagctatagcaatggacttcggttggg

SEQ ID NO: 123456 - DNA, 704 bp, Zea Mays
tcctctccctctcgagattcaactgttaaaagtggagagcctatgaaagctgaaggggagatcaaggttgggattttggataaattagttgttgataaggaaaagaaaaaaggtaaaagaagccgccatgacctctaagatcaccgactacttcaccattagacactgttgatcagaagctcatcagtgaactaaactatcggagcttgcggtgttaaagagggctaggatggagagcgtatgaaggcattggagaagatgaataattccaaaccagcatcttcaattgcgaatctggtggctttgatcatttccgtcatcttttgcttcttcatgctttggcaaggtataacaactgataacccataagttatgttaacatgcattatgttctatgcacaattagattcttgttcactagcactggttgtgcataacagtaaatcatctttgttgctcctactacatccattttgagatagaaatttcgtacttaatcaccattaccatatgaccattacaatatgacatgtgttcactacagttatacttgcattcactttgcaaccaatatcttgttagttatttatagaatggacattgactaattccttcaaagtactactggtctactgcatctctgctaaccaataacattagtctttattaattgactttgcctagaaacaacagatgtgtaggat

SEQ ID NO: 123457 - DNA, 684 bp, Zea Mays
cgccatgatataacttgaattttaaacatcttaacaggtatatgcatgtgcataatgtcgaactgaaattgaaaactaaatacttgtagcgactgttctgttcgccttatcactaggaaagcagtacattggatgggagcatgtttctgatagacagctaattatttggcttcattcaagattgtgatgatttgtagtaatgaattggaggcttcgatccactgcaatttatgtggtacaagggttttgtttgagaaggcgaatgagattctaatggaggaaagaaatgttcagtgtgagtatttccaccaccaacacccgcaagttgaaagcctagacgaatgaactattcagacattggcgacaacgctgcgagtggtgtgatggcaactcttcttgtattcctgtccgttggtttagttggtgctactgatggtacatgcttccatttaactgggaaggtagtaaactggagtggcatgccctttaccattggtatttatggatttttctactctgggcattcagtatttccgaacatctaccagtcaatgtctgatcactctaagttccctgtggcactattcgtatggtatgcttggctatattcatgtttcggtttaccttgttactgaataatgaatattttttcgcaaggtgtgatggtattttcgcaaggcttct

SEQ ID NO: 123458 - DNA, 1542 bp, Zea Mays
agatcgcatccaacgcctgtgacccacacacccacggattccgcctcgtccacctcagcgatccgcagcaacagcccccaaacccatcccaccctccatccccgatccgacgtttcgaacgcacccaatcctccgaaaatcgtcccctcccgcccaaacccgaagcaaaattcccccatctgcccgcgcgcggccctcccaaatcctctcccctataaaacccaccccgaacccaccgctccaaggcaccagagtcaccgcggcgagttcaaatcccacaatcttcttgtagcacaccactgtcttcgtccaactcggcggcgatgtctgggcgcggcaagggcggcaaggggctgggcaagggcggcgcgaaacgccaccgtaaggttctccgcgacaacatccagggtatcacgaagccggcaatccggaggctggcgaggaggggcggcgtgaagcgtatctccgggcttatctacgaggaaacccgcggcgtgctcaagatcttcctcgagaatgtcatccgcgacgcggtcacctacaccgagcacgctcgccgcaagaccgtcaccgccatggatgttgtgtacgccctcaagcgccagggccgcactctgtacgggttcggtggttgagcgcatctcttccctcgtctgcagcggctgccggtggcgtttcctcagttccctctgccttgcttggcttgatgtagagagttatcagattaaaatatctctgatgtgcttcgttattgggtggaatcatgtgtcccagcagtgctgggaaatcaagatcaagatgtatctttctttgcagtaatgaaatgttaaaatcgagatcaagatgtatctttctttgcagtaaagaaactttgctattgcgcccactgttaggctaatcacaatggaggtttcatgaggtgtttcatgtattaattagcctgctatattagctattttgatgatgtgtcatatcatttaagaagaaagttttatggagtttgatggcgatgaaaccatgttaactcctttctaaggtcttggaaactgtgtgaaacctctactgagagtgttttgttttattttcgtataattgagtaaattctattggttatttatatgcaatatttaagaagtatgatgacatatgaaatagtgagatgaaactctctattgagagagtgtgtttcatccatccataaagctgatgtgacatttttggaaatatggacatgaaattctcattgtgattagccttatggggttatcatgtggtgttcgtgactgaaatgtgaatgcttaatcgggatattagaatccttgaacctggatttgaatgaatatgacttacaattttccattttggatcgtaaattggttttaatctagtgttatcactatttttactgtattctgctgttgattcaggtcctagtggcaattaactaaatccatatcttagccttttgtgatggtttctcagttcttgaacggttgatgagattcgattttcggaagtctgaagcagcttatccatttttgt

SEQ ID NO: 123459 - DNA, 306 bp, Zea Mays
gcgagttcaaatcccacaatcttcttgtagcacaccactgtcttcgtccaactcggcggcgatgtctgggcgcggcaagggcggcaaggggctgggcaagggcggcgcgaaacgccaccgtaaggttctccgcgacaacatccagggtatcacgaagccggcaatccggaggctggcgaggaggggcggcgtgaagcgtatctccgggcttatctacgaggaaacccgaccgtcaccgccatggatgttgtgtacgccctcaagcgccagggccgcactctgtacgggttcggtggttgagcgcat

SEQ ID NO: 123460 - DNA, 261 bp, Zea Mays
atgtctgggcgcggcaagggcggcaaggggctgggcaagggcggcccggcaatccggaggctggcgaggaggggcggcgtgaagcgtatctccgggcttatctacgaggaaacccgcggcgtgctcaagatcttcctcgagaatgtcatccgcgacgcggtcacctacaccgagcacgctcgccgcaagaccgtcaccgccatggatgttgtgtacgccctcaagcgccagggccgcactctgtacgggttcggtggttga

SEQ ID NO: 123461 - DNA, 328 bp, Zea Mays
gcgagttcaaatcccacaatcttcttgtagcacaccactgtcttcgtccaactcggcggcgatgtctgggcgcggcaagggcggcaaggggctgggcaagggcggcgcgaaacgccaccgtaaggttctccgcgacaacatccagggtatcacgaagccggcaatccggaggctggcgaggaggggcggcgtgaagcgtatctccgggcttatctacgaggaaacccgcggcgtgctcaagatcttcctcgagaataccgtcaccgccatggatgttgtgtacgccctcaagcgccagggccgcactctgtacgggttcggtggttga

SEQ ID NO: 123462 - DNA, 211 bp, Zea Mays
gttcaacccagcgcgcccaaccagcctgtcgggtgcgccacctgccccacgtctgttagcgcaaaagaaggaatgcatgcacgagtcaaacacgatccaatgcatgcgcgtaaatttagggaaaaaatgtgtgacagttaatatttttaaatgctttatttcctccataaatttaggatcgctgcaacagccatgcagctagacacgtaag

SEQ ID NO: 123463 - DNA, 1727 bp, Zea Mays
cagaccccaccccagtgcaaatctgcccctacgtgaaacgttcccctcctctcctcgccctccttgcgcaggttgaggcccgaggtgtagtgcaaggtggcgacctctcggcggcttgggtcggattgttttcgggaagtttggtctccagtgacccgagcactggagatgccctgtttggaggcgcggaagccgtacacgatcacgaagcggcgggagaggtggacggaggaggagcacggtcggttcctcgaggccctgcagctgcacggtcgcgcctggcgccgcatacaagagcacatcggcaccaagactgccgtgcaaatccggagccacgcgcagaagttcttcaccaaggtggtccgagaatcgtcgccaggaagcaacgcctccgcgggcgccgcgccggcgatccagatccccccgccgcgccccaagaggaagccggcacacccttacccgcgcaaagcggacggcgcggccaagaagcccgcgccggagctcaagcggctggagaagacgtccctgcgcgaccgggtccgggacgaagggtcgccgacgtcggtgcttgcctcggcgcgcacggcgttacgagcggaggtgtcgggcagcgtggtcgcgaacagctcgagcgccagcaggtcgccagccctgtctgacgccggttccaacgagcgtggcgacggcggcggctcgctggcctcctcggtggaccgggaggacggctgcgcatcgccaaggacgagagcgccatgtaccaaggtgctctgtgatgcacacgaagtgtcgcgtctaggatcgggagctccagtcgtgaagctgttcggaaacaaggtcgtcgtggtgaaagtgaaagacctggaaacggacactccgcctgcgagcgttgccgaggcagccagaaacgggagccctactaacggtgccgcaggagcgagctcgtggaaaccgtggccggagctcacgtgcctcgttccccggcgggacggcttcgcggcgcaacccatcgtgagcccgccgtgcgcggtgttctactacccgcaggcttcggctcaggagcaccagcaagcttcagagccgctggatcacagacgcgcgcagagggaagggtcgtcgccgacaggttcgagcgtggcctccagcgccgccgcggagtcccgccacggtcccgggcaagagaacgccagcgacggctacgcggcgctacgggccgcaatcccgaggccgaccaagcgcgcgagctcggcttccttcggcgggagagggttcgtgccgtacaagcggtgcgcggccgagagcgaggcggcgcggccggtggcactggcactggcacccggagaggaggccgacggcgacctgacgaggctgtgcttgtgacaagagctgaaggctgcaatgcacatgctctctgctgaaacaggtaacccgcggtttcccagaaatggatgagcaacaatgctggttctttgctgctcggtacatacgcgtcgtatataggcaaatctgtactcgtattccgcgtttgttcactgtgcgttcgtgtaattttttctcgaactcgggagatccaggggcctatggcagactgtgctaacctggatctcagagagagttgtgtgttgtcaatagtctgaccgaccgcatgcaacaacaaatccagaaaggaacatggtgttttattcgtgaaactccatgaagctaacaacatatatttcatataagggact

SEQ ID NO: 123464 - DNA, 1778 bp, Zea Mays
cagaccccaccccagtgcaaatctgcccctacgtgaaacgttcccctcctctcctcgccctccttgcgcaggttgaggcccgaggtgtagtgcaaggtggcgacctctcggcggcttgggtcggattgttttcgggaagtttggtctccagtgacccgagcactggagatgccctgtttggagcaaattccgatggcgaccggcgagaccgccgtggatcgtcgcgaggacccccgcgacatggatttgtcaggggaggagcacgtgcggcccaaggcgcggaagccgtacacgatcacgaagcggcgggagaggtggacggaggaggagcacggtcggttcctcgaggccctgcagctgcacggtcgcgcctggcgccgcatacaagagcacatcggcaccaagactgccgtgcaaatccggagccacgcgcagaagttcttcaccaaggtggtccgagaatcgtcgccaggaagcaacgcctccgcgggcgccgcgccggcgatccagatccccccgccgcgccccaagaggaagccggcacacccttacccgcgcaaagcggacggcgcggccaagaagcccgcgccggagctcaagcggctggagaagacgtccctgcgcgaccgggtccgggacgaagggtcgccgacgtcggtgcttgcctcggcgcgcacggcgttacgagcggaggtgtcgggcagcgtggtcgcgaacagctcgagcgccagcaggtcgccagccctgtctgacgccggttccaacgagcgtggcgacggcggcggctcgctggcctcctcggtggaccgggaggacggctgcgcatcgccaaggacgagagcgccatgtaccaaggtgctctgtgatgcacacgaagtgtcgcgtctaggatcgggagctccagtcgtgaagctgttcggaaacaaggtcgtcgtggtgaaagtgaaagacctggaaacggacactccgcctgcgagcgttgccgaggcagccagaaacgggagccctactaacggtgccgcaggagcgagctcgtggaaaccgtggccggagctcacgtgcctcgttccccggcgggacggcttcgcggcgcaacccatcgtgagcccgccgtgcgcggtgttctactacccgcaggcttcggctcaggagcaccagcaagcttcagagccgctggatcacagacgcgcgcagagggaagggtcgtcgccgacaggttcgagcgtggcctccagcgccgccgcggagtcccgccacggtcccgggcaagagaacgccagcgacggctacgcggcgctacgggccgcaatcccgaggccgaccaagcgcgcgagctcggcttccttcggcgggagagggttcgtgccgtacaagcggtgcgcggccgagagcgaggcggcgcggccggtggcactggcactggcacccggagaggaggccgacggcgacctgacgaggctgtgcttgtgacaagagctgaaggctgcaatgcacatgctctctgctgaaacaggtaacccgcggtttcccagaaatggatgagcaacaatgctggttctttgctgctcggtacatacgcgtcgtatataggcaaatctgtactcgtattccgcgtttgttcactgtgcgttcgtgtaattttttctcgaactcgggagatccaggggcctatggcagactgtgctaacctggatctcagagagagttgtgtgttgtcaatagtctgaccgaccgcatgcaacaacaaatccagaaaggaacatggtgttttattcgtg

SEQ ID NO: 123465 - DNA, 1095 bp, Zea Mays
atgtcaacaaccactacacacagcagcttctcaggcgttacctctgctccttccctcagcaccgccatcaccgtccgtctctcccgcaccaattttttcttgtggaaagctcaagtcacgccgatcctttgtgctcatcagctgttcggccatgttgatggctcgcttccaccaccgactccggtcatcaccaccggaactggagccgatgctcttcaggttcccaacccagattaccttcgttggttcgcctctgatcaactcgttctttctgcactccttgcatccatgtctgaagaaatgctaggccaaatgacccagcacaccagtgctgctgctgcctggtctgcgttgcacgctatgttctcctcccaaaatcgtgcccagatcatgcaggttcgctatcagctttccaacgccaagaaggcagatctcacagccgctgcctacttccagaagatgaaggggtatgctgacaccatggcttctttgggtcaccccctttctgatgaagaagtcctcggctacatgttggtcgggttgggctctgattttgagtccttcgtcacgactgttgccctgcgtgatacatcgatggatctcaataccttcttcgctcatcttctgagtgccgaagctcgtctccaacgctacacctccactgataacagctacagcagtccaaacagccggattgatttaatccgaaacgaacaagaatgcatgagacatgttcccggctgccgtcagaatgctccgatccagcggccagcagctactcatccgcaaattcaagtaaccgacagacacgagcagagccaaaccaagatgcagcttcatatcgccaggccaaagtccttcctccccctccccccacgatgcacggccatggccccctcagctgtgctgtgcttgcccatctatctagtccacagcaccattgcactgcactgtcttttgatgccagccgagcccagccgatcgattcccgttcagaagtcagaacacatgaatggggacactaggctactggacaagaaaagaggaggggtgaaaaagaaagaaagatggaaagggtcaccattgcgcacatga

SEQ ID NO: 123466 - DNA, 1455 bp, Zea Mays
gtgcactggcattttggaagtagcattggaaagaacttgctttgcatttgtacacaaggtgtacaaattatatatgaatgaaacatattcattaacttaagcatactcctttttttatttaatgagttgatattaattaaatatctttatttttttcgatttttgcaaaggtttcatttacgcctaatccatatcgagtagaccctgtcgttgtgagaattcttaattcatgagttgtagggagggacttatgtcaccacaaacagaaactaaagcaagtgttggatttaaagctggtgttaaggattataaattgacttactacaccccggagtacgaaaccaaggatactgatatcttggcagcaagcattccgagtaactcctcagctcgggcgcctgaagaagcaggagctgcagtagctgcggaatcttctactggtacatggacaactgtttggactgatggacttaccagtcttgatcgttacaaaggacgatgctatcacatcgagcccgttcctggggacccagatcaatatatctgttatgtagcttatccattagacctatttgaagagggttctgttactaacatgtttacttccattgtgggtaacgtatttggtttcaaagccttacgcgctctacgtttggaggatctacgaattccccctacttattcaaaaactttccaaggtccgcctcacggtatccaagttgaaagggataagttgaacaagtacggtcgtcctttattgggatgtactattaaacggattatccgcaaaaaattacggtagagcgtgttatgagtgtctacgcggtggactttattttaccaaagatgatgaaaacgtaaactcacaaccatttatgcgctggagagactgttttgtcttttgtgccgaagcaatttataaagcacaagccgaaaccggtgaaatcaaggggcattacttgaatgcgactgcaggtacatgcgaataaatgattaagagagctgtatttgcaagggaattaggggttcctattgtaatgcatgactacttaacaggaggtcgcaaatactactttgtctcattattgccgcgacaacggcctacttcttcacattcaccgagcaatgcatgcagttattgatagacagaaaaatcatggtatgcatttccgtgtattagctaaagcattgcgtatgtcggggggagatcatatccactccggtacagtagtaggtaagttagaaggggaacgcgaaataactttaggttttgttgatttattgcgcgatgattttattgaaaaagatcgttatcgcggtatctttttcactcaagactgggtatccatgccaggtgttataccggtggcttctgggggtattcatgtttggcatttgaacaaaacgctgcaggcctcacgtcgcatcagccggccgacgtcccgagacagtggc

SEQ ID NO: 123467 - DNA, 3450 bp, Zea Mays
tcaagaagcaaggttattagataccgaaggaaagcccggccagaaccacacgtgcaagtttccctgcatgtggctcgtccgtgataacttcttcggatttgcgtgaactagcggaccgatcactaagtggttagtacctccagcatgagcgaaccttttatgaactggttaggaatgggcgccactatcccagcccggatccagccgggttctattgatcatgtccccttcccaacagttgtaccttgtcttggggcgtctttctttggctttactatcaagcccgcccgcccagacgcggcgccctttcgcattatcatctaccgccctttctttcctcccgtcccttcacgcatgaagatcgtcgtatgtatgttcgacttcggttgccggtgcaatagaattggcgggagtatattatggcaggatcagtcacctgggcaaaccaaccctcctccaagaagaattgtgctatgccccccccccgatatccctatagagcgaaagagctgcctggtgatccctaggttgcagcacgtccggtcgttaactcctcgctagctgccgccgtttttaggaccgaccgacgcctcacctgcatgcacaggtacctacgtagtgtagtgtcggtcgcacattcataatagcgttcggactcatgtgccttcctgaaccaggggagttcccttgctcctgctgcgtacgattagccagccttgcggcggcaaaaggattaggacgtcccccatgctaaggttccctgcggtccggccgcattaggttagggagctgggcgataatagctcctccgcatcccaagcgcgctgccctcctaggcgcgcaacactaagtaatccaagccaacccacattactaactaacggtggataatcatctttcttagaggtactaaatacaactccatgaatgagcaaaatgaaggttgcgttaatgagaaagatctctggggaaaccgctaaaaaagattgaacatgtgtttcgataacttcttctgctttcatttcctctcctccgtctgcctgcaaaatcactgagttaattcaaaagtcctgttaggtcacataaaggcgcttgccactaaactaaaataggaatgcttaaatatgcccccgcccccttttgagatcttcatattgaaacaatagtagcgcatgctcatactcagccctttcgagctgagcacggctgcgggcgattccatcccatcggatcctttgcgccaattcatggcacctcctggaagtggtctgtgcatccaggtaatcctggttgtgcgaaaccacctccaaaaagaagatggatccttccccattctcccgcagatcttgataagctgcccggagaatagaaagattatccattcctttgtccagataggaacgaaccgcctcttctaaaatgtacggctcgagggcttgttaaggaaggcggctagggaaggagggaaaacgaaaggcgttttctggttaaatacattacaagatgtttttccatactttccgccttcaagtcctatctccgtctaggacctctgaggtgtctcattcccatctcctctctctcgagattagcttccgtccctttagaagcccggaggtcccggaaatccttataaatttaagcgaaatagggtccctaaaactttgtaagatttcgggcatcttttccgccccgtggcgctcagttaaatcatccaccaagtgggcgcaactcgcccactttcttcgaccccaattcattgtaaaaaccaataatgattggtttcaattcttcttcaatatcgaataactgttccatagtcctgatatcttgctcggtaagcggccttgaaggtgcactgctgtcctctggctggtccggcccaagcggagcactcgacggctctgctctccccgatcagttggctgaatcgatggattaggcgccgctaaagccatttccggctgctgcacctcttgcccaggttccacaggtgccccgggtatctcccgagaaagcccctggaaaaacgacgaggacgggctagaggttccatcggggttgcccgcagcggatcccccccgcattctgatcaggttcgttacccattccgctgtggtcatcaaagaagaataataaaaaagtgctgttgttacactcaacagagtgaaaacgcgagcagcccaaactgggcaacgcggccataaagcgcgaaccaacatccgtgatacgaaaaccaaaatcagaatgaggaagaaaaggatatctttaggtaagtcattaaaatgaaaacccaataagaacttacccaataatttagaacagatcacttccaaacgagacatgatgagctaaagtcaaaataaaatgcaagataaattcaaattatgtaaggcttagaaaaaagtcctgcgtagagtccacggggagcctttttcgatttgatctctagtcaaactaagactggagcttgaagccactactctagaaccggaagaagcctaacttctgcattttgagtagattttctgactatcatttgccttgaattacaatacgataatcttcgattggtagaagtgagtccggatctccctcttttccactaaacccgccactcctacttgtactttattttccacctggctagcttcaattgcttagtagggagtttccatccttgactttcgcggttctttctttgctttcttcagttgtgttgaggagctatcttttgaacccaactaactcttaaatccgaactttccctgcagctttagggcttctagtgaggagaggtgattctctagtttctcattcgcatagccatctcgattaactaagttgacttgtgagctcccctaacctggcaggccaaagaatgaagggcagtgaaaatggtttcttcttctggctaattccgatacgaataccaaaaacagcttacttccgttcgtgtcctcggaaattggattacttatgagtttcttcggtgcaaaagtaggcaagtccattttctcgtgtttttcgtcctcaagacctgattttccaaagtgcatttcatatagctgcaaaagttgctcatccgattttccctcgcttttattcgtaacatggcgtagttactcattgggtccgctgagaagaaaacaataggtcgtcactacctatgctttcatctagaggaagtcacgctgtgattcgtaacatggcgtagttactcacaggccgtggatctcctttttctaatcaagcagcaggccgtgggttttctggttctgcgcttcagaagaggcaaagtttccgtgattcgtatctgctttgagggcaggtgcgggttggttcatgcttcgaagaagaatcgttctttctagatcgaagaagaatcgttctctttctcgaaatgaaataagttaagtgaagtgatcctgcgaaacctaagatgccgga

SEQ ID NO: 123468 - DNA, 871 bp, Zea Mays
atctaactaccggcggggccaacgaccttagcttctccttcccgcatgttctcgtcctctcctctcctctccgctcgtcgtccacccacccctcgtgctcgtctcactcttcacctccagctccggatctgaaacgccgagcaatctttcgtcgtttcgagtctcatccagagcttctcggtgagtgcgacaattgggccggagaactgggaaagcctcgaggagacatggatgggttgcccagagagctgtgcctcaagatcttccacctcctggatcaccagtccctcgcctcttctccccaagtttgcaggaaatggagggcgttgacctcggatgatgaactgtggcgcaagctgttcaacgacaggtggggagcggacgctgcagcgttctacgcgccggagggctccaagtcttggaaggacgtcttcgccgtgcaggaccggtgcgaccgatacggactgggtgtcaggatcatcagggaagggaaggactactacctgatctaccagggcgagatccagaggtacttgggctcccgccaggacacggatggcgactgcggcgaggacgcgccacggcgggacgctggagacgagcatcggcagatatccgaccggatcctgttcttcctcggggatctggagaaagcctgcgccgacgccaaacgtgttaaggcctgaacacgcgctacccttgtgcccctgatcatcatcagcacaatattccacgctgagtcttgttaatttgtgcatgtctcgtgcatagtttctcaccatcaattcatgtagttggaaatcatgctcacatcgacactgaaattataattcaagtacagtcgtttagagggtaaaactacctgatcccc

SEQ ID NO: 123469 - DNA, 1315 bp, Zea Mays
ccatctttacctaagattaccaactgctaccagcccaaggctattagtagttttagtatatgttatgttggtattgtcctcatgctgatgcattgtattcgagcagctttattgttttttttattaatagaggatttgtatttattctacttcgaccaggtaattgctgagagcctttcggaggaggagattgcagggctgaaggaaatgttcatggcaatggatacagataatagcggtgcaattacatatgatgaactgaaggaaggattgagaaagtatggctccacattaaaggatactgaaattcgtgatctcatggaggcggcggatatagacaacagtgggaccattgattatatagaattcattgctgctacattgcacctcaataaactggaacgtgaggaacatctagttgcagcattttcgtattttgacaaagatggcagtggttacattactgtggatgagcttcaacaagcgtgcaaagagcataacatgccagctgcttttcttgatgatgtgattaaagaagctgaccaggataatgatgggcgcattgattacggggaatttgttgccatgatgacaaagggcaatatgggagttgggaggagaacgatgagaaacagcttgaacataagcatgagggatacgcctgctggtgccctctgaagtctgagcatccaagaaatttgttgcagtatgagagaacgcctggtacgggctgcggaaagcttcttctaatcctttcctacacgaattctgcctacattttttggttgctatatctgttgaagcattgtagggttgtttcaggaattccgggtagggtaactcaactcctgctctttcctcgatgagaagtgtgaattgttatgcgttagttggattgcaaatgttcgtagacgtcgggcgtgtttgattttcttgtgcccttgcctcacctaacctagctgggcaagggtaccctcgccagccgaggcaagctgaagcggctcacctgatacctggccaagcatggaaaaatctttacggcacgggaaacgaggcagatggtaaagaatccaatccaaacacaaacaggctggattttgtccagacaggcgaggcaagcgcttggcgtcttggcgaggaaaccaaacgttcctgttgccctcactaattgcaagttttcatatgcagctgggccatcacgccaaaaaaaaaaacttctctacgtgtaaacgtgtatattcgacatcctgatataaataggaatttcaagctggctcaagcatatgtcatacttaatcatttgctttcgctcatt

SEQ ID NO: 123470 - DNA, 2673 bp, Zea Mays
ccggagcagcggcacacacagcgcgactgcagcaaagcagccttcgcttcgctttcctcgcagcgtgaccgactgaccgcgaagccgccgtgaaccctcctcatccccgtcccccctgctccggcttcgccgggctcctctctcccacttgcgccaacattcaagccccgaccccaattcacatccgaggcgctcgcccctttccatctccatcgcccacgcccacgcccgcgcgtctcgtgtccacgcctcgccgcgacttctcccccctaaaccccgcgagaggccgaggtacatgagagagtgatcggcctcgccttcgcgcccacgctcgcgccgagagtgtgatgggcaacacgtgcggcgtcacgcttagatccaagtacttcgccagcttccgcggcagcgcgtcgcagcgccgtgacgcgccggggtactcacctgtcgccacctccgcggccgccgatgaaccctcgccgcatgggaacgggaagcgagccacgcgtccgtcccaggctgcagcggcggcggacgggtcagccccgccccccgccccaggcatgcggcgcggggtgccggcccccgcggagctcacggccaacgtgctgggccacccgaccccgagcctccgcgaccactacgcgctcggccgcaagctggggcaggggcagttcggcaccacctacctctgcacggacctcgccacgggcgtggactacgcctgcaagagtatagccaagcggaagctcatcaccaaggaggatgtcgaggacgtgcgccgcgagatccagattatgcaccacctggctggccaccggaacgtcgtcgccatcaagggcgcgtacgaggaccagctgtacgtccacatcgttatggagttctgcgcgggcggggagctcttcgaccgtatcatacagcgggggcattacagcgagcgcaaggccgcggagctcacgcgcattatcgttggggtcgtcgaggcttgccactcgctcggggtaatgcacagggatctcaagccagagaacttcctgctctcgaacaaggatgacgatatgtcgctcaaggccatcgacttcggcctctccgtgttcttcaagcctggtcaaatttttaccgatgttgtgggaagcccttactatgtagctccagaagtgctgcgcaaacgatatggaccagaagctgatgtgtggacagctggagttattctttacatacttctatgtggtgtaccgccattttgggcagagacacagcaaggaattttcgatgctgttctgaaaggtgtaattgattttgatttggatccctggcctgtgatctctgagagtgcgaaggatcttataaggagaatgctgaatcctatcccatcagagcgcctaacagcacatgaagttctatgtcatccatggatttgtgaccatggagttgctcctgatcgtcctcttgatccagctgtcctgtcacgcatcaagcagttctcagcgatgaacaagttaaagaagatggctttgcaggtaattgctgagagcctttcggaggaggagattgcagggctgaaggaaatgttcatggcaatggatacagataatagcggtgcaattacatatgatgaactgaaggaaggattgagaaagtatggctccacattaaaggatactgaaattcgtgatctcatggaggcggcggatatagacaacagtgggaccattgattatatagaattcattgctgctacattgcacctcaataaactggaacgtgaggaacatctagttgcagcattttcgtattttgacaaagatggcagtggttacattactgtggatgagcttcaacaagcgtgcaaagagcataacatgccagctgcttttcttgatgatgtgattaaagaagctgaccaggataatgatgggcgcattgattacggggaatttgttgccatgatgacaaagggcaatatgggagttgggaggagaacgatgagaaacagcttgaacataagcatgagggatacgcctgctggtgccctctgaagtctgagcatccaagaaatttgttgcagtatgagagaacgcctggtacgggctgcggaaagcttcttctaatcctttcctacacgaattctgcctacattttttggttgctatatctgttgaagcattgtagggttgtttcaggaattccgggtagggtaactcaactcctgctctttcctcgatgagaagtgtgaattgttatgcgttagttggattgcaaatgttcgtagacgtcgggcgtgtttgattttcttgtgcccttgcctcacctaacctagctgggcaagggtaccctcgccagccgaggcaagctgaagcggctcacctgatacctggccaagcatggaaaaatctttacggcacgggaaacgaggcagatggtaaagaatccaatccaaacacaaacaggctggattttgtccagacaggcgaggcaagcgcttggcgtcttggcgaggaaaccaaacgttcctgttgccctcactaattgcaagttttcatatgcagctgggccatcacgccaaaaaaaaaaacttctctacgtgtaaacgtgtatattcgacatcctgatataaataggaatttcaagctggctcaagcatatgtcatacttaatcatttgctttcgctcatt

SEQ ID NO: 123471 - DNA, 1199 bp, Zea Mays
ccatctttacctaagattaccaactgctaccagcccaaggctattagtagttttagtatatgttatgttggtattgtcctcatgctgatgcattgtattcgagcagctttattgttttttttattaatagaggatttgtatttattctacttcgaccaggtaattgctgagagcctttcggaggaggagattgcagggctgaaggaaatgttcatggcaatggatacagataatagcggtgcaattacatatgatgaactgaaggaaggattgagaaagtatggctccacattaaaggatactgaaattcgtgatctcatggaggcggcggatatagacaacagtgggaccattgattatatagaattcattgctgctacattgcacctcaataaactggaacgtgaggaacatctagttgcagcattttcgtattttgacaaagatggcagtggttacattactgtggatgagcttcaacaagcgtgcaaagagcataacatgccagctgcttttcttgatgatgtgattaaagaagctgaccaggataatgatgggcgcattgattacggggaatttgttgccatgatgacaaagggcaatatgggagttgggaggagaacgatgagaaacagcttgaacataagcatgagggatacgcctgctggtgccctctgaagtctgagcatccaagaaatttgttgcagtatgagagaacgcctggaattccgggtagggtaactcaactcctgctctttcctcgatgagaagtgtgaattgttatgcgttagttggattgcaaatgttcgtagacgtcgggcgtgtttgattttcttgtgcccttgcctcacctaacctagctgggcaagggtaccctcgccagccgaggcaagctgaagcggctcacctgatacctggccaagcatggaaaaatctttacggcacgggaaacgaggcagatggtaaagaatccaatccaaacacaaacaggctggattttgtccagacaggcgaggcaagcgcttggcgtcttggcgaggaaaccaaacgttcctgttgccctcactaattgcaagttttcatatgcagctgggccatcacgccaaaaaaaaaaacttctctacgtgtaaacgtgtatattcgacatcctgatataaataggaatttcaagctggctcaagcatatgtcatacttaatc

SEQ ID NO: 123472 - DNA, 493 bp, Zea Mays
aagttccccgtccatctcctccgcggctcgccctcctccgcccccgcctgctcccctccatcgccccacaaatcgcttctctttcccgaaccttatttaaacccggaacggcagcgtccaaaacgaaaagatcctcctcctgtcctgtcctgcctctcatcgcgcacggcaggcagcacagcagcagcagcagcgtattgatggtggatggatggacgcccagtcccttcattactcttttttgctggtacaccaccaaaccattctactatttaattaatgtcgtattggagccgctgcagttcagttccactggccatctgtacaggaaactcgcaagctgcaggagtacaattttgtcgaaatacttacgccgccgctaatggctgacagcaattaggaggagactgccgggcctctctcttttttagtgacctccgggctgcagtccacgatgtgaaacatgtgatgatgatgatggggatgtttgtaa

SEQ ID NO: 123473 - DNA, 1564 bp, Zea Mays
atcaagttccccgtccatctcctccgcggctcgccctcctccgcccccgcctgctcccctccatcgccccacaaatcgcttctctttcccgaaccttatttaaacccggaacggcagcgtccaaaacgaaaagatcctcctcctgtcctgtcctgcctctcatcgcgcacggcaggctgcacctgccgccgcatagtagccagccaatctcgcttaaacaaaacccatccaaatttaagcattcctagcccgaaaaagggggcacagccgaaagtgaaggaaggcagcaggtgcacctgcgccgtcgtcgcaagtttcgcttcgcttcgcttcgctccgcacacgcgccttcctcgtcgtcaatccgtccgtccacccacccacccacctacttcgccgagtgcacgccccggggctccggcgacgtacgctgggggagaggagatgagataaagacgaggcgcgggcgggcatgaggtgcaagaggcacccgaaccaggccggcggcggcgtgtgcgccacgtgcctccgcgaccgcctgctcgcgctcgaggccgcgcagagcggcgacgcgtccccgccggggcccgcgcaggcgcaggcgcccgagcccccgccggcgttcccgaggtcggtatcgccgtacgtgtcccgcaggaagtcggacacgtcgggcggcgcgctcaggcaccacccgagcctgctcttcttccggacgccgcaggtaggccccgcctacggaggcggcggcggcggcggcgcgctggaggaaccccacataggctacggctacgggtacgggcacgagaagcggcgcgcgggcaagttctccgtgctcgccacgctcttcggccgccaccaccaccaccgtagaccagaagcgaggcaccaggagcggaagaagcattcttggctcgccggcatcatgccgcgccgccgccgcagcaaggggcaggtgccggcctcggccacctcgccacagtcggccccgccgaggcgctcctgccgcgcggtcagcaaccgggggctctcgccggagcgggacggcgacggcgacgacgacgagagcagctcgcccgccgcgtggcggccgtccccgtcccccatgcggcggaccacctgccggcgccgccagacgagcggcagcatgccgtcgggcttcgccgtctgcctcagcccgctcgtgcggcccatcccggggcgccggcccgtgcagccgccggacccgggagcattctccagcgagctccggccgccgccgccgccgccgctccacagcagcctctcgtccgcctccgtcacgcgctgtcgctccaggaagctcgccgacggtggccgcttccggtgatcttccccacggcttttcgttccatggttaataacaccatcctaatccaggttacaatctcttttttcttttggatttgttgcattttgtctatcccgtgaggaaaagagtctgtaaaagattggcgcacccaaaccaagtccaaaccaccccgttgacattatactgctgctgcgtaggttgcttgttgtcggcccaacattttctggcattgta

SEQ ID NO: 123474 - DNA, 748 bp, Zea Mays
acaaactggataacggcctcttccgtcccgtcccgttcgcggttcgcccactccccatccccaacgctatcatggcctcgctccaccccacgacggcaatgctgctggcccagcgccattctcctgcaccatctctcaggtctcagcacatcgtcgctctcatggtctgcctccgtagccatcttcagcatcgagtcggcccctggcctcgctctctactcaccggtcccgcctccggcaaccgccagagcacggtggtgtgtgcggcgtggacgcggcggtcgcgcggggagacggagcagcggcccaaccgcaagtcgtggaaacagacatgtacatgcgccccttcctgctcaattttttttccctccaagcgcttcgtgcacgcaaaggtcatgcacaggggcaccagcaaggtcatcgccgtggccaccaccaacgacgccaaggacttccggctcaccctcccatcccttgtcgacgacaacgcctgcaggaccaccgggaggctcatcgccgagaggtccatggacgccgacgtctttgctttggcctatgagcccaagaagaacgagagtcgagagcaagcttggcatcgtgattgagaccattaaggagcacggcatcgtctttgtataggcgagtttcagggtaggagtgtggctgttgtgttttagtttcgaatcctgtagcctggaaattgttactttatttagatcaaaacaaatggaaattgttgctgacaatt

SEQ ID NO: 123475 - DNA, 2922 bp, Zea Mays
accaatcgattaaataaggaaaaggctcttacattggctgttggtgatgaagatactgacatgcttgctgatgtgaaacagatggcagctgcagcagctgcagcaggacaagcgagttcatcatttgagaaccagctccggccaattgatagatatgcaatgcgctttatggaactctgggatccagtaattgacaaagctgctttaaatcatcaagtaaatgttgaggaggaagaatgggagcttgatcgtattgaaaaattcaaagaggatttagaagcagaaattgatgaggaccaagaaccactttcttatgaatcatgggatgttgattttgctacgacagcctatcggcaacatgttgaggctttaactcaaaagcagttgttagaagaacaggaaaggcaagctcaggaagcaacaaaagagttggaggagaagaatgataatatgagtcaccacagaaagtcaaaaaagaacaaaaagaagacaggcaaactcaagcccctgaaaagagtgcgtctgtcgcctgaatcagaagtcatactggaggaaacctctgtagataatgcaccctcacctgagcttacaagtgatgaatcgccacaccattattgtaacaagcgtaagaagattacggttgccactgaggaaaatagtaacagcagaagtttaaagaagctcaagaaaactactaaatcaagttttatttctgaagccttgtcacctaggctgaaggaggaccttaatgattcagattcaaaatcagtgggtagaactaaaagtgatggcagatttttcatcccttgcatgccagtgaaacgtgttattgtaataaagcctgagagattgaaaaggaagggaatatggtctcgagattgtgcttcagactcatggtcatctgaggaagatgcagttctttgtggaactgttcatgagtatggtccactttgggaattggcaagtgattttcttcattttttgccaggcggttccttgtataggggaagatatcatcatcctgtgcattgctgtgagagatacagagaactgttctgcaaacatggaatgtcagcaacagataattctaacagtgaaaaggttccttctgggactggaaaggctatacttagagtgtctgaggatcaagctcagatgttggtgaatgtgaccagtgaacttcctaacaatgaattgcttctccagaaacacttcatggctgtaatttcgtctgtttggagatcaaaatgtcaccgtgatacctcctgttttacgaacacttactctagtgcattacatgtgttttctcctgtgaagaaacctggtggatcatgtgagaactggcccatggtaaactttagaccaagcttcaatctagttaggaaagcccttgcagatgttcaggctaagtctacactaatggtgattccacctccgtcaaggaatcaggaatacccatgcaattatttagaattagagttagatttcttgaaagatcaacatgcttatgatgaagacatcccatctgtagtaaatgtgtccatacaggaaccagaaccatccaaacagacgccagagccagtggaacaatcgttgttgtctgcactttcttgtagacaggctgagaaccggctcaggatagcatcagaagcttgttatgatggtgaaagttctcattgggcatcatcagcttttcacataaatgatgctgcccgccacaaatctggttcaaagtctataggaaagcacaaagccgcattggaatctggtagacttctcaaatccaaagttcagaagattactgaatcgcatcaggaaggggcaattgctatgagtagttttctccgtatgcctgctcaactattgccaagtacagctgacttccacattagtgactccctatctgactttggtatcagagattctgaattctatttttccgaggatctcttgcaagaggttgacgcccttgagttcttcccagatcagggtgactctggtctccttcctggtattgaagagttagaatctctttcggatttcacagatatcggatgaacatagatgagcaaattattgttgatgggatgccctcctataccaagaggagacaagattgcctctggcaggagcccaaggatacaggttgaattgctcagccgtgcacagatgtgttgcaagcagcaagctatcatcatggctggctggagcaaagcactggcttggtgaggtcacattgatctgacaagctcggaggatgggtttgcactaatggcggcatttgggtaatttccatacatgtatgtatattggtagtctagaatcgtaggatgtagaaatgcctccctcatttgtgtttgagggtaggaccttgtaactcgaccacatggaaattttgttgagcaggtaccaacatagaagggaaaagaagaggccctcagcatcacccatttgtcgctgtatctcttgttatgttcattctctgtttaatccaatgctgtttggctatcttgccattgaaaacatctcagatgtcaagttggtggtgtacatatctatcagaagtttaggatgcggcgtcaatatagctgccaaagaatgatcagtcaagtgcaacttatgggcacattatatatttggtcaggactcaacgcatggtatcaatattggcagaaatggtgttccagatgcacttgaggactgcaatttctggtttgattgagacaccggagacaggtttttcataggaggtaaagagcgtggtcatagttgtacatgtaataaaattatgtagggtagtaatctccatcctgtacttttgggcttatggttctttggactctcggtctcggttatgcacttgtagaacagcgggctgctgctgtgagcctgtaacaatgctattgattgttccccaccata

SEQ ID NO: 123476 - DNA, 2859 bp, Zea Mays
gaattcagtgaggaggctgcgggcagacaagaggaggatgaattggttaatgaggagaatggaaaacccgatgagcacattaacgaagaacaaaaatataactcttctgatgtagagaaggagaagcacattactctgtctaccaatcgattaaataaggaaaaggctcttacattggctgttggtgatgaagatactgacatgcttgctgatgtgaaacagatggcagctgcagcagctgcagcaggacaagcgagttcatcatttgagaaccagctccggccaattgatagatatgcaatgcgctttatggaactctgggatccagtaattgacaaagctgctttaaatcatcaagtaaatgttgaggaggaagaatgggagcttgatcgtattgaaaaattcaaagaggatttagaagcagaaattgatgaggaccaagaaccactttcttatgaatcatgggatgttgattttgctacgacagcctatcggcaacatgttgaggctttaactcaaaagcagttgttagaagaacaggaaaggcaagctcaggaagcaacaaaagagttggaggagaagaatgataatatgagcagtcaccacagaaagtcaaaaaagaacaaaaagaagacaggcaaactcaagcccctgaaaagagtgcgtctgtcgcctgaatcagaagtcatactggaggaaacctctgtagataatgcaccctcacctgagcttacaagtgatgaatcgccacaccattattgtaacaagcgtaagaagattacggttgccactgaggaaaatagtaacagcagaagtttaaagaagctcaagaaaactactaaatcaagttttatttctgaagccttgtcacctaggctgaaggaggaccttaatgattcagattcaaaatcagtgggtagaactaaaagtgatggcagatttttcatcccttgcatgccagtgaaacgtgttattgtaataaagcctgagagattgaaaaggaagggaatatggtctcgagattgtgcttcagactcatggtcatctgaggaagatgcagttctttgtggaactgttcatgagtatggtccactttgggaattggcaagtgattttcttcattttttgccaggcggttccttgtataggggaagatatcatcatcctgtgcattgctgtgagagatacagagaactgttctgcaaacatggaatgtcagcaacagataattctaacagtgaaaaggttccttctgggactggaaaggctatacttagagtgtctgaggatcaagctcagatgttggtgaatgtgaccagtgaacttcctaacaatgaattgcttctccagaaacacttcatggctgtaatttcgtctgtttggagatcaaaatgtcaccgtgatacctcctgttttacgaacacttactctagtgcattacatgtgttttctcctgtgaagaaacctggtggatcatgtgagaactggcccatggtaaactttagaccaagcttcaatctagttaggaaagcccttgcagatgttcaggctaagtctacactaatggtgattccacctccgtcaaggaatcaggaatacccatgcaattatttagaattagagttagatttcttgaaagatcaacatgcttatgatgaagacatcccatctgtagtaaatgtgtccatacaggaaccagaaccatccaaacagacgccagagccagtggaacaatcgttgttgtctgcactttcttgtagacaggctgagaaccggctcaggatagcatcagaagcttgttatgatggtgaaagttctcattgggcatcatcagcttttcacataaatgatgctgcccgccacaaatctggttcaaagtctataggaaagcacaaagccgcattggaatctggtagacttctcaaatccaaagttcagaagattactgaatcgcatcaggaaggggcaattgctatgagtagttttctccgtatgcctgctcaactattgccaagtacagctgacttccacattagtgactccctatctgactttggtatcagagattctgaattctatttttccgaggatctcttgcaagaggttgacgcccttgagttcttcccagatcagggtgactctggtctccttcctggtattgaagagttagaatctctttcggatttcacagatatcggatgaacatagatgagcaaattattgttgatgggatgccctcctataccaagaggagacaagattgcctctggcaggagcccaaggatacaggttgaattgctcagccgtgcacagatgtgttgcaagcagcaagctatcatcatggctggctggagcaaagcactggcttggtgaggtcacattgatctgacaagctcggaggatgggtttgcactaatggcggcatttgggtaatttccatacatgtatgtatattggtagtctagaatcgtaggatgtagaaatgcctccctcatttgtgtttgagggtaggaccttgtaactcgaccacatggaaattttgttgagcaggtaccaacatagaagggaaaagaagaggccctcagcatcacccatttgtcgctgtatctcttgttatgttcattctctgtttaatccaatgctgtttggctatcttgccattgaaaacatctcagatgtcaagttggtggtgtacatatctatcagaagtttaggatgcggcgtcaatatagctgccaaagaatgatcagtcaagtgcaacttatgggcacattatatatttggtcaggactcaacgcatggtatcaatattggcagaaatggtgttccagatgcacttgaggactgcaatttctggtt

SEQ ID NO: 123477 - DNA, 1655 bp, Zea Mays
atggcgtcaaaaggtccccggtcaaagttagaccatgagacaagagctaggcgtcagaaggctcttgaagctccaagggagcctcgacgaccaaaagttcactgggaccatgtccttgctgagatgatgtggctgtcaaaggagtttgattctgagagaaaatggaagttgtccatggccaaaaagattgctcaaagagcaaataagagcatagttgaccaagcaacaaagggcgagagaaaacagaaggagaaagaacatagaatgcgaaaagttgcccttaatatttcaaaggatgtgaagaagttctggatcaaaatagaaaagctggcaagttcatttttgacttctaatgtcatgagaaagcaggttgtttataagcaccagctggagcttgaggagagaaagaagaaggcacttgataagcaacttgattttcttttaggtcagactgaaaggtattcgacaatgttggcggaaaatcttgtggatatgccctatcccgaaaacctagaaaacaggacttcacagataaaccaacgatcccatcaagaggaagtaccagaaaagaacttaaatgcaaccatttctgatgattttgataatatggaagtcgatgatgattatgagagctccttggacgaagagccagaagatgatgagcacacaattgatgaggatgaagctcagatcactgaagctgagcgcaacgaagaactagctgctttagaggcagaagctgatctaccacttgatgttattctcaagatgtacacaaaaactaaagttcaatatgtctcagttagcagggaaggcagtccagatagcaaagacatgctaagtaacttaggttcgaagattttgattgtagattctttgaagcaggctaatgggcgtgatcatgaacctgctcactcttcaagtgaagatggcaattcttctgaggaagtggatgatggccattcttatgctgagtttgtgaagaagaatcattgctgtgtaccttcctggtgcggcgccttcgcagttaggctcatggctctatccttggctgcagctatcgaggacaaagattacattgctactgaagaagtaaaggatgatgaagcaactttgtctgaagaggaagaattggcaaaaaaagaagatcctgattatctggaagaggttaagttactgcagaaggagagcgagataccactagaagaacttctcgcgaggtaccgagaggatggctgtgcagatcatgaaacagcggagttgaagaattcaccccattttgttgaagaggtcaatactgacatgtctttggatgatcaatctgtgagcattttggaagcgaaaagtgatttatttgtggatcaccaatccagggatgtgctggaaactgaggacacggctccacgatcagaaatcgcatcagagccttgtgctaaacaaaattttgatgaagagaataatctcactgatgttaagacagtcaatggagataagagtgatgatgtaaagagtgatgatgtaattgctgatgctgcagctgctgcaagatcagcacaaccaactggcaacaccttcttgactacaaaagtgcgcacgaaattcccattccttcttaagcattctcttcgtgaataccagcatatagggctggattg

SEQ ID NO: 123478 - DNA, 1319 bp, Zea Mays
gacgtcgtccgccgtcgccaggccgcacccttcctccacctgcactgcacagacgaggtcatgagaacagggaggggtgggtgggaatctgcgggtacacatgagcctccgatccaccactgcccgtgtggtcgtaaactacgccacagtgtccaactgccgatgccgtgtccaaaaatactactactactacacagttggtactactactaccggcggggagcaagaaaagactcaggtgtacagtgttcgtgtcaggcccgcccattggattctcatcagagctagatttgggcgagaaaatgtcgattcgcctccaacatcgcaacaataatgcatgcatgcactgcttccagttccagtttggtggtgcaggaaaggtggaaaggacctctcctgccagccggaccgcagcgatgtgatcactcatgtcatgacccctggatgtttgttttggtctacacatccagcagcaggagaataatatatggcacgcttttgttccaggcctacaagtactacttaaagatggattctgccgaagcatcaatggacgacgcaaacgcaaacttctttgctgctcgctctagttttcgagctgtgtgtgcatcggtttgtgttcaaagcttaatttttcattgggaaaaacttattagagcagcagcgaacgcgcgcaccttgacgctgatggagtagaggacaagggcgtccagcgtggtgacgctgaggtggagcacggcgaggcggagcgcctggagcgcggtgaccaggcagacgagctgcccgggcctccgcgccgtcatcacgcggatgctaccgtgcgcctccaccaaggccacctcgacgtcggccacccccaaccgccggccgtcctcctcctcctccgctgccgccgccgcagcagcaccgcgcgccgagtggcaccacaggtactgcgggtacgtgaagaaccgcgcgaacggggccggccgcgcgtggcccgccgcgtcctccgtcacgctgctgctgctgctgcagttgctcgtcgacgccgccgcggaatccacgcggatcttggtgctgctgctgctggcgtgcgctggcgtcgcgtcaggcttcgccgccgccggaacgtgcagcagcttccgcttctgcgcctcgaggcactgcagctgctgctccagctccctcacgaacacgattgcccctcccacgatggaagcttggtccccctgcgaacgttttcgaaaccgttagttttgccaggatttgccgatttattatctggactatggacagacatgcagtgacattatttgccgatttaattaactactaca

SEQ ID NO: 123479 - DNA, 1371 bp, Zea Mays
gtgtctccctgactccctccctctagaattttacagtattctactcgctgcctgcgttccaaaacctttcgtcttttcccccgccgtctacaaagacttcacactcgcagccgcaggctgctccggcagactcctacaccgggaagacttctcctctcctctctcctctctcctctctcccttccactcgcgctctcctggataccgcgcgcggcgacgagatggcgatagatcacgcgacccctctcgggctgaagcggagaggcgccatgggcggaggcggcgagtgcgacgacggcagtgatacccggcggtggccgccgtggctgaggccgctgctgtccgcgagcttcttcgtccaatgcagggtccacgccgacgcgcacaagagcgagtgcaacatgtactgcctcgactgcatgggcggcgcgctctgcgcgctctgcctcgccgcgcgccaccgcgaccaccactccatccagatacggaggtcgtcgtaccacgacgtgatccgggtgtcggagatacagaaggtgctggacatcgccggcgtgcagacgtacatcatcaacagcgcgcgcgtggtgttcctcaacgagcggccgcagccccgcccgggcaagggcgtcaccaacacctgcgaggtctgcgagcgcagcctcctcgactgcttccgcttctgctcccttgggtgcaagatagtgggcacggcccgtggctaccgtcctgggaagaagaagcacggcggcggcggcggtaacaagaagagggcgtcgccggcgccggcgcttaaggacgtgcggtctgactcggaggactcgtgcaccagcaccagcggcgccagcagcgacaagagcagcgtcgtgcagagctcccctccgccgccgacctctgccagccaccgcccccccgggaacaagcgccggaagggcatcccgcaccggtcgcccttgggcagcctcatcgtcgagctctaggactcttcgtcagcgccaaggcaaggcaacgcactctgtatacatgacatagccccccgaagagaagggaataacaaacagtaagcctctggacgtggagggcgaagggcgacagcggtaagccgtaagatcggacaatccttagttttgcttcttctcaggttttgttttgcttttacagttactagcagtggtaccatcagtaagataaccgcgactaagttttgcagccttgtacattgtaatattattactatagaccatgactctccgatgcttagatgtatatagtaatagtatcagaacgtgggggtagcagtcgatcggcagcgaggtgttcgtcgtatgtgcatcataagctgtatgtaataaaaataagaaacgctgctccaga

SEQ ID NO: 123480 - DNA, 4343 bp, Zea Mays
cccactacaacgagcgaaacctatcgcctcctccgatcgccattaacgggtcggtggctctgcgccaccacggcaccacctgtgcccgcgcggacgagacgctgctggcaagctcaccgcccctacagtcgacagcgagcacggcagctagcaggctagcgcacaccgaaccaactcccttttggccgtttcaaactcttttaaagccccaccagctggtgcaggcaccgtcatcactcctaggctcgaccgctcgaggccgaaaggcacgaccttcggccagtcgagcagctgggcgcgtggcgcggccagggacgagggcgccatgagctcgccggagaatggcgccgccccggaggccagcgggaagaagaagaagaaggcggaagaggaggaggtggtggccaaggtgccgttcctgaagctgttctcgttcgcggaccggtgggactgcgtgctgatggcggtgggctcgctgggcgcgtgcgcgcacggcgcctccgtcccggtcttcttcatcttcttcggcaagctcatcaacatcatcggcctcgcctacctcttccccaccaccgtctccggccgcgtcgccaagtactcgctggacttcgtgtacctcggcatcgtcatattcttctcgtcgtggaccgaggtggcgtgctggatgcacacgggcgagcggcaggcggcgaagatgcggctggcctacctgcgcgcgatgctggaccaggacatcgccgtcttcgacacggaggcgtccaccggcgaggtcatcaacgccatcaccagcgacatcctcgtcgtccaggacgccatctccgagaaggtgggcaacttcatgcactacatcagccggttcctggccggcttcgccatcggcttctcgcaggtgtggcagatcagcctcgtcaccctcgccatcgttccgctcatcgccatcgccggcggcacctacgcctacgtcaccatcggcctcatggcccgcgtgcgcaagtcctacgtcaaggctggcgagatcgccgaggaggtgatcggcaacgtgcggacggtgcaggcgttcgtcggcgaggagaaggccgtgaggtcgtaccgggaggcgcttctgaggacgtacaagtacggcaagaggggcggcctcgccaagggcctcggcctcggctccatgcactctgtgcttttcctctcgtgggcgctgctcatctggttcaccagcgtcgtcgtccacaagcggatatccaatggcggcgagtccttcaccaccatgctcaacgtcgtcatcgctggcctgtcgctcggccaggcggcgccgaacatttcgacgttcctgcgggcgaggacggcggcgtaccccatcttccagatgatcgagaggagcaccgtgaacacggcgagctccaggacgggccgcacgctgccggtggtcgacgggcacatccagttccgcaacgtcgacttcagctacccgtcacggccggacgttgtcatcctcgataggttcagcctgaacttccctgccggcaagatcgtcgctctcgtcggcggcagcgggtccggcaagagcaccgttgtctcgctcatcgagcgcttctatgagccgctgtccggctccattctgctcgatgggcacgacatcaaagagctcgacgtcaagtggctccgccgccagatcgggctggtcaaccaggagccggccctgttcgcgacgagcatccgggagaacatactctacggcaaaggcgacgctaccgcggaggagatcaaccacgcggcgaagctgtcggaggcgatcacgttcatcaaccacctccctgatcggtacgagacgcaggtcggcgagcgcgggatacagctgtccggcggccagaagcagcgcatcgcgatctcgagggcgatactgaagaacccgtcgatactgctcctagacgaggcgacgagcgcgctggacgccgagtccgagaagagcgtgcaggaggcgctggaccgcgtcatggtcggccgcaccaccgtggtgatcgcgcaccgcctgtcgaccatccggaacgccgatacgatcgcggtcgtcgacggaggcaggatcgtcgagacaggcacgcacgagcagctcatggcgaacccgtacagtgcctactcctcgctgatccaactccaagaggctgcccagctccaacacaagccttctttgtctgacagcgcaagcattaccaggccactaagtttcaagtattcaagggagttgtccgggaggacgagcatgggcgccagcttccgctccgacaaggactcaatcagccggtacggcggcgccggagaggcgcatgacgaggtgcgcaaggggaagcccgtgtccatgaagaagctctactccatggtgcgcccggactggttcttcggcctgtcgggcaccatcagtgccttcgtggccggctcccagatgccgctcttcgcgcttggcgtcacgcaggcactggtgtcctactacatgggctgggagaccacgaagctggaggtgcgaaagattgccgtgctcttctgctgcggcgcggtgctgacggtcgtgttccacgtgatcgagcatctcagcttcggcatcatgggcgagcggctcaccctgcgcgtccgggagaagatgttctcggcgatactgcggaacgagatcggctggttcgatgataccagcaacacgagcgccatgctgtcgtcgcggctcgaggctgacgcgacgcttgtgcgcaccatcgtcgtcgaccgctccaccatcctgctccagaacgtcggtatgatcgtgacgtcgctcatcatcgctttcatactcaactggagaatcacgctggtcgtccttgccacctatcccctcatggtcagcggccacatcagcgagaaaatgttcatgaaaggctacggcggcaacctcggcaagtcctatctgaaggccaacatgctcgccgcggaggcagtgagcaacatccggacggtggctgccttctgctccgaggagaaggtgataaagctctacgcggacgagctcagggagccttctaagaggtccttccggcgaggccagggcgccggcctcttttacggagtctcccagttcttcctcttctcatcctacgcactggcgttatggtatggttcagtgctgatgagcaaggaattggccagcttcaagtccgtgatgaagtccttcatggtgctcatagtgacggcgctggccatgggggagacactggcaatggcacctgatatcatcaaagggaaccagatggcgtcctcggtgttcgagatcctggaccgtaagaccgacgtccggatcgacacaggtgaggacatcaagagggtcgaggggctgatcgagctgcgcggcatcgagttccggtacccgtcgaggcccgacgtgaccgtgttcaagggacttgacctgctgatgaaggctggcaagagcatggcgcttgtcggcatgagcggctccggcaagagtaccgtgctgtcgctcatcctccgcttctacgacccgatcgccggaagagtcttgatcgatgggaaggacgtcaagaagcttaagctcaagtgtctcaggaaacacatcggcctggtccagcaagagccggcgctgttcgcgacgacgatctacgacaacatcctgtatggcaaggacggggccacggaggccgaggtcgtcgaggcggccaagctggcgaacgcgcactcgttcatcagctcgctgccggaggggtacaagaccaaggtcggggagcgcggcgtgcagctgtcgggcgggcagaagcagcgcatcgcgatcgcgcgcgccatcgtgaaggacccggccatcctgctgctggacgaggcgacgagcgcgctggacgtggagtcggagcgcgtcgtgcagcaggcgctgaacagggtgatgaggaaccggaccaccgtgatggtggcgcaccggctgtccacggtcaagaacgccgacgtcatctcggtgctgcaggacggcaagatcatagagcagggggcgcaccagcacctgatcgaggacaagaacggcgcctaccacaagctcgtcagcttgcagcagcagcaacagatgcagacgcagcagagctcatcagaagacatttgaataagatcgtgcgtttctgtatcttgctgtggctttgtctttcttgggcttttgtaaaagatctgcgctggttatcttttcaatgaaagggagtgttcagaattacaggatgaagcattattgggttcttattcctgactcccgtaaaaaaatatatatattgtacatagaatcttgcaatgtaattctgctccatggatctcaatgtttagtgcctacttctgattct

SEQ ID NO: 123481 - DNA, 261 bp, Zea Mays
atgagagagctttcaacggtgtcgtaccaggcggcggcagagatgctagggagtgtgaaagtgtgcagtcgttggcatctcctgaaccggatctgcagcctcacgttcgccgcgacggctagaggatgcaggaggttgaggccgacagcgggaggttcctccaatggcagatgggcggcgctgcagatcaagctctcgacgattgagtgtccctgcgaggtgcattcaaaggtggaggagcacccgggactccctgcgtag

SEQ ID NO: 123482 - DNA, 1755 bp, Zea Mays
aacttccaattccagtcctttaaaaaaacttccaatttcagtttcggaggagttggttcttggatcgaggcgccgggagccatgcgcaccaaacacctcatccctaacaacgccgccggactcacctacgcggcgcgcgactactccgccggcgaggatcacggcgggggcgacggagtcggcggcgacccgtttgagggttttcccgacgcggtgctggggctgatcgtgtccaagctgccgttacggtccgctgtcgcggcctcggctatctcgcgccggtggcgcggcgctgtcgccgctgcgcccgcgctggacctcgacttcgccgcggcgttccccgccgcgccgcgccgcagggcggcgttcgcggccgccgtcactgccgcgcttgggtcctccgctccgccgcatcgacacccgctccgtcgcctccgcctcgcgctcgagggtttctttgaccaggcgtttgctgcctccgccgccgaccacctcgcctcgtggctcaccgcggcggcggcacgcggcgtcgagcggttagagctccacctcccgcgctcccgcctcgccgttcttccgccctccctcctggcctgcaccagcctcacgtccctgacacttcggctcgaccgctacgcacttccgctcccttctttcaccacattcacccgcctatcccgcctccacatcgcttgtgtctcgctcaatgcggaggatgacttcttcggggacctcttcttgcactgcaaagaggtccgctacctgattcttgaaaaatgccgcgtcggtgctcttcgccttaccggtccgtcgcggctttgctcgctcgccatcacggactgttcttggacggaggagtcggctcttgctgtttttgagatgccggagctgcggatactccactactccggcgcaatagcagctaggcacattattgatggggaagtttctttggaggacgtcctccttaacatcgagaagccattggtcaagcctcgggaggctgctctcagagagcttcttactttggttggcaatgcacgaagacttgctctttcaccctggtgcatcgagcaatttgcacgtccagaggaatggtcgaagttgcagttagacaaggtaaggtggttgacatgtatagttgagaggagggaagaaggtgcattatccattgtgccactgctatcaaactgcagaaatgtggaagagctctgcgtgtctgttgtgccatcgcagggcaaatggaggcggaatagtggcgatggaggaagtcatggtgtgcttggtggtaagagggtatcggtgaaacatctaaaggtcgttaggatgaagtacattgatgaaagcagaagtggatttaaactggtaaaggtcctgctcaagaacgcctctgcactggagaccatgacaattgttccttccatggatggccttgagcaggccaagtttaggcgtagggtgttgaagctgaggaagtcctctcaaaatgctagcgtccagttttgcacagctggatgatatgatgtgtatgagtagagtaggtccattagcaaaagctcaatgttgcagcccaggaagaaaggcctgtccatgaaggtcttcctttttcgtcgggttacttttagcctgtgtatgtagctgctaactgttgatgaattccttacagaattaatggaaccattgtcagtattcatttagtttaagccatcaattttcagttctttgatgaagtttctttaaacttaacagaaattc

SEQ ID NO: 123483 - DNA, 337 bp, Zea Mays
tgcagagacttttagagagcacctttcggcttgacatttacgctgcaagagagtattgtctggcagatgaccagctgtcggaagcagtaagttttctagatttaggggatggtgctggctgggagttattgcaggttttgcctctatcatactaaactctatctcccttattttctggtcactaaacttttgcagttatatatcttcagtgaaaatgctaactctggcttatgcttcgacaggcaatgcttaatccggattaccgcaagcgaccaattgcagaggctgtactgaaccacaggtttataactggagcagttttacgaaactactaatc

SEQ ID NO: 123484 - DNA, 1746 bp, Zea Mays
ctcagactgcatcatccaaccagaacccgggagcagagcagtgacaggcgaaccaagacacgcagggacagggagacatggggcgagggcgagcgccgtgctgcgccaaggtggggctcaacaggggctcctggacgccgcaggaggacatgcgcctcatcgcctacatccagaagcacggccacaccaactggcgcgcgctgcccaagcaagcaggtttgctgcgctgtgggaagagctgcaggctgcgctggatcaactacctgcggccggacctcaagcgcggcaacttcaccgacgaggaggaggaggccatcataaggctgcacgggttgctcgggaataaatggtctaagatcgctgcctgcctgccggggaggacggacaacgagatcaagaacgtgtggaacacgcacctgaagaagaaggtggcgcagcgggagaagaagaaggccggcgcggggagcggcgacgccggcacgcccgccactgcgcccttgtcctcggcgacctcctcgacgacgacccacaacagctccgggggcagcgactccggcgaccagtgcggcacgagcagggagcctgacgcgaccgacgtgtgccccctccagctagaggacatggacgtctcggacatgctggtggacggcgcgcccccggcggcgcagccaatgccgtcgccgtcctcctcgtcctccctgacgacgtgcgtcggcggcgtggaggagctgatcgagctgccggtgatcgacatcgagccggaaatctggagcatcatcgacggcgagagcgctgtggcgcgccatggtggcgatgcagccgcgccatgtacgggcaccggcaccgccgtcagcaccagcgaagcagaggaagcggcggcgaacgattggtggctggagaatttggagaaggagctgggcctgtggggctacgcggaggaggatactcaggcccaccctgacctactggaccactacacaggtttgagcccactctgcgccctggagggggacccagtctccacctacttccagaccgggcccgccgccgcggaacctgagctcctggtggtcgtcgaaccatctgccgttctgctatgactatgagcaacatgacggacggtcacagcaacgaacatcctggttcttggagatgttcggtggatcaaattcgagtagtttgtttgatgcagtggcagattaatatctctacaggccaattagaatgcacattcagaacagaaccgtccaaagaaagcctgtagagtgaaggctagtactctcttattcttaacagtgtttaacgcagatacatacatacaggcagctagctagatgctagggtttgattggtaaccctgcactccggtctcaagacggaggagggcaacgagggagtgccgtccgccgtcgtgctcgtgttgcttggttcgtggctttgtgtgcagtgtgcatatatagaacatgacgtcaccgcgacgtaagcgtgtgctcacctgagaagtcctaccactaccgaccatgtatgatgtcctttgtgaatcatcaccgggctctgattacgctttggaaacccttttgcttttgataatgcgatgtaaccttttttttcttcatctccttttcgttctttgtttgttttcttcttcatgtagatttgccggtctagcttctttttcgttcttgtgcagtgttagttacgtatagctaggacagtgaaaagaaaccacatgttactcgatgatag

SEQ ID NO: 123485 - DNA, 1023 bp, Zea Mays
atggggcgagggcgagcgccgtgctgcgccaaggtggggctcaacaggggctcctggacgccgcaggaggacatgcgcctcatcgcctacatccagaagcacggccacaccaactggcgcgcgctgcccaagcaagcaggtttgctgcgctgtgggaagagctgcaggctgcgctggatcaactacctgcggccggacctcaagcgcggcaacttcaccgacgaggaggaggaggccatcataaggctgcacgggttgctcgggaataaatggtctaagatcgctgcctgcctgccggggaggacggacaacgagatcaagaacgtgtggaacacgcacctgaagaagaaggtggcgcagcgggagaagaagaaggccggcgcggggagcggcgacgccggcacgcccgccactgcgcccttgtcctcggcgacctcctcgacgacgacccacaacagctccgggggcagcgactccggcgaccagtgcggcacgagcagggagcctgacgcgaccgacgtgtgccccctccagctagaggacatggacgtctcggacatgctggtggacggcgcgcccccggcggcgcagccaatgccgtcgccgtcctcctcgtcctccctgacgacgtgcgtcggcggcgtggaggagctgatcgagctgccggtgatcgacatcgagccggaaatctggagcatcatcgacggcgagagcgctgtggcgcgccatggtggcgatgcagccgcgccatgtacgggcaccggcaccgccgtcagcaccagcgaagcagaggaagcggcggcgaacgattggtggctggagaatttggagaaggagctgggcctgtggggctacgcggaggaggatactcaggcccaccctgacctactggaccactacacaggtttgagcccactctgcgccctggagggggacccagtctccacctacttccagaccgggcccgccgccgcggaacctgagctcctggtggtcgtcgaaccatctgccgttctgctatga

SEQ ID NO: 123486 - DNA, 318 bp, Zea Mays
atgtcaccactgtctatttctgatctacaaggtgattcttccaggttcaagggccacggcatgctggcgccttttacagctggctggcagggcaatgatttacaccctctgatcattgagagatctgagggttcctatgtctatgacattaatgggaacaagtatctggactctcttgcaggattatggtgcacaactttaggtggtagcgagcctcgattagtcaaagcagcaactgagggtgcatggttatgttgtgcgattagatccatctatgaattgtttgtgcttctacatttaggaacaatgggcaattag

SEQ ID NO: 123487 - DNA, 1361 bp, Zea Mays
cgcattttggggattagcttggtcgcagattggcgaccatggcaggcacaggcacggtaaaggtccacaacgtctcacttaaagcatcagagcaagatattagtgagttcttctcattttctggtgagattgtgcatgtagaattgaaaagttgtgatgagcggtcacaatttgcctacatcacgttcagagataatcaaggagcagagagggctatgcttcttacgggagcgactatagaagatatggctgtcatcatcacaccagccaccgattacaagctaccggcgtttgttttagctgatctagagtcaaaaaacactggtggcatggaatctgctcttcagaaggctgaggatattgcagtttctatgttagccaaagggtttgttctcggcatggacgccgttgaaaaagcaaaggctttcgatgaaaagcatcagctcacatcaactgcaactgccaaagtcgcttcccttgacaggacaatgggcttaagccagaagttcagcaccgggaccttagtggtgaatgagaaaatgaaggagatggatgagaagtaccaggttgcagagaagaccaagtcagcattagctgcggccgaacagactgtctctactgctagttctgccatcatgagtaacaggtatatccttacaggtgcagcatgggtaactgatgcctacaacaaggttgcaaccactacaactgatgctagcaagtcgataaaggaaaggatgatggctgagcaggagggagccaatcagagcggtgaaaccgcaaaagttgatttgcttgaaatctctgaagcggatgagcaagagtggaagcgccatgaagatgactctgcaaagaacgctgttcaagaaagtcctgaaatgacttgtcaggagagtgagcatcaggcgggtgaacgtcaaatgactaatgtagcaggtaactctaaaacgggtatagaggagcataaaaatcacgagggtgaaatagcagtagtagctcacatgcaagaaaacatggatacagctgagaagaatcctagctgccacgagagtgaagtatccaaggccaatgttcatgatagcgttctaatgacagagcaaagtgagcgagagcataatcaatgcgaaggtgaatttgcaaacagtcatgtcccaggaagccctgtcactattccggtcaccgtgtccactattgacgggaactctagcaacagtcccaagaagcctgattctgctgagggttttctatgatatgttattgtaaatctagattgggggtgatgatgatagttcatttcagctctttctattggatctgtcatccttcttgcataaatagttttgttcagctcttcagctaaa

SEQ ID NO: 123488 - DNA, 1732 bp, Zea Mays
agcaaagcaatcacgagcaatgggcgagataggcacggaccacctcggcgccttcacgctcgactggtccaccgtctcctccttcctcttcagccccctcatctcgcccttcttcgctaccgccaacatcttctttggctacgtgttcttcgtctacgtcatcatgcctgcagcgtactgggggtttgacttgtacagcgccaagacgttccccatcttttcctcgcacctgttcatgtcgaacggcagcagctacgacgtccaatcgatcgtgaacaaccggtttgagcttgacctggacgcttatggtaagaacggcaaagtcagcctcagcgtgttctttgcactcagttacggcttcagcttcgccaccattgccgccaccatcactcatgtcgggctcttctatggaaaggaaatctactaccgtttcagatcgtcgcagaaggagaagcctgacatccacacgaagctgatggagaggtacagcgaaatcccagcatggtggttctactcgttgatggcgctatcaattgtagtgtcccttctcctctgtaccgtgctgaagcgtgaggtacagctcccatggtggggcctcatcttcgcatgtggcatggcattcgtcttcacacttcccatcagcatcatcactgcgacgaccaaccagacgccaggtctgaatgtgatcactgagtatgctatgggtctaattatgccgggctctcctatcgccgtcgtctgcttcaaagtctatggctacatgagcatggcacaggctgttgccttcctctcggacttcaaacttggccactacatgaagatccctcccaagtccatgttccttgtccagtttgtcggtaccattgtggctggcacggtgaacatcgggacggcatggtggctgctgggctccatcgacggcatctgctccgactcactcccaccagacagcccctggacatgtcctaacgaccgcgtcttcttcgacgcgtcagtcatctggggcctcgtgggtccacggcgcatcttcgggccagacgggaactacggcgccctcaactggttcttcctcatcggcgcggcgggcccggtcatcgtgtacgccctccacaggacgtttcccggccagaggtggataccgctgatcaacctcccggtgctcttcggcgcgacggcctacatgcccccggcgacggctgtcaactacaactcgtggctgctcgtcggcaccgtcttcaacttcttcgtcttccggtaccggaagaagtggtggacgcggtacaactacatcctctccgccgctctcgacgccggcgtcgcgttcatgggggtggtgctgtacttctcgttgaccatgcagaacaagagcatcgactggtggggcaccgcaggagagcactgccctctcgccaggtgccccaccgcgaaaggggtggacttgggtgacggcgtctgcccagtgttctgatcgagcttggagtttgatgtcttcacttcaggtacatcgacaggttaagcagtgatcggtttgcagttatgctgccattagatttgtggtgtatatgtggagggtaatgcgacacttctcttatgtgtaaaaaaggtcatattctcatgtatttatcagctgcagaaaacaatgggaataggttgatccttttgggcaatgcaaagcagcaggctagtccctcctgaaatgctacaaatttctcgtcctatgataataccatcc

SEQ ID NO: 123489 - DNA, 2602 bp, Zea Mays
ctcaaagcctcgatatatacgctcgagacagcgcgcgcctctctccttattgctcaccccaaagcaaagcaatcacgagcaatgggcgagataggcacggaccaccgcggcctagccgaggccgaggccggcgtcggcggcaaggaggagggcatcgtcctcggcggccacgaggaggaggaggagacttcgccggtggagcaggtgcggctgacggtgccgtcgacggacgacccgtcgctgccggtgtggacgttccggatgtggagcatcgggctgctgtcgtgcgcgctcatgagcttcctcaaccagttcttctcgtaccggacggagccgctgatcgtgacgcagatcacggtgcaggtggcgtcgctgccgctgggccacttcatggcccgcgcgctgccgcgcgccaggttccgggcgcccgcgctgctgggcggcggggagtggagcctcaacccggggcccttcaacgtcaaggagcacgtgctcatctccatcttcgccaacgccggcttcgcgttcggcaacggcagcgcctacgccgtcgccatcatcgacatcatccgcgccttctaccaccgccacatctccttcttcaccgcctggctcctcgtcgtcaccacgcaggtgctcgggtacgggtgggcagggctgctgcgcaagtacgtggtgcagccggcgcacatgtggtggccgggcacgctcgtccaggtctccctcttccgggcattgcacgagaaggacgaatccgccaaagcctcgcgccagatctctcgctccaagttcttcctggtggtgctggcgtgcagcttcgcctggtacgccgtgccgggctacctcttcccgacgctgacgtccatctcgtgggtgtgctgggtcttctccaggtccgtgacggcgcagcagctggggtcgggcatgagcggcctcggcctcggcgccttcacgctcgactggtccaccgtctcctccttcctcttcagccccctcatctcgcccttcttcgctaccgccaacatcttctttggctacgtgttcttcgtctacgtcatcatgcctgcagcgtactgggggtttgacttgtacagcgccaagacgttccccatcttttcctcgcacctgttcatgtcgaacggcagcagctacgacgtccaatcgatcgtgaacaaccggtttgagcttgacctggacgcttatggtaagaacggcaaagtcagcctcagcgtgttctttgcactcagttacggcttcagcttcgccaccattgccgccaccatcactcatgtcgggctcttctatggaaaggaaatctactaccgtttcagatcgtcgcagaaggagaagcctgacatccacacgaagctgatggagaggtacagcgaaatcccagcatggtggttctactcgttgatggcgctatcaattgtagtgtcccttctcctctgtaccgtgctgaagcgtgaggtacagctcccatggtggggcctcatcttcgcatgtggcatggcattcgtcttcacacttcccatcagcatcatcactgcgacgaccaaccagacgccaggtctgaatgtgatcactgagtatgctatgggtctaattatgccgggctctcctatcgccgtcgtctgcttcaaagtctatggctacatgagcatggcacaggctgttgccttcctctcggacttcaaacttggccactacatgaagatccctcccaagtccatgttccttgtccagtttgtcggtaccattgtggctggcacggtgaacatcgggacggcatggtggctgctgggctccatcgacggcatctgctccgactcactcccaccagacagcccctggacatgtcctaacgaccgcgtcttcttcgacgcgtcagtcatctggggcctcgtgggtccacggcgcatcttcgggccagacgggaactacggcgccctcaactggttcttcctcatcggcgcggcgggcccggtcatcgtgtacgccctccacaggacgtttcccggccagaggtggataccgctgatcaacctcccggtgctcttcggcgcgacggcctacatgcccccggcgacggctgtcaactacaactcgtggctgctcgtcggcaccgtcttcaacttcttcgtcttccggtaccggaagaagtggtggacgcggtacaactacatcctctccgccgctctcgacgccggcgtcgcgttcatgggggtggtgctgtacttctcgttgaccatgcagaacaagagcatcgactggtggggcaccgcaggagagcactgccctctcgccaggtgccccaccgcgaaaggggtggacttgggtgacggcgtctgcccagtgttctgatcgagcttggagtttgatgtcttcacttcaggtacatcgacaggttaagcagtgatcggtttgcagttatgctgccattagatttgtggtgtatatgtggagggtaatgcgacacttctcttatgtgtaaaaaaggtcatattctcatgtatttatcagctgcagaaaacaatgggaataggttgatccttttgggcaatgcaaagcagcaggctagtccctcctgaaatgctacaaa

SEQ ID NO: 123490 - DNA, 623 bp, Zea Mays
ggcttcgaaaggcaggcctgggggcggcggccggcccagcggtggtggcggttggaggggcggtgagcgaggcggcgggggcgagggcacgcctttttccccctccgattgaaattaggtgagggcggagggtggcaccgccgccggcgccacgactccgattcggattagtgaagggcgagttggagccgtggaggttgcggcgccgctggccggcgcggcgggggagtacggcacgatgcagaataagaagagtagaggaagaataacaggaaaccgcgcgctcgtacctgtaccagcgcacgcgccctctaaagagtcccggcaaaattaagagttgatctaagccgatctccacccccgcagcagtccagcaccagtagaggacgacggtaaggaggacgccggtggaaggagccctggcgtgaagcgcggcggcggaagatcaagatactggacacgaaatttccccggaagcaggagaagcggattaggaaaacaggggccgatgggcgtaggcttagcgtagctccgcgacggaactaacgaacggaataatcaacaagagcggcttgtctgacccgtggatttctcttcattccgagtactccctcggtgactcg

SEQ ID NO: 123491 - DNA, 1362 bp, Zea Mays
ccacggggaggacctacacgtacgccgagacgcgcctcctgtgccgcaaggccgcggcgtgcctccacgggctcggcgtcgcccagggcgaccgcgtcatgctcctgctccagaactccgtcgagttcgtgctcgccttcttcggcgcgtccttcctcggcgccgtcaccacggccgccaacccattctgcacgccgcaggagctcatcaagttcaagggcttccaggtgccgccggccgagctcgaggctctgctcgtcgcccacccgtccatcgccgacgcggccgtcgtcccgcaaaaggacgaagccgccggcgaggtccccgtcgccttcgtggtccgcgccgccgacgccgacatcgcggaggacgccatcaaggagttcatctccaagcaggtggtattctacaagaggctacacaaggtgtacttcaccccctccatccccaagtcggcgtccgggaagatcctgaggagggagctgcgcgccaagctcgcggcagccgcgaccgcctgaggagcttgacgctcaggttccatgccttgctacgtgcaactcgtttggtagtggcgtttactgccaatccagtgtatgggtacaggcgtgaaacatgaggtaccgagaatgtactatcaatatatgctttgtatgcgagtgcttcgtcaattaaggaccaccatttattcccgtcatgattttatttccccccgttggtgcataatccaccatccaacacattcatggtcactgggactgggactgggactcatccatgaaacaagactgagaaagtgcagcgactttactgaacaaaccgaaagggggcagatacgaatcgtatgcgaatagacaatcgatccaaatcctaaggaatcttcaatctaccgagtgggtacatcaccagaaaatagcaagcaaaggctgcaattatagaagggtacgcttaaaaagttatcaggtcatccttctttggatctggcttcttcggcccttcctgggagctgctacctcccttcttgccgaatatcatctcgtccagatcatcaaggatatcatcatccccacctgaccttgttctcgcggcagctggttttctgacaagggcgtcttcattgacggcagcagtcagatcttcatgttctgtggcaaccggtatgacaactgctctctgttctgcatgctccgaggccctgggctgcttcatctcctcgtactttgacaacactttctggatctcgtcgttcacgctcaaggcctcgaagagcacagcttcgttgtctccgacggtctcaataatcctctggatagtgtgctgagattggtagcattgttgcacgagtgtggccgtcaagtcatcctg

SEQ ID NO: 123492 - DNA, 2724 bp, Zea Mays
cacgcgcgcgcgatccctcgcctacctccggtccctgcccgcctgttgctgtatttatttccgcctcgtctcttccccatctcgacagcatcactgccgtgtagtgtagctagagcccgtgcactggtccggattcgcagagcaaaacggaaatgatcacggtggcagcaccggaggcgcagccgcaggtggcggcggcggcggcggttgcggcgccggaggagaccgtgttccggtcgaagctgccggacatcgacatccccacccacctgccgctccacgactactgcttctcgagggcggcggaggcggcgggcgcgccgtgcctcatcgcggcggccacggggaggacctacacgtacgccgagacgcgcctcctgtgccgcaaggccgcggcgtgcctccacgggctcggcgtcgcccagggcgaccgcgtcatgctcctgctccagaactccgtcgagttcgtgctcgccttcttcggcgcgtccttcctcggcgccgtcaccacggccgccaacccattctgcacgccgcaggagatccacaagcagttcagcgcctccggcgcgaaggtcgtcgtcacccactccgcctacgtcgccaagctccggcacggcgccttcccgaggatcggcacggtgagcggcggcggcgtggacggcaatgccctcctcaccgtcctcaccatcgacggcgacgcggccgacaccccggaaggctgcctggcgttctgggagctgctcacgtccggcgacggcgacgccctcccggaggtgtccatctccccggacgaccccgtggcgctgccgttctcgtcgggcaccacggggctgcccaagggcgtcgtgctgacccacggcggccaggtcacgaacgtggcgcagcaggtggacggcgcgaaccccaacctgtacatgcgggagggcgacgtcgcgctctgcgtgctgcctctgttccacatcttctccctcaactccgtgctgctctgcgccatgcgggccggcgcggcggtcatgctcatgcccaagttcgagatgggcgccatgctggagggcatccagcggtggcgcgtcacagtggcagccgtcgtgccgccgctggtgctcgccctggccaagaaccccgcgctcgagaagtacgacctcagctccatccggatcgtgctctccggcgccgcgccgcttggcaaggacctcgtcgacgcactccgcgcccgcgtgccacaggccgtcttcggacagggatacgggatgacggaggccgggcccgtgctgtccatgtgcccggcgttcgccaaggagccggcgcccgccaagccggggtcgtgcggcacagtggtgcgcaacgcggagctcaaggtggtggacccggacacgggcctctccctcggccgcaacctccccggcgagatctgcatccggggcccgcagatcatgaaagggtacctgaacgacccggaggccaccgcgaggacgatcgacgtccacggctggctccacaccggcgacatcggctacgtcgacgacgacgacgaggtcttcatcgtcgaccgcgtcaaggagctcatcaagttcaagggcttccaggtgccgccggccgagctcgaggctctgctcgtcgcccacccgtccatcgccgacgcggccgtcgtcccgcaaaaggacgaagccgccggcgaggtccccgtcgccttcgtggtccgcgccgccgacgccgacatcgcggaggacgccatcaaggagttcatctccaagcaggtggtattctacaagaggctacacaaggtgtacttcaccccctccatccccaagtcggcgtccgggaagatcctgaggagggagctgcgcgccaagctcgcggcagccgcgaccgcctgaggagcttgacgctcaggttccatgccttgctacgtgcaactcgtttggtagtggcgtttactgccaatccagtgtatgggtacaggcgtgaaacatgaggtaccgagaatgtactatcaatatatgctttgtatgcgagtgcttcgtcaattaaggaccaccatttattcccgtcatgattttatttccccccgttggtgcataatccaccatccaacacattcatggtcactgggactgggactgggactcatccatgaaacaagactgagaaagtgcagcgactttactgaacaaaccgaaagggggcagatacgaatcgtatgcgaatagacaatcgatccaaatcctaaggaatcttcaatctaccgagtgggtacatcaccagaaaatagcaagcaaaggctgcaattatagaagggtacgcttaaaaagttatcaggtcatccttctttggatctggcttcttcggcccttcctgggagctgctacctcccttcttgccgaatatcatctcgtccagatcatcaaggatatcatcatccccacctgaccttgttctcgcggcagctggttttctgacaagggcgtcttcattgacggcagcagtcagatcttcatgttctgtggcaaccggtatgacaactgctctctgttctgcatgctccgaggccctgggctgcttcatctcctcgtactttgacaacactttctggatctcgtcgttcacgctcaaggcctcgaagagcacagcttcgttgtctccgacggtctcaataatcctctggatagtgtgctgagattggtagcattgttgcacgagtgtggccgtcaagtcatcctg

SEQ ID NO: 123493 - DNA, 2136 bp, Zea Mays
cacgcgcgcgcgatccctcgcctacctccggtccctgcccgcctgttgctgtatttatttccgcctcgtctcttccccatctcgacagcatcactgccgtgtagtgtagctagagcccgtgcactggtccggattcgcagagcaaaacggaaatgatcacggtggcagcaccggaggcgcagccgcaggtggcggcggcggcggcggttgcggcgccggaggagaccgtgttccggtcgaagctgccggacatcgacatccccacccacctgccgctccacgactactgcttctcgagggcggcggaggcggcgggcgcgccgtgcctcatcgcggcggccacggggaggacctacacgtacgccgagacgcgcctcctgtgccgcaaggccgcggcgtgcctccacgggctcggcgtcgcccagggcgaccgcgtcatgctcctgctccagaactccgtcgagttcgtgctcgccttcttcggcgcgtccttcctcggcgccgtcaccacggccgccaacccattctgcacgccgcaggagatccacaagcagttcagcgcctccggcgcgaaggtcgtcgtcacccactccgcctacgtcgccaagctccggcacggcgccttcccgaggatcggcacggtgagcggcggcggcgtggacggcaatgccctcctcaccgtcctcaccatcgacggcgacgcggccgacaccccggaaggctgcctggcgttctgggagctgctcacgtccggcgacggcgacgccctcccggaggtgtccatctccccggacgaccccgtggcgctgccgttctcgtcgggcaccacggggctgcccaagggcgtcgtgctgacccacggcggccaggtcacgaacgtggcgcagcaggtggacggcgcgaaccccaacctgtacatgcgggagggcgacgtcgcgctctgcgtgctgcctctgttccacatcttctccctcaactccgtgctgctctgcgccatgcgggccggcgcggcggtcatgctcatgcccaagttcgagatgggcgccatgctggagggcatccagcggtggcgcgtcacagtggcagccgtcgtgccgccgctggtgctcgccctggccaagaaccccgcgctcgagaagtacgacctcagctccatccggatcgtgctctccggcgccgcgccgcttggcaaggacctcgtcgacgcactccgcgcccgcgtgccacaggccgtcttcggacagggatacgggatgacggaggccgggcccgtgctgtccatgtgcccggcgttcgccaaggagccggcgcccgccaagccggggtcgtgcggcacagtggtgcgcaacgcggagctcaaggtggtggacccggacacgggcctctccctcggccgcaacctccccggcgagatctgcatccggggcccgcagatcatgaaagggtacctgaacgacccggaggccaccgcgaggacgatcgacgtccacggctggctccacaccggcgacatcggctacgtcgacgacgacgacgaggtcttcatcgtcgaccgcgtcaaggagctcatcaagttcaagggcttccaggtgccgccggccgagctcgaggctctgctcgtcgcccacccgtccatcgccgacgcggccgtcgtcccgcaaaaggacgaagccgccggcgaggtccccgtcgccttcgtggtccgcgccgccgacgccgacatcgcggaggacgccatcaaggagttcatctccaagcaggtactcaccagtcacgcaggctggatcacgccgcgcgccttgcttatgccatgaagaagtttgttctgacataacagtgtacgtgtgcgcgcgtgcgccgattttcaggtggtattctacaagaggctacacaaggtgtacttcaccccctccatccccaagtcggcgtccgggaagatcctgaggagggagctgcgcgccaagctcgcggcagccgcgaccgcctgaggagcttgacgctcaggttccatgccttgctacgtgcaactcgtttggtagtggcgtttactgccaatccagtgtatgggtacaggcgtgaaacatgaggtaccgagaatgtactatcaatatatgctttgtatgcgagtgcttcgtc

SEQ ID NO: 123494 - DNA, 1413 bp, Zea Mays
gtgaccagtcacgcacgcgcgcgcgatccctcgcctacctccggtccctgcccgcctgttgctgtatttatttccgcctcgtctcttccccatctcgacagcatcactgccgtgtagtgtagctagagcccgtgcactggtccggattcgcagagcaaaacggaaatgatcacggtggcagcaccggaggcgcagccgcaggtggcggcggcggcggcggttgcggcgccggaggagaccgtgttccggtcgaagctgccggacatcgacatccccacccacctgccgctccacgactactgcttctcgagggcggcggaggcggcgggcgcgccgtgcctcatcgcggcggccacggggaggacctacacgtacgccgagacgcgcctcctgtgccgcaaggccgcggcgtgcctccacgggctcggcgtcgcccagggcgaccgcgtcatgctcctgctccagaactccgtcgagttcgtgctcgccttcttcggcgcgtccttcctcggcgccgtcaccacggccgccaacccattctgcacgccgcaggagatccacaagcagttcagcgcctccggcgcgaaggtcgtcgtcacccactccgcctacgtcgccaagctccggcacggcgccttcccgaggatcggcacggtgagcggcggcggcgtggacggcaatgccctcctcaccgtcctcaccatcgacggcgacgcggccgacaccccggaaggctgcctggcgttctgggagctgctcacgtccggcgacggcgacgccctcccggaggtgtccatctccccggacgaccccgtggcgctgccgttctcgtcgggcaccacggggctgcccaagggcgtcgtgctgacccacggcggccaggtcacgaacgtggcgcagcaggtggacggcgcgaaccccaacctgtacatgcgggagggcgacgtcgcgctctgcgtgctgcctctgttccacatcttctccctcaactccgtgctgctctgcgccatgcgggccggcgcggcggtcatgctcatgcccaagttcgagatgggcgccatgctggagggcatccagcggtggcgcgtcacagtggcagccgtcgtgccgccgctggtgctcgccctggccaagaaccccgcgctcgagaagtacgacctcagctccatccggatcgtgctctccggcgccgcgccgcttggcaaggacctcgtcgacgcactccgcgcccgcgtgccacaggccgtcttcggacaggtcagtgtctactgtttcaccgctaatcttgtaatccaagtttattttgctgttgagggagccaattttgagggccggataggctgacgagtcaaatagctaatatgtcgaagagttattttactgttgagcaactaaaatttaacttaacaagtc

SEQ ID NO: 123495 - DNA, 815 bp, Zea Mays
gcccgtgcactggtccggattcgcagagcaaaacggaaatgatcacggtggcagcaccggaggcgcagccgcaggtggcggcggcggcggcggttgcggcgccggaggagaccgtgttccggtcgaagctgccggacatcgacatccccacccacctgccgctccacgactactgcttctcgagggcggcggaggcggcgggcgcgccgtgcctcatcgcggcggccacggggaggacctacacgtacgccgagacgcgcctcctgtgccgcaaggccgcggcgtgcctccacgggctcggcgtcgcccagggcgaccgcgtcatgctcctgctccagaactccgtcgagttcgtgctcgccttcttcggcgcgtccttcctcggcgccgtcaccacggccgccaacccattctgcacgccgcaggagatccacaagcagttcagcgcctccggcgcgaaggtcgtcgtcacccactccgcctacgtcgccaagctccggcacggcgccttcccgaggatcggcacggtgagcggcggcggcgtggacggcaatgccctcctcaccgtcctcaccatcgacggcgacgcggccgacaccccggaaggctgcctggcgttctgggagctgctcacgtccggcgacgtcgcgctctgcgtgctgcctctgttccacatcttctccctcaactccgtgctgctctgcgccatgcgggccggcgcggcggtcatgctcatgcccaagttcgagatgggcgccatgctggagggcatccagcggtggcgcgtcacagtggcagccgtcgtgccgccgctg

SEQ ID NO: 123496 - DNA, 501 bp, Zea Mays
ttatattcatcaacttcaacttgatctacagcaatgtcaggagaatgagcatgagctaattggtcactatcactcagtttaaaacaatttagtgacctctatttgcatatggatcaacaggttgtcgatactaagcataatagctaaacgtgaaaaactttttcagactatttgtgttgtaatcaaatgacatcttcggaaccttggcgacgctttgaggaatcactggcctacacaaaaacgaggtgaacttggttcgttcaatgaaaaggatccactgggaatgaatgggaagactggggtagcatcttcattagccgaaaggaattagtatccactagcataattcgaagaacgaacaaaaaaaggtgtcactgattaggtaggaggatggatggatgtggtccaatctatgtgtgatatcttgcatgcaaatatatcagagcataaagggagcttgaactgcatagtgatgtgaagttcctctgcattccttaagtg

SEQ ID NO: 123497 - DNA, 104 bp, Zea Mays
gttctttttgcaggctttgaacatgccctccccttatatgcatgttgtacatgtaggctcaccatccccactactttcaccagctttcagaactgtccttctac

SEQ ID NO: 123498 - DNA, 1952 bp, Zea Mays
gctgcgcatgtacgttgacatgctggaggcgggcgtccggcctgacagctacacgttcccgttcgcactcaaggcgtgcgcgcagctcgcggccttgcaagaagggagacaggtgacagcttcagctcgcactcaaccaagcagtgtgttcttctgcagtcgtcgacgcgctgggatcggatgtgagatgtgtttgtttccattagcagttgcaggcgcacatcgtgaagctcgggttccagcacgacgaacacgtgcagaacagcctgatcagcttctacggcaagtgcgtcgagccggcgatggctcgtctggcgtttgaccgggtggaggcggaggagcgaacggcggcttcctggagcgcactcctcgcggcgtacacgaaagccgggctgtggggcgaatgcctcgagtcgttcggcgcgatggtgctcgatgggtggcgtcccgacgagagctccacggtcagcgcgctctcggcgtgcgcgcacctgggtgccttcgacgtcgggcggagtctccactgcgcgttgctgaggaacaccgcgaggctgaacaccatcatgcagacgtccctggtggacatgtacgccaagtgcggcagcatcgagaaggccgcggcggtgttcgacgcgatggacgacaagaacgcgtggacgtacagcgccatgctgtccggcttggcgctgcacggggacgggcggaaggccctgcaggtgttcgacgcgatggtccgggagcgccacgcgcccgacgcagccacgtacgtcggcgtgctgaacgcctgcagccgcgccgggctgctcgaggacgggctgcggtgcttcgaccgcatgcggctggagcacaacgtcgcgcccaacgcgcagtactacggctgcatggtggacctgatggcgcgcgccggaaggctggacgacgcgcgcgcgctcatcgggagcatgtccacggggccgacggacacggcctggcgaagcctgctgaacgcctgccggatccacggcgatctggatctcgccgagcgcgccctccaggagctgaggcgcctcggcgccgcgaacgccggcgactacgtcatcgtcgcggacatgcacgccagggccaaggactgggccgctgccgcccagctccggacagaggcggtggactggggcctcgcgcaatcccccggggtcagcgccgtggaggtacgcggcgagctgcaccggttcgtgtcgcaggacaggtcgcacccgcggacgagcgacatctacgagatgctccaccagatggagtggcagctgcggttcgatggctacaaacctgacacgtcggaggtggcgctggacgtgggcgaagaggagaagcggcgtgtggtcgccgcgcacagccagaagctggccatggcattcggcctgctcagcacggcggagggggcaccggtgaggatcgtgaccaacctccggatgagcaaggaatgccacgcgtacagcgcgctgatctcggaaattttcggccgggagatcgtcatcagggaccggaaccgcctccaccggttccggcgcggcgtctgcagttgcagagactactggtaacggtttcgttttgtcaacagtggtcgatggtgtaaatatcaaccgcaatttctgtctttgctgttgagtcctgatcgaaaaaaatgtctgaacgtttgctgacacttcaaaggccgaggttggtatgtttgatgtcatttgggctaagcaaacgcaggaattttacaagaacggtgtaggaatttcacgggaattagttcaaaaacacgtaaaaaatgtatgattcggattaattctatttgttccaaaggaggtctaagaattgaagacagatatagtaagcgattagcaacgtcaagagaaacttcaactacttaaatcatcaaaactaagtttgagggtttttctcttataacaaagccggttcaaatcggcgca

SEQ ID NO: 123499 - DNA, 1615 bp, Zea Mays
gctgcgcatgtacgttgacatgctggaggcgggcgtccggcctgacagctacacgttcccgttcgcactcaaggcgtgcgcgcagctcgcggccttgcaagaagggagacagttgcaggcgcacatcgtgaagctcgggttccagcacgacgaacacgtgcagaacagcctgatcagcttctacggcaagtgcgtcgagccggcgatggctcgtctggcgtttgaccgggtggaggcggaggagcgaacggcggcttcctggagcgcactcctcgcggcgtacacgaaagccgggctgtggggcgaatgcctcgagtcgttcggcgcgatggtgctcgatgggtggcgtcccgacgagagctccacggtcagcgcgctctcggcgtgcgcgcacctgggtgccttcgacgtcgggcggagtctccactgcgcgttgctgaggaacaccgcgaggctgaacaccatcatgcagacgtccctggtggacatgtacgccaagtgcggcagcatcgagaaggccgcggcggtgttcgacgcgatggacgacaagaacgcgtggacgtacagcgccatgctgtccggcttggcgctgcacggggacgggcggaaggccctgcaggtgttcgacgcgatggtccgggagcgccacgcgcccgacgcagccacgtacgtcggcgtgctgaacgcctgcagccgcgccgggctgctcgaggacgggctgcggtgcttcgaccgcatgcggctggagcacaacgtcgcgcccaacgcgcagtactacggctgcatggtggacctgatggcgcgcgccggaaggctggacgacgcgcgcgcgctcatcgggagcatgtccacggggccgacggacacggcctggcgaagcctgctgaacgcctgccggatccacggcgatctggatctcgccgagcgcgccctccaggagctgaggcgcctcggcgccgcgaacgccggcgactacgtcatcgtcgcggacatgcacgccagggccaaggactgggccgctgccgcccagctccggacagaggcggtggactggggcctcgcgcaatcccccggggtcagcgccgtggaggtacgcggcgagctgcaccggttcgtgtcgcaggacaggtcgcacccgcggacgagcgacatctacgagatgctccaccagatggagtggcagctgcggttcgatggctacaaacctgacacgtcggaggtggcgctggacgtgggcgaagaggagaagcggcgtgtggtcgccgcgcacagccagaagctggccatggcattcggcctgctcagcacggcggagggggcaccggtgaggatcgtgaccaacctccggatgagcaaggaatgccacgcgtacagcgcgctgatctcggaaattttcggccgggagatcgtcatcagggaccggaaccgcctccaccggttccggcgcggcgtctgcagttgcagagactactggtaacggtttcgttttgtcaacagtggtcgatggtgtaaatatcaaccgcaatttctgtctttgctgttgagtcctgatcgaaaaaaatgtctgaacgtttgctgacacttcaaaggccgaggttggtatgtttgatgtcat

SEQ ID NO: 123500 - DNA, 1618 bp, Zea Mays
gctgcgcatgtacgttgacatgctggaggcgggcgtccggcctgacagctacacgttcccgttcgcactcaaggcgtgcgcgcagctcgcggccttgcaagaagggagacagcagttgcaggcgcacatcgtgaagctcgggttccagcacgacgaacacgtgcagaacagcctgatcagcttctacggcaagtgcgtcgagccggcgatggctcgtctggcgtttgaccgggtggaggcggaggagcgaacggcggcttcctggagcgcactcctcgcggcgtacacgaaagccgggctgtggggcgaatgcctcgagtcgttcggcgcgatggtgctcgatgggtggcgtcccgacgagagctccacggtcagcgcgctctcggcgtgcgcgcacctgggtgccttcgacgtcgggcggagtctccactgcgcgttgctgaggaacaccgcgaggctgaacaccatcatgcagacgtccctggtggacatgtacgccaagtgcggcagcatcgagaaggccgcggcggtgttcgacgcgatggacgacaagaacgcgtggacgtacagcgccatgctgtccggcttggcgctgcacggggacgggcggaaggccctgcaggtgttcgacgcgatggtccgggagcgccacgcgcccgacgcagccacgtacgtcggcgtgctgaacgcctgcagccgcgccgggctgctcgaggacgggctgcggtgcttcgaccgcatgcggctggagcacaacgtcgcgcccaacgcgcagtactacggctgcatggtggacctgatggcgcgcgccggaaggctggacgacgcgcgcgcgctcatcgggagcatgtccacggggccgacggacacggcctggcgaagcctgctgaacgcctgccggatccacggcgatctggatctcgccgagcgcgccctccaggagctgaggcgcctcggcgccgcgaacgccggcgactacgtcatcgtcgcggacatgcacgccagggccaaggactgggccgctgccgcccagctccggacagaggcggtggactggggcctcgcgcaatcccccggggtcagcgccgtggaggtacgcggcgagctgcaccggttcgtgtcgcaggacaggtcgcacccgcggacgagcgacatctacgagatgctccaccagatggagtggcagctgcggttcgatggctacaaacctgacacgtcggaggtggcgctggacgtgggcgaagaggagaagcggcgtgtggtcgccgcgcacagccagaagctggccatggcattcggcctgctcagcacggcggagggggcaccggtgaggatcgtgaccaacctccggatgagcaaggaatgccacgcgtacagcgcgctgatctcggaaattttcggccgggagatcgtcatcagggaccggaaccgcctccaccggttccggcgcggcgtctgcagttgcagagactactggtaacggtttcgttttgtcaacagtggtcgatggtgtaaatatcaaccgcaatttctgtctttgctgttgagtcctgatcgaaaaaaatgtctgaacgtttgctgacacttcaaaggccgaggttggtatgtttgatgtcat

SEQ ID NO: 123501 - DNA, 699 bp, Zea Mays
cgaggtgcacaagcacatgttagtggacgacacctaccaaagatacaaagtttctactgttttttagttggagaaaacatttaagacaccattttcattgcttgttctccatatgtggcttgtttcacgccgcttgaaggaagatgggaatgatggtgttaagtccggacaatacatctacacatctacgaaatgtacaaccacgatgtagagcatagagtttctaaagttggagatttggacgatgttggagatgtgctttggtgtagttcatctctcccgaaccaagaggctggtttatggggccaaggtagagtctgccattgccattggattcgatgacttcattgcagatgctctgagaggcattgggttctaccagaaggataacatggagatcaagaaggccaatggcaatggcacactgatcgctgagcagatctttgaaaagactaagagaagttctagatgtattgatgcttggccgaagatggacgttagatttgtacaatgctcacccaaaaggaataatacatttctctaaatgtccgttgtttcgaaaaatacatccatttccaatgtttaacattctgatgatgtctgaattccttgtaaacaaacacaagattgttcattgatgtaacttatgtgcagtatatgtgtgtgaaataaagatcatcgtggagcaccgggcatcaa

SEQ ID NO: 123502 - DNA, 1571 bp, Zea Mays
atcccggcggcgtccgctggcgtgcgtcgtcggcgagcatggcacggtggtcgtcccctaaggaccctgccctggaggcggcgctccggcgcaaccgccgctgggtcgtcaacaaccagatcaagcgcctcctactccgcttcccgtcccgcacggcgcccgtgcgtttcctccaatcccgcttcaagacactcgatctcatgggtcgcgccgccaactggctcagcaagtacccttcctgcttcgaggtcttctccgcggacgatggtggcggtgagcaggaaccccatttcggcttcaccaagcggatggcggcgctcgtccacgcggaggaggctgccgtcgcggcttccgagccggccatggcggaccgcctcgcgcgcgtgctcatgctcgcccgcggccgccgcctacaggtttccaagctcgccgcgctgcggggccctctcggcctccccgatgactacctcctccgcctcgtccccgccaacaccgatctcttccgcctcacaaacccctacccgcaccgccgcaacgccgctgagctagagctcgtcagatgggctccctctctcgccgtctccgccgtcgaggccgcgagcgactcgaccccacggttcagctgctcgctgccggcctcatgggtcaagtcacacgccaagatggaggatttcaacgcctccacgccttacatctcgccctactcggagtgggccttgccgggcacggatgccgaagccgagaagcgatcggtggccttggtgcacgagctcctctctctcaccctgtggagaaagatgtcgattttgaagctggagcattttaggagggagtttgggctaccggaggacacggcgaggatgctgctccggcacccctgcctcttttacgtgtcgaatcggtacaagatacatacagtggtgctccgcgaaggttacgaggggtcagagctgagggagaaggatccggtggtcttggccaaggatcggctcggggagctgatgcaggaggggctgcatgagtataaccaacggcggcgagggatgaatattgagaagaagaggaggagaggggaggttgaggtaaagaaagagaaagaggtggaggatgaggaagcggcgcgcttggatagtgcagagaaaagagaggagaggaggcggttttataaggtgttgtttggtgatggcaatcggtaattcccagttttgctgtgttgatattgaaggtgaacatcatcagtgcatagctgctgctgattgggctgtgttgatattcagaggaaggtgaacatcatcggtgcatagctgctggttggggtttgagcattaccctcttcccattatgtgatcgaaaacatttgcccgtggccttgttctcgcgggtgcaataaggttgacaaactgtctgcaagtgaaaatggtaccaatgtgtgctgttttcttgtcacagggcatgggatttgttaactgttaactagaatgtatgagtgaagaaaggattcccacaggcaccagatgctttgatctgtctaccaatcgcaacaatttaaacactttggaccaaggtaataa

SEQ ID NO: 123503 - DNA, 457 bp, Zea Mays
atgtcgcggcaagctcgccctcacccgcagcaatctcgccggcccccgcggcccgacctcggcaaacccggctctccatggaaggacatggacatcggccaccatgtgaatggcctgcgtaagcacccatccaacgaggtccggcaactggtgaagctgctcgttaggaaatggaaggaaatagtggatgattgggtgaggctgcacaactcaggtggtgatggtagtggctccatcatatgtatgctccaaagcttttggaattacttcgtgtttggtgatagttttgataccttttcattcatggtggcaggcgatggtgactcacctgacaaagtccaatccaagtaccatcaaaatactcatgtaactattcttccacgctccaatttaggctgatcttctgtttcttgtatatagtaatttagtaattgcaaataaaataattgtgccacac

SEQ ID NO: 123504 - DNA, 366 bp, Zea Mays
tacacctcccactgctaccactagcttattttgatcagttatatggcatacctccgatatgctcaaaggttgtatttatcacttggatccacttctccctgtcagcatttatctcctccaaaagcaatcgcctcttcacatcttcagtttgctttgttactagtattctcccctccgcctctgccatggctttctttgaaagggtcgcctgctctagatcagccctttgcctctctgtctgcctccgttgttcctggatttgctcctcagtcgcccgcctgatctgctctagcctaatcccagattcctcttgcatcttcacgagctcttggtttcttaacctttgcgcctcatgttcagcctgca

SEQ ID NO: 123505 - DNA, 641 bp, Zea Mays
atgaataaaaaaaaagggtcaacctaggcatcctgctttggctcctcaccggctaatcttctccgttgctggtgctcagcgaccttgtagtccacgacctcacggaacaggccaggggttagctcgcagtccttgctcccgtagacagccgcctggacgctggccatcatcttggctatctctcgtccggagaagccctgggtcttggccgccgcctcgcggatcaggtcgtcggtgacgcccttcaccacgatcttctggggctggcggcggaagaaacggagccagctcttctcgcgcttgtcgccggctctgatgacgtacttgtccaggtatagcttcaggagcttgaaccgctcgtcttccccgggcagggggaattccaggacctcgtcgatacggtcggcgacggccgagtcgagatcgccaggcctgttggtggcaagcgcaaggacgatgtccttggactggtcgcctgtgcggaagaggagagcgttcagggcactcctttgagcttcgctcatgtaagttttgtttcgtctgtagggtaccccaaaaaaaaaacaaaaacggtctgagatgtcaacgctacagtttgcaagttatgggtgagaaactgagcactactcgcacaagaaaaa

SEQ ID NO: 123506 - DNA, 179 bp, Zea Mays
aaacaaaaactttgaattggagtggagtttcaaatactccaaaaatatcatggtatttaaaacatagttttttcaatgtagacaaacaccactcggcaaaaaatattatggtattctttggtaccatggttttatctcaaaactctaaaagtaatttgcttccaaacaccccttaaact

SEQ ID NO: 123507 - DNA, 1030 bp, Zea Mays
ggcccaactgcagccttgtcgggacaaccgtaatataatacccacaacccactcgatagaagcatcgccccgcgaaccctagctcccgcaactgccgccgccactcccacgctcgcagccatgccgcccaagctcgacccgtcgcaggtggtggaggtgttcgtccgtgtgaccggcggcgaggtcggcgcagcgtcttcgctggcccccaagatcggcccgctcggtctttcccccaagaagatcggagaggacatcgccaaggagacggccaaggactggaagggcctccgcgtcaccgtcaagctcaccgtccagaaccggcaggccaaggtctccgtcgtcccctccgccgcggcgctcgtcatcaaggcgctcaaggagccagagagggaccgcaagaaggtcaagaacatcaagcacagcggcaacatcagcctcgacgacgtcatcgagatcgccaggaccatgaggcacaggtccatggccaaggaattggccggcaccgtcaaggagatcctcggtacctgcgtcagcgtcgggtgcaccgtcgacggcaaggaccccaaggacctgcagcaggagattgacgacggcgaggtggagatcccgtccgcttaagaaggattggtgtccaggactgtgttatctttgctgctgaagccattctctgcctagattttctcatatttatttgaggtgggggtggacgtggacgtggaactatggaagttatcacagcggagttttgcttagaaactttgtcatgctttaagtctgagacaatttctgtcaaattttatgaacattcctaggtacaatcgaagttaccagtgcctgagttttgttggaatttttcatgcgatgtttaaaatttgactatattgcatggccaattggttatttgtctggttagtgattacatcgttgaggcgcatagtacttgaaatatgtttctgctacccgttgctatggttttctggtggatgcgtgctcttatatatatataaaacaaagtgttttttcatta

SEQ ID NO: 123508 - DNA, 708 bp, Zea Mays
ggcccaactgcagccttgtcgggacaaccgtaatataatacccacaacccactcgatagaagcatcgccccgcgaaccctagctcccgcaactgccgccgccactcccacgctcgcagccatgccgcccaagctcgacccgtcgcaggtggtggaggtgttcgtccgtgtgaccggcggcgaggtcggcgcagcgtcttcgctggcccccaagatcggcccgctcggtctttcccccaagaagatcggagaggacatcgccaaggagacggccaaggactggaagggcctccgcgtcaccgtcaagctcaccgtccagaaccggcaggccaaggtctccgtcgtcccctccgccgcggcgctcgtcatcaaggcgctcaaggagccagagagggaccgcaagaaggtcaagaacatcaagcacagcggcaacatcagcctcgacgacgtcatcgagatcgccaggaccatgaggcacaggtccatggccaaggaattggccggcaccgtcaaggagatcctcggtacctgcgtcagcgtcgggtgcaccgtcgacggcaaggaccccaaggacctgcagcaggagattgacgacggcgaggtggagatcccgtccgcttaagaaggtattgtgagcaagtttctgttattttactgtaataatattgatgacccattttgcattgaagttagccaatacagtttatgc

SEQ ID NO: 123509 - DNA, 2889 bp, Zea Mays
tgctcaattcgccatccacaaaatcactgcacccgatcatcgtatcaggaggagaaggtaagagacgtgagggagatggaggcggcgacggccatggatttccacacgctctcgcgccgggagctccaggcgctgtgcaagcgcaacggcgtccgcgccaacatgaccaacgccgccatggccgaggcgctgcagggcctaacctcggtcgacggggtcgacgagatcggcacgactctctgtctgccgacggcgacgccaggaaggtcggcgatgaagtcggcggcgaagatggtggccgtcgaggagcagcagcacggtagcccgctcccccgcggccgccgcgtatcggtaaaatcaccagaggccatccggatggaggttggaggagaggacgagatgaaggagaacgtgaagactcccggcgtggtgctgcgcagcactcgccgcggtattcgggccacacccgcgcctcttcctactccggttccggcgtccagtgcgcgcgcaacagcgaggaggactgccgttcgtaggacgggcgaggtggcgccgaccccagccacccggaggagggcggcctctcgcaaagccgcgggggcagtggaggtggaccgccccgccgaagatgtatccgaggacaagacatcgaagatgacgagagctttggatcaggaagccgaggtggtggcggtcgcatcaaaagaggagaaggggcagcaagacgaaccgagagctgctctctcggatgtgaaatgtgatgacccaaagggggaggagaaggtgcagcaagaggaaccaaaagccgtggtcttggatgtgaaatgtgatggcccagagcaggaggaagttgtccagtttttggaaggggacaacaaagtggaggaagtggaggagggtgaggaagttgattcttctgatgcaaccacagggtctgcagctgttttgggtaagagctgcaatgatcctaaggtggaggaagtggtggttgtcatggaggaacagttcacagagccccatgaaggaattgtgaaagagcaggaacctatcagtgttgagagatctgcttcagtggaagtcatggatgattcaccaatcctaggtgtgattgagaagaaacaggatgcctcagttgaagattgtgaggacttggctgagttctcacctgcaagggagatgactgatgaggccattcctgttactgaagataaggaagtggccatcagtgaggagtctgttactgaagataatgaagtggcaatcagtgaggaggctgttactgaagataaggaagtggccatcagtgaggaggctgttactgaagataaggaagtggccatcagtgaggaggctgttactgaagataaggaagtggccatcaatgaggaggctgttactgaagataaggaagtggccatcagtgaggaggccatcgaggaagatggttttgctaacactgttgagactgatcctaccccaaaggagattcttctgactgaaggtgaaatcatactcattgaaggcaaagaaggtgctgctaatgagatgccacaggctggtgagaccagtgaagaagatgaggaagattaccttgctgaattgaaagaaggggctgctgatcaggtgctgcaggctgagctggcagacaatgaaacaagtaaagaagatgaagatgacctaagtgaaaagagagaagggactgctgctaagatgctgcagggtgaactgacggacgatgagaccagcgaagaagacgatctcgatgaagatgaggaatgggtttcagatgatgatgagaacaccgaggaagattaccttgctgaattgaaagaaggggttgctgatcaggtgctgcaggctgagctggcaaacaatgaaacaggtgaagaagatgaagatgccctaagtgaagagagagaagggactgctgctaagatgctgcagggtgaaccgacagacgatgagaccagtgaagaagacgatctcgatgaagatgagggatgggcttcagatgatgatgagaacactgaggaaattggctctactgacgagaccgatgaagatcctgatgagaccaatgaggagagttacacctctgatgcagtccaaatgatgcagggatctgggatagctgaagatgccaacgaagatgcctctactgaagatgatgatttcagtggcgacctaccaccagagtttgaaaatatcatgatattcagtggtgctgaaaccgagagtgacattgctcctccagtgctcgaggaaaacaaggatgctgttgtatctgcaacaaaaactgcaaagtccctggatgattctgccttaaaaacagggcaggaggaggagggtcctgaagaggttgacaacgttgtgaagtccctggatgaagaggtagaatcaaaggagatgcagaagcagcaaccacaggattataatagcatgagcctcaggaagcttaaagccacacacaagaaatatctcattgctgcaaaggaggaggtcaccgaagggaagaggcttcctctcgaggaggtggatgaaaacgcctgcatcgaccactgaacagaacaagcaggcgaaattttgtgtggatggcgtctgccacaaaaggattgaaacgcggagtgtgctctggttgtgaagtgataactaggctaccgcatgttcattttcaaaagttttcgtgtgtgatcgtgatcaggggtgaaaccatggtttcagccaacaaacttgcagttcctgttgcttctcccccttttttcctttatatatatattttgtatcggttacagaacatggtttatccagtgaagatgctaagtttcgcttaataatgtatatgaaggtcctggatacctcaaattttgttcatgttgaaccagtgcgaag

SEQ ID NO: 123510 - DNA, 3075 bp, Zea Mays
acccggctcgctcgcatgaagcaatcgccggcgtctactgcagtctccgactctgggatgctgggccgccgcctcgccttgctcccggcggcgaccgtcgggcgcgggggtaggacgacgcgggcgcggatgacgatggggtgcgtgctgctcgaccacgtggcgccgcggctcgcggtggcctcggccacgctcgtgggtgcccgggaggtgatcgcggcggctgccgccgcgggcgcggggggaagcggcgcggtgcacggcgccgtggcgtcgacgctcgcgcaggtagcggtcacggccgtggcgattgcatcgggggcgtgcctttcgaccaaggtcgacttcctctggcctcgcatcgaccagttgccagatactcttatatttgaaggagtggaggtgacaggataccagatatttgaggatcccaaggtgcagaaagcaatagaatttgctagtacagcccaccttgggcaatttaggagaacaggggatccatatattacacactgcatacacactggaaaaattttagctgccttggttccgtcaactggagaaagagctgttaacacaattgtggctggcattcttcacgatgttgtttgtgatacatcagagagcttgaagagcatagaagagcagtttggggctgatgttgctagcttggtatctggtgtatcaaaattaagctacataaaccagctacttcgcaggcatcgacaaaaaaatactggtgggagcactcttacttcagaggaagcaaataatctacgtgttatgttattggggatggttgatgatcctcgtgtggtgctcatcaagctggcagatcgcttgcacaatatgcggacaatttatgctcttcctgtacctaaagctgaagctgttgctcaagagacattggctgtctggtgctcacttgcttctcgattgggagtctgggctttgaaagctgagctggaagatttatgctttgctgtcctccagcctcaaatcttcaagaaaatacaatctgaacttactttaatgtggaatcgtaccggaaaatctaaaaatatgagaagatcatcaattcgaaacgaattacttgcttcaatgaaagatgggaatatggtgtccatcaatgatttgtttagttcatgtaaccaagaaagaccaaatatgaaggacttattgcaggcagttttgccatttgacatctttttggatcggaagaggcgttcatacttccttagcaatctcaatagtaattctggagaatctataccaaatcctaagatagttgacgatgctgctgttgcattagcatctttagcatcttgtgaggaagaacttgagcgagaattactcatatcaacatcgtacatacctgggatggaagtgactttgtcgagtagactcaagagcttgtacagtatctactgcaagatgaaaagaaaagaagtaggaattaggcaagtgtatgatgctcgtgcattgagggtgattgttggagacaaaaatggtgccatgcatggatctgctgtccggagttgttacagcatccttgatatagtacacaggctatggactccaattgatggggagtttgatgactacattatcaatcctaagggtagcggttaccaatcactacacacagcagttcaggcatctgatagctcaccgctggaggtccagattagaacccagcgaatgcatgagtatgcagaacatggacttgctgctcattggctgtataaggagagcaaagttgagtacagaagtagcatgagtaagagaataagacaaagtacatcatattcatctagttcttcagaagatgaaagttctgtacaggatgatatcccatcaaagtacagttcaatgaaagtggggcatccagtgctaagaattgaaggtagtcacttactagcagctgtcgtagtcagtatagataaaggaggaaaggaattgattgttgctgtaagttttagtcttgaagcttctgaagctgtagctgagctaaggtcatcttttcagttgaagcgttgggaagcctatgctaggcttcataaaaaggtttctgagaagtggtggtgtgcacctggacatggtgactggtcaacaaatctggagaggtacacactatgccaggatgggatatttcataagcaagaccaatttgggagacttttacctacatttattcaaataattgatttggcggaagaggaagaggaagagtattggatggttgtatctgccatattcgagggaaaggaaacttgcagtctaccatctgaatcgagttatgctgataaatcatcatctgaacctccaagttctactccattaagcgaccccatcaacaataaggtgcatttgctcagaaccatgcttcaatgggaggagcaagttcgtcgtggcgcatctttggcagagaaaagtctcagtgcaagcatctgcacaaaggcaatcctgcgtgaggtggccataatattctggcctaatggcaagattatgagaatgagcactggtagcacagctgctgacgctgctagaagaatgggcgtcgaagggaagctgctctgggttaatggccaactagtgctgccccaaacagagctaaaggatggggatatagttgaagtgagggtatagatgcaagtaccagattccagtacaccttcctcagggttattgatcatattggttcctcagttcttgccctatcttggcaatgcatcgaacctcaattgtacagtccatttgtcgaaatgaatcgaagaaagaaggattaggtccagtaagtgttgtgtcatacaagagttcactgtgtacataagaaactgcaagtataaaagctgtctgtccagctgtgcttctccttgcccatagttacagtggtaatgtaaatttccgtaagtaaagatgtagtaatgtttagttagtggtccacatttcagcgtgaagttatgaagtgcagtagcgctgcaagtttttttttatatatgtccaaagtagatgtctcatgctgcctaaaaaagatgtccatgtcccgtaatttggcaagccaagattttcaac

SEQ ID NO: 123511 - DNA, 1207 bp, Zea Mays
aatctggcgaaacttctatcatcgtcactcacaaggcttttacacgactagttctgcgaggctaagagcagaaaaaactccacctgcctggctgatttcatcaactccggcggcttggagaagacgaagctgctccagaatccgataggaagtttggtgctcgcgtgttgacgggttgatttcggtgcgccgatggggcaggcgttccgcaagctgttcgatgccttcctcggcaccagcgagatgagggttgtgatgcttggtctggatgccgccggtaaaaccaccatcttgtacaagctgcaaatcggggaggttttgtcgactgttcccacgattggtttcaatgtcgagaaagttcaatacaagaatgtgatgtttactgtttgggatgttggtggccaagaaaagttgaggcccttgtggaggcactacttcaacaatactgatggcttgatctatgtagttgattcattggatcgggagaggattggaaaagctaaagctgaatttcaggcaataatcaatgatcctttcatgcttaacagtgtcatattggtatttgccaataaacaagatatgaaaggggcaatgacaccaatggaggtgtgtgagggccttggcctctacgatttgaagaatcgcacctggcacatccaaggctcctgtgcgcttaaaggtgatggcctttatgagggcttggactggatggcaagcactctgaaggaattgcaagcttcaggtcgcctaccctctggagggacatcgttgttctaagaagcaaatctgcatgtaagatccttgggttgatactagtaataatggatcaagagatcatcaatgatgttaacatcttgatgagaatttcctttcaaattcatgctgcactgctcaggctccgtggggtgattctactaaagaaaaggtgaaacatgggcctgaccgcataaaaatatcggtcatgcgtttgtactcacccctggggatttcttgtcaatgatctaacctgtgatataggccttgtaacttccgttgtgagtaagtttcattcaaagctaaccggcggatgcatttgtcacatatgagaattgaggagtcaacttccacatcctgttgttgtaagaatttctgtaaatcgaagttggcaaacataatttatctcaacaagttggtccggtcattattcaggattgggtttatttttgtg

SEQ ID NO: 123512 - DNA, 1122 bp, Zea Mays
aatctggcgaaacttctatcatcgtcactcacaaggcttttacacgactagttctgcgaggctaagagcagaaaaaactccacctgcctggctgatttcatcaactccggcggcttggagaagacgaagctgctccagaatccgataggaagtttggtgctcgcgtgttgacgggttgatttcggtgcgccgatggggcaggcgttccgcaagctgttcgatgccttcctcggcaccagcgagatgagggttgtgatgcttggtctggatgccgccggtaaaaccaccatcttgtacaagctgcaaatcggggaggttttgtcgactgttcccacgattggtttcaatgtcgagaaagttcaatacaagaatgtgatgtttactgtttgggatgttggtggccaagaaaagttgaggcccttgtggaggcactacttcaacaatactgatggcttgatctatgtagttgattcattggatcgggagaggattggaaaagctaaagctgaatttcagaaaggggcaatgacaccaatggaggtgtgtgagggccttggcctctacgatttgaagaatcgcacctggcacatccaaggctcctgtgcgcttaaaggtgatggcctttatgagggcttggactggatggcaagcactctgaaggaattgcaagcttcaggtcgcctaccctctggagggacatcgttgttctaagaagcaaatctgcatgtaagatccttgggttgatactagtaataatggatcaagagatcatcaatgatgttaacatcttgatgagaatttcctttcaaattcatgctgcactgctcaggctccgtggggtgattctactaaagaaaaggtgaaacatgggcctgaccgcataaaaatatcggtcatgcgtttgtactcacccctggggatttcttgtcaatgatctaacctgtgatataggccttgtaacttccgttgtgagtaagtttcattcaaagctaaccggcggatgcatttgtcacatatgagaattgaggagtcaacttccacatcctgttgttgtaagaatttctgtaaatcgaagttggcaaacataatttatctcaacaagttggtccggtcattattcag

SEQ ID NO: 123513 - DNA, 818 bp, Zea Mays
aatctggcgaaacttctatcatcgtcactcacaaggcttttacacgactagttctgcgaggctaagagcagaaaaaactccacctgcctggctgatttcatcaactccggcggcttggagaagacgaagctgctccagaatccgataggaagtttggtgctcgcgtgttgacgggttgatttcggtgcgccgatggggcaggcgttccgcaagctgttcgatgccttcctcggcaccagcgagatgagggttgtgatgcttggtctggatgccgccggtaaaaccaccatcttgtacaagctgcaaatcggggaggttttgtcgactgttcccacgattggtttcaatgtcgagaaagttcaatacaagaatgtgatgtttactgtttgggatgttggtggccaagaaaagttgaggcccttgtggaggcactacttcaacaatactgatggcttgatctatgtagttgattcattggatcgggagaggattggaaaagctaaagctgaatttcaggcaataatcaatgatcctttcatgcttaacagtgtcatattggtatttgccaataaacaagatatggtgaggcaacaatacttgacccttcatatatatattagctcggccgggagggggggagaccgcctcccggtattatattaagaaaagatcgaaacatggtcccggccgagaaaatctccgaaccctgcgcctccatcactagcgggccgtcaccatccactctgcaacggtccagtcggagggtggagcgcatgacgtaactcgggagcgagcggggcataacgaggggatttttt

SEQ ID NO: 123514 - DNA, 1890 bp, Zea Mays
cgagcagcagcagcagcagcggcggccggagcccggacggagccaaccgccagctagtctgtctgccgcgccggcccgccgctcgctcccgctccccctcccccgtccgaggatcacgtcgcgcctcgctcgcggtctcgtccacagctcccggtgcggtcggcgatggacgctgccggggacgccatggagagaggcgaccgcgcgccgctcctgccagtgagtcaaggcccaaaggttcgggacgacgacagcctccaagtgccactgttgaaggataagaaacgtgccggcagcaaggcgccggcggttgttcttgggttcgagtgtctggagagcacggcgttcaacggcatctccacgaacctggtggtgtacctggagaccgtcctccacggcagcaacctggccagcgcctccgacgtcaccacgtggttcggcaccagcttcctcacgccggtcttcggcgccatcatcgccgacaccttcttgggcaactacaacaccatcctcgtctctctcgccgtctacctccttgggatgatgttcgtcaccttctcggcgttcctgcccacagccgcggcgctcggcggcgccacctcggtgttcggcgccaagaccgtcgccttcctcgggctgtacctcgtggcgatcgggcgcggcggggtgcagtcgtcgctggcgccgttcggcgcggaccagttcgacgacgccaacccggcggaccgggacagcaaggcgtctttcttcagctggttctacctctgcgtcgacttcggcatgatcgtctccggcctcgtcatcgtgtgggtccaggacaacgtcagctggggcctcggcttcggcatctccaccgcctgcctcgcgctcgccttcgccgccttcgtgctcgccacgcccatgtacaagcgccgcatgcccaccggcacgccgctcaagagcctcagccaggtcgtcgtcgccgcatgcaggaagatcgccctgaaggcgcccgccgacgccggcatgctcttcgaggtcagcgacaaggtggacgccgcccagcctaagatcgcgcataccgacgagttctcgttccttgacaaggcagctatcgtctccgaatcggacatggaggagatgtcgtcggaggaggcctgttcgtcgtcgtggaagctctgcaccgtcacccaggtggaggagctcaagatcctgatgcgcctgctgcccatatgggtgactagcgtcatcgtgtcctcggcgtacgcgcagatgaccaccaccttcatccagcagggtagcgccatggacatgtccatcctgtccgtgccggtggctgcggcgtcgatgggctcgttcgaggtggtcttcctcctcacgtgggtgctgctctacagcaaggtgatcgtgccggtgctgaggggcttctcctccggcggcgacggcgagccgtcccagctgcagcgtatgggcgccggccggctactcatggcgctctcgatggcggcctcggcgctcgccgagatgaagcgcctcgacagcgccgcgcgaggcgaggagatcaccatcgcgtggcagctcccgcagtacttcttcatggccggcgcggaggtgttctgctacatcgcgcagctggagttcttctacgccgaggcgccggacaccatgaagagcacgtgcacgtcgctctcgctgctcaccatcgcactcggcagctacatgagctcgttcatctacgccattgtagcggcgttcacggcgacgcccgacagtcccggctggatctccgacaaccttaaccaggggcacctcgattatttcttctggaccatggctgccatgtgcacgctcaacttcgttgtgtacagcgggttcgccaagaactacaagctcaagacggtgctatcatga

SEQ ID NO: 123515 - DNA, 2234 bp, Zea Mays
ccgctcccagctgagcaagcccttgcccttggccggcccttgctgtgccccccggcccttctctctcctctccctcagtccctgtcttgtcctatcctagtaaaagaaaggacagtttgattgcacaggtagcccaccgctcaaatcatccgcttcccctcgcccttcctctctcacacccaaaacaaacaagcctgctggatcgaccgagttcagccgagctagctaaccctcgcaagctagcagcttctctcaaccctcgacttccttctacctatacaaccctaaatcagtttgcttccttcggttcttgcgaattgccaggaacgaaagagctttgccgctctcgtgttacagaagactcggaaagagagatcgagaggaaggagtaccagatagacgtaccagcaggcagcagctagctagaggggcgagcgagccatgtgcgactacttcctacaaaggatggaggacgaccgccaccaccaccatcaggccggaggagacctcacggacgtcgtccgagccggcggcgcgatgcatccggcagctgtcgcggagctctcctccacggccaccacggggtggcagctcccggccgagccagctggaccacccggcctcttcccgccagcccggtcatcgtcgtcgtcggacggcggcgccttcgccggcctctcgggcccattcgccagcgacttccgcgcggactccgccggcgttgaccccagccctgccgacttctttgacttcgaggcgcccgctgtcggtggcggccggggcggaatggtggagggcggcgggccgccgcagatgcccgcgctgtcgccgagagaggtacggccgtactcggtgatgatgggcggcgacaccgtcaagatcggcgtgccggcgatgatgcccggggggctgcccgttggcccgccgtgcgcgttcgacgccatcgccgggatgcagatgccgtcgccgcactgcggcgggatcaagcgcaggaaaaaccaggcaaggaaggtggtctgcatcccagcacctgcagcatcagcaggaggaaggaccactggggaggttgttccttctgatctctgggcttggaggaagtatggacagaagcctatcaaaggatcaccgtatccaagagggtactacagatgcagcagctctaaaggatgcccggcgcggaagcaggtggagcgcagccggacagacccaagcctgctcgtcatcacctacaactcggagcacaaccacccttggccgacgcagcgcaacgcgctcgccggctcaacacgttcccaccacgccaagagcagcaagaacaagtactcctcgcacagcctgccgcagacgccaaacctcaaagcggaacctgagcatcaccaggcctcgggggcagtccccagcgccaccgccgcaaccgcagcaacagccacaagcaccacaacgaccacgagcaccaccagcaacagcacccctcctcctcctccgacgatggctgtgaaagaggaggcaataatggtggggtcggaaatggagaaagtgatagaccaccatgacgcttctggctggctggatcacggtgatctcatgcagcagatgttcagccagagctactacaggccgatgataccggaggcggccggcggtggcctccatgccgatgacttcttcgctgacctcgccgagctggagtcggatcccatgagcctcatcttccctgcaggtggtgaacctggaaaggagaacaagagcttggatgccgatccattattcaacatgctagactggggtgccactaatgttgcagctacttcttcatttgagcaagacgagagtggctggtgacattgtttttgtttagcttgcatcggcaaaagcaatcatgcatacatgcacacgcacaacacaacacaacacgttcgttctctaggacaataaccattgcattcattaagatggaaagagttaaaaaaagataagatgtgagggctacttttgtttctgtgtcccactctttgttttttgtagtttcttctttagttttatttatttgtttattctaattgatgtgttagaataaatacgagcaaaaaatcgctctagaaatctcttttcttcttcttcgtttctgtggcacgagggatatttttgtttctatgccatgctctttgtagtagctaatttcttcgttttgtttacactctaattgatgtgttaaataattgtcattttgatcg

SEQ ID NO: 123516 - DNA, 2353 bp, Zea Mays
atgaaagaaggggaagaactcaatactgacaaaatacactactcgctgcgaatgaatgaaaggaagaactcaatactgacaaaatacactactcgctgcgaaatgcgagtgaatgaaaggaaagtgaatgaaaggaagaactcgatgctgacaaaatacacactctcgctgcgaatgaatggaaggaaaacgaatgaagggaagaactcgatgctgacaaaatacactcgctgggaatggatgaaaggaagaactcattttcagctcattattataagctgtcctcgctattacgagggggaaacaaaaacaaaacgaaaaatagggacacgccacatcatcgccatcctcatttcgtcctgttatctcgtagctccacagtccacacccaccatcccgttctccctctcttctcctctccaaggtccctgccacccacacaaggcttggactcttgggccggccgggggggaagaagacaagacaaacgcagccgccggcatgatggcgatctgcagcgcgcacaccaccaccatctccctgcgctccccatgcacgacgaccgtctcgaacgcggcagctggcttggtgcagaagcaagtcatcttcttgaccagcatcaacaggaggagcggcagcagaaggcgtggaggaggggtgagcaggaccttactccaggtctcgtgctccgccgacggcaacaagccagtggtgatcggcctggcggcggactccgggtgcggcaagagcaccttcatgcgccggctcaccagcgtcttcggcggcgccgcggagccgcccaggggcgggaacccggactccaacacgctcatcagcgacaccacgaccgtgatatgcctcgacgactaccactccctggacaggaccggcaggaaggagaagggcgtcaccgcgctcgacccgagggccaacaacttcgacctcatgtacgagcaggtgaaggcgatcaagcaaggccaggcggtccagaagcccatctacaaccacgtcaccggcctcctcgacccgccggagcttatcacgccgcccaagatctttgtcatcgaaggtctgcacccaatgttcgacgagcgtgtgagggacctcttagacttcagcatctacttggacatcagtgatgaggttaagtttgcatggaaaatccagcgggacatggcagagcgtgggcacagccttgaaagcatcaaggccagcatcgaagccaggaaaccagatttcgatgcatatattgatccgcagaagcagtacgctgacgccgtgatcgaagttctgccgacccagttgatccccgacgacgacgaagggaaggttctgcgagtcaagctgatcatgaaagaaggggtggacaaattcaacccggtctatctcttcgacgaagggtccaccatctcctgggtgccctgtggaagaaagctcacgtgctcttaccccggcatcaaattcgcctacggcccagacatttacttcggaaacgaggtatctgttttggagatggatgggcagttcgacagactagacgagctcatctacgtggagagccatctgagcaacctctcgaccaagttctacggggaggtgacacagcagatgctgaagcacgcggacttccctggaagcaacaacgggacaggtctcttccagaccatcgtcgggctgaagattagagacctctacgagcagattgttgccgagagggctggcgcgccagtggaagcagccaaagtttgatggcccgcgtgcattcagatgtcctaaaacgggacaggcctcttcaaactcgacgcacgtctgttggggatatatgcatgggcagcatggcgaggaactaggagcctaggaggatgtggaagaaacgtcatttgcagagctcaggaaaacgtgcagcacttgtttagatgtgtgccttcttccatgcttcattgcagaaagaaatcaagtgcctctactactatcaggtactcctattcaagtgtaggagacgaatccataccacttccattgttggttattgtttctctgacccggagccaagaacagtcaacaaggacccgaggttgaacatctctttttatggactactggagagtaacaacatgtccgtttggttttaattagtactggattggactgcttctacagtactttgtctttatggattatagctgtagtagtcggttttaattcgtactggattggactgcttccacagtattttatctttatgcattgtagctgcagtagtccgaacaactggttttaatccgaggagagcattaatgttcttgccatctagcaattgaaaaccatagcaggcaaacaaaaaaaatcaaaa

SEQ ID NO: 123517 - DNA, 69 bp, Zea Mays
gccaacaacttcgacctcatgtacgagcaggtgaagttctacggggaggtgacacagcagatgctgaag

SEQ ID NO: 123518 - DNA, 231 bp, Zea Mays
atggcacccacgcttgcccccggcggcggacccacactcatctgcacggtggccgaggtcccgcgtagtggccagcgccaaggccatgctcgaggctatggcctcgccccaaggaggccagaggaggggtcgctagagccgagcgcaggaaatgaaggggcaccgccactggtcgaagacgccgcacaagatgagaaaggggtcacagtctcacacatgagaagagtttag

SEQ ID NO: 123519 - DNA, 1462 bp, Zea Mays
aatttccaaatccaaccgacaaaatatcaatttatatatattgctgtcttgatttacaataattggtacatcaaacaagcgcccttgatgttccaaccaaaaatgaggaaaaaacattacatctgatttctgaagcaaaccctgtgtcattgatttctgaccttccgaaaacgacaggccatcatcaagtcaagtatagacaatatccaataatagtcttgactcatcctatcggatatgtttgaagctgttgaacatcccagtgtgggaagctttggctgcaggcttgggcgtttcaggggttccaaaaacgttccagaaccggagggtctcgtcagcagcagccgacgctactgtgcatccatcaggactctgcaccatgaagaggacgcgagaggtatggccattaagttcagccatcttcaccatcgatgggtacttccacaaggtgagttggttctgtgtgaatccatgtgagctcagcagctccctctcgttcttgttccacagcagagcgcacacctgtgatccggtatcaaccgagttcaggcacacaccggtgtgcgtgttccagaacttgatgcagcggtcgctgccaccgccgccggtggccagcaagttgctctggaacgggcaccacgcgagtgccttcacggcggccatgtggtcctcgagcctatgcagccactggttgcggccagcagatggcatggatgatgccatcgacacatcccaaatgtgcagaaggttgtcgttgcctccgctggccagctgctgccctgatccggaccacttgagcccgcagacctcctggctgtgcccctcgtacctctgcacgacgtggtctctaatccttacgtcattgttcacgatcttgccgtccatgcaaccggtggtcaagacgctgttgttccatgccagcgagcctacccttgcctcatgcgcacctctgagtgttctcaactgcataggatgaaacgatttaattcagcaacagataacctgcactggaatttttagatgaaacatcacaatgtgcgtaccagtcggttggagctggtgtcccagagctggacgtcagacgagttgagcccgacggccatgtgccgaccatcaggagcccagctaacgcttgtaacaggaccactgtcctcgccgacggtcacaagctcggatgtggatccgctcgatgcatcccacaggtacaccgtgtctcccaaagcaatggatagcacgttgttgcttccccagtcaagcaagttgaggtagtagtcgtcaactagctctggtgcgtctagggtcctctcggcagactgcacattttgattcaaccgcatcagtgatccaccattctcccaccccattccctcgccactacacccgttggggatgagatggctagaagcgaaaacagaagagctgtcgcacatacctggggaatgtggcgccgctgtttggccgg

SEQ ID NO: 123520 - DNA, 218 bp, Zea Mays
caatttaaggggtgtttggaagcaaagtatttttggagttttgaggtaaaactatggtattggaggataccatattattttttaccaagaggtatttggctaaattgtaaaaaaaactccgtttcgaattacatggttttgtggatactatgttatttttggagtatatgttattttaggagtatttgaaacttcattccaacctaaagtttttgtct

SEQ ID NO: 123521 - DNA, 381 bp, Zea Mays
gggcatgctctctcaagacctccaattttagaaggagaagcaactgcacgggcaatccgtttagcgaagttcatcaatatgctactgtatgttcatgtgatgagcatagacgcaatggatgagattgccaaggctaaaagagaaggacagtcagatgccgagatctggaaattgcgactacagttgcacgtagcaatggtctacattgcaccacgcttgatggtagggaaaaagggtgctatgacagcaggtttctatgattctagatgctcaaaactaaagtttgtgaagataataagggataacaagacaacaattaataaaaagatgggcatctggagattgtcgaaacaggctaaaagatatcctgctttggtttaa

SEQ ID NO: 123522 - DNA, 1175 bp, Zea Mays
ccaacctcccgcacccgcgccgctactgccctccacgcacgcaggccgccgcttcggtttttgagtttttccatcacacgcagaggtagagagcatccggattccagcttcaagtcccgaaccccacccatgtccgccgccgccgcgacctctgccagcgactggaccatagtccgccgccgcggccgccgccgaggcaacgccccacgctccacctcccagcccgatgccccgacgcctctccccgtgaccccagtcctctggtccccctccgattcctctctcgaccccgcccgcgtctcccgcctcgtcgcgcgcgcccacgccgccatctcccgcgtcgctgcctcccctctctaccacagcctcctccaggactcgtcgctccgccgccgcctcagtctcctcgccccggcccacctctccctcctcggcgtcggcagcttcgagtcctcccccgccgcgcgcctccagctcgcgctcgccgccctcctacgccgcgacctcctcccgaaagccgcctccgcggacgtcttcgaccccgtcctctccgccgtcgagtgcgcggccgccgcggcgctcggcttctccgtcccgagcctcgacgacgggtgccgccgttgcgctgaggagcccacgctcttctacatgccccactgcgaggcgtcgctctacgatgctctcctcgccgctaactgggattcccccgcgcagctacgccgcgtctgcgtgctcggcaacagcttccggcggtacgcgctccaggccgaggagaaccgctcgggccccgccgccaaggccccacatgtcctcgctgcagagcggttcgcgcgcgaggagcggttcggcgacccgagggatctggatgacgaagattggttcgcccacgcgttcaacgagacgagctggcatttcttcgagctgcgcgacgacgtcgacttgtccgccaccattgctgtaggagggagctaagttcattgatcagatgtaatatggtaactggatatcttcatgcgttgcttgattgaatgcaatggtgatcaagattctaagtttatcctatttatcggattctctgtgggatgcatactgtataccaattccaaggagaacggtgtatatgccaagttgccaactaggtacctggttgttgctcgatttgttgtctctcgtct

SEQ ID NO: 123523 - DNA, 191 bp, Zea Mays
gaatacgcacagccgccactgcaaaaaaaaaaagggaaggagcgccgtccgaccaggaagacagacgccaccgccagagaatcgcatctagccgtgaagactacaactcagttgccagaatgagccagggtcgtgttccgggttcaccaagtctgcggcgcgcatcggcggggcttgggcggcgcaatccg

SEQ ID NO: 123524 - DNA, 370 bp, Zea Mays
ggcgaagccatgcgcccccaccaagctatcgtcaaagagagaccgagagtgagagcgatacctcgccaagggatgcgggcacgtcggcttatggaccaaggcggaaggctggggagaatcgcccgcgcgtatgggtgctcgtcggggcaaagcaaatctgcgccgccgcgtggatgctcagcaccgtcgtcatccaagccttcggtaccgtgccagcgacttcctcgggcctgagggaaagaggtcgtggccgtgccacctgggaatttctaccagagctacctgaattgctcgccggagcaactccattgccgttcacccgcgctgcgccgtggcgggacctccaccgaggcggaacacggtatgcagt

SEQ ID NO: 123525 - DNA, 206 bp, Zea Mays
acccgattcctttcgggtgacacgcgtgatcgcgctatctgccgggtttcccccgtcccttaggatcggcttacccatgtgcaagtgccgttcacatggaacctttctcctctttggccttcaaagttctcatttgaatatttgctactaccaccaagatctgcaccgacggccgctccgcccgggctcgcgccccgggttttgcg

SEQ ID NO: 123526 - DNA, 2576 bp, Zea Mays
ccgacattccgcaaagaacctgtattatctcagaaatgccgcgcggtgctgctccagttcctgccgcagtgcgtgccttcccggccccgagagcttcgtgttccccgccttctcctctccttcatcactactaccacaggggaggggaagactagcgttgggtgatctttgcaagatcgctgcgcttttatttatttatttatttatttatttatttatttatttgcagctgtttgcggtccggcgaccggcctgcttctcattcgaacccaatcaaatgctgatgctacggtggggtttcgtctcctcctgtctttttcagttattgctgctggcattgcggcgcggtaagaggagaggagcgaggagggatcggcggagaatgaagatgaaggcgctggcgtgctgccggcggcggccccaggacttgagcatcgacatggaccaagagcccgacagggtgatgacatataatggcctggagacctgcattatcaactgttccgcctatgacgatgatagtggcatcagtgcaacaacatgcggagatggctgtgtcaccgctgattcccttgatgatgaagtctctagctgctttagtaaagatgcttctggttcttccttctcttcacactgccttagcaagcaggaggagcattcgctagatgagttgggtacacccatcgcaattcatctactccctttcaaagcgaagaaaccaatcacatataccttgagtgcttcagatattgaaaacatgaagaaaaaatttgcgaagcttttgctcggttatgatacttcaggaggcgctaggggcgtttgtgcggctctggccttgtctaatggcataatcaatctctctgctactgtttttggagaactctggaagctggaaccattgtgcgaagataaaaagatcaggtggagaaaagaaatggactggttgatgtctcctacaacttatatagtggagctggttccaaggaaacaaagcggagcagatggatgcacatttgagattatgactccaaaggcccgctcagatgttcatgtgaaccttcctgcccttcagaagcttgatacgatgctcattgaagtaatggactctatgatagatacagagttctggtatgaggagagtggtagcagagctgatggtccggtgaaaattaccggcccaaggaagagtaaaaagtggtggctcccatctcctcgtgtccctgagcaagggctatctcgatttcagcggaaaaggcttgtttttcaggctaagcttgttcaccagatcctcaaagccgcaaaatccatcaacgaacaagtcctgttccacatgcctattccggcagctgttatggatgcccttccaaagtctgggagagctagcttgggtgaagatttgtaccaggctataacgaccgagtatattcccatagaggaaatatttgtttccctcagtttgaaaactgagcatagtgtgctcgagactatgaaccagttggagggggcaatgtttgcatggaaccaaagaatcttagaggagcgaagcaagaggtcaccgggacgtcattcctggagcttcatgaaggacagctcgtcagaactcgacaagatgtctgcatgcatcgaaagggtcgacacccttgtgcagcttctgaaagccagatatccgaacctgcctccaacttttatagatgttctaaaggtccagtacaatgtggatgtggggaatgcaatcgtggaggcatactctagggttcttgtcggggtagcattcagcatactgtcgcgcgtggcggagatactgctggaggatgacctggtcaagaggcccaacacccccatggcctcactgaagttcgacctctcctccgacgtgtacttggccggcataacagagacgccgccgggacacgtccggaggtcccttatggatcagatcagcatggtcgacgggcgcttcaacgctgctgtgaagaagaaaggagcgaagcagctgaggtggtgaggacagtcggctgttgtgtgaaatcttttggccatgtacagggtgggtgatgcagagcccagtgtccgctccacaaggacacaaggcaaggttaccatagcaatagcgccagtgtaatgtatttggcaacgagtttatagcttactgtaagagcaagcattaggcgaatcctgcctgtcgaagtctccggatgttgctgttccgtctgaacatctgatgctcttggtcagcctctgctgcatttcttgctggcacctgatgatagcatgtctatggcgagggaccttgcttgagtgcttgacgggttcatgctgacgcgtcttccgctctggaagcagtccgcgtgtggacgcttgtggaattgagactttagagaagagaacgaattccgaagtcagattgggagccagtcgggtgcaaaagggaaggaaatgcactcggcccaacaaatcttccccgcacggtcattcggtcagcgatcctctagttgtatccttgatttttcagatttctgtcatcaatgtcactattatagaatctacggcatacatatttttaggttttttttcac

SEQ ID NO: 123527 - DNA, 1816 bp, Zea Mays
ctctctctctctctctctctctctctctctctctctctctctctctctctctctctctcgctctctctctctcgctctctctctctctctctctctctctcccccccccccgggctaagtccatttggcttctcctccgtgtcggacgcccgctggtcgctgactcgtgttgctgttggggcggcgtcgacgctgcaaagctgtttgcggtccggcgaccggcctgcttctcattcgaacccaatcaaatgctgatgctacggtggggtttcgtctcctcctgtctttttcagttattgctgctggcattgcggcgcggtaagaggagaggagcgaggagggatcggcggagaatgaagatgaaggcgctggcgtgctgccggcggcggccccaggacttgagcatcgacatggaccaagagcccgacagggtgatgacatataatggcctggagacctgcattatcaactgttccgcctatgacgatgatagtggcatcagtgcaacaacatgcggagatggctgtgtcaccgctgattcccttgatgatgaagtctctagctgctttagtaaagatgcttctggttcttccttctcttcacactgccttagcaagcaggaggagcattcgctagatgagttgggtacacccatcgcaattcatctactccctttcaaagcgaagaaaccaatcacatataccttgagtgcttcagatattgaaaacatgaagaaaaaatttgcgaagcttttgctcggttatgatacttcaggaggcgctaggggcgtttgtgcggctctggccttgtctaatggcataatcaatctctctgctactgtttttggagaactctggaagctggaaccattgtgcgaagataaaaagatcaggtggagaaaagaaatggactggttgatgtctcctacaacttatatagtggagctggttccaaggaaacaaagcggagcagatggatgcacatttgagattatgactccaaaggcccgctcagatgttcatgtgaaccttcctgcccttcagaagcttgatacgatgctcattgaagtaatggactctatgatagatacagagttctggtatgaggagagtggtagcagagctgatggtccggtgaaaattaccggcccaaggaagagtaaaaagtggtggctcccatctcctcgtgtccctgagcaagggctatctcgatttcagcggaaaaggcttgtttttcaggctaagcttgttcaccagatcctcaaagccgcaaaatccatcaacgaacaagtcctgttccacatgcctattccggcagctgttatggatgcccttccaaagtctgggagagctagcttgggtgaagatttgtaccaggctataacgaccgagtatattcccatagaggaaatatttgtttccctcagtttgaaaactgagcatagtgtgctcgagactatgaaccagttggagggggcaatgtttgcatggaaccaaagaatcttagaggagcgaagcaagaggtcaccgggacgtcattcctggagcttcatgaaggacagctcgtcagaactcgacaagatgtctgcatgcatcgaaagggtcgacacccttgtgcagcttctgaaagccagatatccgaacctgcctccaacttttatagatgttctaaaggtccagtacaatgtggtaagttagacactgcactgcgacgttttggataggcctaattctaagatgctgtagctctgaacattcgctgaagaatggctactggatgcaggatgtggggaatgcaatcgtggaggcatactcta

SEQ ID NO: 123528 - DNA, 201 bp, Zea Mays
atggcagcaggatcaaatgattgtgggttttatgttatgggatacattctcttttatggctgcgttgaaggatctctgcggtcagacatagaagcaggcaacactagtgagatacggtctcttgcgctgcattacatcacattccatcgcaagaacaaagcattatcgcagcttgaagacacccaaagattcaaggtctaa

SEQ ID NO: 123529 - DNA, 117 bp, Zea Mays
ttttttttctatagtctcttttctttcgtaagggtcaccaaaatcaaaatggtggtgatatactccacctcttcgttagcacgtcaaagaatggagagagagagggagacaagtggc

SEQ ID NO: 123530 - DNA, 100 bp, Zea Mays
ccgatataattactcaggggcagcgacgtccaaatcccagacccacacgcgctacgacttcttttgtgcacgctcagtcacgcgcaggatgactctccgg

SEQ ID NO: 123531 - DNA, 204 bp, Zea Mays
atgtaccgcatctcctcctcgccgaagatggacagcaatgccacattcagcgcgtacagcttcatctcttggaaggtgttgacgaggcggccgtcccaggagcggagcgagcgcagcgcgacggcctcgacagccggcacggaggcgcggatggcctggggggagaaagcccgggagacgaggcggcggaggcgggcgtggtag

SEQ ID NO: 123532 - DNA, 2444 bp, Zea Mays
tgagcagattgcgctgctccataattacttgtgctctaagctttgatccaaatccacacacattgatctaaaggccaggttgcagaatggagagaacactgatcacctctaacctctgcttgagtgcacacgcttcaagatcgtcccggagggttcactacatccctccttccgcctctgctgctgcacacaactccagctacaggaagaagagtgccccgtctctgccgccgtcggccgccgcatctgccactgttgtcaccgcccctccgtccactgacaatgtccagtccactgctccgaaacagaccgggcgacaggagctggaagatctcgtggccgccaagaccagcacttcaagaactgcacgtgcgccgagccaggctcgggctcgggctcgggctgagcctcgccgccggcctgccccggcagccacgtccctgccaatggcgttctgcagcgcgctggaggaggcgatcaacacgttcgtcgaccctccggcgctgcggccgtccgtggacccccggaacgtgctgtcgaccaacttcgcgccagtggacgagctgccgccgacgccctgccccgtcgtgcgcggcgccatcccgcgctgcctcgccgggggcgcctacatccgcaacgggcccaacccgcagcacctcccccgtgggccgcaccacctcttcgacggcgacggcatgctgcactcgctcctcctcccgacggcggggtccccgccgtcgtcggaccccgtcctctgctcgcgctacgtgcagacgtacaagtacctcgtggagcgtgacgcgggagcgccggtcatgccgaacgtcttctcgggtttccacggcgtggccggcctggcgcgcggcgccgtcgtggcggccagagtgctcaccgggcagatgaacccagccgagggcgtggggctcgctaacaccagcctcgccttcttcggcggccgcctctacgcgcttggcgagtcggatctcccgtacaccgtgcgcgtcgacccggccaccggcgaggtgaccacgcacggccggtgcgacttcggcggccgcctcttcatgggcatgaccgctcacccgaagaaagaccccgtcaccggcgaggtcttcgcgttccgctacggccccgtgccgccgttcgtcacctacttccggttcgacccggccgggaacaagggccccgacgtgcccatcttctcggtgcagcagccgtcgttcctgcacgacttcgccgtcacggagcggtacgccatcttcccggagatacagatcgtcatgcagcccatgggcatggtgacgggcggcgcgcccgtggggtctgactccggcaaggtgccccggctcggcgtgctcccgaagtacgccacggacgagtcggagatgcggtggttcgaggtgccgggcttcaacatgatgcactcgctgaacgcgtgggaggaggccgacggcgaggagctggtgctggtggcccctaacgtcctgtccgtggagcacgcgctggagcgcatggagctcgtgcactcctgcgtcgagaaggtgcgcatgaacctgcgcacgggcgccgtgtcgcgcaccccgctctcggcggggaacctcgacttcggcgtgatccacccgggctaccttggccggcgcaaccggtacggatacctcggcatcggcgaccccatgccgaagatctccggagtggccaagctggacttggaccgcgccggcacgggcgactgcacggtggcgcggcgcgacttcgggcccgggtgcttcgcgggggagccgttcttcgtccccgacgacgtggagggggacggcaacgaggacgacggctacttagtgtgctacgtccacaacgagcgcaccggcgagaaccagttcgtggtgatggacgcgaggtcgccgcagctggacatcgtcgccgaggtgcagctgccagcgcgcgtcccctatggcttccacggcatgtttgtcacgcaggccgagctccaggcgcagcagcaatgatcaaagcaccgaacactcgtccagtgtttacgtgctggggatctgtagcacatgattccaggagaaacacacacaaacacccatcaggtgcatactgaatagattgtagtaagaacaactctaggccacatagcattcacgaattatattgtagtgtaaatgtagcagaacccataaaagagttcatgagtagaattgatacgaaatcacaaaaaaaaattattggaatagaacaatgttcatcattgatgggtccaccaccaacattgccggctgtgcacggtgcacgccgtgcacggaagcagagcaagggccactcaacagacgaggccccgacgacaagccgacacagaaggcctcagccaagggcagcacaatgacaattgctggagcacatgtcaaacgtgcgagggcaaggcaaaagctgcgattccagaattc

SEQ ID NO: 123533 - DNA, 1634 bp, Zea Mays
cgaatactggatgggggaggcgtggggacgctgtccaaaacggcgatccgctggggcggaaggagcttggccggtgcgtggtggagtcgctcaggcagggcagggcagggcatgcggtctcgtccatggcatctaggctcgccgccgccgaaatggaaggtgacctcgtttccatggcgttgcctctacattagtgagggtcggtggaaggcaggcttgggttcgtgaatcgtgatccaggcgcagccttacctcttggccgcccccatgcatgccccaggatctggacttgtggaggcgctctgtctcaaggtctcacacactaccctaccctgttcaaccacttccagcgtgagctccgactggtgagcgggatgtggtgctggactgctggagtttacacaagaggaattgaatgccactgcaatgacgattccgagcatcccaagcctgtcgagtaccccgtgagcaatgggtaggctcagcacgagcaatgcgacaccatttgatcttggatgtgatcagcagctccacagttgccacttttttagggttgggaggcctgcatttggttctctattcagggttgaaggtggggcataagctgctccaacctccaactactctgtctcctggagacgtggtttgggtgagggcgccacttcttgaaggctatttggagaaaagtgtgcgaattgaccaaatttaagattcgctgattctctttcatataaggctacttggataacacggtgcccgctgctcttacttggatgccaatgagccctaagcattggtagcaaggagcacttagatcctgctggggcatgctcattttacaacgaaggagaagcacagcaagttcgtaatcttgtgcactggagtatctccaaccgcgattgctgttcagtcaccctacattgctcaagtgcaattattagactatctccagcagatttcctatctcacttctattttaaactccactctgcaaatagtgtcgtctcagtataaaatagtgttttgcacgcccatatagatggtcttaagagagaagcaccttccttggatggggtttctgggctcggcttcagttaacattgattcaaacacctgaacgcttggttaacacaaggaattggaagctgggaaatcatatgttgcgttttattatcattttttttaactctgatacacacaggacggcatgaggatgaatattcaggaagaggaaaacttcaatttcctgggcatcactgacctatttcttgcctagcacgggcacggtgctcctattcctgtaaatccagtactgtcgacaaggataggatacccagtgcagatgacagacagttcacaattgagttctaggcttcacatttgtgcttgtgcttgcttggagcaacatattgcagcatcaaacatttccaagatatctctgaacaacccgatcttccaactcccgtctctcccctgtcatgagcgtggagttttgtgttgttaatatcatgctcatgtaatctatcttggattcttgggagatcacggaggaatccagttcccccacataactgaactttacttatactgtccttgcttatgctactgcaacttcccaatattgctgctctatt

SEQ ID NO: 123534 - DNA, 1528 bp, Zea Mays
cgaatactggatgggggaggcgtggggacgctgtccaaaacggcgatccgctggggcggaaggagcttggccggtgcgtggtggagtcgctcaggcagggcagggcagggcatgcggtctcgtccatggcatctaggctcgccgccgccgaaatggaaggtgacctcgtttccatggcgttgcctctacattagtgagggtcggtggaaggcaggcttgggttcgtgaatcgtgatccaggcgcagccttacctcttggccgcccccatgcatgccccaggatctggacttgtggaggcgctctgtctcaaggtctcacacactaccctaccctgttcaaccacttccagcgtgagctccgactggtgagcgggatgtggtgctggactgctggagtttacacaagaggaattgaatgccactgcaatgacgattccgagcatcccaagcctgtcgagtaccccgtgagcaatgggtaggctcagcacgagcaatgcgacaccatttgatcttggatgtgatcagcagctccacagttgccacttttttagggttgggaggcctgcatttggttctctattcagggttgaaggtggggcataagctgctccaacctccaactactctgtctcctggagacgtggtttgggctacttggataacacggtgcccgctgctcttacttggatgccaatgagccctaagcattggtagcaaggagcacttagatcctgctggggcatgctcattttacaacgaaggagaagcacagcaagagtatctccaaccgcgattgctgttcagtcaccctacattgctcaagtgcaattattagactatctccagcagatttcctatctcacttctattttaaactccactctgcaaatagtgtcgtctcagtataaaatagtgttttgcacgcccatatagatggtcttaagagagaagcaccttccttggatggggtttctgggctcggcttcagttaacattgattcaaacacctgaacgcttggttaacacaaggaattggaagctgggaaatcatatgttgcgttttattatcattttttttaactctgatacacacaggacggcatgaggatgaatattcaggaagaggaaaacttcaatttcctgggcatcactgacctatttcttgcctagcacgggcacggtgctcctattcctgtaaatccagtactgtcgacaaggataggatacccagtgcagatgacagacagttcacaattgagttctaggcttcacatttgtgcttgtgcttgcttggagcaacatattgcagcatcaaacatttccaagatatctctgaacaacccgatcttccaactcccgtctctcccctgtcatgagcgtggagttttgtgttgttaatatcatgctcatgtaatctatcttggattcttgggagatcacggaggaatccagttcccccacataactgaactttacttatactgtccttgcttatgctactgcaacttcccaatattgctgctctatt

SEQ ID NO: 123535 - DNA, 453 bp, Zea Mays
caaaatcaactcgagtgggattagtgggcatgatactaagcatatccacattccttgtattaaattctcaaccagtaaccatctatgattctatgcagagatttacggtgattggaatggagccaatcctgaacggagatggcccatccaacatttttgcagacaaagcaacaaatgaagacagtagcgatcatggccgatcaccaaaagagagcttatacaacctttttttcctctggggcatagttagagctttgttaagcttcgaaaatgagatgtcttcatctagctctagtcgctggtggtactatttgaatctgcactagtttggggctgtgatgaaggtagataagaccaggcgatggctgtggcaccaagggtgactgcaagcccagcaaaaccccagagccacttctgttgcttcttacactccttacattgttgccttgacat

SEQ ID NO: 123536 - DNA, 1317 bp, Zea Mays
gtcgctgctgcggccgtgggaaaggaaacacagaaaaaaggccaacgccgtcttctcgtcgaggccagggaaggaggtggagcgcagcagcctgcgctcgggttccccctcttctcggtggaggcgcaacgcctccgggacccggaccctgtcaggtccagaaatccacgtccaagccgccgccctcgcctccggacaagggcacacctgtgccggtggctcctgttaggacacagacgtcccctgcatcactctatgccacgcctgagagcaccaccctgcctgactcaccttcctcgttcccgggaacctggtcgccatatattatcaaccataagaggcggggggcctcccttgccaagacctctcggggtgatgttggaagtgggggcagccagccgaagctccaggtgatgctgtccgctttgcccaaagggggtgaacccactgcagcggaggagcctgagtttgcttttcagcaatcagagaatggtcaaactgaaggtgacagtggtgtggaagaggctcccatctatggaaaaaatgaaatgctactaaaggacaagggatctatgtcagccaaaaatgagcaggagcagcctgagtttgaatttcagcgtggaagtcttgaagcatcagtgaggtctgttaacgttggaaggcctttgattgctggagcaccaaaaaatgatgagagtgacaccttccttgaacttcaggatttgattagtgtgtctagccatactgaagctgacggtgctggtacacaagagcggtggtggaagcccagttccccgcttgggacctctgttggcacacctggtgctgaattctatgatgcgtttgaagaaatatcaagtgatggtggaactcgatctttacgaggcatggatgatgatctccgtgaactgagattaagtctgttgatggaaattgagaggaggaatcaagcaaaagaagcacttgagatctggcagaaggaatggaagaagctgagtcaccacctatcacatgttgccttatcgcttccatctccatgtatagctgaggaaactgattattcaagtatggatcctggagctgagttgtgccagcaaataactgtttcacaacttgtcgctgctgctattgcccaaggttttgctcgttctgaagttgaatcagagatggaaaccgtgcttgcagcaaagaactttgagattgcaaggctgtcggatagggtccagtactatgaagctgcaaacagggaaatgtctcaaagaaaccaagaagctatcggtaaataattgctccattgcaattagctatatttgtttc

SEQ ID NO: 123537 - DNA, 1429 bp, Zea Mays
atggcgaatcgtcggttcgtcgtccttgaggccccagatgagttctcctccagcgatacgatgagtcaccgggaagtccttactttttattttgcccggtcccataaattcgaatccaaacgcgcgaccgtcgctgctgcggccgtgggaaaggaaacacagaaaaaaggccaacgccgtcttctcgtcgaggccagggaaggaggtggagcgcagcagcctgcgctcgggttccccctcttctcggtggaggcgcaacgcctccgggacccggaccctgtcagggtcgcctgcacaggtccagaaatccacgtccaagccgccgccctcgcctccggacaagggcacacctgtgccggtggctcctgttaggacacagacgtcccctgcatcactctatgccacgcctgagagcaccaccctgcctgactcaccttcctcgttcccgggaacctggtcgccatatattatcaaccataagaggcggggggcctcccttgccaagacctctcggggtgatgttggaagtgggggcagccagccgaagctccaggtgatgctgtccgctttgcccaaagggggtgaacccactgcagcggaggagcctgagtttgcttttcagcaatcagagaatggtcaaactgaaggtgacagtggtgtggaagaggctcccatctatggaaaaaatgaaatgctactaaaggacaagggatctatgtcagccaaaaatgagcaggagcagcctgagtttgaatttcagcgtggaagtcttgaagcatcagtgaggtctgttaacgttggaaggcctttgattgctggagcaccaaaaaatgatgagagtgacaccttccttgaacttcaggatttgattagtgtgtctagccatactgaagctgacggtgctggtacacaagagcggtggtggaagcccagttccccgcttgggacctctgttggcacacctggtgctgaattctatgatgcgtttgaagaaatatcaagtgatggtggaactcgatctttacgaggcatggatgatgatctccgtgaactgagattaagtctgttgatggaaattgagaggaggaatcaagcaaaagaagcacttgagatctggcagaaggaatggaagaagctgagtcaccacctatcacatgttgccttatcgcttccatctccatgtatagctgaggaaactgattattcaagtatggatcctggagctgagttgtgccagcaaataactgtttcacaacttgtcgctgctgctattgcccaaggttttgctcgttctgaagttgaatcagagatggaaaccgtgcttgcagcaaagaactttgagattgcaaggctgtcggatagggtccagtactatgaagctgcaaacagggaaatgtctcaaagaaaccaagaagctatcggtaaataa

SEQ ID NO: 123538 - DNA, 850 bp, Zea Mays
gggatgggcggctttgttcagttgttctgtgtgtggttttcctcatccctatctaatactccttttacctcaaaatataatttgttttagactaatcaaacattcattaagtaacatatgaatgtagtttgtatgtatgtctatattcattattattggaatgaatgtggacggaaaaaaacgtgggccagaaagaactatattttggaatggagggagtaaatttttgccatgggcccacggcaattctcttgtgctttcgaaaaaaatgtgaggtcatggatatggtgccagtaattttagtgtagaattgtacaagttggttgctaaagtctacttactcacttaggcaatgcttacctattgtttgagcacatactcaacaaagtggcgtgagctatttaacttgcctcttatggttcttgaattatagaacttgttgaattcatgaaattgtcttaaatcatagtcatggctggagctgctgctctcaatgagggtatcctttcttccgtgtccgagaaaaatgttgctgctcacccatggcatgatttggagataggaccagaggctcctgaagtgttcaattgtgtggttgagattcctagaggcagcaaggttaagtatgagttggacaagatatctggtctgatcaaggtggatcgtgtcctttactcctctgttgtttacccacataactatggtttcattccacgcacactctgtgaggatagcgaccccatggacgtcctcgtactgatgcaggaacaagttgtccctgggtgttttctgcgagctcgtgctattgggctcatgcctatgatcgatcagggtgagaaagatgataaga

SEQ ID NO: 123539 - DNA, 2751 bp, Zea Mays
tctgaatttacatgtaaattttgttacctcagggaagaacatttatttgcaggtatttttttaaaagagaatgatgttgctaaattgacaatatgcaccatagaagattccaggacattgaacaagatgttgtatctgaggcctctaggaaatgtctgctcaatgactgaattggctgacctctaggagacaaaaatcaagaaatccctgaaaaagttatatgtaacagaagatcaacttcttaaagaaatccatgttggctctgcgactgggtgtttgaagaatgccatatgtttttccttgagagcaacttagggcataataggcattctcgcaatgatgtttccacaaagcacaaaagtggctatgaaccttctgacacagaaactgagtggcatgaaagcccttggaacgatggagcattggcatcgaataggaatcgtcttcctaaagattctggtaggaatgaccaagttggtactaggaggcaaaacatatctcctaactgcacactagattatcatgctgagaaaacttcaaacttgagatacagtcgtactcctccaagggtcacagaacaaaggcgccatccttctccatttacagctgtgaagaatgaatcacgtaagaagagcagccggacgcctcccagatttcgttcttctatggaaacctttagtagatcatcaataaaggcaaggttttcccgcaatcgttcaatttctgcaccaaaattacggccacaagagaaggaacatcctgctagagctcctgcatttcctggcagtaaccctgtctcaacacatccagaaagagaagttgctgataatatagaagaagattcacatgcagaaaactgttcccaggagatcagtgaattgattgcaaatggcaagttacctaattccagatataatgagtatgcatttacgagcacagagtcgatacctgcaggtgatatcttcttctcccgtgattgcagggctccacttgagaaaacgtcaacaaagcttaacaatattgaccaatcatttacctctgactcaaatgtccatactgagaatgatggcactgttactcaaagtaatttgggccagccatcacaatttgtttcagctcggacaggtctttcgcgcacaactacgaaatccagttatgctactggtcgccattgccagatgagcaccaccaccactttgagtagcccatatagcaatggaaaattaagtggggagagtggaaagtttagtgaaatcactgggaaactagttggaggcgtcatgaaattcacatccagcaaggtgcaaaacgatacgtggcttccatgtatgactgggaaggcatgtcgaaaatcaagaacatcaaacaacaaaaaaaatgatgaatctgaatcaagtttcattcagaaggcacttgtcattgagaagattagacttttttgggctgataaatatcgtccacaaaatttaaatggatttacttgccacagggagcaagtccagcagcttaaacaatcggtctctgcagaattttgcccacatattattttcaaaggtcctccaggatcaggaaagagatctttgtgcagagctgtcctcactgaaatttttggcgattcatctttgaatgtctctcactatttgaagagctgcaatggccaggggtccatatctgtgcctattctcgtcccagtttcatccagcaataaccatgtggaactccacatgaggtttcaatcgaagaacgctagatatgctttgatgactctagcaaatgaaatgtctgataagtgtaaaatcactgagccaattgtgagaaagagctttaaagtgattgttctctatgatgttgataaagtcagccaaaataaccagcgtctgataaaatggataatagattcctcctctgatgcatgcaagataataatgacttgccaggatgaatctaatctcctagattctataaagagtcgttgcaagattatttcaattggtgtgcccagtacacgtgaggtggtagatatccttacctatacatcaagaaaagagagttttgatcttcctacaagttttgctactaccattgcgaatcaatccaggaagaacttgagggaggctatattggctctagaggcatgtaaagccaacaattatcccttcattgatggacaagctataccactaggatgggaggaggttctggaggaacttgcagtagaaattttggatgatcctgcccctaaaaggttatttctggcacgaggcaagctccaaaaactcctggtggaatttgtacctcctaaactaatactccagaagctcgtagaactcttcttgaagggaattcagactggcgtgaagagggaagtctactattggcatgcctactatgacaagaggttgcctgttggtgcaagtgctctgcttaaattggaagaattcgttgccaagttcatgagcatccaccggaagagcatgtcgcatgagcccaagattcctgaggtgccgcagtgaaacctggcagagcatgtcctcgtgcggttcggccgtgtcgaaatcccgtttgtggtggtggtttttctgttttatataattcaccttacgtgatcaactgtcatggtccatgtttttcttgttctatgtatatactatatggtacacatatatgctactactgagtacacaaatatgtccagccgaataaatgtctatacggctataccatctgtgttggcaatatcttgttgcaaaa

SEQ ID NO: 123540 - DNA, 1684 bp, Zea Mays
gccacggctacccgatcgcgcgccgcgccacggagcaccacacgatccccgacgcaaacctgctacacaaagaaaaaaaaaaacagaacgagccttcacttccgttcccctggccggcctggccccgtcctctgttccagcgttcgccgccgctctgcacgagccctgcctaccgatgtccgtcgcgtccgtggccgccctccggacggccggctccggccgccgccgcggcgcgggttcccagcagaccggccttaacgggggcaggttcctgatgatgcagaggagggagctggtgaccaaggccgggatcgcgctcgccgtctcctgctcgatggctacctcacccgcttcagccaacggcgctgctcaagggctggagattttgccgttcaaagctgacgggtacaacttctggacgtggcggggtcgccggatacactacgtcgagcaaggcgcggggcggcccgtcgtgctcatccacggcttcggcgcttccgccttccactggaggtacaacatccctgagctggccaagaagtacaaggtgtacgccatagacctgctggggttcggctggagcgagaaggcgctggtggactacgaggccaccatctggatggagcaggtctccgacttcctccgggagatcgtcaaggaaccagccgtccttgtaggcaacagcttgggaggcttcacgacgctgttcacggccaccgaggtgccggagctggtccggggcgtcgtgctcctcaactccgccggccagttcgccgaccccaacaagccggccgccgcgccggccgaggaggaggaggggggcagcgcgctgtccaggtacatcgtgcagccgctcaaggaggccttccagcgggtggtgctggggctcctcttctggcagtccaagcagcccgccagggtcgagaaagtcttgaaaagcgtgtacatagatcccagcaacgtcgacgactacctggtcggctccatcacggcgccggcggcggaccccaacgccggcgaggtgtactacaggctgatgtcgcggttcatgtcgaaccagagccggtacacgctggaccggctgctggggaagatgtcgtgcccgctgctgctgctgtggggcgacctggacccgtgggtcggcccggccaaggccgcgcggatccaggagttctacgccgacaccgccgtcgtgcacctgcaggccggccactgcccgcacgacgaggcgccggagcaggccaaccgcgcgctgctcgagtggctcgcggccctcgacgcccgcgctaagtcggccgagcccagcctacagaccgtctgatggatcgagcgcaaggggcttagcgtatgctagtcaaagaatacaatttggtggcctatatctatagtttgatgtagtatgtcctgtagtaggaacagtaatttcttactgtgagttagtttactgttctacagctgttgcacccgtttgatgtagttatagatgaccaataagcacgaggcccgcgagcccggcacgaggcccgcgagcccggcacgaagcccactgtttagcctcgatccgagtccggcacggcacggttctatgcaggcccgggccgggctcggacaggaaactaggcacggtgggctagtccggcacggcccgtttaactctaagcccgttaagcccgctttttgcact

SEQ ID NO: 123541 - DNA, 1453 bp, Zea Mays
gccacggctacccgatcgcgcgccgcgccacggagcaccacacgatccccgacgcaaacctgctacacaaagaaaaaaaaaaacagaacgagccttcacttccgttcccctggccggcctggccccgtcctctgttccagcgttcgccgccgctctgcacgagccctgcctaccgatgtccgtcgcgtccgtggccgccctccggacggccggctccggccgccgccgcggcgcgggttcccagcagaccggccttaacgggggcaggttcctgatgatgcagaggagggagctggtgaccaaggccgggatcgcgctcgccgtctcctgctcgatggctacctcacccgcttcagccaacggcgctgctcaagggctggagattttgccgttcaaagctgacgggtacaacttctggacgtggcggggtcgccggatacactacgtcgagcaaggcgcggggcggcccgtcgtgctcatccacggcttcggcgcttccgccttccactggaggtacaacatccctgagctggccaagaagtacaaggtgtacgccatagacctgctggggttcggctggagcgagaaggcgctggtggactacgaggccaccatctggatggagcaggtctccgacttcctccgggagatcgtcaaggaaccagccgtccttgtaggcaacagcttgggaggcttcacgacgctgttcacggccaccgaggtgccggagctggtccggggcgtcgtgctcctcaactccgccggccagttcgccgaccccaacaagccggccgccgcgccggccgaggaggaggaggggggcagcgcgctgtccaggtacatcgtgcagccgctcaaggaggccttccagcgggtggtgctggggctcctcttctggcagtccaagcagcccgccagggtcgagaaagtgtacatagatcccagcaacgtcgacgactacctggtcggctccatcacggcgccggcggcggaccccaacgccggcgaggtgtactacaggctgatgtcgcggttcatgtcgaaccagagccggtacacgctggaccggctgctggggaagatgtcgtgcccgctgctgctgctgtggggcgacctggacccgtgggtcggcccggccaaggccgcgcggatccaggagttctacgccgacaccgccgtcgtgcacctgcaggccggccactgcccgcacgacgaggcgccggagcaggccaaccgcgcgctgctcgagtggctcgcggccctcgacgcccgcgctaagtcggccgagcccagcctacagaccgtctgatggatcgagcgcaaggggcttagcgtatgctagtcaaagaatacaatttggtggcctatatctatagtttgatgtagtatgtcctgtagtaggaacagtaatttcttactgtgagttagtttactgttctacagctgttgcacc

SEQ ID NO: 123542 - DNA, 1362 bp, Zea Mays
gccacggctacccgatcgcgcgccgcgccacggagcaccacacgatccccgacgcaaacctgctacacaaagaaaaaaaaaaacagaacgagccttcacttccgttcccctggccggcctggccccgtcctctgttccagcgttcgccgccgctctgcacgagccctgcctaccgatgtccgtcgcgtccgtggccgccctccggacggccggctccggccgccgccgcggcgcgggttcccagcagaccggccttaacgggggcaggttcctgatgatgcagaggagggagctggtgaccaaggccgggatcgcgctcgccgtctcctgctcgatggctacctcacccgcttcagccaacggcgctgctcaagggctggagattttgccgttcaaagctgacgggtacaacttctggacgtggcggggtcgccggatacactacgtcgagcaaggcgcggggcggcccgtcgtgctcatccacggcttcggcgcttccgccttccactggaggtacaacatccctgagctggccaagaagtacaaggtgtacgccatagacctgctggggttcggctggagcgagaaggcgctggtggactacgaggccaccatctggatggagcaggtctccgacttcctccgggagatcgtcaaggaaccagccgtccttgtaggcaacagcttgggaggcttcacgacgctgttcacggccaccgaggtgccggagctggtccggggcgtcgtgctcctcaactccgccggccagttcgccgaccccaacaagccggccgccgcgccggccgaggaggaggaggggggcagcgcgctgtccaggtgtacatagatcccagcaacgtcgacgactacctggtcggctccatcacggcgccggcggcggaccccaacgccggcgaggtgtactacaggctgatgtcgcggttcatgtcgaaccagagccggtacacgctggaccggctgctggggaagatgtcgtgcccgctgctgctgctgtggggcgacctggacccgtgggtcggcccggccaaggccgcgcggatccaggagttctacgccgacaccgccgtcgtgcacctgcaggccggccactgcccgcacgacgaggcgccggagcaggccaaccgcgcgctgctcgagtggctcgcggccctcgacgcccgcgctaagtcggccgagcccagcctacagaccgtctgatggatcgagcgcaaggggcttagcgtatgctagtcaaagaatacaatttggtggcctatatctatagtttgatgtagtatgtcctgtagtaggaacagtaatttcttactgtgagttagtttactgttctacagctgttgcacc

SEQ ID NO: 123543 - DNA, 1681 bp, Zea Mays
gggatcgaaagggacacgcaagcttcacccacacaaggccacaagatcctccctacgccacacgctcctcctacatagtaattgctaaccgcgctgcgttgattcactcgtcggtggctcagagacctgcaccaaaacagccgaggcaaagcttgccccgagtcctcgtgttttttccccctttctcccccttagtcttaggactcggcgttttgatcccgcctctggggtcgctggcaatggcgcgatgccgggggaccgccgagagcctctgccaggggcggctcgacctcgacgacgacaagttcggcgcaatgtgcaccaccgcgttcggctgcctccaggagtggccggacctgggcgccatgtgcggcgcgaacctcggcgtgcctgccatggccggcaacggcaacgagtcctcttgcagcggcagcggcggctccaggaagaggaaaccggacgcgtacgacggcctcgatgccacgggtggtgcaaacgacatgagcaagagacccagagggaagcggctgtctggcatctctgagatcgtggcgccagggaaagggaagcaggagcggccaaaggcaggcacaaagaaaaaggccgaggctgcatcggcggcggcggcggctgctgctgccggccataagaccgactacatccacgtccgggcccgccgcggccaggccacggacagccacagcctcgccgagcgggtgaggagggagaggatcagcgagcggatgcggtacctgcaggagctggtgcccgggtgcagcaaggtcacgggcaaggccggcatgcttgacgagatcatcaactacgtgcagtccctgcagaagcaagtcgagttcctgtccatgaagatcgccgcttccaacccggtggtgagcttcgacatcgtcgaggacctcttcggccggcagctgaagcagtcacgacgcagcccggcggcagccctgcccgcgatggctctgccggccggccagctggagccgtcctgccttcagatgagccacatgccgcagatgcatccatctgcagcggcaaactccaccggatttgggctggacatggtcgtcaacaacccgtacgcgcccgccggcgcgagctgccctgtgtcggctgccgcgtcggtatcggtggcggccggaccgtcgacgaccgagccgtgcctcaacgtgaatggaactgctgcctgggacattggctcccggaatttgttcagcggatttgttgcacagtttcagtcagtagaaagtgagtagctgcttcctgaagaccaagccagcagtcacttggcctcatgtgaaatgaaaaaaaacacagtagtggttagatcagggcaaaataaacccctacggcccaacctgaacatgtttaaagttcagagttcataatggccgtacatgccatcacggaattcccaaactggcggacgatccaataactctaccaaaaaatgagcacatcaaacaaaatttgactatgttcatgcaaattcagacttgtatgagccgtgtatatgttaccgtgaagttaagagacttttatacatttaacttcagcatgagtgactgaatccagttactactttccctgcaggcgactgtttgctaaacaacttcaaaatggaaatgtaagaagaactaatcctcatttctggagttttaaccgtggc

SEQ ID NO: 123544 - DNA, 1314 bp, Zea Mays
gggatcgaaagggacacgcaagcttcacccacacaaggccacaagatcctccctacgccacacgctcctcctacatagtaattgctaaccgcgctgcgttgattcactcgtcggtggctcagagacctgcaccaaaacagccgaggcaaagcttgccccgagtcctcgtgttttttccccctttctcccccttagtcttaggactcggcgttttgatcccgcctctggggtcgctggcaatggcgcgatgccgggggaccgccgagagcctctgccaggggcggctcgacctcgacgacgacaagttcggcgcaatgtgcaccaccgcgttcggctgcctccaggagtggccggacctgggcgccatgtgcggcgcgaacctcggcgtgcctgccatggccggcaacggcaacgagtcctcttgcagcggcagcggcggctccaggaagaggaaaccggacgcgtacgacggcctcgatgccacgggtggtgcaaacgacatgagcaagagacccagagggaagcggctgtctggcatctctgagatcgtggcgccagggaaagggaagcaggagcggccaaaggcaggcacaaagaaaaaggccgaggctgcatcggcggcggcggcggctgctgctgccggccataagaccgactacatccacgtccgggcccgccgcggccaggccacggacagccacagcctcgccgagcgggtgaggagggagaggatcagcgagcggatgcggtacctgcaggagctggtgcccgggtgcagcaaggtcacgggcaaggccggcatgcttgacgagatcatcaactacgtgcagtccctgcagaagcaagtcgagttcctgtccatgaagatcgccgcttccaacccggtggtgagcttcgacatcgtcgaggacctcttcggccggcagctgaagcagtcacgacgcagcccggcggcagccctgcccgcgatggctctgccggccggccagctggagccgtcctgccttcagatgagccacatgccgcagatgcatccatctgcagcggcaaactccaccggatttgggctggacatggtcgtcaacaacccgtacgcgcccgccggcgcgagctgccctgtgtcggctgccgcgtcggtatcggtggcggccggaccgtcgacgaccgagccgtgcctcaacgtatgttagctgcaaatcggttgtcctcgagtcctaccctcccgtgctgaagcctgaactgaaccgagtgccttgtgctttctgcaggtgaatggaactgctgcctgggacattggctcccggaatttgttca

SEQ ID NO: 123545 - DNA, 2127 bp, Zea Mays
aagacaaggctgcctaggcagtaggcactcgctcggtttctctccagcccgtgtcaccaccacctcctcttccccttcctctctctctctctctcccgctgctgctgctgttcccttcttcctccctggcctcggtcccttcagggtgcatctgcatgcatagatggatgatggacggaaaagatggatttgtttgccctctagctagctctccatgccaaaacattccccactttgtgccaaaactgttgttgcggttggtatggtttagtgcatttttaccactctcttgtaatgatctagcttaattagctctaccaagcaatacaatcgccaccacaccaccgtctcctcctcccatcccccaagaaacccttttcctagctctaaaaaaagagcccaccaaaccctgcgagcccccaaccaagctcggtagccgaagccatggagtacaagagatcatcgcatgtggaggatgaagacgaggatgagctggaggaggaggaggaagaagacgaggaagaggaggaggacgaggatgaggaggccagaagccatcgctacaccacggcggcggcggcacccttaggcactccacagcagcaggaggtgcaagcccaagctcttgggctcggctcgcacgcctccctgatggactccgccgccttctcgaggccgctcttgcctcccaactcatctctggtgacgcagccaccgctgcctccaccaggcttcctgccggctcaccgccagccgccgcagctccatccgaggaaagcggagagggagagggagagggacagagccgcgggagcgcagcagccccagctccggcgccaccaagaaccagtgaggaataataatggcgttctcggcggcggcggtggcgccgcgcccccatcggcggcctcttctacgttcggcctcgcgtccgtgcggcccgtggtggaggcaccccagtggcggtaccgtgagtgcctgcgcaaccacgcggcgcggcttggcgcgcacgtgctcgacggctgctgcgagttcatgccgtccgggagcgacggggccgccgcgctggcctgcgccgcctgcggctgccaccgcagcttccaccgacgcgaggcgatccccggcggcgttgccgccgcggcggcggtggtatcgccctcggcggtgccggtggtgacccccacagcccgcgccagcgccaactcgtcccgtgtcatgccgctgctcatggccccgccgcacatgcatacgcgcccgccgcacgtcccggcgtccccggcgtccgcgcccgccgcgctgaccgagtcgtcgagcgaggagctgcgaggccacgcgcccgcgcacccggccgcgccgccgccgccgccgccacacgcgcaggtggtggccctagcggggtcggcttccgctcccccggcgccgagcaagaagcgtttccggaccaagttcacggcggagcagaaggaccgcatgcgcgagttcgcgcaccgcgtcggctggcgcatccacaagcccgacgccgacgccgtggacgtcttctgcgcccaggtcggcgtctcccggcgcgtcctcaaggtgtggatgcacaacaacaagcacctcgccaaggtcccgccctcgcccccatcctcccaggcccaggcccaggcccagcccccgccgccgccgcagcagcatcgccaccacaaccaccacccacctccacctccgccgcaccacatccaccatcaccaccacccgccgccgccgccgcagcaggagcagcagcatgatatgcatgagtgagtaccgagtagtcgcagagtaatgcgggaggatcagacgatgtcattagcttattagctcctttctttatccttcttcctcccttgtaatttcagtgacatcccggttgttaagaagttgactcatcatgcagcagaagttaggagggattaatatgattatgtgacctaatctcatctagtcatctcatccatccatacttctacttccagtcttccgtcgtcctctcgttgctttcttggataaacctttacctccattattaggttactgctagcgtcaatggcgcttgctttgacatccattacacctctttcttgtggtaataatgttcaatgtgtt

SEQ ID NO: 123546 - DNA, 270 bp, Zea Mays
atggcgatcattctctactgggtatacacatttaccttcttgcccatcgtgctctactgggtgtacaccgacggctaccagttgatccttcacccgcttgagcggtacaggctccacacactggacgaagaggaggagaaattcatcagcctctgcaccgttgtatgtggcatactcctacagcatcttgtgcatgccatccacgtgatggtcttgttcttgatgatgtctgtaagaacttggtcaggagatcaatccttgggtgggtga

SEQ ID NO: 123547 - DNA, 2279 bp, Zea Mays
cacatacctgggttcttgtactaacatatataattcctttctggcagctcactagctcctctctttgttgatctctgcgctatatatctctttaattatctgttgtttttttgtcataacgtactactaagttgtatgtctctgctctctctacaataatggttgtttattagtgtagacttaatctgatcaaaggcagtgagatcgtaataataacctttatgaaactactatgatcgatcacaggagatatccaattaataggtccacaaggatcgttatatcttacttaaaccaacaaagaaactaaccgatgaaactctggaaggattattgctcacaaatatgtcgaaaaacacaaaggaaacaaccacataaacagtataataaagtgtactgcacctgcactaccgtcagattcttacccatatattaattgcaagcaaaagcaacaagagagataaagagagatctgaacaagtacatctgatctacatggctttaactttagaacactgcaaaagccgtgtatatcgatctctttgactgtcgacataacacgtgaaaagaacaacgtgaataaatatacttgtcgatattttaccataattttattagggaaaacactattttttgttaatgataactagtaagtaataagcacatatatgtatgaacggtagacgatgttcttatcatgttatgtgttttcaagcttaattagaccagatgttacctagcagcacgatgagaccattcttcaaatacatgatggcgccatggcggacatgatgaacgagcacaagattttatgtaatctcactgacaattctatctagtacgagtttataggaagtgcctgcataatgcataagaaatcaataaaaaaacgaaactacgcgcgcgcaaaggatcagatgtgtggcggccaggcaacagagactgaccaacgtgatttcaaaagctacggattcaccattggcagatcagagatctagaaactctgatctacatgatgcctccatcatgaaaaccataataatctctggatctttttgcacgcacctctttcacgcattccgaggcttccattctgtcactgcacggctcatcatgatttgcgatcactatgcaacaaacgtggtctcgtgcttttcagggcatcgtcgtccccgaggagcctgggatgggcggatcgtcgtcctcaccgtcagcggaactgatcgcatgccctaggccgcccatgcacgccgcggcggcggatcaccggcgtctgcgcccgcagcacgaccagccgctcaagtgcccccggtgcgagtcgacgcacaccaagttctgctactacaacaactacagcctctcgcagccgcgctacttctgcaagacgtgccgccgctactggaccaagggcggctcgctccgcaacgtcccggtcggtgggggatgccgcaagaacaagcgagccagcgccaagaagcatcccgccgcgacgccgatgcagccacggcacgtggcggagacgggcctccacctgtccttctccggcgtgcagctgccgccgccgccgtcccccgccgccgcggccgacccgctctgcagcctcggccttctggactggaagtacgacccgatcctcgcgggttccggtggcgccgccgctggctcgttggatggcgcgagctccgaggcgcacttcgctggggcgggcatgctgggcatcccaggcggcggcgagtgctacgcgctgagttcgctccggtacgcggccgacctgggcgagcacctgcagctgcaggggctcccgttcgggctacgtgctgagcaggaatcgatggaggtgaaggcggcggcgacggagaggacgctgtcgctggactggtacagcgagacaagccgcgcgccggagagcgccctcagctcgctgggcgcgctgggcctgtggagcggcatgctccgcggcgcgcaccagcaccatggctcctcggcggccatctaagatgctggcgaaaacgtgcctcttccactacatgcttgcgttgtatgctaatggatttaaccagtacgaatgactacgtaggagtgcttgcttttcttgttgtttttgcctgttttcatcttctgtttcctttcgcccttttgtttcttggtacttgctactcgtcatttcagatatgacgtctctgttgccacttcaaagttcaacattacgttttatctatgtattgaactacggattatggaaccatgcataaatagaacttagagagcttgggacgaat

SEQ ID NO: 123548 - DNA, 1808 bp, Zea Mays
ctcctctcctagtctcccctcctgccggacgtgtctccactgtccactcaccgcgctccagtccgccacgctgccgggcgctgctggccccgacaccgtgggccagccccggcccgtggtgcgcggagcccagcaacatgcacgcagccacgcaccggcaccgcccggcacgctgctgcctgctgctgccgcctgctagcgcttctgtcgtaccagtactactgctgcgttcctcagttccttcctcgctctcgatctatcaccaaaacccgcctgctaatcactccggtgtgggagttggggttgggttcgggcgcgcaacttttcctccccttcttattcacatctcctcaccagcagccgccggcaccaccatccatccatccatcctctcttcttcctctgcaaatcgatcgcccggccttccggtttgtttgccgctgcaaatcgatcgcgcgtcgctcgatcggtgcatctatcgtctcctccgacgtaccgtcctcgctgcgtaccttccagttcgtcgatcgacaacaaggcaggcaccagcggcaagaaggaatttcagttagtgctctataatatgatcaggtcgtagtcagatcatattgctgctggtgatcgaccgacgatgatggccggggcaccgccgacgatgcacatctgcatggactccgactggctcaagggcatcgtcgtccccgaggagcctgggatgggcggatcgtcgtcctcaccgtcagcggaactgatcgcatgccctaggccgcccatgcacgccgcggcggcggatcaccggcgtctgcgcccgcagcacgaccagccgctcaagtgcccccggtgcgagtcgacgcacaccaagttctgctactacaacaactacagcctctcgcagccgcgctacttctgcaagacgtgccgccgctactggaccaagggcggctcgctccgcaacgtcccggtcggtgggggatgccgcaagaacaagcgagccagcgccaagaagcatcccgccgcgacgccgatgcagccacggcacgtggcggagacgggcctccacctgtccttctccggcgtgcagctgccgccgccgccgtcccccgccgccgcggccgacccgctctgcagcctcggccttctggactggaagtacgacccgatcctcgcgggttccggtggcgccgccgctggctcgttggatggcgcgagctccgaggcgcacttcgctggggcgggcatgctgggcatcccaggcggcggcgagtgctacgcgctgagttcgctccggtacgcggccgacctgggcgagcacctgcagctgcaggggctcccgttcgggctacgtgctgagcaggaatcgatggaggtgaaggcggcggcgacggagaggacgctgtcgctggactggtacagcgagacaagccgcgcgccggagagcgccctcagctcgctgggcgcgctgggcctgtggagcggcatgctccgcggcgcgcaccagcaccatggctcctcggcggccatctaagatgctggcgaaaacgtgcctcttccactacatgcttgcgttgtatgctaatggatttaaccagtacgaatgactacgtaggagtgcttgcttttcttgttgtttttgcctgttttcatcttctgtttcctttcgcccttttgtttcttggtacttgctactcgtcatttcagatatgacgtctctgttgccacttcaaagttcaacattacgttttatctatgtattgaactacggattatggaaccatgcataaatagaacttagagagcttgggacgaat

SEQ ID NO: 123549 - DNA, 1640 bp, Zea Mays
aataggtcggctgccttctgtcactctcccctctgctcaaaatttcccccaaaacttctcctcttgaggaaggcagcccaagcgagcgcgctgcaatggcggactcgtcggcgccgacgagagtgatgatggcggtgaacgagtcgtcgctcaaggggtacccgcacccctccatcagctgtcgcaccgccttcgactggacgctctccaagctcgtccgctccaaccctgggggcttccacttcctcttcgtccacgttcaggtccccgacgaggacggatttgatgacatggatagcatctatgcttcgccggaggactttcaccaaatgaagcagagagacaagataagagggcttcatttgctcgagtactttgtaaaccaatgccatcagttagggataaaatgcgaggcatggatcagacatggagatccaaaggaggttatctgcagcgaagtgaagagagtccagcctgaccttctagttgtgggaagtaggggtcttgggccatttcagagggttttcgtgggcacggtgagcgagttctgcgttaagcatgccgaatgccccgtcatcaccataaaacggaacgctaccgaagctcctcaggaccctgtcgacgattgatgcttccaagccaagccatgccatgtcactggagaatgagatgttcttcttcactgcttttataatgggttgatgtacaaaatacgatatggaagtggtgcctggaactagttcgcggagggttccaactcttgcacactgcgcccccaaaaactagagttgaagatgtaaaacgccgtcgtccgccgagggacgacgagagattgtacgtgatacatcgatcgagtctcgtgaacctaaaaagctgccgctacattattgttcgctcatgtgccaggcttcgctggaacgaacgccccgccccttatttgcccctgcccgtccacagccacagccacagcttgagcagggtacctgaagcccgcgtagtcctttggcacggcgtagcctttgggaacgccgacgagctggggctgttgctgatgcttaagctgacgccccttgttgctgccagcaagcttgccgtcgctcttccacgccggaggcttccccggcgcgaacttgatctcgaagccgtcgtcgatgtcgtggatcgtggcgcgggagctcgccacgggcttcatcgccgggcacttgatctcgaatccgccgcccttctccaggtcgcctccgacggagtcggaggcgtaggagtcctggtcggcggcgtacctcttcctggagagccggcgcccgcacagcctgccggcgacgcaggcggccacggcgaggaaggagatcgccgcgagcacggcgaagaccgggccgaacgagcccttggcggtcgtggaaggcgcccgcgcgcgcaggacggcgttggaggacgcggggtagtagaccgtggggtcaggcatatccttggttctcggcgctctctcaagctgctagctgctgatatatgccaccaccacgctctccctcgaagaaaatggttcggccgtttgggtgtcgcactcttgggcaccgaggggagtgctggtcgttttatgatggggagctgaaggcgccggtttgaaccgagcgattactttg

SEQ ID NO: 123550 - DNA, 651 bp, Zea Mays
aataggtcggctgccttctgtcactctcccctctgctcaaaatttcccccaaaacttctcctcttgaggaaggcagcccaagcgagcgcgctgcaatggcggactcgtcggcgccgacgagagtgatgatggcggtgaacgagtcgtcgctcaaggggtacccgcacccctccatcagctgtcgcaccgccttcgactggacgctctccaagctcgtccgctccaaccctgggggcttccacttcctcttcgtccacgttcaggtccccgacgaggacggatttgatgacatggatagcatctatgcttcgccggaggactttcaccaaatgaagcagagagacaagataagagggcttcatttgctcgagtactttgtaaaccaatgccatcagttagggataaaatgcgaggcatggatcagacatggagatccaaaggaggttatctgcagcgaagtgaagagagtccagcctgaccttctagttgtgggaagtaggggtcttgggccatttcagaggtaatatatgccagcatgactcagtgtttcaggttcagccatatcgcacagcattttattcagaatggcatagacagaaaagtgcatgttgcggtaattcaacctctcacattatcttgctccctgctcat

SEQ ID NO: 123551 - DNA, 3047 bp, Zea Mays
gtctgccccctgctcttcgcggctctgccgcactcgtcttctctcttcctcttctctctgtctctcctaccctccgtcaccacctcgtccctatggcaagcgagcttctcccagcctcttcctaccagactatcctcctgccgcaacggacctgacggtttccctccatctggcctccctgtcgcgcgagctgatcgacccacgcaagcgcaatgccgtccagaggctagttcgagctgctgagcgctgatcacggtgaggccacccagatccacccgactgccacccggatttcgcaccttgccttttcttctctcgttcacccagctggctcggtcgctcctccctctctagtgggcaactgccaactgggcgactcgccgacgcccctacgccaggtgctcaggtcttcgtcgggtcttttgccggcgacgaacacacaccagggtattgtgtagagctatcatctccctcggtttcttggaagaacaattatttgacataattatcaccataagatgcctggaattacagaggatggagttgttgcagaggaggtgccgaacggggtgaatttctctccacagaacgaaagtctgcctgccccaaagtcgacagcagcttcaacgatggcgggtagcatgcaaagcgaggcgcttgagatgcatgttgaggcctccggtgctggggaaccctcaatcgagcaactctacaacaacgtatgcgagatggagagctcaagtgagggtggctccccatcacgcgagagctttggctcggacggggaggagtctagaattgactcggagcttcgacatcttgttgctggggagatggaggccatgaaggtgattgaggaggaagaggagaatgggagtgttgccaacgttgtaccccctgctcctgctgagaatgggaccccagtaaaggaacactcttccagttcgtccaagaagtcgaagaaggcatcaaaatcacagcttgagtctgatgcctctgttggactcaatggaaaggcgtccactgaggaaggtgagagcgaggtcagcaaaccggcaagccgagttggccgacggcggaaatcaaatgccaacccacagagtggaacagaagatgctgggcttgataacccagaccttggtccatttcttcttaaacatgcaagagacttgattgcctcagaaaacccacggcgggcattgaaatatgctctccgtgccacaaagtcgtttgagaagtgtgctggtggaaagccaagcttgaacttagtgatgagtttgcatgttgttgcagcaatctactgcaacttgggaaaatatgaagaggctgtacctgtgctgcatcgatccattgagatccctgtaatcgaggaaggccaggaacatgctctcgcaaagttttctggttgcatgcagttgggggacacctatggcatgctaggtcaaactgcacactcactgcaatggtatgcttctgggcttgaaatacaaaagcaaacattgggagagcaagacccaagggttggagagacttgtcggtacttagctgaggcccatgtgcaggcactacaactcgatgaagcacaaagattgtgtcagatagcccttgacatccacagggagcatcgcgagacggcctcactagaagaaacagctgataggaggctgatgggtctaatttgtgacactaagggtgatcacgaagctgccctggagcatctagtgatggccagcatgtccatggtagccaatggtcaggagacagaggtggcctcagtggattgcagcattggtgatatctacctctccctgggccggtatgatgaggctgtgtttgcttaccagaaagctctcactgtattcaagaccagcaaaggggagaaccatgcaactgtggcttctgttttcgtgcgcctagcagatctgtacaataagacggggaagctgagggagtcaaaatcctactgtgaaaacgccctaaaaatctaccaaaagcctattccagggacttctctggaagaaatcgccactggtctaactgacgtctcagccatatatgagacgatgaatgagcacgagcaagcgctcaagctacttcagaaggccttaaaaatgtacaacaactctgccggccagcagagcacgattgctggcattgaggctcagatgggcgtgctgcactacattttgggcaactatggcgagtcctacgactccttcaagagcgcaattgcaaagctccgcacttgtggcgagaagaagtctgccttcttcgggattgccctgaaccagatggggctggcatgtgttcagaggtattcgataaacgaagcagcagaattgttcgaggaagctagaactgttctggaacaagaatacgggccataccatccggatactttaggagtctacagtaatcttgctggaacttatgacgcgatgggaaggctggatgaggccatcgagatcttggaatatgtggttggaatgcgcgaggagaagctaggtacggcaaacccagacgttgacgacgagaagcggaggcttggggagctattgaaggaggctggccgggtgcgaagcagaaaggcgaaatccctggagaatctgctcgagaccaacccgtatatcgccaccaagagaaatgccgttgctgcatgagtcactctgtcctcagatgacacggtattgtgatggaaggcgaggattgttactaaggtattcgtattcatttggtttgttcagatggggggtaacgggagtagtggtgtttacatatttggaaatatgaaaatgcttaaattgattgttgtaaagtttcaaatgctactgtttctccttttctactacctctctgaggtgcgagtttgcattcgtcagttgtacctgggtttttattacatacatgaaaaaaaaaatcaatgacacagcaaattcgatccctacttaattgaaaattaaatttgccagcgagaatcggctgttggacaagttgaagatgacaaaagcaataataatcgaacgcggtcccccatctcaggcctagat

SEQ ID NO: 123552 - DNA, 1461 bp, Zea Mays
cgatccattccgtgaggcgaaaaccggaaacgctacacgcggcctccgtttaataaggtggtcatattccatccttgctcggcatggcgcttcatccagggcaaaccttattctcgccgaccctcttccaaggcaaatctcctccaaaaacagctgccatcttgcttcatgccaacaataatggcagtatcgatgaatgatccatcaatcttcctagcccctcgcgaaatctccctatcgccgaaagacccttccccgtccccggtagcgctagctccgtcctgatgcgcatgccgcggctgcccctcctcctcaaggtagccgcggcggcggctgccggggcgctggcgctcattgtcgcggcgcgcctccgcagggaggacgccgtggcctcgctccgccgggagatccgcgaggcactcacggcacttgtcgcagacgacgaggacagcgacgacgccgaggagaactcttcctccccgccgccgccgtccgtgctgatcacggggttccgcgcccacggcaagagctcgctggtcaacacggcgtgccgggcgctggcggccgaggacggccctctgctgctgcgggcggaggcttcaccgcccggcggcgggagcgaagggctgaggaagctccggatggtcaaggccgtggtggccgggtccgacgtcgacggcgcgggggcgggggagggcgacgtggtggagctgctggacgcgccgccgctcgccgagaccggtaagctgacgagggaggacatcgacgccgccatcagcagcggggaccctgagtgcgttgtgttcattctgcgctgcaacgcgcccaccaaggaacggaacgccgccatcaagcgcctcccggagatttctgccgccgtcagaaacaaagggcttaatttgatcatcgtgttgacttttaagaaggccatgagatccattaggcaggctgaagagcttctacgggaggtgtcgttcagggccagaactgattgtgtctacttcatcgagaactacacctggagcaacaacggccccaacctccaccatccccccgtcatcaggaacgacttcgagactcatttcacggtgctgacaatcattcgccagtgtcttgagttcatcaagctaaacaggagccagtccaagagcaagaaaaagacgaacggcgagcaggaaaaagcacccgagcctaaacttaagaataatccacctgcagaaactaacaaacagcgccagaaactcaacgagtccattgtaaaacctttcctcagcagttcagaaacttgaatcgcccggctatacgtatgatgtactgatcagactgatgtagacatacttgtatagcactgaggtagtctgacaagctgcgtaaaatgtaacgatcatccattcgttttgtgaagatacacgtcctctttatgtatcataaatcaagatgtgctgctgccttttctcgtta

SEQ ID NO: 123553 - DNA, 510 bp, Zea Mays
tcgttgtggcttctgttttctgtctacgcgcgtccagcgatgccgtcgtcgtgcgtgggcgagaccggcctggtggccatggactgcctggtggtgtgctgctgctgcccgtgcctggtgctgcaggtcaccgtcttcctcttcgtccggctacccaggaaggtggtcgtgaagaccaagagggtcatcctgaggcggtggcacaggagaaggccaccggcgccgtcaagcgcagccgggctgaagctggccgccctgctggacctggacgacgacggctttgaggccgcgttcggcatgggagagaaagagaggtgcaggtgcttcgctgtcggcggcgacggcggcgtcgacgtcgacgtcgacggcgtgtgggaggcgatcattgagcaggaagggctcttctggttcgggagcttttggggccggcgtggggcggcttctgaaggcgatgatcggatggatgggagcttcaggttgcctgtggcgctagagcgggtacgtgaatag

SEQ ID NO: 123554 - DNA, 1230 bp, Zea Mays
gcccccggcgcctctcggacatagagtggcctccctctttttcctcgcactccgcaagacgcaagaccacctcaccagcctcctcgtccccgatctcctcccacccgcatccaagggtttccttctcgaccgtgcggaacgagccagagaacaggtatggcggcggcgcggcacctcagatccggcctccccctcctccgcgcccacctcgcatcctccgaatccgcggccgtcgctcaggtttcgaggggcttcgcgtcgcaggccgccaagcccaccgggaaggagatcaaggttccaaaggctctgtttggcggcacaggcaactatgccagtgcactgttcctcacagcagctaaatctaatgcattggacaaagttgaatctgagattaaagctattgtagaggcttccaagaagagcccgttgttttctcaattcataaaggacttgtcagttccaaaagcgaccagggtgaaggctatagccgaaatatttgctgacgctgggttttcagatgttacaaagaatttcttggctgtcctggcggacaatggcaggctgaaatatattgaacgcattgcggagagatttgttgatttgactatggaacataagggggagatgaaggttgtggtcaggacagttatttcactcaccaaggaggaggagaaagaactcaaggaaaccttgcaggatatccttggggaaaacaaaactattttggttgaacagaagattgactacagcatcatgggaggattagtgattgaattcgggcagaaggtgcttgatatctcaatcaggaacagggcgaagcaaatggaggcgttcttgaggcaaccacttgacttctaacagccttttggataaaagaagcatcatcggaatgcagaggctgtcctgttgaaggttttcctgtgtctgcaattttaatctggccttttgaataaaatgtttcctctaacaagtgaagggcactgtttttattgtctcgtgggccacagatgcctgctgaacaatttatgttcatttcttcttttcttaaagaagcatgcactaagaacatgaaggatgcatgccatggaaagtttttgaaagtcattgaaacgtatgagctcctcatgcaatgcattattctccttatattcatgggtttacattaaggttcatcgattgcaaatgaaaaaaaaacgcgctaacaagtgtcacaatatgtcccttgatgtt

SEQ ID NO: 123555 - DNA, 854 bp, Zea Mays
gcccccggcgcctctcggacatagagtggcctccctctttttcctcgcactccgcaagacgcaagaccacctcaccagcctcctcgtccccgatctcctcccacccgcatccaagggtttccttctcgaccgtgcggaacgagccagagaacaggtatggcggcggcgcggcacctcagatccggcctccccctcctccgcgcccacctcgcatcctccgaatccgcggccgtcgctcaggtttcgaggggcttcgcgtcgcaggccgccaagcccaccgggaaggagatcaaggttccaaaggctctgtttggcggcacaggcaactatgccagtgcactgttcctcacagcagctaaatctaatgcattggacaaagttgaatctgagattaaagctattgtagaggcttccaagaagagcccgttgttttctcaattcataaaggacttgtcagttccaaaagcgaccagggtgaaggctatagccgaaatatttgctgacgctgggttttcagatgttacaaagaatttcttgggtatgttccctgcctagtcattttttgtgtgcctaattaagttaagatacagtttcgtgtaacaagttaatcgctttgatacattccaggggaaaaaactgataaggtgctcttgtcgtgtacatgccttactgatgaactgtgtagaacgtattcagacatttacttgtgctgttccaaaaacttttccatatcgatacggagcaaatattttttggtagccatgatctgcataataatttaccatgtgcagcagcatatttatattagtgtcatcaagttgtttgattaatcatcctgatcagtcccttggact

SEQ ID NO: 123556 - DNA, 93 bp, Zea Mays
cacagtggcccagcggggacagcctaactctgctgcacacgattggccttcaaatctaatgccaaagcagcaaagaactatctgtcgtcaccg

SEQ ID NO: 123557 - DNA, 1992 bp, Zea Mays
ttcttcttttgttgttgttttgatcaatatttatgacagagttgggagccaaacgaaggagccggctctttgtcaaccagttcagtcggtgtggaagtagaaaaatatagaaatctgtacactatcaaggccttgcctttaagtgatgtacgcttcatccgtaagtacaccccaacgtttggactggactacgtaataatcgttctctcatcaggcctggctttccctccattctatttctacaacggtggaattcgtgaattgtttgcaacactgaaacaacatgtattcatcatcaggtcggatgacgatcctaatgtttttctcgtcaacgactttcaagatccccttcagaaaagcttgtcatccttggagcttccaggagtagcctcagtagcaaatgccatgtcaagacaaaattcactcagttttactgggtcaattgatgagtccaggcatggggataatgttagacatggggcaacttctagcatgtctcagtatagctcaaagcaaaatcacaaatcaaatgatccaggtcgtgatctttcaattcaagtcttggagaaattctcattggttactaaatttgcacgagatactacatcaagcctttttcgagacaatagtggtgctcatgcttatggacgccaacaacatcaatacattttggataataaatcaactaataaacataaaaatcagtatgtaacaccagaaaaggcttcggcaccctcagcaacactcgagtcagatccattacctctcgtatggggaaaacaacgagatcacccgttaagtgtcgaagagtggacatctttcttagatcgtgaaggtaggattatggattcaaaggcactgaggaaaaaggttttctatgggggagttgatcatgctttgagaaaagaggtctggaaattcttgttggggtatcatgaatatgattcaacatatgctgagagggaataccttgctgtcatgaaacgagcagaatatgaagtcataaaatctcagtggaagagtatctcagccacccaagctaaaagattcaccaagtttagggaaagaaaaggcctaattgacaaagatgtggtgagaacagataggtccattccctattatgaaggagatgacaatcagaatgttgtagttttacgtgatattctgttaacatattccttctacaatttcgaccttggttattgccaaggaatgagtgactttttggctcccatactttatgtcatggaggatgagtctgaatcattttggtgctttgcttccctgatggaacgtctaggtgccaattttaatcgtgaccagaatggcatgcatgctcagctacttgcattatccaagcttgtggagcttcttgatccttcattgcacaactattttaggcaaaatgactgcttgaactatttcttctgtttccgctgggttcttatacaattcaaaagggagttcagtttcgaccagatcatgcttttatgggaagttctgtggtcccattatttgtcagaacatttccacttgtacttgtgcgtagcaatcttgaaaaaatatcgtcagcggataattggggagcagatggacttcgataccctccttaagttcatcaatgagctcagtggtcagatcaatcttgaccgggctatccaggacgcggaggcattgtgtactattgcaggagaaaatggggcttcctgcattccacctggaaccccaccttcaatgcccgtcgagaccgatggtggcatgtacgtgcaagaagacgaggtcttgtgagatatcggtcaccctagaaaataattgcatagaagcatcgcaagtttttatccagtagtgctttcgtcgtcgtcataaatgtgatccgttgtaagtttggaagaatcatgaaaacctagagttgtgtgtatatactaccttgataaacctgtaattgatactttcactattctgtatggaaccccaggttttacctcagctctc

SEQ ID NO: 123558 - DNA, 4034 bp, Zea Mays
ctctctgtcctctcccctgctgccgccccctttcccaaatctggccgcacgacgcaccagccaccaaccgcacacaccccaaacttgaaggcacaacccgagcgctcgcccgcctcgcctctgcgccgcgtccggccgccggtagcgggccggtcacttaccgggagggagaggtgctttggttcctggatgagctgtgaaggaactgggagcaagaagaattgatgtttactccgcagggcaaaggatggaccggctggtcgacgccaactccggccaaccagcggagcggtggtggggctcctgctgcgtcggcgccccttggaaagggcaaaggaagggtcgccgagctcgagcaggagttgcatgaatatcagtacaatatggggcttcttttgattgaaaagaaagaatgggcagcaaaatttgaagaaatcagtgaagtgctgacacagaaagaggagatactgaagagggagcaggcggcacatctgaatgctatatcagagtatgaaaggcgggaggagaacatgcggaaagcactaggtgttgagaagcaatgtgtcgctgatcttgaaaaagccttgcgtgatatacgagcagagatagctgaggttaaatttacatctgagaaaaagataacagatgctcagtctcttgaggctagtttggaggaaaaatccttggagatcgagggaaaacttcatgctgcagatgccaaacttgcagaggcaaaccgcaagaagtctcaagctgaccgtgatttagaagaggcggaagctcgtcaacgtagactggagaaggagaaactgtattttgagacagagcggaaggcccgagaaaagcaacttaaggagcaggaggaatcactgcaggaatgggagaaaaagctgaaggaaagtcagaatagacttaatgagttgcagagatctataaatgagcgagaggagagagcaaataagaatgatcaacttttcaagataaaacaggacgaactggaggaggcacgaaggacagtggaggccgctaaagttactctgaaagtcaaagaggatgatattaacaaaagactaaatgaattacatttacaggaaaaggatgctgactcaaagcgcagtgcattggaagagcaggggaaaaaattggatgagagagaggcaaaggtcactaatagagaaaaggaggggctccagaagcttcttgaggatcatcaggtggagcttgaatccaaaagacgggattttgaattagaattagagagggaaaggaaatcttttgatcaaaatatgacacagaagcaagcggatttattgaaaagggagaaagatgttaaatctttggaggctaaactttctaaaagtgagcaggcattgaatgataagaagaaatcaatggaaaacttgcagaatgatcttgatgccaaatctaaggctctgaagagttgggatgaatcattgaaaaatgacgagaaaaggttactgaaagaaaagcagcaaatggatcatgaaagagaacaattggagacatacaaattggagcttgaaaagatcaaatcagcattagaagctgagaaggaaaaaatatcagaagagcagaataatctgaaactcacagcgcaagagaggcaggagcatagcttgttgatagcaaaacttaagaaggagattgaggaatacagaatgcgaagcaactccctatctgaggaaatggaggatttaaggaagcaacggcagaaatttgaagaagagtgggaacaactagacgaaaagagagccctccttgtagaggaggacaaaaggttgaacattgagaggatgaatttagaacggtggcgtgacaacgaagaaaaaaggttaaatgatatgaaactcaaaatggatgaagaatacaagcagcagctggagagtcttgagcgcaaggaaaaggctttgagtgatgatatgaagcacaagcaaatggaaaatgatgaatttctgaagggagaacgtgctgatgttcaacgtaaattgcaactcaaacggcatgaattggagatggagatggagcaaaaacaagccacgaaggagaaggaactggaagaaaaggaaaatgagttaaataagaaaatagattttgtggaaaataaactccgacatgcaattgagttgaatgagtccaagattgagaagttattattggagaaaagggaggtgcagatggaaagagaattactgctggaggaaagaaagaaaacggagactgacaaggcagatattagaagggatattgagagtctgcactcattgagcaagagtttgaaggaacgtcgagaggcatataacagggacaggagcagactcatcgaactatttgaaaagtacaaggcgtgcaaaaactgtgggatttctatttttgagggattggattctctgctgcttaaagacagtgctgaaattgagcatccaagtttggctgttgagggagatgatcatgccttgaccaccgatacatcaggtccagatacaggaacccttgttaattcaggtggtcgtttttctttgttacagaagtgttcaaggcttttcaagttctcccctagaaaaaagggtgagcagtcatcagaacaaccatcagagaggaatatatcttttggtgcaagactcgaggaagcaacacagagcgatggagattatgtgccaactcctgtctatgagatagcccacgattctttcaatgcagaggatgagctcccttctgacggtgaaaccagggagaatgaagagtctgaaaggcatgacatagctgataatgcccagatggagtcttctgttggtgtagcagataacagtatagatattctcggtactaagtcatttgatggtgctaacgacatggcagttgaagcaactattgtctctgttgatcaaaatggcgaggactctgtagttcctgctgaagcaggtgtagagcctgaaacatcagagcaaggtcggcgccagcaaaaccagagaggcagaagaaaaggtggtatgaaaagaacacggtctgttaatgctgtagttgaagatgctaagatgatacttggcgaggtttttgaggagaagactgatgatcagggagatacagtcaaggtgggtgctacacgaaagcggcggtttgctggagctacaataagtgaacaagatgaagaagggagcgaagcacattcagaaagtgtttcacttggagggcagcgccgtaagaggcggcaaactgctggggcagtgacagatgccccaggagaaagacgttacaatttgagacacagtagagctgcaaatgctggcgctgcaacagcccaagcagacaaaaaaaaatcttcaaaagcaagaaataaacatacagtagaagcttctgctgatgacaccgaaggaacatcaaaggttgttgaggaacctgcccctgagagcaagagggtatctgaatctgcagactacgatgcatcccagttgcatgagttttcccaggttgaagttggtgatgcccatgctgtagacggtgagggtgctggtgaggaagatggtgatattttggatggccaagatgcactgcctgatgtgccaatgacaccttctggaagcgagtttggagcggaacaggaagatgaggacgatgatgattcagagaggcgaaaccaatcaatcagcaagaagctatggtcattcttcactacatgacttgctgaagaggtcgtcatgtaggttatttctagcttttgtggtttcgattcatgataccccattcttggaactgtaggtcgtgtgcttttggtgattatgtactagatctcccacttgattgtgcttctctcccgtgtaattgaaatatatttgtagtggacatagtttgatggcactcacagaagtagctgatgagatgtacaatggcgatgatggtatgccctgtaaggctgtaacaccagtagcttggtttgtaattgttcttttcccccggttcgtgttacttcgttgaccttattccggggaaatattttagtgctgtgatgatggtctaaa

SEQ ID NO: 123559 - DNA, 244 bp, Zea Mays
gattgttctcttattgggttttggatcttgatccaccatgatcatttgttatcggggtttggttttagatgttctctagctcttttgtgtcgtttgcctttttgtttggcggaaaatttgtctttggcgcatcaaaaaatcaatcgaatgttttgttttcgtttgttgtttgtacttactagctcacatgtgcaagatgacgcattgacaagatgacaagccaagaacaggagaagcaagacat

SEQ ID NO: 123560 - DNA, 93 bp, Zea Mays
gtgagttacaagctgaatgattatttacataatactgtagcaataagtatatctgcaaaaaaaaaggatagtcaaagatctacgaaaacttgg

SEQ ID NO: 123561 - DNA, 2100 bp, Zea Mays
atgcgacagtacgcgcgaaagggttgtcgccggaaaacgcttgcgccttcggaagcagatggcattcgtgctttggtggtgaaagcggaaaatttgttgcttccggaaaatgttgctgatgctcatcatggggaggtcaccagtacgttttcttcgccgacgtgttctgcatctccgctgcatgatctgggtaaggtttctgcggctggaggtggtggctgtaaactgggatgggactcagctccggcaaagtccgagtggatggaggcgttacagtccgttggtgaagacacaatgggggtctacaggtcgggacctgtgcggacgcctgttcatagtccgcttcaccctcctcctttgacaccttcttctaggagtaaggtgaagccatggcagggcaagttgccgtcgccacggtgttcgccgaagctcacgcttggagatgtcctatcaatggtgcaagagcgccggaaaccaaattacgacgatgggcgtagtgttcaggggatgaagaaggcggaatgtacggctgggttagtggggcagccggaggcagtttcaaatttgcttccttgtttatttggaaaggatggagatcgggaaaatctgcaggaatcgctcacatcttcatttccggatacaaggagacatagtacgtatgtgtatggtaggcgtagatttgggagagcccagcagctgaaactcagccctgggattccttacagacctacgccagggctagcttccctttttgcacgtacgggcacatgggtgactagtgcctgggcagttcattcaactctcaggaagtcagccaccatctcatacgtggacgcagcgaggaatacaatggtgcttggcggtgatcagggaggccggggcggtggtagaggccatcagcaatccgggggtgcaagcgggtatgcttcatgtcatcaacagcacagtggagcaggtggctttgtcgctggtcagggacagggatccggatatggccggggcggaaatcagccaatgttccaccccggttatggaggaggtgaccggtccttgatgcgtcgtggaggaggtcgtggacgtcatagcttttggcgcggtggaagaggaacatcgaccgggggtcggatcatcggggatagagctgctcaggttcaaatcagagatggagggagccacggaaggtctgtagtgtaccgggaggggtggtgtcaacctgcgctgctgctccctgatgggaggagtaatgcctctgccagtaccagatgggatgcagtgggctcgaatctggggcctcaccgtagttcaaaacttgagacgatcaatgagatttctaagccatcccattttgatgaccaggatcaaaacaaggaaggcagtttgggcgaaaaagggagtaggggatcggtgctgctggatcagtcaaatggttctactggtgctgttgacatggcatcatccgcacagcaaaacaacaaggttgggactaaatctgggagagatgggggtccggttgccactcactgtcttgctcgggtggatttggcgcagccacaggagaccgggtctgatgttggcattgtcaacgttgaagctctaggtggtattcaggaagtgacaggaattatgcatgatctccgtcgcagtaagcgtcgcgccgactcggtgagcgaacactcgcttgatcaggcggaaaaacttaaggcgggaaacaatctggacgatctgccttctaaagttaacagtgatacttttgttgatttcccagataatattatttctgagtcccttaaatccattggtattctggcgggtagcaatcccggttcagtttcaatgtctattagtatgctaaaacaattagagactaatagaggtaaagatcaacgaaaaagtaattacaaaaacgctttagctgatctgttggaaaaggaagtagaagaggaggaagagttagatagcttcattttaaataacttgtgcggggatagtatgcaagctgtgatggatggtaatgatgagctgattatttcagcacgtacaaaaccacctagtcacggcccacagctttcaaagaggaggtcgggttcgaacatttattaa

SEQ ID NO: 123562 - DNA, 2150 bp, Zea Mays
atgcaggtgctctgcgacgtctgcggcagcgcgccggccgccgtgctccgctgcactggcgaggccgcgctctgctccgcctgcgaccgccgcgtccaccgcgctgacaagcgccgccgcatcccgctcgtccatccctgcggcgacgactccaccgccgccgcgccgctctgcgacgtctgcaaggagtggaggggcctcgtgttctgcatggaggatcgcgccatcctgtgccccgattgcgacgaccccatccacagcgcctacgacctcaccgccaagcacacccgcttcctcctcgtcggggccaagctctccgccacgctcgtcgaccaggcgcccccctcccctgacgacgatgatgacgacgacgacgtcgccaagcccgacgctgcccccgccgcctgcgcggccaaggcctatcgcgaagaagctcttccccatagtcgcaaccatgacaaacccgttgttctcaaagatctacgatgggtaggggcgaatctggcggccacagaggagacagagtgggcgacgcgtggtcacggaggagacggcccttgcagcggcaccatggaggcggcgcacagtcgaaaaggtttgtgtgggaaccgacggagggacgtcgcggcgatcgaaagagccagcagagatgcgcgctgcaacgacaggacgagggagagagagaggcagagggaggaggctacagacagaaacagacatgagacatgcaatgcaatccccacaaaattcaggctacagacatcagggttgtccggccaccgggcgaagcggcagtccgacggcgcagccacggtgacatcgcccgcggcgaagcgcgcccgcgacccgtccgcgcccgcgttccccacgaacaaggaagtccccgacatgccccccaagacccgtatcttctgcgatatcctggcctcccgcgccgctttctttcgctgggcgggacaccggcacctcggccacgagcactcgccctactcgtggaacctcttcgttgacatcctcggtaaaaatcgcctcttcgagcccatgtgggacactgtcaaatccatgcactcgcagcagctgctctcgctcgccactttcgcctccgtattctcctctctggcggcgacccccggcggttccccgctgaaggcgttcatggacatgccgcgctacggcatgacccgcgacacggcagcgctcaactcgctgctctccgcgctctgccgtgccaaccgcttcgacgacgcccgcgccgcgatccctgtagccgcgctgaggctggcacgcgcccggatgccgactcctacgccatcctcctcgagggctgcgagtctgcctccgacctgcgggttgcgcgcgaggtgttcgacgaaatggtgcgcgccattggctttgatcctgacaacatgcctgcctatgactccttcctcactacgctggtttcaagcgactcctccacggcgccaccagaagcaatggggtacctaaatgaggcaccgagaggcagcgccaatatttagcaagatggtcaagaatgaatgttggccaaatgagggaaattgttcgcttgcacttcaaatgtttttggatacacactattgggagactgggatcaatgtctggagctgcatggtggagaatggcttgccacctttagaggagtgtgggaacatgcttgtatcaaagctgaaggatgacaggctacctgaggcatgcaaatatgcagaagacatgattgatcggggtatcaagttgagttcatccacactgtccaagctgaagcagtgcctgcataagattaagaaaggagagatccatgatcacctacttaaaaaatggaaggcacattagtttgttgagctctggatagcctgaataaagacaggtgggatcttactgccagtttgtatcccatgaattgaaatcaatatctagaaagcgcttctcattttattattagattctttttcagtgtctcttaattactgggaaccaaacagggcattagtgttgatactgaggttgaatgttttatcactctgtaacgtttgaaacaacagttggaacttggaagtctctttctacatggaaattatcatatcaatgagctggagcatttgtgtctcaaggaatgaacacatcttccaagg

SEQ ID NO: 123563 - DNA, 1357 bp, Zea Mays
cgagcatgtatcccgcaccgaaacacacacgcaaacggcaccaccaccaccaccaccgtccggcgaggtagggaggcagcggcgccatgggttgctatcctcccctggccaagatcgtgtctagagcgctcggaaaatgcaacggcgggcgcgagagatggcgggaagggaggctggagctggactttgatcacgccttgggctgtcagcccacggagacccactacatgcggccggtggcgcgcacggtgaccttcgccagcaacaactccatctacgtgaccccaccgtcgccgtcgccacaaccgcagcagcagagcgcaccaccagagccacagcgaccccaaacgccgccccggcacgagcccgagcagcacgacggtgcacccgaatcccaaccccaagccgagcaacccgaggcacccgcgcaaacggaagacgcgccgccacaggccgccggcgccgagccgaagccaccaaagggcccaaacccaaagcgaggcaagagcaagaaggggcagccgggccgcgtccggttcggccccgagcctccctctccgcagcaggaggaacggcaaaagcaggagcacgcgcaggggcaggggccaggcaacagcagcgagagcgagaaagcgccgccgccgccgggtcaggagcctcatcatcacggcgcggcgcccgcgcccgcgcaggggcaggcgcagggatacctgatccggtacacgccgtcgccgctgccgaggtgggaggcgacgccgcggcggcacgagtacttctccggggagtaccggagctactacccgacgccggtgcgcgagggcatctaccgcatcgccaccgacgccaacaggctcaccaccatcttcagcgaggagaatcccaacgcctgcaccatcgtctgagactgagagcgacggccaggaaggaataacccgttgttccgttcgggcaacggctcgtcttccttttggttcttggttgattggtgatggaatcattagccaagaatccggttcttcttgtagggagtgttgtagataagaaaaaagcaggaaactttcggttcggccggtatgatgagatgtaaacttccttgtgctgctctgctgctcgccttggattgtcaatttgtcgttgtcctcttacgtttaaagcagctacttccttccaataataaataaactagaattagcagcgccctatagggcgctataaaattctctgatccagcatcaattttttatgtttgaccattaatcttcattccacttcatgtttgagcataacattactttacatattttagaattttacaccatagatacacaatggagaagacagacactgatgtcatttc

SEQ ID NO: 123564 - DNA, 2500 bp, Zea Mays
tccaaaccgccccttaacccctttgtccccggcgcacaccccgtctccgcagcaccacaccacctccttcccctgcgggctgcggctctgctgcctgccactcttctcttctcttctcctccgctcctgcagagtgcaggccagcacatgacgacggggccttggcgctggtgccacggcgtccgcgccacggccagcctggcgctgctcctgctgctcgcgtgcgtgtccggccgctccgtcacgtgcgcgcgagcgcagtccacggcgttcaccggcagggagaccaccagcttctccttccccaagttcgaccagaaccggctccagctctccaccaacctgacgttcaccggaaactccaccgtcagccagggggcgctgcaggtcaccccggacagcggcaacaacttcagcacgtacctcgccaaccaggccggccgcgtcttctactccacgcccttcgtgctctgggcctccaacgcgtccagcgccgccgccgccggccgccgcgtcgcgtccttctccacggtgttccagttcaacctgtaccgcaccaacgcgtccgtcaagggcgaggggctggcgttcgtcgtcgcgtccgcgatagccgacccgccgcccggcagccacggcgggttcctcggcctcaccaacgcgtccacggacgggctcggcgccaacgggttcgccgccgtggagctggacacggtgaagcagccctacgaccccgacggcaaccacatcggcctcgacgtcaacggcgtccgctcctccagcgccacctgcccgctcgcggccctgggcatcgagctcgcgccggccgacaccggcgccagcgacggcagcaacttcgtctgggtcgactacgacggcgccgcgcggcgcctgcgggcgtacatctcgcccaacgccaccaagccgtccgccgccgcgctcgacgcgtcgctggacctctccgcggtcgtcgccgccagggacgcctacttcggcttctccgcgtccaccggcgcggacgactaccagctcaactgcgtcaagatgtggaacatgaccgtagaggtgctgcacgacgacgacgacaggctgccgaagaagctgtccggctggaagctcgggctggccgtcggcgcgccgtgcgccgccgcgctggcggcgctcgcgctgctcgcgggcctgtacctgatgaagaagcggaggaaggtcggggacgacccgagctccgtgtcccacagcgccatcgacctgaggagcatcccgggcgtgcccaaggagttcgactacgaggcgctcaggaaaggcaccaacggcttcgacgacaagatgaagctggggcagggcgggtacggcgtggtgtaccgcgccaccgtgcccggggacaacggccgcagcatggaggtggccgtcaagcagttctccggcgccaacaccaaggggcaggaggacttcctcgccgagctcggcatcatcaaccgcctccgccaccggaatctcgtcaagctcatcggctggtgccaccaggacggcgtgctgctgctggtgtacgactacatgccacacggcagcctggacaggcacctgttcggcggcagggaggcgtcggcggcggcgacgacgacgacgacgctggactggaagcagcgctacaacgtggtcgccggcgtggcgtcggcgctgaactacctgcaccacgagttcgagcagacggtgatccaccgcgacatcaagccgtccaacatcatgctggactcgtcgttccacgcgcggctgggcgacttcggcctggcgcgcgcgctcgagtccgacaagacctcgtacacggacaagctgggcgtgccgggcacgctggggtacatcgcgcccgagtgcttccacacggggcgggccacgcgcgagtcggacgtgttcggcttcggcgccgtggtcctggagaccgtctgcggccgccgcgtctcctgcgacaacccggcggggtgcagccagctgctggagctggtgtggaggctccacggcgccgggcgcctcctggaggccgtggacccgcgcctcgccgccggcgggtacgggtacgacggcgaggaggccgagcggctgctgctgctgggcctggcgtgcagccaccccaacccgcggcagcggcccaaggcgcaggccatcctgcagaacctgcagacgcggtccgtgccgccgctccccgtgcccatgtccaagccggtgttcatgtggcccgcgccgctcgccgacggggaggaggacgcgacgcaggcgtcgtccatgtcgcgcagcggggtcaccagctcgggcgtcacctcctcgtccaactacccctacacgtggtcgtcgtcggggtacaatacccagaccttccaggtgagcagggaggtgcacgacgcggcggagagggacgtggcgaccgtttgactgagaagaagacggtgtcgagctcagcatgctgccgccggcaggacggctcactgacggtggtgcacgtggagcccgg

SEQ ID NO: 123565 - DNA, 633 bp, Zea Mays
gccggcggcaaggccgacgctgcttacccgccctcatccggctacccacctgcggcaggtctgcaatgttgccgatgtcgaacccttcagctaatcccacacagcttacaattttctatggtggatcagtatgtgtgtatgactcggtgccaccagaaaaggctcaggcaatcatgcttatagctgcagctgcggcagctgcggcagccaccaaaggcagtgctgccactgcttttaatcctccaatggtacatacagccactgtcgccccagcagcagtcttctctcctgtgcttacacggtctccatcactgcagagcacttctgtagcagctggacaagcttaggttgttgctgaccctagctcaataagcaagcttcaggctgatctccccattgccaggaggcactctctccagcgcttccttgagaaacgtcgtgacagggtcgtgagcaaagctccgtacagccccgccaagtcgttcgatggcatggagtcagcgggaatggagatgactgtggacggcaagcagggtgcaaggcccagtatcttgaaaggttggggagccgcgaagtctgaagtctgaacggtgaaagcgtagccccgcgggagcgtggcggtgtctgggaagc

SEQ ID NO: 123566 - DNA, 773 bp, Zea Mays
tagtttcttcacccgtgctctctccctcatcccctgcgcataggaagccagctccttcacgtcgcctcctccctaggcggcgatcctacagagcctcgccggtcatccctgctccctcggcgtctctcccatggcgccctccctgctccttcacatggtgtggacgccagccccctctcttgttgccatggatagcccctctcccatctccttccccaagcacaagtcccatggtcgcccaaccccagctcgccctgccccagccatggacgctgtcgagccgcccgtttcctatctcccctcgccttcatcctctggctgccgcccctccctggatttcgccctctctactcgtcgatcttctctgttgtggcgcgcactggctgtcttccacctccatcggaccacgccgagctccctccttgctccagtcttctccatggtcgctcctctcctttccctgattaatactagacgcagcagcaacatgccagatctctgtagcccaggaaatttagatgagaagaaagctttagcgaggcgcttgccaagtgcttggtgaatcgcctcaaccggatatggttgtcgatctcgcggagtcgagtcgagtttagtcgtggtaagtcgatccattgttttcgttagtcggatgaatgattagttgtgtggatatataaggcttgtgctattaaattgatttgtgttgtgtgaatgaaattattttcatgagtatgtatgtcttgtattatgaaactaattagagatatgcatgg

SEQ ID NO: 123567 - DNA, 1767 bp, Zea Mays
atgggccgtggcggctggacgggcggctcaatggctggacggaagacctcccgtgagctgcctcctaagactcctgctccctctaatcctatatgtgaggcagccgacggggttgctaaaggtagaacgaagcttccgcagcacagcgtcgtcgtcgaggagataaggtccagacagaggtctctagccgtgcagcggtgctgtcgttggtggcggccggcgacttggagctgtcgaggtaagcaagctggtgtggcggcgattggagctgtcgactggagcgcgcccgatccaccagagaccgtgaagctggcggccggcaagtggtgggagcggccagatgacacgggcatgcccggaatggacccaggcgggggcggcagctcgcgctacttccaccagctgctgcggccgcagcagcagcagccctcgccgctgtcgcccaattcccacgtcaagatggagcaccacaggatgtctccagacaagagccccgtcgtcggcgaggccgacgctggcgggagcggggccggcggcgaccagccgtcctcgtcggccatggtcccagtcgagggtgggggcagcggaacgggcacgcccacgcggcggccgcgcggccgcccggcgggctccaagaacaagcccaagccgcccatcatcgtgacgcgcgacagccccaacgcgctgcactcgcacgtgctggaggtggcggcgggcgccgacgtcgtggactgcgtcgcggagttcgcgcggcgccggggccgcggcgtgtgcgtgctcagcggcgggggcgccgtcgccaacgtggcgctcaggcagcccggcgcgtcgccccccgggagcatggtggccacgctgaggggccggctggagatcctctccctcaccggcacggtgctgccgccgcccgctccccccggcgccagcggcctcacggtgttcctctccggcgggcagggccaggtcgtcggcgggagcgtggtgggcccgctggtcgccgcgggccccgtcgtcctgatggccgcgtcgttcgccaacgccgtgtacgagcggctcccgctggagggggaggaggaggaggatgagacggcggcgggcgccgccggagccgaaccacaagatcaggtggcacagtcgtcggctggaccaccgggtcagcagccgacggcgtcccagtcctctggtgtgaccggaggcgatgccggcatgtcactctacaacctcgccgggaatgtaggggcataccagctaccgggagacagcttgggaggctggagtggcggcggagtccggccaccgttttagtccaaagtccatgccttgagagatatccgattcgcatcatccacaccatccgagaaccgggagttgaagctaccctgagacatcatgtatatgcaattattgtatgcatgctggatcattgttgataggagagaaggatctttcatctgggcgccatacaatataatgcatatgcgtttacacacgtggaggatgcattgcaaatcatgatgtgttttaaagacgatttatcaaatgcaagaggggaagaagctagagattggatgcatgcaagagctagctcaataaactaaaggtcagtagtagtgagatccgatgtttcgtgtttccaacttttcctctctttttccctttttttttcatgttcatttgtatttgtgttaattatattctgattgtgtgtctctcgcagtcaatcgctgtagaatggtgttttctgttataaacaatttggtcatcgcc

SEQ ID NO: 123568 - DNA, 103 bp, Zea Mays
ttttcttttagctcatgtatttctgtgttcaatgcactttcacctcaaatgtgtgtaggaacatgtttgcatgaattttgttttgcacctagctgtagttggg

SEQ ID NO: 123569 - DNA, 2109 bp, Zea Mays
aggcaccagcagcacgcacgagtcacgacacacaatcgtcgagcgcacgcgcagacgcgctccgcttgacaccgctgacggtggccggttaagcccgagcggtggtggatggacgtgcgccggctcggaggccgcatcgcggcggcgctgagggcgctcgccgcggggggctcgctgcccatcccggcgtggatcaccaacggcctggcgatgatctcgctcgtgctctcctcctgcgacctgctccgcctctgcagcgacagagaccgacgtctccggttcccgctcggtggccgcgagttcgttaccgtggtctgccagctggcctccatcgtgtacctcttcagcccttgcggtactggtatcccatctgcgaaccccgagacccccgcctgccgcgaccagggcggctccgccgaccaaacgcgcgccgccgccgccgacgcgccggaggcattgcatggcggggcggagggcgaggacgaggagatcgtcgccgctgtggtgtccggggcgctgccgtcgcaccacctcgagtcgcgcctcggagactgccgccgcgctgccaggctgcggcgggaggcgctacggcggatgacggggcggggcgttgaggggctcccgctcgacgggatggactaccaggccatcctgggacaatgctgcgagatgcccgttgggtacgtgcagatgccggtcggggtcgccgggccgctgctcctggatgggaaacagtaccatgttcccatggctaccaccgagggatgtctcgtggccagcgtcaaccgcggctgcagagccatcgctgcgtctgggggcgccttcagcgtgctgctccgggatgcaatgtctcgtgcgcctgtcgtcaagttgccatcgatcaagagggctgcggagctcaaggcgttcgtcgagacacacaccaatttcgagactctggctgctgtcttcaatagatccagcagatttgggaagcttcaaggcattcattgtgcactagcaggacggaacctttacatgaggttcacttgtagtactggagatgctatgggaatgaatatggtgtcaaaaggtgttgaggatgtcttgggctacttgcagaatgatttccccgacatggatctcatcagcctatctggtaactattgttcagacaagaaggctgcagccgtaaactggatagaaggtcgtgggaaatctgttgtttgtgaggccagagtcaaagggggagttgtgcagagcgttcttaagaccaccgtgcaaaaactcgtcgagcttaacatcgtaaagaatctcgctggatcagctgtggccggagctcttggaggtttcaatgcccatgcaagcaatatcgttaccgccctgttcattgctacggggcaggatcctgcccagaacgttgaaagctcacagtgcatcaccatgatggaggcagtgaatgacggaggcgatcttcacatctctgtgaccatgccttccattgaggtaggcactgtcgggggtggcacctgtcttgcttcacaggccgcatgcctgaacctgcttggcgtcaggggtccgaaccgtgactcgcctggggcaaatgctaggattcttgcaaccattgtcgccggcagcgtgctcgcaggcgagctctctctcctggcagcccttgccgctggccaactcgtgaagagccacatgaagtacaaccgatcgagcaaagacgtgccaggtgcttctgcttcttgagtatatatatatatatatatatatatatatatatatatatatatatatatatatatatatatacagcagctcgtcgggcactccaaggctccaagcgacatgtttgggcagcagtggcccaggcgagaccgacgccaaacaaacgagacaagcagagaccgactgtacagagtgtgctaaggcgagcagggccctgcttgactgttttgttctgtggacgttatgctagcgacgtacagcgcctaacagatcatgcaacttctgactgtagtaacctcctctttgttcttatgtgagccttcgtatatttaatgttcgcttataaccgtccgttcgaactcaatcatctctttgctttggatagcagaagatcagatt

SEQ ID NO: 123570 - DNA, 2172 bp, Zea Mays
ccgattaatcggtcgataaaccgataacggttagtttaagaactctattttcccatgggatttctattttcccttaaaaatatatggttctcaaactagctctaaaagagggaaaccgagtcccatggtttttgtcaaaaaaatactttcccgacaaattaaaaccggctgggcgtctcgtgcgttctttttgttcgttttcacgtcgtcgtccgcggcaagagggagcacgctgcactctacacacgataaaagcaagatttgcccatgctagaaacacccatatgaaccaattgacctcctcctgatcgtcgtgggccagcgctgggctgacgcccgtgcaccggtcggtttctgttcggttcggcagcagggtgcgctcggtcagaaatttagtcccatcggctcggatccgcccgcccgccgtgcgcgcgcgcacgcacgcacgcctcgcgagcagatggggctggcagtggcggtgggcaggcggccgacgcagcggtccggtgtctcccgttctcgctgcgctggcaagagacccactgccgccgagccccgacaccaccggcaccgcacggagggaagaaaagaaagaaatcccgggggatcacgtcgttatcagcgaccagattcagacgcgagccgagcgggggaggcggaccacactagaactagaaccctctctacggctctactacgctacgccccatcccgcccggaccggaccggacccaccttcctccacctctctgcccgccgccggccgacccgaatgggggcgggaaccaataatggcctgagcaacggcgccgccgcagggcagcgcgcggacgacgggaccacggtgttccggggcacggcgtactcgccgctacggaccacggtggcgctcgcgctgtggctcggggccatccacttcaacgccttcctcgtcctcgcctcgctcttcctcttcccgcgccgcgtcgccgcactggtgctggcgacgcagctcttcttcatgttcctgccgctcagtgataagagcagactgggccgcaagatcgccaggttcataagcaagtacgtcattgggtattttcccgtcactttgcacgtggaagactatggcgcctttgatcccaacagggcttatgtgttcggttatgagcctcattctgttttgcccatagctgttgggatcctcggggaccttgttggattcatgccgctaccaaagatgaagattcttgcaagcagtgcggtgttctacaccccgttcctaaggcaaatatggacatggttggggttggctcctgcgtcgagaaagagtttctactcctaccttggagctggttatagctgtattatagtgccaggaggtgtgcaggaaatacttcatatggatcatgattcagaggttgcttttcttaaaccaagaaaaggttttgttaagatagctattgagatgggttgccctgtagtccccgtttttgctttcggacagagctatgtttacaaatggtggaggccaggtggcaagttaattgtcaagattgctagagcaatcaaattttctccaataatcttctggggaaaactggggactcccatcccttttgcaacaccaatgcatgtgattgttggaaggccaattgaggttgtaaagaatcctcaacctaccattgatgagataaaccaagtccacggacagttcgttgttgcgatgcaagatctgttcgagaaatacaagagcagaactggataccctgatcttcagttaagagttctttgatggcgtgctgttccaatgaaaagctcttatcagctaggtttaagggataaaatggctgttcagacccatcgactcaattgatcgtagcatttgggctataatgtttttgagcacaggtccattattgaaattctgtaccccattccaaattagaagacgtttttttaatatgtagcttttctatgcagttgcatacatactatgtctaaaaatataaaaaaatatatgtctagaaagggaatatatcatctgtaaagcaagcagtcatgataattttttaaaacaacccttctatcgtacatcagctttcaaaacgatggtgcttgtgtgatgtgcccctatcatttttcatcttttttgggctcatcctcgaggggtggaatgcaaacatatgcatt

SEQ ID NO: 123571 - DNA, 810 bp, Zea Mays
caggagctaggagagaggagaggccgagagggagaccagagcaccgtagctagaagataggagagaggagtcccggttcctcaacggagtaagccagatcacaccggaggccggagggggagagggagaccagatctgtgtgccagtgccggtctgccggacagtaccggagggggagaagaagataggagagggagaccagagccaggagagaggagagggagaccggagctaggagagaggagagtaccagtgccagtgccagtgtcgccgtaccggaccccggagtcccggttcctcaacggagtaagccggagcaccgggatctccgcagaagcgcagatcacatcggaggccggagggggagaagaagacaggagagaggagagatatgagggagaacggagcaccgggatctccgcagaagtgcagatagcatcggttcacaaatgcgcgtgtaaaccctaataagccgaagcaccgggatctccgcagatcacaccggagggggagaagaagacaggagatccgagcgggggttatggatctgagttacccggttcacaaatgcgcagatccgagcgggggagagccggagaggatctccgacgagcgacgatcgatccgagcggaggcgccgaggcggagagccggagaccgcagaccggaggcggagatggagaccggagcgcttagcggaggcggagggaacgagggagaggagagctcgccggtcgccgccgaatcgcccgcggctgagagagagcgagtgaggcagtgagcaagagcgagttagggtttgagcgagag

SEQ ID NO: 123572 - DNA, 2323 bp, Zea Mays
ggtcgcaggcagaagcagaactcacctccgcccggcccggctgtataaaaaaaaatcctctcacaccgcacacccgcatctctcccatcacagtgcgccacccgcacccaccaacgaggcaacgaaacccagtcggaagctagaccggcgacaagtgcagcgctcgccgcgatggattctgactacggcgtgccgcgcgagctgtcggaggtgcagaagaagcgcgcgctctaccagcccgaggtgcccccctgcctccaggggactactgtcagggtggagtatggtgacgccgcaattgcagctgaccaggcaggcgctcatgtgatcagccatgcgttccctcacacctatgggcagccccttgcacatttcctcaggaagacggctgttgtccttgatgctaaggtcatatctgaacacccggtggtcagggttggcattgtcttctgtggcaggcaatccccaggaggccacaatgttgtttggggactctatgaggctatcaaggcccacaaccaaaacagcaaactcattggtttcctcggtggatcagatggtttgctagcgcagagaacattggagatcactaatgaagttcttgcttcatataaaaatcaaggtggatatgacatgcttggtcggacaaaggatcagattaggacgacagagcaggtcaatggtgcaatggctagttgccaggctttgaagttggatgctctggttataattggaggtgtcacttccaacactgacgctgctcaacttgctgagacttttgctgaggcaaagtgtgcaacgaaggttgtaggtgttcctgtaactttgaatggggacctcaagaaccagtttgttgagactactgttggctttgacaccatatgcaaggtgaatgcacaacttatcagcaatgtctgcactgatgctctatctgctgagaagtattactacttcattcgtttgatgggacgcaaggcttctcatgtggcattggaatgtgctcttcaatcacacccgaacatggtcatcctaggagaggaggtggctgcttccaaacttacaatttttgatattacgaagcagatttgtgatgcggttcaggcaagggcagaaaaagacaagaaccatggggttgttcttattcctgagggtcttgtggagagtattcctgaactatatgctctgcttcaggaaatccatggcctccatggcaaaggtgtttctgttgagaatatctcttctcagctttcaccctgggcatctgcactctttgagtttttgcccccttttatcaggaagcagctacttctccatcctgaatctgatgattcagctcaactttctcagattgagacagagaagcttctagcccagttagttgagactgagatgaacagacgtttgaaggagggcacttacaaaggaaagaagtttaatgcaatctgtcacttctttggctaccaagctaggggagcactgccttccaagtttgactgcgattatgcctatgtcttggggcatgtgtgctaccacatcatagctgccggtttgaacggttacatggccacagtgacaaatgttaagagtccagtgaacaagtggcgatgtggtgcggctcctatttcgtctatgatgactgtgcagcgatggtcgcgtggcccttcagccacccaaatcggaaagcctgctgttcacatggctagcgttgacttgaaaggaaaagcatacgatgtattgaggcagaattcttccaggtttttgttggaagatgtctacaggaacccaggtccgctccagtttgaaggaccaggtgccgattcaaagcctatctcactgtgcgtcgaggatcaagactacatgggcaggataaagaaattgcaggaatacctggagaaggtgaagagcattgtgaagcctgggtgctcgcaggatgtccttaaggcggcgctgagcgccatgtcttctgtgacggagacactgaacatcatgacctcatcgtccaccggccagactgcactgtgactcgtttggtgccgttttgtggtgcggatcagaatccccactttttccatggtgtcgattgacaaagttaggagcagtaatcctggtgccacacgggtcattcttttgtagcttcttgggagagttctgtcagttttgaattcgatagtttattatggagaggcttgttggtgagtttgagctcgaataatttttgaaacagacggattgcggaatcttaataaaccaaaatttgtgactgcattcacatttctgccagtcgtctgaatgagaaaaatgtgagagcgatctcttcatctga

SEQ ID NO: 123573 - DNA, 2027 bp, Zea Mays
agacccgtcccactccaactccaggccatctccctacgcctcagacctcggtgcaaacctgccgcgaaaatagcagccgcccgttcgctctcccactcctcccgcgatgagcgacccgcggggccacgccgccggtcccgaccgtgacggggacgacccgctcgccgaggacgccaacagcgaggaagcgtggcagacgcccgagaaagagccggttgctgtgtcgaaagaggcggctgcgcggggtggggacacgaccccggacgccgaaccggagagcgatgacggagagggaggagtgggctccccggatcagatggagcccaatgcggacggggagcgcgcaccgcccgtggccgcggctgaggacccggaggggattgttggcagcgcaaaggtggagacgaacggcgaggacgccatcagccttgacgccgacggggaggaggaggacgacgatgatgacggagacgaggaggaggaggaggaggacgacgacgacgacgactccacccctgatgcgtctccgagggccgaggtgaaggtggagggcgaaagctccacggggatgacccagagtggcgccggccaccgcgtggaggtggaaccggaccccttcctcgacggtgatgactctgggacggaggaggagcaaggtgcgttcatggcggagctggagcgcttccatagggagcacagtctcgagttcaagccgcccaagttctacggcaagggcctcaactgcctcaagttatggaggcaggtcgcccacctgggaggccacgagcaggtaacggtttgtaaactatggcgtcaagttggagagactttcaggccaccaaagacctgcacgactgtttcttggtcatttcgaattttctatgagaaggcacttcttgaatacgaaaaacacaaggtccggactggtcagcttcagataccaccgcctggtttaccacagcctagtggtgctgaccgtgaggtggttgtaaatcaatcatcttctgccagagttagaagggatgctgcagcgcgtgctatgcagggttggcatgctcaccgccttctcacaaatggcacttatggggataacattttgaaggacaaagatacaatgccacttccaaatcgtgataaaaacctaagctttggggtgctcaagagaaagaaagcatctagtccagagtatgctctcaagtcgtcccgctcaaaaacaaataagtcacaggaagattctatggtcgttgacgttggagaaccagccgactgggtgaagatcaatgtgcggcagactaaagattgctttgaagtttatgcactagttccgggacttctaagagaggaggtgcatgttcaatcagatcctgctggacgtctggttatcacaggggatccagagcagcctgataatccttgggggatcactccgttcaagaaggtggtcaacttgccatcaagaatcgatcctcaccaaacatccgctgttgtcacgcttcatggtcagctattcgtgcgtgcaccatttggtcatcctgatatgtagatatgaaatcctgtttacttcagttttgttgactggcgatgcctcgtcatcagtgatattccttgatattactagggtttatgtcaattctgttgaggaaataggattttgtttgagcagatacatgatgtcaagctgacttagctgaaccgttctgtggttggatgctgattgctgctgttgccatctgttatcaccttgtttattactccctccgttcttttttatttgttgtggtttagtttaaaaatgaactagaggacgataaatatttgagaacggaggtagtattatagtagtggccataaagttagctgattcatgcatgtattccagtttcatggtgagattttatagagaaaggagatgttgttcgtagtagggctaatttgacattatgattacttattgttctttattatttttcttctgtattataaatgcctctctgggtcactccaggcgccttaatgttgcatttttg

SEQ ID NO: 123574 - DNA, 1344 bp, Zea Mays
ggtgtcaacacagtgtttttgttttaataaattacataaattacagttgcagccgtcaagcagccgactttaatcagagaccgactttagcgaacatatttttccgaatggaaaacctctagtgttatagagctcacgtatcaagtattaaggaacttgggacaggaaaagaaaagacaaaaattagatcgcgtttctttcaatctcagtcgtgacctgctcgatggcgggctggccgcgggggaggtggctcgttccgtggtgcttgtctggcatcgtaacgatcgacgcgccaccgtcggatgcctttgggactttgcacggtggcgactgtctcttcctctcaagtagggccaaaacatagacagaaagatccacctactctgccaccttcgcagtttcgcatgtcaaaaacatgaccaaagaaaaaaaaaacaagtggcttcgtccatgcatcgattgcccgagccaaaggtcgattcttgagcgcagtcatcgccaactccgcgcttagctaatagtactatagtagcatcagcaaaaaaaattaggagctagaaaacagaggagtcgggcaccaagtgcaacgcatcatgcccaacatggaggggggcgagcgccgaaacaaagaggccgcctttggagtcaaagacctgcaaaggttgcagctttttatacgggagctgcgaagagctcgtcagctcgtgggcgtggctaaaggtggcatgccatgttcccaaaacgagtggtcacggcaggaggtgcggagatcaatcacggtcccattgcacgggcaaaatatctgaatggcaccactcgctgaatcatacctacagatctggtgaggaacaagcgtggattcatcggggcaaaacctgaaatccacatcggcagggccgcggatgcccgccggtgaggtcggtgtcaaagctcgaccggcaggcgctacggcgagtttgcagagacccgacccgacccgaccgggcggcgcgacggcgagtgccgctgccgaatcgacggccggccacgagcccgttgccgggctcagcaacccagaaccgaacgccggtcgattcctcaccaatccattcggaacaatctatggaacagtggcagggggggcactagtgatccataacaatccaggaaggctaaatgcgggtacctgagagtgaggacgacgtgacaggctgcttcggggggcggagcagatcgggcggacgccgcgcctcaccctctctcggtctctccccttctctcctgtcccccggacaggaaaacgagcggtggtgcctgcaggatttgcagggaggaggaaggaggagggagcctgaccgcctcggt

SEQ ID NO: 123575 - DNA, 751 bp, Zea Mays
ttgtcgttcgacgatctgttattccgccaaagacaccagactagtgttttacaacaacacgaagggagcacgaagagatggcaagacgcacacgacaaggcgcggccacgcaacgaccgccgccggcaagcctacaacagcgacgactaaaaacaaaaacaagagaacttgactacttgagagtacccaaagctcacagccatgggcacagacacactgaatttgccttaaatctagcgatggcactgcagtagtgcagtaagcctccttttctgaagcccaaatgctctcttcctgtctaaagactggtgactaaccattagacaggtagatgcagacattaccatcttctcatcctgatttctcctcccattcctagggaaaaagcaagcggcggctagaacttgctgttgtaccagaagacgcccttgcggttgcggttctcaggctcgacgtagatgcactccctggcctcgcgccaggtggccttggcgacaggggtcgggtcgaactggtagtactcgccgaggacgggcctgatcgccctggtggcctccacggcgtggtagtgcggcatggtggagaagaggtggtgcgcgacgtgcgtgtccgtgatgtggtggaacacgcggttgaggacgccgtagtctcggtcgacggtggcgagcgcgccgcgcagccagtcccactcgcccgagtcgtagtggggcagcgccgggtgggtgtgctgcaggtacgtgatgagcaccag

SEQ ID NO: 123576 - DNA, 1898 bp, Zea Mays
cggctcatctcccctccgttcctcggcttgtcctcttcctccggccttccttttcgtgccgtgcggtacagtgcaaagacaaagctttcccctctccgccccccgccgtcgcccccacacgcgcacagaacccccccgcccccaattccaaatcccgagtgcccgcggccacagaccgacccccatcacacacgcgcatcgcgccaccccatccgtcaccgtcgacccgcgagcacccatggcgaagggaggaggtggaggccagcgcgagggtagcgccctgaagagggcggcgatcgtcgcaggggggctcgcgctggcctgggtcaccgtggagaccgctttcaggcccttaatgggccgcctccgcgctgccatctccagctccaccgacaccgcccgcgaccccgaccaggaggagcctcccgcgcctgcctctgcggcggaggcggagaaggcgtccgcaccagaggagcctgccgcggtggaggagaaagtcgaggagaaggtggtcgagttggaggagaaggtggaggaggccgccgccgacaaggccgagtgaaggcgacggccacatggcgccctgtctggctgctcttctgaacgggttcttgaggttagccgggatcgaatccaagatcgtttaaaataaaacctgtgtttaaacgtttatcatgcaaattatattggattagcatgtgtgcaattttcgtttgtccaggctgagaactaaggaaccatggtgcacatcaagccactaaccattatgctgaaatgcaaatcagatagtgacttggaaaacataggaagttgcgttcatgtccatgtacgctctggtcggtttttttccttcgtcgttagagaagtattagattgaagttgaatctgtacaatcctattcagtacaaatttgagtctttattgaaccaagtaccaaaactaactgaaaacagaggtaactttaaaatcccaaatgcatactgcatcgtagaaggtggtgggcataaatatctatggaaaatgtccttagcttggtttggctttaatctgtaccgacttctacagtattttttttgtctatatggattatatctgcagcagtctaaacaaccggctttaatccgaagcgaacaacccaatgcacaagagttaaaaaaaaacttgagataaatatgcagtgtgtattcgtgctctgcttctgaacatgtaagcatagcctgaaacgttcatccagttagcacatggcggattggtggcggcaagtatagtgcaagaaacaatcagcgactgcaagccaagcaatcgcaacgaccggttcgggtaactgtttgcatccaaccgtgctcataccagctgccagcctgccacgccatgagaggaagaaaaacgtagtcagagaaggccagaaagctaagaaaagagcagggagtaaaacctgagctggagacatgagaaaacagaggaatcggcaaggctagaaaaaaagcgtcttgtgtgtgcatctcaagctactgcagtggcctccgcatcagtagaagcggtgtgtacgcaagatctctatttctttgcactacgatttggccacgttcattgatttgtgtgagattttagcctacaggctgcagtacgcgctactagctcgtagcactaattatttttgcttagtagccgcatgcctgcactacttttgcttagtagtcgcatgcctaaaccaacatgtagtacgccactagtaattcatggatgagtatgaatttgtgtacaaaatggaggccacgttagaagaagaggaggaagagaacaacattgacatgaatgctactgataaatatttatttcctaattttacaatgtatgctacagttatatacctcatgttatacacttctattcttgta

SEQ ID NO: 123577 - DNA, 897 bp, Zea Mays
tcacggctcatctcccctccgttcctcggcttgtcctcttcctccggccttccttttcgtgccgtgcggtacagtgcaaagacaaagctttcccctctccgccccccgccgtcgcccccacacgcgcacagaacccccccgcccccaattccaaatcccgagtgcccgcggccacagaccgacccccatcacacacgcgcatcgcgccaccccatccgtcaccgtcgacccgcgagcacccatggcgaagggaggaggtggaggccagcgcgagggtagcgccctgaagagggcggcgatcgtcgcaggggggctcgcgctggcctgggtcaccgtggagaccgctttcaggcccttaatgggccgcctccgcgctgccatctccagctccaccgacaccgcccgcgaccccgaccaggaggagcctcccgcgcctgcctctgcggcggaggcggagaaggcgtccgcaccagaggagcctgccgcggtggaggagaaagtcgaggagaaggtggtcgagttggaggagaaggtggaggaggccgccgccgacaaggccgagtgaaggcgacggccacatggcgccctgtctggctgctcttctgaacggtatgctgttggttccgtgaatctgttctgtgaatctggaacttgtcgcttaaagtttaccagtaaagttgccttaacttttggcttaaagtgccatttagatttagttaacgtcgttgaggggtttgatgtgatggtatctgtgtttttaaatgtttattgaactgctgactacttgattatgatattattaactaaaatattggtgctctgcctttttgcagcatcaggtgttctagtcatttcgtttcattattatgataatataatatgattgactgttattaa

SEQ ID NO: 123578 - DNA, 1359 bp, Zea Mays
tgtatctgagctgcctgcctgacttgcaggagatagaaaaaaaaaggggttggtagttcgttcacgtcgcctcgagggctatagcatgttcttgtgttcacaaaggtagtaggaacttttcagctgcacacctggtgaataaagccagtctgtccaggcggaggcaagctgttgtggctgcgacacaaacactgcgccatcacatacacataccatctctccaccatcctctgtccagacgaccagaccaaattaaaaggagaagcaaacagagatctggcaatctgggtgggggtgggcggcgagagagcaggagaagaccattgccccttgaaggcgggctccagagcgagcttctccgccctctctgtttgccttgcctgcttgcctctactcgtccggcccagccatggccaccatcctggagaccatccagaaggcgaggctcctgccgcccaggccgctcaaggacgagctgccaaccttcggcggcggcggcagagaggagagccacctcacgggcctgcggaagcggctgtccgccttctccggcaagatccagcccatctcctccgcgtcggccgagtgggcgttccgccggcgctcccggccggcgccctccctctccgcgggaggcggctccctgaggcagtggtggcggcggggcgtcgtcggctggcttctgtcccggaagccggggttcgcgggcgacctcgagatgaacgaggacgagggccgccacggcggcaggggcacctggggctggggccacgtcctttacagggtgcgctccggcgtccgccgcctcgtcgtgtccgcgcactcgctccccaccacgcagagtcagtccctgccgccgccggcgcactgcaagccggcggcgctcgcccacgcgcagaggctgggcttccaccacgccggccacgccatggcgcactaaggagggtcgccggtcgcgccgcgccgcgctgcgcttgccggtgctgtttgcggccgatctccctccagattcggaaacggagaagcgggcgagaggcacgagaagaggaggattcaggttgcaggtaggtgcgtgagatcggtggcgaagaaatcgctgtaccgttataagtgaaaactagctcggtgaatcgatggtgaatggaatggaatggaaggtttaccatcctgtgctgtagaggtcaactggtcaagtgttgtatcatatgctcgttctttatattctttttgggtttattggacgatgaaaacgtacaattttggttgaatctgtacttttttttaattttttttcctccagcagtaaataaaactaacgcaaattgtgctcccctgttcttgcgtctcatcatccaagat

SEQ ID NO: 123579 - DNA, 1412 bp, Zea Mays
gtcgaagcagagcccgccccttcccgcgccgttctttttggttcccctgtccccgccgctgccgaaaaaccgccgatggaggtcgtcgccgccgcgaagcagaaggcgaagaagcatatacacctcttctactgctccgaatgcgaggagctcgctctcaaggtcgccgccagctccgacgtcatcgagctccagtctatcaactggcggagcttcgacgacgggttcccgaacctgttcatcaacaaggcccacgacatccgggggcagcacgtggcgttcctggcctccttcagctcgccggcggtcatattcgagcaggtctccgtcatcttcgcgctgcccaagctcttcatcgcctcgttcacgctcgtgctgcccttcttccccacgggctccttcgagcgcgtcgaggaggagggcgacgtcgccaccgccttcaccctcgcgcacatcctctccatgatccccaagtcgcgcggcgggcccaccagcgtcgtcatctacgacatccacgccctccaggagaggttctacttcggggacgacgtcctgccatgcttcgagacggggatcccgctcctgctgcagcgcctccgccagctcccggacgcagagaatatcaccattgcctttccagatgatggagcgtggaagcggttccacaagctgttgcagcactttccaatgatagtctgtaacaaggttcgtgaaggtgacaagagaatagttcgtataaaggaaggaaatcctgaaggccgtcatgttgttattgttgatgatttagtgcaatctgggggaactcttagagaatgccagaaagttctagcttcacatggcgcttcaaaagtaagtgcttatgtgacccatgctgtgttccctaagcagtcatacgaaaatttcatggcgtctaactctgctgggccaggcgaccagctcgcttacttctggatcacggactcatgcccgcacacaataaaagccatcgggcaaagacctccgtttgaggttctgagccttgctggctcgattgctgacgctcttcagatatgagcgcgtacactgactggtagacggggggcttgaaccgtgggatgcccgtcagatcgagaacttgtaccgtgagatgagctgctcctgctttttttccctaaatgtaggagtttgttccggttccttgaaaaaagcaaataatgtggagcaagttttaagtacctgaaggttccacaaacagcgctgtgaattgatgataaaatcaggcattgggatactcacatctgtgtgtacttactgtcgatgctcgcttccgtttgaagttcgcgagaccagtgcttctttcctgagtcctgaccctatgttggagtaccgttgccgtgcattcaacagaggccagtgcttctttcctgtgtcaa

SEQ ID NO: 123580 - DNA, 4221 bp, Zea Mays
gattcgccccagtttctctgaaacgaagtagacagccaccgtcttcccgggccacggcgatcatcaccgccgcggcgccgcccatatcgacagcagagccgctcgcccagtagcctcacctcgcccgcgcttgtggcggccatggaggactacccagaggagctgcggacgccgccggtgtcgctcgtgtcaatcgtggggtgcccagagctgcacccctcgatctcggcggcactcagctcccagcagccgcccatgaatactctggccctccccgacttcgccaaggtctccatcctggcccgcagcggtaagccccgcgaccctctcgcaccgccgcacccccccgcgggaatcctcaagaaggactggctccttaaacaccgcacccgtgccccggccgccgtcgccgcgctgttccgtgctgaccaggtctccgacgatcctgcccagtggctcaaggcctgctccgatctcgaaaacctcaagtctgcaattcagaggaaaaacactaaattattggtggtccttgtgcaggctcaagctagtgatgagttaagtgaggatgtaacggttgccctgaggaaacgtgcggaaatcgattccaatcacttggttgtgttggttgagcacgatgaagcagaatggaacagatctctgaacaaattgaagagtgtgtttgcggagttatgtgtagcattctataaagaggaagggctaaggataaaggctcgcattgagaaattttttttgcttctgtcgagctgagcatccggtactgcttcaaggttgctatttatgcggagtttagaagggattggccagaagcattgaagttctatgaggaaggtgttcgtgttttgcgtgagatgattggaacttcgacaaggttgcctccaacccaacgcctagttgagataaaagcagttgccgagcaatttcactttaagatatcgaccttgctacttcatgctgggaaagcggtagaagcaatcacatggttccgtaagcatatcagaagctatgcacgggttcttggaacaccagaagttgcttttcttcactgggaatggtttagccggcagttcctcgtctttggtgagttgatagaaacaacatctacaactattccagatacattatctcctagatttggcactgcagactatggattgactgagtgggaatttcagccagcatactactatcagttagcggcaacttacttgagagagaagaggtatgccatcgaatgttcatcatcaatggctaatcttacaacagaagttaatggagtacctgagtcagtaatgccttctgtatatgttggccaatatgtgcgcttgtttgagcaaggagatacagttagtatactacccctttctgatactgaatacaccagctatgctttgtcagaagctgaaagatttcaagattcttatgagataatagcactgttcagaaaagcttatgaatcatttcagagcctaggtgctacaagaatcgcttctgtctgtagcggtggaatggccatggaatattatgcagctggggattttagcaatgcaaaacagctttttgataatgttgctggtctgtaccgcaaagagggttggaccactttgctctgggagaacctaggatacttgagagagtgctcaatgaaacttaattccccaaaggattttatcagttattccctagagatggctgcattaccattattttctcgtagtgaagaggaaaatcgagaaaacaaaattaagagtgggcctgcaggttcccctaccatttccaggagagagaatatacagcaggaagttattaatgttttggaaagaaatcagtcatcagagggaaccgatgatggatttaataatgcgatggaagaagttactcaccttgatattgatcagataagttcgctaagaatggtacttactacgtctgttgcttttcttgatcaatctgtaaaacctggttcacctttgcttgtcagcgtgtcactcttatctcatcttccttctccagttgtggttgatcagttggaggttcaattcaatcaatctgactgtaactttgtgatacatagtagacaggaagattctcctcctttctattcaaatttgcatgaccaagttgttcaagatacttctcttacactcttcaccaatagatggatgcggttgacacatgaagcaaaatcaggacagagtggaaaactagaatgtttgtctgtgaaggcgacaataaaaaaaatgccttgtgatttgctgccacgctgaaagccctgcttccatggaagacttcccattatggaaatttgagaaccaagtggagacattgcccacaagggaccctctgctcttgccttttctggacagaaacttattcaagttgaagagccagatgctcaagttgaccttgtcttaaattctgctggcccagctttagttggagaattatttactgtaccggtgagcatagagtcaaaagagcatgcagtccattctggtgagctgaaaattaacctcgttgatgccagaggtggtggtatgttgttgagtccaagggaagcggaagattctgaaagtcaccatgttgaacttcttggtgtctcaactgtgtccgaggacaaagagtcgaaggaagaggccgatagcataagaaatatccagtattcatttggggttatatctgttcccacattgggtgtgggtgattcctggtcgtgcaaactagaaatcaaacggcatcgagcaaaatcagtcatgctttatgtttcacttatagtgtgtttggtttgaggaataaagtgattcatcttcttctcactcctcacttttttatttggtttgtggaatataatgggttgatccatcaccacctcattcctcataagctaataattagtatatacatgtggagtgggttgattccaccaaaattgatggaatgaacttatgatgcatcactttatgaagcatagactgactctacaaaccaaacacaccattagttactccctaggttcaagtgaagaagaagcatcgcaccggcttaacgtccatagaagcatgcgaattgaagggcagaccccccttattagttagccaccagtttttgagaccatttaggcgagaaccgttgttgctatatcagggatcaggtcctcaggaagtgatgatgaaaaatgttctcttgctatgaatgagtctaacgtgcttattgtgactgctagaaactgcactgacgtgcctttgcatttgcattcgatgaccattcaacctgatggatccgccgccgcttgttgtgggcgtggagtgccctccctacgccgtccttgggatccctttcaccgtctatttgaaggttcacaattcaacgtcttttgcttcaggaaatcaagtactccctcgtcgatccccagaatttcgttttctctggtgctcacagtcacgccttctccatcctgccaaaatcagagcacactgttagccataagcttgtgcctcttggttccggctctcagcagttaccaaggatcacggtgacttcggtgcggtattctgccgcgttgactccttcagcctcggcagcgaccgtctttgtgtaacccggccagtgagcctaaattcaacttggaaactagccgtgcccgtgcagtatcggatgagatcgtgagttgagacgacctgagcaacctgaagtctccactctcctgacacttgttttagctcggcccgggctgcatgccatgcgagataaggtatgcttgctaccggaaagaccatcagtttggccttttacgttgatgttggagaaacgaatcagattcttgtcggcgaaaaaaaagggattgtcgctgtgcaaaagttttggcgttgtttttttttttgaggtttcgatttttgtagtgcttctggattaaccacatgtccgtaacttatgattacttcattgttttgggcccaagggtacaacaacatactacacaggacaggaggaggataggctgttgtaaatcaccatcccaccagtcaggaggataggctgcatgcttcgtgatggcagggccatggaggagaaaaccaacgcgtccttgactccttgagcaagtagcccgtcgcgttcatccggcggcgcgctccatgccgatccgtctcggcgtcgcatacggcatatgccagtcgccttcgcgtcggtctatataccggggaa

SEQ ID NO: 123581 - DNA, 4125 bp, Zea Mays
ctgaaacgaagtagacagccaccgtcttcccgggccacggcgatcatcaccgccgcggcgccgcccatatcgacagcagagccgctcgcccagtagcctcacctcgcccgcgcttgtggcggccatggaggactacccagaggagctgcggacgccgccggtgtcgctcgtgtcaatcgtggggtgcccagagctgcacccctcgatctcggcggcactcagctcccagcagccgcccatgaatactctggccctccccgacttcgccaaggtctccatcctggcccgcagcggtaagccccgcgaccctctcgcaccgccgcacccccccgcgggaatcctcaagaaggactggctccttaaacaccgcacccgtgccccggccgccgtcgccgcgctgttccgtgctgaccaggtctccgacgatcctgcccagtggctcaaggcctgctccgatctcgaaaacctcaagtatgttgcgttgttgatcccaaattgacttcgcgcggtcagagatttagttacgagtcttaagatgctaatgtacaacttatcaaccacttgggaactaggaagcaccacccacactttattggcagcagctagtagtataaccgaagttggcggcaagtgatttttgtttgtcgcacaggtctgcaattcagaggaaaaacactaaattattggtggtccttgtgcaggctcaagctagtgatgagttaagtgaggatgtaacggttgccctgaggaaacgtgcggaaatcgattccaatcacttggttgtgttggttgagcacgatgaagcagaatggaacagatctctgaacaaattgaagagtgtgtttgcggagttatgtgtagcattctataaagaggaagggctaaggataaaggctcgcattgagaaattttttttgcttctgtcgagctgagcatccggtactgcttcaaggttgctatttatgcggagtttagaagggattggccagaagcattgaagttctatgaggaaggtgttcgtgttttgcgtgagatgattggaacttcgacaaggttgcctccaacccaacgcctagttgagataaaagcagttgccgagcaatttcactttaagatatcgaccttgctacttcatgctgggaaagcggtagaagcaatcacatggttccgtaagcatatcagaagctatgcacgggttcttggaacaccagaagttgcttttcttcactgggaatggtttagccggcagttcctcgtctttggtgagttgatagaaacaacatctacaactattccagatacattatctcctagatttggcactgcagactatggattgactgagtgggaatttcagccagcatactactatcagttagcggcaacttacttgagagagaagaggtatgccatcgaatgttcatcatcaatggctaatcttacaacagaagttaatggagtacctgagtcagtaatgccttctgtatatgttggccaatatgtgcgcttgtttgagcaaggagatacagttagtatactacccctttctgatactgaatacaccagctatgctttgtcagaagctgaaagatttcaagattcttatgagataatagcactgttcagaaaagcttatgaatcatttcagagcctaggtgctacaagaatcgcttctgtctgtagcggtggaatggccatggaatattatgcagctggggattttagcaatgcaaaacagctttttgataatgttgctggtctgtaccgcaaagagggttggaccactttgctctgggagaacctaggatacttgagagagtgctcaatgaaacttaattccccaaaggattttatcagttattccctagagatggctgcattaccattattttctcgtagtgaagaggaaaatcgagaaaacaaaattaagagtgggcctgcaggttcccctaccatttccaggagagagaatatacagcaggaagttattaatgttttggaaagaaatcagtcatcagagggaaccgatgatggatttaataatgcgatggaagaagttactcaccttgatattgatcagataagttcgctaagaatggtacttactacgtctgttgcttttcttgatcaatctgtaaaacctggttcacctttgcttgtcagcgtgtcactcttatctcatcttccttctccagttgtggttgatcagttggaggttcaattcaatcaatctgactgtaactttgtgatacatagtagacaggaagattctcctcctttctattcaaatttgcatgaccaagttgttcaagatacttctcttacactcttcaccaatagatggatgcggttgacacatgaagcaaaatcaggacagagtggaaaactagaatgtttgtctgtgaaggcgacaataaaaaaaatgccttgtgatttgctgccacgctgaaagccctgcttccatggaagacttcccattatggaaatttgagaaccaagtggagacattgcccacaagggaccctctgctcttgccttttctggacagaaacttattcaagttgaagagccagatgctcaagttgaccttgtcttaaattctgctggcccagctttagttggagaattatttactgtaccggtgagcatagagtcaaaagagcatgcagtccattctggtgagctgaaaattaacctcgttgatgccagaggtggtggtatgttgttgagtccaagggaagcggaagattctgaaagtcaccatgttgaacttcttggtgtctcaactgtgtccgaggacaaagagtcgaaggaagaggccgatagcataagaaatatccagtattcatttggggttatatctgttcccacattgggtgtgggtgattcctggtcgtgcaaactagaaatcaaacggcatcgagcaaaatcagtcatgctttatgtttcacttatagtgtgtttggtttgaggaataaagtgattcatcttcttctcactcctcacttttttatttggtttgtggaatataatgggttgatccatcaccacctcattcctcataagctaataattagtatatacatgtggagtgggttgattccaccaaaattgatggaatgaacttatgatgcatcactttatgaagcatagactgactctacaaaccaaacacaccattagttactccctaggttcaagtgaagaagaagcatcgcaccggcttaacgtccatagaagcatgcgaattgaagggcagaccccccttattagttagccaccagtttttgagaccatttaggcgagaaccgttgttgctatatcagggatcaggtcctcaggaagtgatgatgaaaaatgttctcttgctatgaatgagtctaacgtgcttattgtgactgctagaaactgcactgacgtgcctttgcatttgcattcgatgaccattcaacctgatggatccgccgccgcttgttgtgggcgtggagtgccctccctacgccgtccttgggatccctttcaccgtctatttgaaggttcacaattcaacgtcttttgcttcaggaaatcaagtactccctcgtcgatccccagaatttcgttttctctggtgctcacagtcacgccttctccatcctgccaaaatcagagcacactgttagccataagcttgtgcctcttggttccggctctcagcagttaccaaggatcacggtgacttcggtgcggtattctgccgcgttgactccttcagcctcggcagcgaccgtctttgtgtaacccggccagtgagcctaaattcaacttggaaactagccgtgcccgtgcagtatcggatgagatcgtgagttgagacgacctgagcaacctgaagtctccactctcctgacacttgttttagctcggcccgggctgcatgccatgcgagataaggtatgcttgctaccggaaagaccatcagtttggccttttacgttgatgttggagaaacgaatcagattcttgtcggcgaaaaaaaagggattgtcgctgtgcaaaagttttggcgttgtttttttttttgaggtttcgatttttgtagtgcttctggattaaccacatgtccgtaacttatgattacttcat

SEQ ID NO: 123582 - DNA, 2143 bp, Zea Mays
agtcgtaattaacaggttcattttggtcggaacagttgctgagtttccacatcatgcatggaactgaaatatacatatgcaggaccaggactgctgtggaacagtatcctgaactaaacagctaaaatacacagtagaaactaataaactcactggacactggacagggctgatggatgctaccactgttgattccaaatggatctctcccgccactgaagatgggtccatggacaggcgaggaaacccagctgtcaagacaaccaccggaagatggagatctgccatcctgctgctagctaactatgggctcgcgacgtgcgccttcttcggcgtcggcgtgaacctcgtggtgttcctgcgccgggtgctccaccagggcaacgccgaggcggccaacagcatcagcaagtggactgggaccgtctacatcttctcgctcatcggcgccttcctcagcgactcctactggggccgatacgtcacgtgcgccgtcttccagatcatctacgtgatggggctggtggtcctgtcgctcgcgtcatggctcttgctggtgaagccgtccggctgcggcggcgtcaaggcgcactgcgacgggccgtcggcgcccggcgtcgcgctgttctacctgtccacctacatgatcgcgttcggcaacggagggtaccagccttccatcgcgacgttcgggtcggaccagttcgacgagacggaccccgaggaggcgcgctccaaggtggccttcttcagctacttctacctggcgctcaacgtcggctccctgctctccaacacggtgctggtgtactacgaggactcggggcggtgggtcatggggttctgggtctcggcggccgccgcggcgctggcgctcgtgctcttcctgctcggcacgcccggctaccgccacttcaagccgagcggcaacccgctcacccgcgtcgcgcaggtgttcgtcgccgcgctgcgcaagtggcgcgccgaggtcccgcgtggcgagctcctccacgaggtggtggaagcaggagaggaccctaaggtctcgggcatccgcaagatccttcacagcgacgggctcaggttcctcgacaaggcggcgacgatcacggaggaggaggaggaggagggtccgtggcggctctgcacggtgacgcaggtggaggaggtgaagtgcatcctgaggatgctgcccatctggctgtgcacgatcgtgtactcggtggtgttcacccagatggcgtcgctgttcgtggagcagggcgccaccatggacaccaacatcgggtcgttccacttccccgccgcgagcatgtcgctgttcgacgtcctcagcgtgctggcgttcatcgccatctaccggcgggtgctggtgcccgtcatggcgcggctgtcaggcaacccgcagggcctgaccgagctgcagcgcatgggcgtcgggctcgtgatcggcatggcggcgatggtggtggcgggcgtggtggaggtggagcggctgaagcgcgtggcggccccggaccagccgagctccctgagcgtgctgtggcaggtgccgcagtacgcgctgatcggggcgtcggaggtgttcatgtacgtggggcagctggagttcttcaacgggcaggcgcccgacggcgtcaagagcttcggcagcgcgctgtgcatggcgtccatctcgctggggaactacgtgagcatcatgctggtgagcgtagtcacgagcctcaccgccggtgagaagcgtccggggtggatccctgggaaccttaactcaggacacctcgacaggttctacttcctcctcgccgctctctcgctcgtggacctcgccgtctacgtcgcctgtgccatgtggtacaagggcatcaagcttgacggcggcgacggcgataacaggagaaaggtctctgcgcacgtctagctagccactgcatactggacctcgggccttcagttttcaggttcagagacgtgccgggctggcccctggccgtatgcccgtatagtcttatagagagaggagagagagagagaggaaataaaatgtcaaagaatatgtaaccatccgctcggcgttggatggcccatgttgttatgtatctttggtcagatgatccaagtaacctcatgtgaagtactaatg

SEQ ID NO: 123583 - DNA, 2790 bp, Zea Mays
atggaacaaccacaatgcaatgcgcctttgcaggcagtggggcaagaaaagccgagggagaggaggaagcgacgctaccggcgatgcgtggctgaacaattgagggagagttttgctgtcgacgccgactatgaatacatttcaaaggaccacaagccagattgccaaaatgggtccagcagaagcaccaaggtttcctccccagatgtgatcactaagccagaccatgatgaatctgctgaggtagttgactcaaaatccgaagaggcacaaatcacagatagtgagcaggcaacatatgcttctgccaacaatgacttaaaaggaactaaggcctatcaagaagctgatgtttctggcctttacaatcttgcgatggcaataattgattacagaggtcacagggttgtagctcagcatctttttgtatattattatgccaaactgtcacaaatgagtatcatacctggtattcttcaaggagacaagtctgattctcttctgtatggctctgttgataatggcaagaagatatcttggaacgaaacattccattcaaaggtagtcgaggctgcaaagcggctccatttgaaggagcatgtggttttggacggttctggcaatcctgtaaaattagctgctacagtcgaatgcaagggcattgttgggagtgatgacaggcattacattttggatctgatgagagtgactcctcgagattctaactacattggacaagggcaccgcttctgtgtgctgagacctgaacttatagcatcatttgttgaggctgaatccatgaaacaatcgttgaagcagaaggttccagatgctccagttgcaagtacttctgatgctaaggctacctctgttgaagcagatgacaagtctgaagaaagctctgttcatacacacaaggaaaatgacaactcaagctccgagattcttttcaatccaaatgtgtttacggagtacaagcttgatggcagtccagaggaaatcgctgccgacgaagagttggtaaaaagggctggtacatatcttatagacatagtgatcccaaaaattgttcaggatctatgctcccttgatatctcccctatggatggacagactttaaccgatgcattgcatctccatgggataaatattaggtatctgggcaagattgcaggcatggtcaaacatttaccacacttacaggacttgttttctgctgaaataatagttagatctgcaaagcatgttatcaaggatatactgaggcaaagtttggatcatgatattgggccagctattgctcatttcttgaactgtttcatggggaaagttttaggtgcttctacagagggtagtctaagtgacatgcagtcaaagactctgaagggccatgaaaatagccaaactcaaaagtctactaaaggccataaactgagcaatgctgctgcttcaagaaaaagcttgtcagcttattctcatctaacctctgatggaatttggtttagcattaaggaatttgcaaaatcaaaatatcagtttgaagtgccagatgatgcaaggctttcagccaaaagggtagctgttctccgaaatctttgccaaaaggtaggaataacaattgctgcacgtaaatatgatcttgatgcttcaactccatttgaagcctcagatattttaaatctccaaccagtcgtcaagcattctgttccaacctgtacggaagcaaaaaatcttatggaagcagggaaagtcaggatggctgagggaacattgaatgaggcatatgcattgttttctgaagccttttcactgcttcaacagataactggtcccatgcacaaggatgctgcaaattgttgccggtaccttgctatggttttgtaccatgctggtgatacagctggggcagttgtgcagcaacatagggaactcatcataaacgagagatgtcttggtcttgatcatccagacacagcccacaggcatgatgccagtaatatgaataccgctctcaggtatcttcaagaagcccttatgaagaatgagcgacttcttgggcctgtccatgttcaaacagctgtgtgctatcatgctctagccattgcatttagttgtatgagcttatataagctttcaattcagcatgaaaagaagacatatgatatactggtaaaacaattaggggaaaatgactcacggactgaagactcaaaaaattggttgaatacatttaagcttcgagaagagcaggtcaacgcccagaagcagaagggccaggaagctaatgcatccgataacgctgttaaattcttgaaggcaaaccctgcagttttacaagcaatgaaggctgctgcgatccaatcaggtggtgtgtcagcaaatgtcaacaggtcgctcaatgctgcagtcgttggagaaggtgtaccacgactgagaggagtggatgagcgagctgctcgagcgactgcagaagcacggaagaaagctgctgcaagaggccttaatgtccgtaatggccctgtggcaaaccatgcgtctgatgaactagctcagattctcaaactcatcaacgctgtttcggggtcttccactcctggctctgcaaagactgaggtatctgcctctgaagggcaggcaacgaatggatgtattcaaaatggaactgacactgaaccgaaggctgcggataccaacgggctatctgcatcggttaagtccactgtcaacgcaccatttggactggggacaacattggagtcgaagaagcagaaatcgaagcaaaagtcgtag

SEQ ID NO: 123584 - DNA, 336 bp, Zea Mays
atggatgctcacggtcttcttcagattgggctttcgggccttgatggcggcggcgaggaggcgggggaggcggtcagactcagaggcctcgaggtgggacggccacaaatccgggcccttgtaacagaggaacacatggcgctcgtggaaccccaccgtcccgaccagcttctccttcccgagctccggacgctggaacccgaactctgcgcctggatccggcaccgcggccgcggcggcgaaggccgcgtccgtagcgtcagccgccggagccggagccgcgaggggggcatcaccttgcgtaggggaggccatgagcaggcggagtggcagtag

SEQ ID NO: 123585 - DNA, 2270 bp, Zea Mays
acgggccgccgggccggggagcagaaagggaggccattaatactcgacacctccccgtcttcttcctcctcccccctccgccattgctccacgagtccacaagacatctcccgcgcgccagagctctagagagaaactggacaggagcgcgggcttcggactcccatctccgcgggggcacaaaagatgcaggtcctcatgactcccagcctccgcgcagcgcaatcggttttgccgatttcatcgaagttcttcccccccacaccatttgcagattgtcaatgaatctacaatgcaaatagtccattgcaatgccaaggttgcttcctgactgaccagatcgagcgtgttgaactctctggtcatctcgtctgaaaaaacagacaggtgtttgcagctatggcttcgaaggcaatgccccaaattctcccagaaacgccaggcatcccaggcacgaagcaatgctctaagagtgctccccctttcgagcttccccagacgaacaattcctgtgcttctgcgctgacggtgttaccaggaacaacaactgacctgagcaaatcgagccataaacctgagctgaacgagcagaaaccagaccaccgcctcaaggaacctgtcgacgccgcgtcggtcaagttccccgtagaaccgagcaagaaagcggtagcggagcatgggagcacgaacgggggttccacttcgtttcagacgtgtggagggactagccaggcccaggcaaaggtcagtgcgagtgctaaggccgctgatccacccgagatcggtgacaggggcaacagtggaagatgcaggcctagcacaagcagcgacatcagtgacgagagctcgtgcagcagcatgagcaacagcacgaagcctcacaaggcgaacgattcgcggtgggaggcgatccagacggtcaggaccagagacggggttcttggactgagccatttcaggctgctcaagaggctaggctgcggcgacatcggcagcgtgtacctctctgagctgaatgggaccaagagctatttcgcgatgaaggtcatggataaggcgtcgctagcgagccgtaagaagctgctccgggctcaaacggagaaggagattctgcagtgcctggatcaccccttccttcctacgctttacacccacttcgagaccgataagttctcctgcctggtcatggagttctgccccggaggagacctccacgctcttcggcagaggcagcctggcaaacatttcccggagcaagctgtcaaattctacatagcagaagtcctcctggcgctagaatacctgcacatgctcggtatcatataccgtgatctcaagccagagaacgtccttgtccgggaggacgggcacatcatgctctcggacttcgacctctcccttcgctgcgcagtcagcccgacgctgatcagatcctcgaaccctgacgcagaagcgctcaggaagaacagccatggctactgtgcgcagccagcttgcgtcgagccgtcctgcgtcgtccaaccgtcatgcgcagccccgaccacctgctttggcccgcgcctgttctcctccaagtccaagaaagaacggaagccaagacctgaagctgccaccccggtcaacccttggcctgagctcatagcagagcccagcgacgcacggtcgatgtcgttcgttgggacgcacgagtacctggcccccgagatcatcaaaggcgagggccatggcagcgccgtcgactggtggaccttcggggtattcttgtacgagctgctgttcgggaagacgcctttcaagggatccagcaaccgggccacgctgttcaatgtcattggccagcagctgcgcttcccggagtacccggccgtcagcttctcggcgagggatctgatcaggggtctgcttgtgaaggagccccagcaacggctggcctacaagcgtggagccacggagatcaagcagcatcccttctttgagggcgtgaattgggcgctcataaggtgcgcaagcccaccggaggtaccaaagcctgtcgagatcgagaggccgtcaaatcatccttcatcgccgtctggagctgctgctgacgatgcctccgttggtgcaccccagaaaggtgtcgacggctacttggagtttggtttcttctagcaaacatgtgggctttttttttacactggatgtagggttttctgatgttatgtttttagcagatggttggtgttgtagatttgtgccttcaacctgttttgttttgtattttacacgtt

SEQ ID NO: 123586 - DNA, 2225 bp, Zea Mays
acgggccgccgggccggggagcagaaagggaggccattaatactcgacacctccccgtcttcttcctcctcccccctccgccattgctccacgagtccacaagacatctcccgcgcgccagagctctagagagaaactggacaggagcgcgggcttcggactcccatctccgcgggggcacaaaagatgcaggtcctcatgactcccagcctccgcgcagcgcaatcggattgtcaatgaatctacaatgcaaatagtccattgcaatgccaaggttgcttcctgactgaccagatcgagcgtgttgaactctctggtcatctcgtctgaaaaaacagacaggtgtttgcagctatggcttcgaaggcaatgccccaaattctcccagaaacgccaggcatcccaggcacgaagcaatgctctaagagtgctccccctttcgagcttccccagacgaacaattcctgtgcttctgcgctgacggtgttaccaggaacaacaactgacctgagcaaatcgagccataaacctgagctgaacgagcagaaaccagaccaccgcctcaaggaacctgtcgacgccgcgtcggtcaagttccccgtagaaccgagcaagaaagcggtagcggagcatgggagcacgaacgggggttccacttcgtttcagacgtgtggagggactagccaggcccaggcaaaggtcagtgcgagtgctaaggccgctgatccacccgagatcggtgacaggggcaacagtggaagatgcaggcctagcacaagcagcgacatcagtgacgagagctcgtgcagcagcatgagcaacagcacgaagcctcacaaggcgaacgattcgcggtgggaggcgatccagacggtcaggaccagagacggggttcttggactgagccatttcaggctgctcaagaggctaggctgcggcgacatcggcagcgtgtacctctctgagctgaatgggaccaagagctatttcgcgatgaaggtcatggataaggcgtcgctagcgagccgtaagaagctgctccgggctcaaacggagaaggagattctgcagtgcctggatcaccccttccttcctacgctttacacccacttcgagaccgataagttctcctgcctggtcatggagttctgccccggaggagacctccacgctcttcggcagaggcagcctggcaaacatttcccggagcaagctgtcaaattctacatagcagaagtcctcctggcgctagaatacctgcacatgctcggtatcatataccgtgatctcaagccagagaacgtccttgtccgggaggacgggcacatcatgctctcggacttcgacctctcccttcgctgcgcagtcagcccgacgctgatcagatcctcgaaccctgacgcagaagcgctcaggaagaacagccatggctactgtgcgcagccagcttgcgtcgagccgtcctgcgtcgtccaaccgtcatgcgcagccccgaccacctgctttggcccgcgcctgttctcctccaagtccaagaaagaacggaagccaagacctgaagctgccaccccggtcaacccttggcctgagctcatagcagagcccagcgacgcacggtcgatgtcgttcgttgggacgcacgagtacctggcccccgagatcatcaaaggcgagggccatggcagcgccgtcgactggtggaccttcggggtattcttgtacgagctgctgttcgggaagacgcctttcaagggatccagcaaccgggccacgctgttcaatgtcattggccagcagctgcgcttcccggagtacccggccgtcagcttctcggcgagggatctgatcaggggtctgcttgtgaaggagccccagcaacggctggcctacaagcgtggagccacggagatcaagcagcatcccttctttgagggcgtgaattgggcgctcataaggtgcgcaagcccaccggaggtaccaaagcctgtcgagatcgagaggccgtcaaatcatccttcatcgccgtctggagctgctgctgacgatgcctccgttggtgcaccccagaaaggtgtcgacggctacttggagtttggtttcttctagcaaacatgtgggctttttttttacactggatgtagggttttctgatgttatgtttttagcagatggttggtgttgtagatttgtgccttcaacctgttttgttttgtattttacacgtt

SEQ ID NO: 123587 - DNA, 1172 bp, Zea Mays
ttagaaactggtgttgtcagaatcaataagatctttgattactcctgcttattactgtactatttagtaataaattcacttgtcttgcagcaattgctgctagctgctattgatttggttgatgccaactccaaaactggtggttacattgtttactcaacttgttcgataatgatcccggagaatgaggcagtgattgactatgcacttaaaaagagaaatgtaaaacttgtgccttgcgggttggattttgggcgtccaggattcatccggtaccgggaacatcggtttcatacttctttagaaaagacaagaagattttatcctcatgtcaataacatggatggattttttgtagccaagctgaaaaagttaagcaatacaatcccggtgacttctgagcagcctaaagcgtccgaaggagcagctgagaaggccgatggagaagatgagaaagttatttctaatgaacaggagacagctgttcctggtaaagatgaaaaaactgtgcagatgataaatcataaaaagagtaaggtgactaataaaagaacaagtgtgaccaaagaggctggagggcataaacgtgaacctaataggtcaggaaagcatctcaataaaaataaggataccgataccaaggaagttgatggccctgaaagcactgaaacaaatggagatgggaaagaagagcaacgtgaacaaaccaagcaaacgagccacaaaaggaagatagattctgttaaaactaaaaaatctggccctgtgagcttctcgggtgttcaagagaagaatcaggtgagtggcaagaagacaaaaaggaaatggcaattcaagctgaggcgagactgggaagctgaaaagaaaggtaccaagaggagtaaggtatgagtattcagatatccacaaatcccaatgaaatttgatgcgctgggcaacaaacaattttgaccaagcatgggtttgcacccaggatttttttttggatgtacgaaatagcgattgtaatttgttgtattttattcgatgtgcgtgtagacgagtgacatatctgtcagtgggaactgaagcaaattatcttgatgaatgccatgtgaatcctgctgcttaaatatgtcaaattttagtttctagtgcttatctcccagaaaatatgctgttgtttgtgttgt

SEQ ID NO: 123588 - DNA, 2439 bp, Zea Mays
atggcgaagaaaggggcgaagagaaagcagcagttgccgccggctcccacggcgaagaacgggagcaaggctgtgctcccactgaagggccgcgaagagagcgcccaagaagcagaaggttctggagtcctccgacgattctgatacggagcagcagcagcagcttcaggaggaggactccgacctcgacgtttcctctgattccgacgccgaggagctctctgggtcggacgctgaggctgacgagctctcgggctcggacgccgatgctgacggaggctcgacccgcggcgacgacatggatgatgacgacgacgacgaagatggtgaaagcgatgatgactctcttgcggacgacttcctcgctggtagcgacgaaggaagcgagggtggtgactctggtctggagtcagatgggtctgatgaccttgaggcaaagtcacgagcaattgacgagcagaaactcaaggcggaagaagatgcagaggaggaacttcaaaccaacataagatcagaatctgatgaattcagattacccacaacagaggagctggaggaagaggcacacagaccgcctaacctaccaaatctcaaaaggaggatatccgaaattgtacgagtgctctcaaacttcagcaaactgaggcagaaagatgttccgcgaaaagattatatcaatcaactgaaaactgacgtcatgtcatactacggatataatgattttcttgttgaagcgttaattgagatgttcccagctgttgagcttgttgagttactggaagcctttgagaaaagaccgcctgagtgcttgcggacaaatacactgaagagccggaggagggatcttgctgctgctcttataccaagaggatttaatttggacccgataggaaaatggtcaaaggtaggattagttgtctatgactccaccatttcagctggtgctactactgaatatatggctggacattacatgaaacaaggtgcaagttctttcttgccagtgatggcacttgctccacaggagaaggagcgaattgttgatatggcagctgctccaggcggtaagactacatacattggcgctcttatgaagaatactggaatcatctatgcaaatgagttcaatgagaaaaggttgcatgggcttatgggaaacatccatcgaatgggcgtgacaaataccataatttgtaactacgatggtaaagagctacccaaagttcttgggatgaattcggttgacagagtattgctggatgctccctgcacaggaactgggaccatttggaaggatctacagatcaaaacttcaaaggacattgaagacatcaggaactgtgcctttgtccaaaagcaattgctgctagctgctattgatttggttgatgccaactccaaaactggtggttacattgtttactcaacttgttcgataatgatcccggagaatgaggcagtgattgactatgcacttaaaaagagaaatgtaaaacttgtgccttgcgggttggattttgggcgtccaggattcatccggtaccgggaacatcggtttcatacttctttagaaaagacaagaagattttatcctcatgtcaataacatggatggattttttgtagccaagctgaaaaagttaagcaatacaatcccggtgacttctgagcagcctaaagcgtccgaaggagcagctgagaaggccgatggagaagatgagaaagttatttctaatgaacaggagacagctgttcctggtaaagatgaaaaaactgtgcagatgataaatcataaaaagagtaaggtgactaataaaagaacaagtgtgaccaaagaggctggagggcataaacgtgaacctaataggtcaggaaagcatctcaataaaaataaggataccgataccaaggaagttgatggccctgaaagcactgaaacaaatggagatgggaaagaagagcaacgtgaacaaaccaagcaaacgagccacaaaaggaagatagattctgttaaaactaaaaaatctggccctgtgagcttctcgggtgttcaagagaagaatcaggtgagtggcaagaagacaaaaaggaaatggcaattcaagctgaggcgagactgggaagctgaaaagaaaggtaccaagaggagtaaggtatgagtattcagatatccacaaatcccaatgaaatttgatgcgctgggcaacaaacaattttgaccaagcatgggtttgcacccaggatttttttttggatgtacgaaatagcgattgtaatttgttgtattttattcgatgtgcgtgtagacgagtgacatatctgtcagtgggaactgaagcaaattatcttgatgaatgccatgtgaatcctgctgcttaaatatgtcaaattttagtttctagtgcttatctcccagaaaatatgctgttgtttgtgttgt

SEQ ID NO: 123589 - DNA, 2766 bp, Zea Mays
gcatagcaaattagaaaaactagactgactgataatctggaacagaaggagtaattagtaactaataaaaggaaaaaaatgacataactacccggtgcccataaagctcactcagccgagcgcccggatgatttgcacgtcagcccataaagctcctatttttcttggcccgacccagctgaagcaccacttcgaggccgcttcttagcaaggcccagagttaaatcgtccgtgggcgtggcgctcctctcgcggttagggttttagggtcttcgtctcccgctcccccgggtccattcgcacccaacgcagctacagacggtctccatggcgaagaaaggggcgaagagaaagcagcagttgccgccggctcccacggcgaagaacgggagcaaggctgtgctcccactgaagggccgcgaagagagcgcccaagaagcagaaggttctggagtcctccgacgattctgatacggagcagcagcagcagcttcaggaggaggactccgacctcgacgtttcctctgattccgacgccgaggagctctctgggtcggacgctgaggctgacgagctctcgggctcggacgccgatgctgacggaggctcgacccgcggcgacgacatggatgatgacgacgacgacgaagatggtgaaagcgatgatgactctcttgcggacgacttcctcgctggtagcgacgaaggaagcgagggtggtgactctggtctggagtcagatgggtctgatgaccttgaggcaaagtcacgagcaattgacgagcagaaactcaaggcggaagaagatgcagaggaggaacttcaaaccaacataagatcagaatctgatgaattcagattacccacaacagaggagctggaggaagaggcacacagaccgcctaacctaccaaatctcaaaaggaggatatccgaaattgtacgagtgctctcaaacttcagcaaactgaggcagaaagatgttccgcgaaaagattatatcaatcaactgaaaactgacgtcatgtcatactacggatataatgattttcttgttgaagcgttaattgagatgttcccagctgttgagcttgttgagttactggaagcctttgagaaaagaccgcctgagtgcttgcggacaaatacactgaagagccggaggagggatcttgctgctgctcttataccaagaggatttaatttggacccgataggaaaatggtcaaaggtaggattagttgtctatgactccaccatttcagctggtgctactactgaatatatggctggacattacatgaaacaaggtgcaagttctttcttgccagtgatggcacttgctccacaggagaaggagcgaattgttgatatggcagctgctccaggcggtaagactacatacattggcgctcttatgaagaatactggaatcatctatgcaaatgagttcaatgagaaaaggttgcatgggcttatgggaaacatccatcgaatgggcgtgacaaataccataatttgtaactacgatggtaaagagctacccaaagttcttgggatgaattcggttgacagagtattgctggatgctccctgcacaggaactgggaccatttggaaggatctacagatcaaaacttcaaaggacattgaagacatcaggaactgtgcctttgtccaaaagcaattgctgctagctgctattgatttggttgatgccaactccaaaactggtggttacattgtttactcaacttgttcgataatgatcccggagaatgaggcagtgattgactatgcacttaaaaagagaaatgtaaaacttgtgccttgcgggttggattttgggcgtccaggattcatccggtaccgggaacatcggtttcatacttctttagaaaagacaagaagattttatcctcatgtcaataacatggatggattttttgtagccaagctgaaaaagttaagcaatacaatcccggtgacttctgagcagcctaaagcgtccgaaggagcagctgagaaggccgatggagaagatgagaaagttatttctaatgaacaggagacagctgttcctggtaaagatgaaaaaactgtgcagatgataaatcataaaaagagtaaggtgactaataaaagaacaagtgtgaccaaagaggctggagggcataaacgtgaacctaataggtcaggaaagcatctcaataaaaataaggataccgataccaaggaagttgatggccctgaaagcactgaaacaaatggagatgggaaagaagagcaacgtgaacaaaccaagcaaacgagccacaaaaggaagatagattctgttaaaactaaaaaatctggccctgtgagcttctcgggtgttcaagagaagaatcaggtgagtggcaagaagacaaaaaggaaatggcaattcaagctgaggcgagactgggaagctgaaaagaaaggtaccaagaggagtaaggtatgagtattcagatatccacaaatcccaatgaaatttgatgcgctgggcaacaaacaattttgaccaagcatgggtttgcacccaggatttttttttggatgtacgaaatagcgattgtaatttgttgtattttattcgatgtgcgtgtagacgagtgacatatctgtcagtgggaactgaagcaaattatcttgatgaatgccatgtgaatcctgctgcttaaatatgtcaaattttagtttctagtgcttatctcccagaaaatatgctgttgtttgtgttgt

SEQ ID NO: 123590 - DNA, 602 bp, Zea Mays
ttagaaactggtgttgtcagaatcaataagatctttgattactcctgcttattactgtactatttagtaataaattcacttgtcttgcagcaattgctgctagctgctattgatttggttgatgccaactccaaaactggtggttacattgtttactcaacttgttcgataatgatcccggagaatgaggcagtgattgactatgcacttaaaaagagaaatgtaaaacttgtgccttgcgggttggattttgggcgtccaggattcatccggtaccgggaacatcggtttcatacttctttagaaaagacaagaagattttatcctcatgtcaataacatggatggattttttgtagccaaggtactttccgtttgactgttttccagttcaacgcgcagcaattttcgaaagacaaatcatagtgttctctaagtataaagttgcatgttgacccctcgaaggttttgttgtatttgttttggcaaataattaaactgggcacttgcatgttggattggttatagtgcattggatctgaagtctcttatatatggactctaattgtaacatttgttctaaaataattgacatcctagaaa

SEQ ID NO: 123591 - DNA, 2347 bp, Zea Mays
cacgtcctcttccagtctccactctccacgtgttccatcccattctcctccccgcgccccgtccccctcgcctcgcttatcccccggacccggccgacccctgctctgctcgacgtgttggcaaaacctcctcctagtcctctcgcagaaggagcttgttttctttaccggcgcggcaacagcgaaagcttctcgatctctctccccgctgctccgccgctgggtacggtggttccgcgcctcggacgcgcccgtgcgggttggttggatccgagctctgtgcagaagcgccgccgcgacacggtcgaattccactggatccagctgctgaacggggtaccagaaggtggatttggtagtagcactgaacagcgagtggaatttctctaatactgtccaggatcatggttcctctctgtggtttctgtgggaaacaaaggtcaatgatctactgcagatcggatgcggcatcattgtgcttatcatgcgaccgtagcgttcattcagctaatgcactgtctcggcgtcatagaaggacccttctttgtgatcgttgtggtttacagcctgcatcagtccgatgtcttgaggacaacacatcactttgccaaaactgtgattggaatgggcatgatgcagcatcaggggcttctgggcataaaaggcaggccataaactgttactcagggtgcccatcatcagcagagctttcgagaatctggtcatttattatcgatatcccgactgtagctgctgagcccaactgtgaggatgggctaagcatgatgacaattgatgacagtgatgtgactaatcatcacggtgcttcagatgataaacgattgttggaaatagctaacacagcactcatgagtgatccaccttcacctgacaagcttaaacctctgataggctcttcttctggagatgggtttgatgttctgcctctagccacagatcagcctgctggaccagtttcagcgacacctaaggtaccttatgccagagatgacaataagttcaatgatggcatgtatgaagacttatgtgtggatgatgctgacctgacattcgagaattatgaagagctattcggtacctctcacattcgaatagaggaactctttgatgacgccggaattgacagttactttgaaatgaaggaaacaccgccttttgatttcaatgagcagcccaaaattgtgcagctacaatgtagcgatgtggtaccagctgattgtgcgatgtcaaacacaggggaaagggctgattccagcctttgtattcctgttaggcaggtcagatctagtatatcccatcccttatctggtttgactggtgagagcagcgctggagatcaccaagactgtggggtgtcaccaattctcctcatgggcgagccaccctggtattctcctggtccagaaggctcattagctggaggaagcagagatagtgctctcacacgatacaaggagaagaagaagaaaagaatgtttgacaagaagatcagatatgcttctcgcaaggctagggcagacgtgaggaagagggtcaagggacggtttataaaggctggcgaagcgtatgactatgatccactaagtcaaactagaagctactgagactgctgagccttgaatgcggctgcttgttgatcgtccagtgtcagcctagcaaatcttcaacggctcgtctgttgtaggtcgttgcgctacaggcaagattactggagagcacagcgattgcaaatttgcaatgcacgcatcagagcctgcagttgaaatacgaaaaaaaaaggttaagaagaggtaccaagggttgggatgaatgaaaaaaaaggaaatacgacgcgaacttgccggacgccttgtggtttggatggagcatacatattcattcttcagttcatctgcagatgagagtgatttggatcagctctgccgtctgtgcgttgaacagatgcagttatgggcgctcgtcctccggctgtgtctaccgctgcgtgcaaggacctgcgtcggccacggtgttcggcagtgagctgccaggattttacagtctgggtaacagcctaacaggatccccttatttattacctcccagcttgcgctctgtaacaatattatttgtgaagcacaacattctcttgtcaggagattgttttcgatcgtgtgtttatgtttgtagatggacgcaatattggtaaaaagaagtagccgtcatgaagtgtgttcttgtcggatcgcatatagcactggggatgagcaggagaatcacacatatttcatctggacgtcgaacctctaactattctatgccagagtaaccttcttgtgctttgtca

SEQ ID NO: 123592 - DNA, 1335 bp, Zea Mays
atgccgccacgcgctgcgaccgcgaagccgtcgtggctcggagacgcgctcctcttcgccgcgggtgccgtggtggccaccgtggcgctgctcgcgttcgccaacccgttcgctcagccggagggctactacggcgacggagcagtcccgtcctctggctctggctctggctcatcatccgtgggcgccgccggcggtggtggtggtgccgccgcccacacgttctacgacgacccggcgctggcgtacaccgtggaccggcccatcacggggtgggacgagaagcgcgccgggtggctgcgcgcgcacccggagttcgccggcggtggcgagaaggggcgcgtcctcatggtgtccggctcgcagccgacgccgtgccggtccccgggcggagaccacacgctgatgcggctgctcaagaacaaggccgactactgccgtctccacggcgtgcagctgctgtacaacatggcgctgctgcggccgtcgatggaccggtactgggccaagataccggtgatccgcgccgccatggtggcgcacccggaggcggagtgggtgtggtgggtcgactccgacgccgtgctcaccgacatggacttccgcctcccgctgcgccggtaccgcgcccacaacctcgtcgtccacggctggccgagcctcgtgttcgaggccagctcctggaccagcctcaacgccggcgtgttcctcatccggaactgccagtggtcgctcgacttcatggacgcgtgggccgccatgggtcccgactccccggactaccagcactggggcgccgtgctcaagtccacgttcaaggacaaggtgttcgacgagtcggacgaccagtccgcgctcgtgtacatgctgctgcaggagggcagccggtggcgggacaaggtgttcctggagagcggctactacttcgagggctactggatggagatcgtggggcggctcgccaacatgacggagaggtacgaggcgatggagcggcggccgggagctgccgcgctgcggaggcggcacgcggagagggagcacgcggagtacgcggtggcaaggaacgccgccctgggcggggccgggctggcggagaccggggtgcacgggtggcgccgcccgttcgtgacgcacttcacggggtgtcagccgtgcagtgggcagcgcaacgagcactactccggggacagctgcgaccagggcatgcgccgcgcgctcaacttcgccgacgaccaggtgctgagggcgtacggtttccggcacgccagttcgctcagtgacgacgtgcagccactgccgttcgattaccctgcaaaggcagtgactagctga

SEQ ID NO: 123593 - DNA, 370 bp, Zea Mays
gagcagtttagtttttttattgtttggttttgccaccagaaacaatgtccacatgggacttcaaaattttgtgtggaccaaccaacaccaagcagctgctgttggttccaaactgtccgagctacaagttatgactgaaatacaagacccattgatcatacgacaaatgaacatgacctagaaaattagaggatgcccaattactacaaatattttaatttcaaaggcaaaatttacactagagagtaacctccaccctcttccaagtatactctcgtgggttgtgttctatttgccattcaaaatttctctatacaagatatcaaataggccatacttcccacagttgcatagctgcaatcacttgtag

SEQ ID NO: 123594 - DNA, 1434 bp, Zea Mays
gtcctcgctccaccccctccaactcccgtcccctctccctccctccttccccgccgccgccgccgccatccaccaggtcagctccagcggacgacgtctcaacagtctcgcgccactgagatctcgccgagggagggagagcagcaggcagcagcagacatgtcgtcggggcggtacatggcgtactcgccctcgccgtcgaccaccccgcactccccccgcatccacggcctccgcaccccctctgccgccgtcgccgagcaggagaagtacctttccgaactgctcgcggagaggcacaagcttaccccgttcatcccagtgatcccacatagtgtacggttgctgaatcaagagttctccagcttatagctggcttggaggatctcaaggcagctcctctggactcattgtcaagaaaacaatgaaggtcgatatcccagtagacaaatatccaacatacaattttgttggccgcatccttggtccaagaggaaattccttgaagcgggtggaggcaaatacggattgccgcgtgctaataagaggtcgtggcagcatcaaagatccagcacgggaggaaatgatgcgagggaagccaggatatgagcatctgaatgaacctctccatatattggttgaggcagagctacctgttgacatcattgatgctcggctgatgcaagcccgcgagatccttcaagatctgctaaagcctgtggatgaatcccaggacttcttcaagaagcagcagctccgggagctcgcgatgcttaatggcaccctgcgtgaggaagggatgcagaggttcggttcagcgtcccctttccacaacagccttggaatgaagagagccaagacaagggggtgatgaagaaagtcgcaagcatcatgaagggagaacttaaatcatcatctattctgaggccaatcctgtgtacgaatggggggttgccttgctggctactggcccaatacggtctcgcgccaccagcatcgcggcgcgggcggccgtgcacgataaaacatatatctggagttgtgtctactgggggagttgagtttggttatgcgccatgggttgttacgctatatattgggctgtgcaggcttttgtagcaatgtggtttgtgtaaatgctcatttggagcgtttggaagctctcggcttgtatttctttcttatcgagatagtattcaaggacgctgtttgggatttgaagcaatgctctaaactgcgacaagcatggaggcttgatctgtttcattcgaatctcttgtttgacactatcaataaccagtgcatacaagtagtgaactggcgtcttaagttgcatcttcaattcggattctgctttgttgatgcaggataatctaaattaatgcatgtaatgcacttgaaattaatatatcttctttttccaaaaaaaaagaa

SEQ ID NO: 123595 - DNA, 1634 bp, Zea Mays
ctctctactcatcactccccagcgggcggccacgcgcacgcacccataaaagtcctcgctccaccccctccaactcccgtcccctctccctccctccttccccgccgccgccgccgccatccaccaggtcagctccagcggacgacgtctcaacagtctcgcgccactgagatctcgccgagggagggagagcagcaggcagcagcagacatgtcgtcggggcggtacatggcgtactcgccctcgccgtcgaccaccccgcactccccccgcatccacggcctccgcaccccctctgccgccgtcgccgagcaggagaagtacctttccgaactgctcgcggagaggcacaagcttaccccgttcatcccagtgatcccacatagtgtacggttgctgaatcaagaaatttttcgtgtttccacactattggagaacgcgtctcttttaaatcaaagtggccttgaacatggtagtccactaacaacgggaggattatattcaaacggagcagctactgacatgaatgggtggccatcagcatttcaatcagaaagttctccagcttatagctggcttggaggatctcaaggcagctcctctggactcattgtcaagaaaacaatgaaggtcgatatcccagtagacaaatatccaacatacaattttgttggccgcatccttggtccaagaggaaattccttgaagcgggtggaggcaaatacggattgccgcgtgctaataagaggtcgtggcagcatcaaagatccagcacgggaggaaatgatgcgagggaagccaggatatgagcatctgaatgaacctctccatatattggttgaggcagagctacctgttgacatcattgatgctcggctgatgcaagcccgcgagatccttcaagatctgctaaagcctgtggatgaatcccaggacttcttcaagaagcagcagctccgggagctcgcgatgcttaatggcaccctgcgtgaggaagggatgcagaggttcggttcagcgtcccctttccacaacagccttggaatgaagagagccaagacaagggggtgatgaagaaagtcgcaagcatcatgaagggagaacttaaatcatcatctattctgaggccaatcctgtgtacgaatggggggttgccttgctggctactggcccaatacggtctcgcgccaccagcatcgcggcgcgggcggccgtgcacgataaaacatatatctggagttgtgtctactgggggagttgagtttggttatgcgccatgggttgttacgctatatattgggctgtgcaggcttttgtagcaatgtggtttgtgtaaatgctcatttggagcgtttggaagctctcggcttgtatttctttcttatcgagatagtattcaaggacgctgtttgggatttgaagcaatgctctaaactgcgacaagcatggaggcttgatctgtttcattcgaatctcttgtttgacactatcaataaccagtgcatacaagtagtgaactggcgtcttaagttgcatcttcaattcggattctgctttgttgatgcaggataatctaaattaatgcatgtaatgcacttgaaattaatatatcttctttttccaaaaaaaaagaa

SEQ ID NO: 123596 - DNA, 854 bp, Zea Mays
ctcgctccaccccctccaactcccgtcccctctccctccctccttccccgccgccgccgccgccatccaccaggtcagctccagcggacgacgtctcaacagtctcgcgccactgagatctcgccgagggagggagagcagcaggcagcagcagacatgtcgtcggggcggtacatggcgtactcgccctcgccgtcgaccaccccgcactccccccgcatccacggcctccgcaccccctctgccgccgtcgccgagcaggagaagtacctttccgaactgctcgcggagaggcacaagcttaccccgttcatcccagtgatcccacatagtgtacggttgctgaatcaagaaatttttcgtgtttccacactattggagaacgcgtctcttttaaatcaaagtggccttgaacatggtagtccactaacaacgggaggattatattcaaacggagcagctactgacatgaatgggtggccatcagcatttcaatcagaaagttctccagcttatagctggcttggaggatctcaaggcagctcctctggactcattgtcaagaaaacaatgaaggtcgatatcccagtagacaaatatccaacatacaattttgttggccgcatccttggtccaagaggaaattccttgaagcgggtggaggcaaatacggattgccgcgtgctaataagaggtcgtggcagcatcaaagatccagcacgggtaaacattcagattagtgcctcttaatcttatggacttggtagttagatgtactcagaaatttgaagaattggagattatgtattaaatattttccccgaaggatcttgatgtatgaaatatgaactatg

SEQ ID NO: 123597 - DNA, 1037 bp, Zea Mays
agtaccaccaccgggagaccgggcaccgctcgcaacctccgtccacgccacggctactattcacttcacttgttaccgcgcgcggcgcgcctaccactactctctactcatcactccccagcgggcggccacgcgcacgcacccataaaagtcctcgctccaccccctccaactcccgtcccctctccctccctccttccccgccgccgccgccgccatccaccaggtcagctccagcggacgacgtctcaacagtctcgcgccactgagatctcgccgagggagggagagcagcaggcagcagcagacatgtcgtcggggcggtacatggcgtactcgccctcgccgtcgaccaccccgcactccccccgcatccacggcctccgcaccccctctgccgccgtcgccgagcaggagaagtacctttccgaactgctcgcggagaggcacaagcttaccccgttcatcccagtgatcccacatagtgtacggttgctgaatcaaggtgagatatggtgccgtcatagctggatgcactgatactgctgccacgcgttcagaatattctgttatgatgttgtttacttgttggtgttcgtgatgagctagacttacagcaaaatcaattattatttctcgccgtttctttgtggaactatcgaatatgaatccaactccccctcctcacaaacaaaaaacagagagaaaagaaatcgatattttatttgagtccccggcaccattggtctaagtcatccaacagattgccttgttatagattgacccaatggcaaatgtcttgtaaattgtaatcctgccattttgctattgtttcaaagtattggtttcataacacatatttgaagattcttcttgatttctatctactcctgggatatttagcattaatttagagacttgcatttctccgctgttgccataaattcctcaagagggttctggcaagtgcactgagtaccagttctctagaggcatgtgcccatctgatcactctactacaacaatgaaatcttacc

SEQ ID NO: 123598 - DNA, 2598 bp, Zea Mays
gtcaccaaggaagagggccgaagggcggaggaaggcgggtataaaatttggcgggttctcggttccgccggcgaagcgtttacttcttcggccgcgatctcgaggagggagggagcgagcgagcgggaagaaagaggggggcgcgcgcgcgcccatgttttgacctcgcccggcgtcgtctcggcagcgatctagatctgaggttctgaggttcttgattgagcggtcacaagacctgtcactgcaatggtcgccaagatgttgccatgctcatggatctcggcgtgcgtgctcgtgctgctcttgagcctgcacccgcgtgtccatgccttctacctccccggcaccttcatgcacacctactcccctggagaggtgatctcggccaaggtcaactcgctcacctctatcgagaccgagctgcccttcagctactacagcctgccatactgcaagcctctggatggcgtcaagaagagtgccgagaaccttggtgagatcctcatgggtgaccagatcgacaactctccataccgcttccaagttaatgtcaatgagtcagtattcctttgcaccacggacccgctcaccaaggagcaggccgagctgctcaagaggagggcacgagatctgtaccaggtcaacatggtcctggacaatttaccggtcatgcggttcaccgagcagaacggcgtgataatccagtggactgggttcccagttgggtacaacccgatagggagcaacgaggattatatcattaaccacctcaagttcagagtcttggtccatcagtaccaggcgcagggcgacgttgtggtcacgagtgaggatggtgttgcaatggtagagtctgatcgcaagagtgggttccagattgttgggtttgaggtcgtgccttgcagcgtaagacgtgatcctgagtccatgtccaagctcaagatgtatgacaaggtcgactctgtgaattgcccgttggagcttgagaaatctcaggcgatccgtgagaatgagcggatcacatttacctatgaggttgagtatgtcaagagcaacatcaagtggccgtccaggtgggatgcgtatctgaagatggatggtgccaaggtccactggttctcgatcatgaactcgatgatggttgtcttcttcctggctggtatcgtgtttgtcatattcttgaggacggttcgaagggacctgacaaggtatgaggagatggacaaggaggcacaagctcagatgaacgaggagctctcaggatggaaacttgttgttggggatgtcttcagagagcccagctttccaaagttgctgtgcgttatggtcgctgatggtatccagatcactggtatggcagttgttacaattgtgtttgctgccctgggatttctctcacctgcttccaggggaatgctcctgaccggaatgatcattctctacctcttccttggtatcattgccggatacgttggtgtccgtgtctggaggactatcaagggaacctcggaagggtggaaatctgttgcttggctgactgcatgcttcttccctgggattgtgttcatcatcctcactgtgcttaactccattctgtggggcaagaagagcactggagctctacccatctcactgttcttcaccctcctggccctgtggttctgcatctctgtgccactcacacttattggaggcttgctaggcacacgtgctgcaagcatcgactaccctgtccgaaccaaccagatcccacgagagatccctgagcgcaagttcccctcatggttgcttgtgctcggtgcgggaacattgccatttggtactctcttcattgagctcttcttcatcctttccagcatttggttgggaaggttctactatgtctttggcttcctgttcattgtcctcttcctgctggtcatagtctgtggtgaggtttctctggtcctgacctacatgcacctttgcgtggaggactggaaatggtggtggaaggccttctttgcttctggctctgtcgcattctatgtgttcctctactctattaactacctggtgttcgatctcaggagcctgagcggaccagtttctgccacactctaccttggctattccctgatcatggcccttgcaatcatgctctccactggcgccattggtttcctgctctccttctacttcgtccactacctcttctcgtctgttaagattgattagaggtgtgccccgctgcctctttctgcaatagagtcatctgatcatggtaatagttaccctcttagaaatactacacaataaatcaaatggaaaaaatggatacatggcaacgcccatggcttttggtcatgattaattcaatcatttagcgcagcacagtcactcaagttgaaacttaattcttaggaatgattgtaagttcttcagctatgtttattgcactttgtaataccattcagttttgcttgctctgggcatttgtgagcagcctttggttttggaacacttgagatctattcaatatgaaaatgaagctattcatttacagttcgttactattctgggaaggttatattgtaacatgggtgccacattagctgt

SEQ ID NO: 123599 - DNA, 213 bp, Zea Mays
atgaccactgcttgcagtggcactgtctctctcgaggacatctgcgcaagagagcccctgcttgccttctttgcactcgctggagaacaggcccggtggatacttaccatacaggttgatgtagctgaacattgtcgatgcacagtcgttgctctcgtcattgagttttggaactcaaagttcacggggcaacctgatgataagcacaggtag

SEQ ID NO: 123600 - DNA, 123 bp, Zea Mays
atggcgcacgacggtgatggcaggcactgcggcggaggcaggggttggtgggtggctgggtgcacgcgcgaaccggaagggtgtggccatggacgtgaaggagtggccaaggcacaatgttga

SEQ ID NO: 123601 - DNA, 1957 bp, Zea Mays
ggtgcctacacagtacacactgaccacgtcagtttcgccatggctacctcctccaccaccgcgctccactcgcagttccggccaccgctgcgcgctccccgccatctccgtccgcttccacactcgtattcctcctcctcccgcactcgcggctgcgctcctgtccgggcctcagcggcgtccgcatccgcgccggcccagcgggagatcgccgcgggcgtcccgtggggctgcgagatcgagtccctggagagcgcggcatcgttggagcggtggctcatagactcgggcctaccggagcaacgcttggccatccaacgcgtggacatcggcgagcgcggcctcgtcgccctcaagaacatacgcaagggggagaagctgctcttcgtgcccccttccctcgtcatcaccgccgattcagagtggggtcgccctgaggtgggagatgtgatgaaaaggaactccgtgccggactggccgcttatcgctacttacctcataagtgaagccagtttagagggctcgtcgaggtggatcagctacatagcagcgttgccgaggcagccttactcgcttttatactggactcgtgcagagctagatgcatacttagtggcctcaccaatcaggaaacgtgcaattcagaggataactgatgtgattgggacatacaacgaccttcgagaccgtatattttccaggcatccagatttgttccctgaagaggtgtataacatagagacatttctatggtcctttgggattctgttctcacgcctggttcgcttgccatcaatggatggaagggttgcactagttccttgggcagatatgcttaatcatagccccgaggtggaaacattcttggatttcgataagtcatcgcgaggaatagttttcaccactgaccgctcatatcaaccaggtgagcaggtatttatatcttatgggaagaaatccagtggtgagctattgctttcatatggttttgttccaaaagagggaacaaatccaaatgattcagttgaactgttggtgtctcttgataagtctgataattgctataaagagaaattacaagcactgaagcgaaatggtttgtcagaatctgaaagtttccctttgcgggtcacaggatggccagttgagctgatggcttatgccttccttgtggtcagtccacctgacatgagtcaatgctttgaggagatggctgctgctgcatctaataaaacttcatccaaacctggattgaattatcctgacctggaagaacaggcccttcagtttatcttggactgctgtgaatctaatatagaaaaatatacaaagtacttagagggtggcgctggctctccagaagttccaatgaatgcaaagcaagccaacagaacattactgctaaaacagctagcaagagatctgtgcatcagtgaacggagaatcctgtatcgcacacaatatatattgcgtagaagattgagggacatgagaggcggcgaacttagagctctgtcacttttcaacgggctgagaaaactctttaaataaatggatcggctatcttatcttggcagatcttactggacagatttgatttctccagtaacatggtgctttgaccttgccgccaaagcctcagatacttgtatgccaaatcagactgcagtccaggctctcggccgcaaatttcatctagatgctagaaacaagtaaaccttcgatgaaggatagctgtgcgttgagattgaacaacccagagcttatatgtatgtgtgtaatgtagattcagtccaaccatggagtcgttttacgctaggtgcgagcctggccttctgttacgtatataattataaatccagtagccagcaaggcaaccccccacccccatgtgtacacaggatcgatctcagaacagatgatttggttctcccttcatcatgcttcaactttgtcc

SEQ ID NO: 123602 - DNA, 2145 bp, Zea Mays
agcggataagcccccgcgccggtgcctacacagtacacactgaccacgtcagtttcgccatggctacctcctccaccaccgcgctccactcgcagttccggccaccgctgcgcgctccccgccatctccgtccgcttccacactcgtattcctcctcctcccgcactcgcggctgcgctcctgtccgggcctcagcggcgtccgcatccgcgccggcccagcgggagatcgccgcgggcgtcccgtggggctgcgagatcgagtccctggagagcgcggcatcgttggagcggtggctcatagactcgggcctaccggagcaacgcttggccatccaacgcgtggacatcggcgagcgcggcctcgtcgccctcaagaacatacgcaagggggagaagctgctcttcgtgcccccttccctcgtcatcaccgccgattcagagtggggtcgccctgaggtgggagatgtgatgaaaaggaactccgtgccggactggccgcttatcgctacttacctcataagtgaagccagtttagagggctcgtcgaggtggatcagctacatagcagcgttgccgaggcagccttactcgcttttatactggactcgtgcagagctagatgcatacttagtggcctcaccaatcaggaaacgtgcaattcagaggataactgatgtgattgggacatacaacgaccttcgagaccgtatattttccaggcatccagatttgttccctgaagaggtgtataacatagagacatttctatggtcctttgggattctgttctcacgcctggttcgcttgccatcaatggatggaagggttgcactagttccttgggcagatatgcttaatcatagccccgaggtggaaacattcttggatttcgataagtcatcgcgaggaatagttttcaccactgaccgctcatatcaaccaggtatttatatcttatgggaagaaatccagtggtgagctattgctttcatatggttttgttccaaaagagggaacaaatccaaatgattcagttgaactgttggtgtctcttgataagtctgataattgctataaagagaaattacaagcactgaagcgaaatggtttgtcagaatctgaaagtttccctttgcgggtcacaggatggccagttgagctgatggcttatgccttccttgtggtcagtccacctgacatgagtcaatgctttgaggagatggctgctgctgcatctaataaaacttcatccaaacctggattgaattatcctgacctggaagaacaggcccttcagtttatcttggactgctgtgaatctaatatagaaaaatatacaaagtacttagaggtgacatcctttccatgccatctcttgcgcactacaacctctcataagatcttgacaatctgttatcctatcatcatcatcatcgtcatcatcatttgatcctgtcatcctttgataaatgcttttgtacacaaatcaccgtgatcagttttcagagtgaaccgataatgtttcagggtggcgctggctctccagaagttccaatgaatgcaaagcaagccaacagaacattactgctaaaacagctagcaagagatctgtgcatcagtgaacggagaatcctgtatcgcacacaatatatattgcgtagaagattgagggacatgagaggcggcgaacttagagctctgtcacttttcaacgggctgagaaaactctttaaataaatggatcggctatcttatcttggcagatcttactggacagatttgatttctccagtaacatggtgctttgaccttgccgccaaagcctcagatacttgtatgccaaatcagactgcagtccaggctctcggccgcaaatttcatctagatgctagaaacaagtaaaccttcgatgaaggatagctgtgcgttgagattgaacaacccagagcttatatgtatgtgtgtaatgtagattcagtccaaccatggagtcgttttacgctaggtgcgagcctggccttctgttacgtatataattataaatccagtagccagcaaggcaaccccccacccccatgtgtacacaggatcgatctcagaacagatgatttggttctcccttcatcatgcttcaactttgtcc

SEQ ID NO: 123603 - DNA, 1969 bp, Zea Mays
agcggataagcccccgcgccggtgcctacacagtacacactgaccacgtcagtttcgccatggctacctcctccaccaccgcgctccactcgcagttccggccaccgctgcgcgctccccgccatctccgtccgcttccacactcgtattcctcctcctcccgcactcgcggctgcgctcctgtccgggcctcagcggcgtccgcatccgcgccggcccagcgggagatcgccgcgggcgtcccgtggggctgcgagatcgagtccctggagagcgcggcatcgttggagcggtggctcatagactcgggcctaccggagcaacgcttggccatccaacgcgtggacatcggcgagcgcggcctcgtcgccctcaagaacatacgcaagggggagaagctgctcttcgtgcccccttccctcgtcatcaccgccgattcagagtggggtcgccctgaggtgggagatgtgatgaaaaggaactccgtgccggactggccgcttatcgctacttacctcataagtgaagccagtttagagggctcgtcgaggtggatcagctacatagcagcgttgccgaggcagccttactcgcttttatactggactcgtgcagagctagatgcatacttagtggcctcaccaatcaggaaacgtgcaattcagaggataactgatgtgattgggacatacaacgaccttcgagaccgtatattttccaggcatccagatttgttccctgaagaggtgtataacatagagacatttctatggtcctttgggattctgttctcacgcctggttcgcttgccatcaatggatggaagggttgcactagttccttgggcagatatgcttaatcatagccccgaggtggaaacattcttggatttcgataagtcatcgcgaggaatagttttcaccactgaccgctcatatcaaccaggtatttatatcttatgggaagaaatccagtggtgagctattgctttcatatggttttgttccaaaagagggaacaaatccaaatgattcagttgaactgttggtgtctcttgataagtctgataattgctataaagagaaattacaagcactgaagcgaaatggtttgtcagaatctgaaagtttccctttgcgggtcacaggatggccagttgagctgatggcttatgccttccttgtggtcagtccacctgacatgagtcaatgctttgaggagatggctgctgctgcatctaataaaacttcatccaaacctggattgaattatcctgacctggaagaacaggcccttcagtttatcttggactgctgtgaatctaatatagaaaaatatacaaagtacttagagggtggcgctggctctccagaagttccaatgaatgcaaagcaagccaacagaacattactgctaaaacagctagcaagagatctgtgcatcagtgaacggagaatcctgtatcgcacacaatatatattgcgtagaagattgagggacatgagaggcggcgaacttagagctctgtcacttttcaacgggctgagaaaactctttaaataaatggatcggctatcttatcttggcagatcttactggacagatttgatttctccagtaacatggtgctttgaccttgccgccaaagcctcagatacttgtatgccaaatcagactgcagtccaggctctcggccgcaaatttcatctagatgctagaaacaagtaaaccttcgatgaaggatagctgtgcgttgagattgaacaacccagagcttatatgtatgtgtgtaatgtagattcagtccaaccatggagtcgttttacgctaggtgcgagcctggccttctgttacgtatataattataaatccagtagccagcaaggcaaccccccacccccatgtgtacacaggatcgatctcagaacagatgatttggttctcccttcatcatgcttcaactttgtcc

SEQ ID NO: 123604 - DNA, 625 bp, Zea Mays
atggagcaagatgttggtggtgacaacagtcattcgcagttcatcaacaatgatctgaggattatgcccgctgatgaggatgggccatctcagtccattaacaatggtagcagtgctgcccctattaacttagaggagggtgctgctaccaacaatggtactgaagatgcaaatacttcagaaaatgttgatggtaagaagcataaaagaatttgcacatctaaagtgtggcaggattttgaaccactatataagactgtagacggcaagaggatcaggtatggtggtaagtgtcactggtgcaaatgtacattgactgctgtgtctactagtggtactggtcatttgcttaggcatcaacgtgattgcaaagttaagctttctaagcagggcaagcagtcagtccttaagtttaaccctgatggttctgtgcgtaactgggattactgtcctgatcgtgctagaactcagatgtgtaggttgattgctaggcttgatcttccacttaattttgctgagtcacctgcttttgaggagtatattagactatctcataatcctgtctttaagaaagtatctcatcaaactactgctagggactttgtcaagttctttaatgatcgtc

SEQ ID NO: 123605 - DNA, 1645 bp, Zea Mays
accaaacaaacccttatcttctttatcgaaacaggttccgtgcgcacccggtttgctgttcctgccccaactctccctctcggtgccttcacgcatcaccccaccgctccctgcaactacaactctgtttcacatcgtccgctcgtcatactcccgaggccccgatccccctttcatttcaactcgcatctcccgcgccgcgccgccccagcccggcagcccaaatggacctgccagtggtagatctcacgccgtatctcggggccgcagccggcggcccggccgcgtcgggcgtggaggagctgcgcgcgctgtgcgccacagtgagcgctagtctgcgggacacgggggcgctgctggtgatggacccgcgctgctccgccgcggacaacgaccgcttcctcgacgtcgtcgagcgctacttcgcccgatccgccgacgcaaagcgcctccaggaacggccccacctccactaccaggttggtgtcacacccgaaggggtggaggtgcctcgcagtttggtcgacaagaacatgcaggagaagatcaggagcatgcctaaggactttaggccagccactcctaaagggccggacccgaaatggcgatacatgtggagagtgggtcctcgccctacaaacacccgttttaaggagctgaactcagaacctgttatccctgagggattacctgagtgggaagagatgatggattcctggggttctaaaatgatttctgcaattgaggttgttgctgagatggctgcaataggctttggcctatcgaaggatgcatttacttctttgatgaaagagggaccacatctcctcgcaccaactggaagtgacctgcagcgtcatggttctgagggcaccgtttttgctggattccactatgatcttaatttcttgacgatacatggccgaagtagattcccaggccttaacatctggttaaggaatggtaaaaagatggaggtgaaagtccctgttggttgccttctaattcagtctggaaaacagctggaatggcttactggtggcgattgtttggctggaatgcatgaggtagtggtaactaagaggacactagaggccatagcgctagcgaaagaacagaatagaagcttgtggagggtttcatcaacactgttcgcgcacattgcttcggatgcaattcttaagccgctcggccactttgctgaaacacctgatgctcattcctatccacctatatgcgctggggattatgtcgagcaggagctttcagtgattaacctgaagggaaaggattaagtatagactctatgcagctggtgcatctggatatcttatgaattgacagatatcaggatgcaacactaaatcaccccaactgacaattgggtatccgtttccaaatgctgctgtactgaaggtggttaagttggcccgaagacatgcttgttcattgcttgctcttgttaagatagtggatacccttctttgtgaaccacatatcacttatgaaaataaaatgtatagcttcctcataaatctgtctttctccttgaaactgatatccggctagttcagacatctgtagtgtctgatgtagttccgaaacagagaaacttttcgatcgaccaaaaatatacttctcacgc

SEQ ID NO: 123606 - DNA, 1638 bp, Zea Mays
aaacaggttccgtgcgcacccggtttgctgttcctgccccaactctccctctcggtgccttcacgcatcaccccaccgctccctgcaactacaactctgtttcacatcgtccgctcgtcatactcccgaggccccgatccccctttcatttcaactcgcatctcccgcgccgcgccgccccagcccggcagcccaaatggacctgccagtggtagatctcacgccgtatctcggggccgcagccggcggcccggccgcgtcgggcgtggaggagctgcgcgcgctgtgcgccacagtgagcgctagtctgcgggacacgggggcgctgctggtgatggacccgcgctgctccgccgcggacaacgaccgcttcctcgacgtcgtcgagcgctacttcgcccgatccgccgacgcaaagcgcctccaggaacggccccacctccactaccaggttggtgtcacacccgaaggggtggaggtgcctcgcagtttggtcgacaagaacatgcaggagaagatcaggagcatgcctaaggactttaggccagccactcctaaagggccggacccgaaatggcgatacatgtggagagtgggtcctcgccctacaaacacccgttttaaggagctgaactcagaacctgttatccctgagggattacctgagtgggaagagatgatggattcctggggttctaaaatgatttctgcaattgaggtatatatatctatcatgatagcacctttttatgaacagtattcaatgtttgatgtcttatacgtctcttttatgctctacactacacccatgcctgtatggttatgttttcataggttgttgctgagatggctgcaataggctttggcctatcgaaggatgcatttacttctttgatgaaagagggaccacatctcctcgcaccaactggaagtgacctgcagcgtcatggttctgagggcaccgtttttgctggattccactatgatcttaatttcttgacgatacatggccgaagtagattcccaggccttaacatctggttaaggaatggtaaaaagatggaggtgaaagtccctgttggttgccttctaattcagtctggaaaacagctggaatggcttactggtggcgattgtttggctggaatgcatgaggtagtggtaactaagaggacactagaggccatagcgctagcgaaagaacagaatagaagcttgtggagggtttcatcaacactgttcgcgcacattgcttcggatgcaattcttaagccgctcggccactttgctgaaacacctgatgctcattcctatccacctatatgcgctggggattatgtcgagcaggagctttcagtgattaacctgaagggaaaggattaagtatagactctatgcagctggtgcatctggatatcttatgaattgacagatatcaggatgcaacactaaatcaccccaactgacaattgggtatccgtttccaaatgctgctgtactgaaggtggttaagttggcccgaagacatgcttgttcattgcttgctcttgttaagatagtggatacccttctttgtgaaccacatatcacttatgaaaataaaatgtatagcttcctcataaatctgtctttctcctt

SEQ ID NO: 123607 - DNA, 1146 bp, Zea Mays
ggagtagagggcctacctagatgggcctaattattacacatgggctggccatgtatgtgcgcggggtggcccggaacattaggtagccctaactcgcgccgctataaaatggcgactctggcgatcagggtttatctcgactccgcaacctccctctagcccgagcgaagaagaaaggagggtgctctgccggcggcggagcggagatgtccgagaggaggcgcggcgccggcgccggcaccggcacccgcaaggatgaggtggtgacccgcgagtacaccatcaacctccacaagcgcctccacggatgcaccttcaagaagaaggcaccgaatgccatcaaggagatcaggaagttcgcccagaagaccatgggtaccaccgatgtccggatcgatgtgaagctcaacaagcacgtctggagcagcggtatccggagtgtgccgaggcgagtccgtgtcaggattgcccgcaagaggaacgacgaggaagacgccaaggaggggcagtactctctggtcacagtagctgagatccctccggagggtctcaaaggtttgggaactaaggttgttgaggatgaggattaagtcgaagggttcaatcatctagcacttaaatgcataccatgagagcaagtttgataatgctgcttcagcttgttatctatgccggatgacgtgtgatagaagtttcgagacgttgctcctttcaagttttgaaattttgactatatgccatgccaagtctgtgttatctttacacattccgagcatctgtatttattatgctgagacagactcatcaatttttgcttgtacaacctgatatgactgatgtagccatgtgttttaagattttttgacgcatgaaagatcacttgtagccctgtctgtcacagctgccagtttgttcttgacagatcacttgtaagccctgtttgtcgcagcagctgctttttagagaagcaacttatcagagaagctggtgaaaaacattttagactatctgcagtggttcatcctaaatttctcaccctataatcacttttttgcgtcacaatattaacattttatcccctactttttttatctcctgtaatggtttcccctaaaatctctccctatatcccactacaactataaa

SEQ ID NO: 123608 - DNA, 1988 bp, Zea Mays
ggagtagagggcctacctagatgggcctaattattacacatgggctggccatgtatgtgcgcggggtggcccggaacattaggtagccctaactcgcgccgctataaaatggcgactctggcgatcagggtttatctcgactccgcaacctccctctagcccgagcgaagaagaaaggagggtgctctgccggcggcggagcggagatgtccgagaggaggcgcggcgccggcgccggcaccggcacccgcaaggatgaggtggtgacccgcgagtacaccatcaacctccacaagcgcctccacggatggtactaccaccaactttctcttccatttcccaagcttattagatccacgtgttggggagcatagtgttgttctatagccgcgtcgggcttacacatcagatgctggtgcggagggttgcggcctgtgagcactatgtgggcttgcgaatggtcgatacacctgatcggatgcattatcttttaccagctagactacagtcgggatcacctgaccgagcgggaatagcgtgtagttgatcttgctcttgtatctgatcccacattcatctcgcgtttgtcttgttgtttgcctttgtgagtggtggcagtagttgcattttgttctgtgggcgccgttcgattaggtgctactcgggtatagtcaggtgcctgccttatttcattggctgaacacagttacatgcccggtatatacaatctgctcatcgttacacgtattgcctcataatgctactatgtgttccatttgggcagtatattttcctcccataatacacattgtatttgtagttgcatcgtatttttttgaaggtgtttctctgatacagtaatatcttttgtattgtccggttatagtcaggtatctgtcttatacaatctcgtggttgatacagttacatgaccggtacacagatgtcgctcatcgttacacatgttgcctcgacatgctgtcatgtgttccatttgagtgctacatgcacattgcagaagtacaatatcatgatgttccattctgttaaatctcttttgaacacgcaaaattatattgtatacagcactaaccatgcttcagttgatcttgtcagtttagtcaacactaattaatctacaattgtatgcagcaccttcaagaagaaggcaccgaatgccatcaaggagatcaggaagttcgcccagaagaccatgggtaccaccgatgtccggatcgatgtgaagctcaacaagcacgtctggagcagcggtatccggagtgtgccgaggcgagtccgtgtcaggattgcccgcaagaggaacgacgaggaagacgccaaggaggggcagtactctctggtcacagtagctgagatccctccggagggtctcaaaggtttgggaactaaggttgttgaggatgaggattaagtcgaagggttcaatcatctagcacttaaatgcataccatgagagcaagtttgataatgctgcttcagcttgttatctatgccggatgacgtgtgatagaagtttcgagacgttgctcctttcaagttttgaaattttgactatatgccatgccaagtctgtgttatctttacacattccgagcatctgtatttattatgctgagacagactcatcaatttttgcttgtacaacctgatatgactgatgtagccatgtgttttaagattttttgacgcatgaaagatcacttgtagccctgtctgtcacagctgccagtttgttcttgacagatcacttgtaagccctgtttgtcgcagcagctgctttttagagaagcaacttatcagagaagctggtgaaaaacattttagactatctgcagtggttcatcctaaatttctcaccctataatcacttttttgcgtcacaatattaacattttatcccctactttttttatctcctgtaatggtttcccctaaaatctctccctatatcccactacaactataaa

SEQ ID NO: 123609 - DNA, 2518 bp, Zea Mays
taaagaattgtggttgtagccaatttattaacaaacaggatatcggtatggagctggttcatttaaaaggaagatactacattttaccaattggttctacaagctgaagattaatatcattgtaatagaaatgtctcgaacaatcatattttaatctcccctctcccgtgtacaatcaccaaaactaagcataatccaacatccaaaagcaccaaaatatctttagttcgaagtctacttgcctattagcagtgcatttttattccttttgatactgaaaactaagtatccttccggcagaggtctgaacttaaaatcatctaataaacaccgcagcaactgacgcgacagacactcccagagcgcaagagatggccatcacccgtgtccggagcagcatgaggttaacgttcttcgtagcctggaggcacaacgtgagcacctgcagcctcgcgttggcctccatcttctggaagaaggcgatgggcttgatggcgcggcgtagcaccagggcgaccgcgaaggggaacgcgaacgccgccactccctgcactgccgcggcggatccgacaccgagaggcggagcaccgtaagatatccacgcgccggcggcgaggtgcgctcctccgaggagcgcgagcgagccgctgaggcgctgcacggtgcggcggagcgcgtcgagctcccgccgcgtttcgtcggccagcggcgacgtatcgcgctccaccgtggggccctcgatctcctggtgccgcatctcatccggcgacgcgggcgcggatggggcgccttggctgggctctgatgtcgtggaggaggggttggggctggggtttgagggcgcggagaagaagcggcggccgggattcaggaggatgaaggggtcgcggccatgggtgaatgttttaggtatggggaagtgcgcggcggcgacagccgttgggctcaggaggcggtgggagaggcgcgagagcgccatcggaggcggagcctgcaacaacgctgcaagcctgacgaggaaaggtcgcggcggcggcggctcgcctgtttcggatttctgaaaagttgtctcccgtttccccagtcaagagtcaaggcgtaatctgggaatacgtttgctcccctcgtatgcgggtagggacacgctcgccggcaggttcgggctgccttcctccacaatccagcggctgccgcacggctcggcctcggtcctacagctacaagaaccatctctctctctctctctcctctcactcactcactccccccattcctacctttcttctcctccacctcgtcaggcaccctcaaaccctcgccgcaagaaagaagaggtcaatcaaatcgaaccaaaacctcccgaccccacaaggccaagctcatttccatggtggtgtacacgcaggaacatgtgtaccggcacccgtgggaccgggtgacagcggcggcgtggcgcaagttcacggatccggcctcctgtacggcgctctcccacgtcgcagacgttcacaccctacaccgccgcctcgactccgacacgggccgcctccaggccgcgcgctccatcaccgtgcggtccccgccgctccctttcgtcctgcgccgactcctcccgtccgccgcggcgtccccaaacggcgccgcgctctgccactgcgtcgagacctcgctcgtggacgcccagcgccgcgccatggacgtcgtcgtgcgcaacgtcagcctccggggcctcatcgaggtcgaggagcgcgcctcctacagaccacatccggaccggcccgacgactggacgcagttcaggcaggagaccacgatccggtgccgcccgctcgcggccctcgccgccgtcgctgagaaggtcgagacccggtgcgccgagaggtttctgcagaatagcgccaaggggagggaggtcgtcgagcggatctgccggtacctcgaggccgagtccgccggcgccgcgccctccgtaacctgatctcgtttgcacatctttgcttgatccgaacggatccaagggttcctcgatctgtgctgtgtgcgcccggataaatcgaaccccgcctgctaggcgcttgcttttcttcattttttgtgtgtgaaatgatgagctgaattcggaatagaataaagcttctggtcatacttgtttcttctgttgtaagtatgtggaaccgctttaacctccctgattttgatcatgagccttgccaaattctaatttgctaataaatttaaatgctatgaaatcactgatgtttgttgtgttattttgattgactgaatggttgctcatgctttgattgactagatttagtggtgttctcattcacagaaaagggtgaggtcattgatctgttgttctttaagctggtagcagattgtccccttggttgattggtaagaatagtatgacatcgtgaagtaaaatactttccatatctagtctattctagcaatgtgtcattcttgaagctgggcaggtagtgtttaatggtagataccccatagctttttg

SEQ ID NO: 123610 - DNA, 899 bp, Zea Mays
cctcgcctccgtagtccgtactacccaggcaagcgatcgtcggagcagagagagacttcctcgcctccatcccatcccgccgccgccgtctctacggtcgctaataagccgccgcatccagggatggagatgaagaagatcgcctgcgccgtcctcgtcgccgcctcggccaccgtggcgctggccgcggaggcgccggctccgtctcccaccagcggctcctccgcggtcgcacccgccatcgtcggggccgccgtggcctccttcttcgcgtactacattcactgagccgccggacgaggagccggagccggagggaagagaccaaggtggggggagagacttggctgcgctgcgctgctctgctgctcccgcgcattcccgatgcgtgggcgtgctctgattgggcacggcggtggcagtggcacaccttcgtcttccttttgtttgttttttttccttcctctttctacttgattttcatttaacgaattggtatcgctgatgcaccagtttaatttggtgccctgttatttgttctttccctcgagtgagggatcgacacctgtaccattgcttgccatttgtctggaccagttcaacaattcgatttaaccatcacgtatatgtgtgctttggataaacattattacattaccctcatggtgaggggattgccggtttgttatgccttaatatgcgtgattgagaatgtgcttgccgtgtgccctgctctgctttttaactgctcttataaaaagtcgtatatttgagtcctaaaaattaaaatagaatctgatttcaaatatttaaaactatagaaaatatttacggttcaaacagttgagtcatatatcatattattagaaaatagattattttatttaagaaaataaaaa

SEQ ID NO: 123611 - DNA, 927 bp, Zea Mays
atggagctccagcagaataattgttcagccttcccgaacttcaacttcagcacctcgcaccatggggactacgtcggctttgcatccgagccactttgccttgtcggcctggacatcgtgtccgtttccgagccccatggagaaaccgccgccgagttcatcagcaacttctcttcgtgccttactgaccatgagtggaactgcatcgttcgtgctggcactcccagggacgtgctgacagagttctacagagaaccagttatcttctgcgctagacagtccagaagaagctttcactctgcagacagtggaagagcttacacaatctcaggggtaactggccaacagtgtagtgcagccaaggcagcagagcgtgaggtgcactaccaggcaacaagaaaaaaaaatatggagctccaggcaaggtgcgtctgcgtcgtcgcgatgctcctggtggccagcttcgcggggctggatacggcgcacggcgcgggggagtgtggccgcgtcccggtggaccaggcggtgctcaagcttgccccgtgcgcggcggccacgcagaacctgcgcgctgcggtgccgccgagctgctgcgcgccatcgggcgcgtccccaagtgcctgtgtgtcgtcatgctgtccggcaccagggagaggagcgccgtcgagcgctcagcgccgggcagagaagaccgtcgggccagggagctccaaccaatcagcgatggagcacagggccgaggaccggggagagggagcgctcggggagaggaggagcgcccaggagagccgtcggacaagacgaactccagctcgagcgccgatccgttctaagaaacgggacagtgagatggactgccgtaacagcgactgcggatcggctaaatcacaccccgatagcaaaattccgaagttgaaaggattataa

SEQ ID NO: 123612 - DNA, 795 bp, Zea Mays
atggcggtaattttcgaccaccaacacctacacttccttcctggcctacaccgtagaaagcagagaagcattcctctcctgccctcactctggttggtgatgctccaatttttacccctaacccccaaggcgacaactttcaagatccagaagtcaaatgccatgccacaacaattagaggatgagttcaagagatttggtgccattaaacatgaatgcatccaagttagaagtaataaggaggcggtcgcgcctgctctgccgaaagtgcgggggcacatcggcagcgcctacggggaggaggacgccagggaagccggctcctccagcctcttcggcggtgacggctcctcggacgacacgcatccgagctccggctcgggccaccgcagcagcgtcgcgtcgagccagaagagcctggatgaatttgaatttggtgtaacctgggatggcgatggactgcaggaggacgaagtggagcaaggaaagatctttcttggcgtgtctagacttttcagaggctcagtggtgacatcagctgagaacaccatgcggcaaaactgcacactcctagctgttctttgtggggagtttgctgagaagcagcggacaccagcttccctggcgctaggcacaaagcggttgcggctgtcataccctttccttgagctcgcttcgtttgggagactggaggggcagcagcaagagaatgaggagattggcacgcttgtctggggtgatacagatttatctgacccgcagatgtttgtctcacacctttgtatgagtttttaa

SEQ ID NO: 123613 - DNA, 2205 bp, Zea Mays
ccaataatccaatcactcattcctccctctccctccctctctcaatcgcgatgcaagccgcgttattttgggggtccgtaggcaagaacagggaacgcacggcacgctccactccaggaagccacaaaaaaaaaaagacacccacgctcaggcgaatgcgatggcattgcgcagccatggaacggccgatcaccagagccattggatacctaccacccctcgatgcgtctcatcaaggacttggacggaggaccaggacgtccatcgatcgctggcaatgcatgccgcatgcgacacacgacgacacgagacggaacttgccaaatgctcccagcaccacgcccgaaaatcaggtgggtaccctgctagcgcggcctagcgtcctgacgcggggaccggccggcccacgcctcagccgaggctcggcacggcagtcggcggaactgcactgcacacgctcccaggcagcgccgccgcagctgcagctcgtcggcacagcactccgtgtcctcgtcgctttggccgtgcgcggaaggcacagtggagcgggcaggcaccggtcgtccggatctgcgctgtccgcgcgagcggcgccacgccagcgagccgaccacgattttatgggagaattcagacagcgacgaccgtacctgcatgagcgggctcgtgctcatgcgcgaggtttttctggctggatgcggccggaccgccaattcgcgaaacaagcggggcaagcgctgtactgctgtccgcctgtccccgacgcgggctgtctcagtgcactgctcagcacagcaggagtgcagtgagcctctgagccagcaagtgagacagtgacccccatgagaacgatgctcgcgtgcaagtgcactgtacccggcgtaggcgtagcgttgacgtttcggctgggcattctcaggttcgcctcgcctgtcacggagggcataggtcagctcactcatacggccgtacgtaggttttactgaagaacacgcaaaagtcgagaggatcgtagggccaaatgtgaagaagcaacactgcaacagcgaatataggaactggtggaaagaaagtcacaagagtgccaatgtaggcagctatcagcttgcccaaggcccaaggtgaaggttttccatgcatactggtttggcggtgattatacggaggctgcatattttgcatgtctgcatgactgcatattttgctttagcgctgagataaaaccataaacgaccccatatgaatatgagagacaaaagctaaaatttatcccggccaccatgttaaagaacgagctgtttgcgttctcgctcacagtgcatgtaaataaatagaaaggcaaaggcactgtatgtacaccatcgtggactcgtggtttcgacgtgaagtctcaagaaagacaccaaacttaaaacaggtcgagaaaaaatcgtcacagctgacaagggaaaaacacacacagatcaacccaagcacaaacgtgcacaccatgatctggaaaccgtgagattatccacagccctctgcaagctgggagtaatatagtactacgtacgaaggaaatgattgcaggcgagggagcaaaaactactcgctctctccttcggttccaaaatagataacgtttttttatttttagataccatatttagctacttatattgtttttttataaataataaattaaataaatctatgtatagtaataaaataagtcgtaataaaataaataatacctatgtaaaaaaacttgaataagatgaatagccaaacaagatgtctagaattcaaaaaatctcactgaacgagagagcaagagcaagaagatgattgcttgctgcaactggggagtaataagtaatgtgagcgagaatgcgagatcgaatgcctggcctgcccttgtatgccgcgacgccgatacgtgtaggccgccggttaccgccgcggaatttcgacgccgctgttctcctcctccgttcttcggtgatggaaagacggagctgccggcaatggcggagacggcgaaggaaccgtagcttccggcttgacttgcatcgtcgtgcctagctcggtgcctgggccttgcgacgaggggtggagggagaggtgcgcactgggccgtggagaagggagggagagtcggagagaagggacgatatatgatacagctcagtagcagtagcccagtaggggagcagcagcaag

SEQ ID NO: 123614 - DNA, 222 bp, Zea Mays
atggaggaacaaatatcaacaggtgttgctacgttcttcaccaccacaccttcggagcatgcccagcccacggaatgcgccacaagcagtacagcaaccgcgccgagtcctggacatgtcaacggagtctgttgccatgctcgatggacctctgccggcgcagccgcccaggtggttgctgcggctgcgctagctcggcaagacggcaatggagataaatga

SEQ ID NO: 123615 - DNA, 1679 bp, Zea Mays
ttcttaagctgcaacttactccatcctcagaccgagaagaaagaaataacggcacaccgtaccatggcatctatttctaagtttctacttgcactgttgttcagctatcacaccctcattgctcacgcagcagacgatcgccgccacaaggttctgtccgttggctctctgatgaagtcttccacagcatgctccgagcccaaagtgactccaccatccaccggcgtcacggtgccgttgcaccaccggtacgacccatgctcgcctgtaccctccaagaaggtgcccaccttggaggagcggctccggcgcgaccagcttcgagccgcctacatcaaacggaagttctctggcgccggcgacatcgagcaatcggacgccgctaccgtgccgaccacgctgggcacctccctgagcacgttggagtacgtgatcaccgtcggcatcggctcgccggccgtgacccagaccatgtccatggacaccggcagcgacgtgtcgtgggtgcagtgcaagccgtgttcgcagtgccactccgaggtggactcgctcttcgaccccagctcgtcgagcacctactcgcccttctcctgcagctccgccccctgcgcgcagctcagccagagccaggaggggaacgggtgcatgagctcccagtgccagtacatcgtcaactacggcgatagctcgagcacgaccgggacctacagctccgacacgctcacgcttggctccagcgccatgacggacttccagttcgggtgcagccagtcggagtccggcggcttcaacgaccaaaccgacgggctcatggggctcggcggcggcgcgcagtctctcgcgtcccagacggcggggacctttggcacggccttctcttactgcctcccgccaacttcgggttcgtccggattcctcactcttggaacgggaagttcgggtttcgtgaagacgccgatgctcaggagcacccagatcccgacctactacgtcgtgctccttgagtccatcaaggtgggaagtcagcagctcaacctacctacctcggtcttctccgccgggtcgctcatggactccggtacaatcatcacgaggctgccgccgacggcctactcggcgctgtcgtcggcgttcaaggccgggatgcagcagtacccgccggcaacgcccagcggcatcctcgacacgtgcttcgacttcagtggccagtccagcatcagcataccgaccgtcacactggtgttctccgggggcgcggccgtcgacctcgccttcgacgggatcatgctggagatcagcagcagcatccgctgcctcgccttcacgcccaacggggacgacagctccctcggcatcatcggcaacgtgcaacagcggacgttcgaggtgctgtacgacgtcggcggtggcgctgtcgggttcaaggctggggcttgctgatcggcaggcgccagccgccaacaaggacacactgacgtcatggggttcacgagtttttgttggctgcgaggtaggagtaaacagacacgaaagggaggccattacctatagtacttcaattttgattgtttttgtgcttgcaaaccatgcaagtgtgcaatataattgtaattttatcctcaaatttatgaatacacaataataatataataagttgctttcacaatgttttttcatat

SEQ ID NO: 123616 - DNA, 988 bp, Zea Mays
agtgctcacacacgcgccgaacacaccagttctctagagcagcaccgttcgtccattcgcccacgcacgccgcgtgatccgatcgcgcgcgtagggctccatcgatccgctaccgctacaatggcaatgtcgtacaccaccctccactacttcgccgtctcctgcgccctcctcgtggcatcggtgtcgtcgctgccgccgccggcggtgttccaagtcggcgacgagcgcgggtggacggtgccggcgaacggcaccgagacgtacaaccactgggccaagaggaaccggttccaggtcggcgacgtcctggacttcaagtacggcgccaacgactcggtgctgctggtggcgcacgacgactacaagcagtgcagcacggagacgccgctgggccggttcaccggcggcgacaccaagttcgcgctggaccgctacggccccgtctacttcgtcagcggcgtcgcaggccactgcgaggcgggacagcggatgatcgtgcgggtcatcaggcccggcgcctccgcaccgcgcggcgcccctgtggcggcgccggcgacgccgccaaccgcgagtggcagtggcagatcaggcgcgcccagcccggccacctcgccggccggctccggctccggttccagttccacttctccgagcccgagcccgagcccgagcccgctgccgcaggccagcggtgcgtctaggcgcgtgctcgtgtcgtccgttgcagttgggcttgtgctcttggttgcctgtgccatcaccctgtcgtccgtggtggcttgattaaacttagaagtctgttttctgcattcatgtacttagtgcgccgtcagtttaggaagtaatgttagcttgtcgagatctaggaggtatacgcgtgtcggttaggaatggttgggccactgggccgagtccgcatgctctttatgttaaagacttggtaatttcaaataaatggagttcttgccatgctctaaggctaatt

SEQ ID NO: 123617 - DNA, 1121 bp, Zea Mays
caccagcaagagcaactcagcaacctagctagctataggtttaggtagcaagagccaatggactccagcttcctccctgccggcgcggacaatggctcggcgggcggcgccaacaatggcggcggcgctgctcagcaggcgccgccgatccgcgagcaggaccggctgatgccgatcgcgaacgtcatccgcatcatgcggcgcgtgctgccggcgcacgccaagatctcggacgacgccaaggagacgatccaggagtgcgtgtcggagtacatcagcttcatcacgggggaggccaacgagcggtgccagcgggagcagcgcaagaccatcaccgccgaggacgtgctgtgggccatgagccgcctcggcttcgacgactacgtcgagccgctcagcgtctacctccaccgctaccgcgagttcgagggcgaggcgcggggcgtcggcctcgccccggcccctccgcgcggcgaccaccaccaccaccaccactccgtgccgccatcgatgctcaacaagtcccgcgggcccggctccggagccgtcatgctaccgcaccaccaccaccacgacatgcacgcctccatgtacgggggcgccgtgcccccgccgccgcaccacggcttcctcatgccacacccacagggcggccactacctgccttacccctacgagcccacgtcgtacggcggcgagcacgccttggccagcgggtactatggaggggccgcgtacgcgccgggcaacaacggcgggagcggcgatggcagcggcgggagcgcgtcgcacgcaccgccgggcggcagcggcggcggcttcgaccacccgcacacgttcgcgtacaagtagttcgttcagcaagccatagatctgcggcatgtacgttgtacgcatgcatgcatgtatcgggcgcatgcaggtcgtcctagctagcagtgtgcacgcctagcattcctattgtgtttgggtaaccatgcattctctagtttcttagcagcttgttttccttaaactacgtaccactctctagtttcttagaagtagcttccagtgcttgttgccagtacttagtactcctattgtgtttgggtaaccgttgcgacgacgagattatttca

SEQ ID NO: 123618 - DNA, 1008 bp, Zea Mays
gctatcctccatggacagaggcggccgccggcatggtgctccttccctggcgcggcgcgcgggcacagttccccgggcgtgcgcgggcccgtctcggcgggcggattcggccccggtcccggcggcgcggcggctcgtcagccaggcgggcgcggcctcggcacggcggcctagccctggcggcgcgggcaacggcttcccgggcgtgcaggtcctcgcggcgcgggggcgcaggcacttgacgcagcggcccggcagccagtagcccgacgcgcttctgcgcgggagcgcagccccgaccggtgggcaccggcgcggccccggcggctcggcggcacggccacgcgcggctgcccggcgcgggctcgtcccacggcggccttggcgacgtggcttgagcgcgaccgcgccgcgtcgtctcaggcacgctacggcgtggcggctctggccccggcggtgtggtgcacgggctcgacgcgcgctcgggtgcggcgtcctcatcccctatgcggtcacgacgcgcgcgcgaatggcggcccggcgaggcgcttccgagcgcagccccagagcgagcccgaggcggcgcggccgcgcgggagcggccacggcgcgggcgcagccccagcgcgggcgcagacgcacggccccgcggcggtcgggccacggcgcaggtgcagccccagcgcgggcgcagacgcacggccccgcggcgatcgggccacggcggcgtggggcgtggccccctcgcagcgtgggcgcgcggtccccaccgcgcggacgcggccccgttgagggcgctgtgctggcgcgcagggcgaacgcggcagtcaggccccgacgagccagagaccagcggcggcgcgactagtcggccctgacgcggcctcaccacgtaggagccattcgttggaaagcatgcatgcgtgtcggactgtcggtgcttcccgtaaaatttatgcaagaagcaaggaggtatggtgtcctcaccttgagtgtgaggagcgcata

SEQ ID NO: 123619 - DNA, 1496 bp, Zea Mays
cagcacctcctgtgctgtgcattcctgagaaaccaaccccccccccccccccacacgcacagtttagtgcccggagcccggaggcgtacgtgtacgtcgcatcccagcgcagcgatgccggtcaccgccggcgcccggaccaccctcctcctcttcgccaccgcagtggtgctagcgtgcacttcagcgccgccggcatgccatgccgcgcacaacatcaccgccatcctctccgggcaccgggacctcgccgagttcggccgcgagctcgcggccacggggctcgcggacgacatcgacgaccggaacacgatcactgtcctggccgtggacgacgcccacatggcgccgctgaaggcgcgcggcctgccgcgggagacgctgcggcacgtgctctccctccacgtcctcgtcgactactacgacgacgcgaagctgcaccgcctccccggcggctccgcggacgtgtccacgctgttccaggcctcgggcgacgcgccggggagcgcgggcatggtgagggtcgcggagcgccggggcgggcgcgtggccttcgcgcccgaggacgacgcggggagcgccgccgccgccgtgttctacgtcgggcccgtccacgaggcgccctacaacatctcggtcctctgggtgagcggcgtgatctcgtcccccgcggccgaggcgcccgcggcggcggccgaccggccgccgagcaggcgcaacgtgtcggacgtcatgtccgagaacgggtgcgggcgcttcgccggcctcgtcgccgccacgggcgacgcggccgcgacgttcgagaggcaggccgacggcggcggcgggctcacgctgttctgcccggcggacagggcggtggaggcgttccagcccacgctgaacagcctctccgccgacgcccggctcgcggtcgtgctgtaccacggcgcgccggggcaccactccatgcaggcgctgcgggcgggcgaccaggacctgcgcacggcggcctcgctcgacgggggcaggtcccacttggccctggccgtgcgcaacgtccgcggcagggtgacgctgctggcctccgcgacgcgcgacgtggccagggtcacccgcacgctcgcggacgaggaggccgtcgccgtgtatatgatcgacgcggtgctggtgccgggtaacctcacggcgcaaggaactgcaggggggacggagcacggcgagctcacgtccggttcgggcggggaagaagacggcggaggaggcggtgttcgccagagcagtggctccagggctctggctccggctccgtgctggctaccgcgtggatggttcgccgcttgggcgcttctgctcgctcttctggcggcgtttgcggcgtctggttgagtgatcgatcggcgggtcgtccgttcgtcttccaccggcgtcgattgttactgttaggttgtgatctgtgtccgtgtgcgcgtgcgtgtcgatcatgtctgtgcttaaatttttcgtcgactctgtgt

SEQ ID NO: 123620 - DNA, 101 bp, Zea Mays
gttttagccgagagtcattcgctcgatcattctcgacagacgataatagaccattccagtttcatttttattaaatacggtggcacatcatcacttttgat

SEQ ID NO: 123621 - DNA, 1216 bp, Zea Mays
cccgagcgagtggagctcttgcgtcttgccactttgccagttgccacgctccgggctcctcggcaaacacacagcaccagctaagctagctcacgcccgccgaggccatatccttcccagcacgccgtagacgccgacgcttgacgccatgcaggagttccaatccatcccggggctggcggggcggctgttcggcggggcagcggccgccggcctccggcgcgcgcaggggcagtgcggcggcgggggtgcctcggccgcggcggccgtgaagtgcccgcggtgcgagtccaccaacaccaagttctgctactacaacaactacaacctgtcgcagccgcgccacttctgcaagggctgccggcggtactggaccaagggcggcgtcctgcgcaacgtgcccgtgggcgggggctgccgcaaggccaagcgctcgtcggcgccgtccacgcccacgcccacgcccacgtcggcggtgggcgacgccaagagcccgcgccgcgcctcggcgtcctcgccccgcggctccatcagcagcggcagcggcagcgcgagccccacgcccaacggcttcgccttctcctccacggccgacgtggtggcgccgccgccggcgccgatattcgccgatcaggcggcggcgctggcgtctctcttcgcgcctccgccgccgctcccggcgttcagcttcgtggcggcgcaggctaaggaggaaacgtcctccacccccgctggcttcgcggcgccgtactcctcagtatccgaggacatggcaccgttcgcgtccctggacgccgctgggatgttcgagatcggcgaggacgcgtcggccgcggcggcgtactggaacgccgggagctgctggacggacgtgccggacccgagcatgatgatgtacctgctaccctaggctgtttgttttaggtacttgtcacgatcgcttgattaaggttaagccgtggttaattaagtgcttcttattaaacgacgacgaccacgagctacgtctccctactagtatattatatgtccacgctccacccgccggatgccttcctctgcagcgtcgatcttgtgtttgtttattggtgatttgtggcttcacagaccgcgtgtaagaaaagctaacgtctgtgttgcactcgtaagctgatcattgccctagcttgcaattgcaacgctgcgatgaaattattcgcattaattattgttttta

SEQ ID NO: 123622 - DNA, 1657 bp, Zea Mays
atggggaggcactctaattataagacgtcgtgtctcctccgatcaaaagcttctccagtctccacactcccacttcttcctcgccgcgctccatccaaagtcataacaacggaggagctctccaatccatacatgcgtgaagaccttcacatttctgtgcaacgagggaccggcggcaactggaagctggaattccgtccgcgcagacctcaccgtccctgcaacgagccgggcttcggcggcgccttggcgaggatggtgatgccgatctcgagcggcggcgaccaccacggcgcggagcccctgctcccggagaagcagcgcggcggcggggccggggcggacgatgccggcgacgacttccacggcgcgtccttctccggcgcggtgttcaacctctccaccaccatcgtgggcgcgggcatcatggcgctcccggccaccatgaaggtgctcggcctcgtcccgggcctcgccctgatcgcgctctccgcgctgctcacggacgcctccatcgagctcctcgtcaggttcaaccgcgccgcgggcgtcaggacctacgggaagaccatgggcgacgccttcggggtgctcggcagggggttgctccagctgtgcgtcgtcgtcaacaacgtcggcatcttggtcgtctacatgatcatcattggtgacgtgctatctggaacctcctccagcggcgtgcaccatcacggcgtgcttgaaggatggttcggcgaaaaccggtggaacggacgcttcgcgatcctcgccatcgcaacgctcggtgtgttcactccgctggcatgtgtcaagcgcgtcgactcactgcgatacacgtccgctctatcggtggctctggccgttgttttcgtcgtgatcactgccgggatcgctatgttcaagctggcgagagggcagattctaatgcctcggctattcgccgacgtccatgactggccgtccatctggaggctcttcacagcggctccagttcttgtcaccgcctacatttgccactacaatgttctccccatctacaaggagctcaaggattcttcacagatcacgcctatagtgcgcacgtcgctgctgctgtgctcggtcgtgtacgtcaccaccagcttcttcggcttcctcctcttcggcgactcgacgctggacgacgtcctcgccaacttcgacaccgacctcggcatcccttacagctcgatcttcaacgacgccgtcagggtcagctacgtgctccacctcatgctcgtcttccccatcgtgttccaggcgctgcggctcaacatggacgggctcctcttcccctcggcgcggccgctgccctgtgacaaccgaaggttcggtggtctgacggcggcgctccttgtggtgatattcctcgccgccaatttcatcccaaatatctgggacgccttccagttcaccggagccacggcttccgtctgcgtcgcctacattttccctgctgcgatcacactaagggatcctcatggcatagcgaagaagagagacaaggtcctggcagtgttcatgattgttcttgctgtggtggcaaacaccgtggcagtgtacagcgacgcttgctcgtgatcttaaatggcagccatggctacgtcaagcgcacgcgtatctaaaaattagtcagggc

SEQ ID NO: 123623 - DNA, 546 bp, Zea Mays
atggccgccttcaacacttctgggctgaacagagtcgcagtgagccgcacgagcgtgccaacgagaccctccatgtatggcacagcctgcctgcttgatctaccagcgccgttctccacctcttttatcgccctcagcatggctggcacggcaccatccttcacaagcgcgatgttgagggaggtgttccggtaaggtagcttcgcgaggagcgtggccaacgtagcttgccgttctgtgatgcgcccagcatggctgatgcttttgaccagcttgtgtggctgtccttgtgtcttgcagagcctctctacgatggtgtgtccaatgtgtggagacagggtgatgagcagccttgtcgcggcgaggctgagcacctccgttggtgagcccatgagctcgatgatagaatggccgcggtagttctccctgatgaccgagaccacagtgtctagtggcttggcgagcgcggtgagcgctagaaggatgcggaggacgctgaggttgaggtcgtccggcatgaagcacttgagcatgtgcacaaagttg

SEQ ID NO: 123624 - DNA, 359 bp, Zea Mays
taaaataataagataataataaaacgatacttgtctacgcatccattatgattttttgggttgtgcatacttgaagtggaaaccacaactcaaattcgagtttgaaatttcagatttgaaatgaaaacaagaaatagaaatgaacaaaagaaaaaaaaagaaaaaaaagagaactcacctgaactgacctgggtcgaatcaccttcctgcacaggcccactaccgaaatcccttcttggcccgctctcccttttttttctcttccttttccgcgccagcccattaggacgtatgccttggcttcactgggtggtgggaccaagcagccagccgctgcttgactcgtgccagccacctcc

SEQ ID NO: 123625 - DNA, 297 bp, Zea Mays
gtagtttccttcgggggattggcgagtcctgcacataagttgtttccatgccatatatttagtacctcacacaatatgggactaaggccctgttccaatctcgcgagataaactttagcagcttttttttagctacttttagccatttgtaatctaaacaggagagctaatggtggtaattgaaactaaactttagcacttcaattcatatagctaaagtttagcaggaagctaaagtttatcctgtgaaattgaaacggggcctaagagaaatagataagtttatcgatatcgacc

SEQ ID NO: 123626 - DNA, 102 bp, Zea Mays
cattttcgttcaaaatcaatcatctatctaccagaagaaaccatccataacctgctccacacacacacaaaagagacattttgtggcaaaatccaaaagtgc

SEQ ID NO: 123627 - DNA, 327 bp, Zea Mays
gcttgccgtcaccctgaccgcgctcctcgtcctggccagcttcacgctcacagccgcgctcgccgcgctggtcctgctcagcccgctcgtgtcgtgcccctcacagtcccgctctgggcgcccgtagcggtactagcgctgctgacgggggccgcctcgctcgtcgtctgctgcgccagcctggccgcggtcgcggacgtggccagccgagtgagggggtactacgacgcctatgcgcgagagtacgccgagcacccagccgcccctgctgttccgcgcctggctgtccagtctgcgcctccctgcgccggcctgcaccagtcgctg

SEQ ID NO: 123628 - DNA, 256 bp, Zea Mays
atgcgacgtcgggtgcgcgagagaaaggaagtggcggcgggtgcacgagtggagagggtgagctcgaggaaacccttcccgaccttgtgaggccgggggcgaaagccctgttctctcccacggattgggccggggagttgggtcaccaaacataatttttttctcgctctgtgataatttagcgcgtgggtttggaaggcagggaatgggtcggtattctcctgggatcctcggctaccaaaggtgcccttagggg

SEQ ID NO: 123629 - DNA, 2431 bp, Zea Mays
gtggcaacaaatcaaccgccccagaggtatccgcctccggcctatcccctccactcccgaccccgcgatccccagacccggtccaccagaccaccacgccgcctccgctttcttccctgcctctactagtctacttcaactgcagccatccgccattcccgaagcttccagaagctcgcctgcaatggcgaggcttctcgtgctccgcacggcgccgtaccgtcactctgcccacctttgcgctgccaccctcctcgtgctccctccctcccagcaccgccacttcgcctccttcacctcccctgccccctttgccgcgcgccgcatcctcccctcgccactccgccttcctatccgcgcagtggagtcctcgcccgggcccaccaaagaggatcaggagccgtctccggccgccagtgaggcccaggagcagctagcgcccgcggtgcctgcgttcgaggtcgaagagcttgggtgggggacccagctcgccgtcaagctccgcatgctcgtagcgccgccgtggcagcgtgtccgcaagggaagcgtcctcaacatgaagcttcgcggcgagatatctgatcagttgaagacacgcttctcatcagggctgtcgctaccacaaatctgtgagaattttgttaaggcagcatatgacccacgaatctcagggatttatctgcacatagagccactgagatgtgggtgggcgaaggtggatgagatcagaaggcacattgtggatttcaagaagtctggtaaatttgttgttggttatatgcctgtttgtggggagaaagaatactatcttgcttgcgcgtgtggtgagctatatgcacctccaagtgcttatgttgccctgtttggcctaactgttcagcaaacatttctcagaggtgtccttgagaaagttggaattgaaccggaaattcaaagaattggtaaatacaaaagtgccggagatcaacttgcacgcaagagcatgtcaaatgaagttagggagatgctggcagcactgcttgacaatatttatggaaactggctggaaacaatatcttctacacatgggaagaaaaaagaagaaattgagggatttattaattcaggggtctaccaggttgccagactcaaggaagaaggttgggtaacagatttactgtatgatgatgaggtaatgacattactaaaggagagagtagggcagaaagacaagaaaagtctgcgtatggttgactacagtaaatactcgcgtgttagtaaaaagactcttggattacaaggtggaggagaacaaattgctataatcagagcatctggaagtataacacggactcgtagcccattgagtgctcctagttcaggcattgtcgctgagcagttaattgagaagatacgaactgttagagaatcagaaaagtacaaagctgttatcctacgtatagacagccctggtggtgatgctcttgcttctgatctgatgtggagagaaatccgacttctagccaactctaaacctgtagttgcttcgatgtctgatgttgctgcaagtgggggctactacatggcaatggctgcaccagtaattgttgctgagaaactgactctcacagggtcaattggagttgttacagggaagttctgccttcaaaagttatatgagaggattgatttcaataaagaaattatatccaagggtcgatatgctgagcttaatgttaatgatcaacgacctttaagaccagacgaggcagagctttttgaaaagtcagcacaaaatgcttatgcattgtttcgtgataaagcagccatgtcgcgatcaatgagtgttgatcagatggagagtgttgctcaaggtcgagtgtggagcggccatgatgcgttttcaagagggttggttgattcagtaggtggactctcacaagctcttgctattgcaaaacagaaagctaatatacccaaggataagaagatccagctagttgaagtttcaaagccctctccatcattaccggagatcttatccggcattggaggttcgttgcttggagttgacagggcagtgaagggagtgctccaggacatgacctccctaagtggagtccaagctaggatggatggaattctgtttgaaagtttaggagacatgtcaggagaaaaccagttattgttgcttgtaaaagatatcatgaactattttgattaattctagcattcaggtccttatgttccaaacatttgtatttagagatgaggggaaattcataatgtcactacacatctatcttgcacagaaacaggtagcttgtgatttgtgtagttaatttagcattgtatatgccattttattcttttgcactgatgactaaaaatatcatgattgatatactgggcaaaagtaaaaggaactccaccttttcttatgcatgatatt

SEQ ID NO: 123630 - DNA, 1087 bp, Zea Mays
cagagtattagttatctggtgtgacacaaaactttagttagttaaggaaaccaaacagcctctaagaccatctccagcagcaagaacatattaggaaaaggtgggtttggtgtcgtctaccggggcagctctcagatggaagtcttgtagccgttaagaggctcaaagatggtaatgctgcagacggggaagcacagtttcagactgaactcgagatgatcagcttggcagtgcacaggaacctgcttcagactctatggggattctgcatgacctccagtgagaggctactggtctatccatacatgtcaaatgggagtgtcgcattgcgcctgaaagggaagacaccactggactggatcaccagattaccagaaagaggatagcacttggggcagcacgaggtctaccgtacctgcacgagcagtgtgatcccaagatcatccatagagacgttaaggcagcaaacatactgctagatgactgctgcgaagcggttgtcggggattttgggctcgcgaagctcctggaccaccgtgaatcacatgtcaccacagccgtgcggggaactgttggccacatcgctcctgagtacctctccgctggccagtcatctgagaaaacagatgtctttggctttggaatcctgctgctggagctgatcaccggtcagactgcactggcgtttgggaagtcgtcaaatcagaagggaaccatgttagactgggtgaagaagatgcacgaagaaaagtagctggatacacttgtggacaagggcctggagagccaatatgaccgtattgagctgaaggagatggagcaagtggcactgctatgtacccagttccttccgggccacaggtccaagatgtcagagatggtcaggatgctgaagggcgatggggttgcatagcgatgggaggcgtcacaacacaaccagtcacacaagttcaaggtgccccaggtctcctccggccgctgccactctgacctaacggacgactcgtcgctgctggtgcgagcagtgaagctttttgggccgagatgataccattatagttagtttgggagccacaaatctggaagt

SEQ ID NO: 123631 - DNA, 1021 bp, Zea Mays
gtggacccgacctgccattttatagcaacttcagtgagtaagctttcgctaaaaccctagctccaaaaaacgaactagaaacgaccgcgaagccacaggtcgaaggcggcggcggcgatggggagcgacacggagacggagaagaaggcctcggtggcgctgatgtccatcgcgaaacccctcgctggaaagaagctctgcaagcggaccctcaagctcgtgcgacgagcctccgaggcgaagtgcctcaagcgcggagtcaaagaggtagtcaagagcattcgccgcgggaacaaaggattgtgtgtgatcgctggaaatatttctcctattgatgtgattacacatgttccgatactatgtgaggaagctaatgttccttacgtatatgttccatcaaaagaggatcttgcgaccgcaggaaccactaagaggccgacttgttgcgtcttggttctgaccaaaccaaacaagggggagctcagtggagaggtgaaggataaactgaagtcggactatgaccaagttgtaacggaagtcgctgaggctacatctgcaatgttctgaggaccacattatctgagaatccggcaattccctgtgcacgtctttcttggtgtagtatcctgcccagcttctgtgaaccgaaccaatatgttttgcacggtggctggagcgagatatgactatgagtttacctatatgctatggaccatccttgttggcggcatatgattctaccagtgattagatctagccaattacaatcagttctgtgagcagactgtttccttgtgttgtcagatctcggtagctagtgtgtgcgttccaggtctttttgatcttatcacaagatgtgctcgtgatacttgtgttgaaggaactgtggtatcttagcgccttatatcaagattagtttttggcttctgctcgtattgggtaaaacttggaatgtagagcatcccgtcaatgccctaaacaatgataagcaaaagatccagcggcaaaatggccttagttt

SEQ ID NO: 123632 - DNA, 105 bp, Zea Mays
aacagcctagcgttgcgcccctaccccagcctccgcgtcccaggtgccgtgccgtgccactcctacgacgcgcctcgccgccgccgacgtgggcgcacctggcag

SEQ ID NO: 123633 - DNA, 2085 bp, Zea Mays
acagggcttccgttgaagtggaagtacactgtacagtgtacaccctactgatctgaccaagccctaaacagcaccgccctctcacatctcctctcccctcgatccatggccgccgccgccgccgccgccgcgccatcccgcaagacggagacctacaccgacaccaagcgccgcgatgacgtgcgcggcgccaatatcgccgcagcgcgcgccgtcgctgacgccgtgcgcacctcgctgggaccccgtggcatggataagatgatctgttcgggcgaccaggcgcaggaggtcatcatcaccaacgacggtgccaccatcctctcccgcatggcgctcctccagcccgccgcgcgcatgctcgcggagctatcccgctcccaggacgccgccgctggggacggcaccacgactgttgtcgtcctcgctggatccctcctccgccgcgcccagtcgctcctctccgccggggcccacccaaccgccgccgccgacgctctccaccgcctcgcgacacgcgctgttgagatcctccacggcatggccatccccattgagctatctgaccgggaatccctcgtgaagtccgcgtccactgctctcaactctaaggtcgtctcccagtactccacccttctctcgcccctcgccgtcgacgccgccctctccgtggtggatcccgctcaccctgaccttctcgacctccgtgacatccgcatcatcaagaagcttggtggcaccgtggacgatactgagcttgtcactggcctcatttttgacaagaaggctagccatgctgctggggggccaactcgggtagagaatgccaagatcgctgtcatacagttccaaatctcaccacctaagactgacattgagcagagtgtcattgtatcggactatgcacagatggaccgcatactacgtgaggagcgcaattatatcctcgggatggtcaagaagatcaaagctgctggatgcaatgttttgctcattcagaagagcatcttgcgcgacgcggtcactgacttgtctctgcactatcttgctaaggcaaagattctggtggtgaaggacgtggagagggatgagatggagttcatcaccaagaccctaaactgtcttcccattgccaacattgagcacttccgcacggataagcttgggtatgcagacgttgttgaggaaatctctgttggggagggcaaggttgtgaagatcactggtatcagggacatgggtaggaccgccactgtagttgtcaggggctcgaaccagttggttattgatgaagctgaacgtagtctccatgatgccctctgtgtcataaggtgcttggtcaacaagaggtttttgattgctggtggtggtgctccagaaatagagatgtcaatgcagctggctgcttgggcaaaggagcttcgagggatggagagttactgcattaaggagtttgctgacgcacttgaggtcatcccttacacactggctgagaatgctgggctcaacccaatctccattgtcaccgaactcaggaatcgtcacgccagaggtgagaagaacgctggcatcaacgtcaggaaagggcagatcacaaacatcttggaggagaatgtcgtgcagcctttgctggtgagcacaagtgccattacgctggcctgcgagtgtgtcaggatgatcttgaagattgatgacattgtcactgttaggtgagagcatgaagtcggtggtttggtcagattgctctgttctgtctggattgatagtagttaggttactacttagtgtagaacttctattcacgggcgtgtttcaatgttttaaacacaatgttagtacggagaggacagtaatgtacccatccttgcatgacactaccagggttgcatctgctatttccagtttcttatgattggccgtgtatgtatgccttgtttctgtcgccgcttacatgtaacctgttggctatatcatattatatattttctctgtttctttttagttgtcgctggataatttaattttgtactatccaacgacaactaaaaagaaacggatggagtatgttttttttaaatgagaagg

SEQ ID NO: 123634 - DNA, 775 bp, Zea Mays
atgggaagttttcttatgaggaagctagagcagttggacgtcgcgcacaacttgctcaccggcgcggtaccgccggggatatgcgacctgctgcgcctcaagaacttcacgttggccacaaacttcttcacgtgcgagccgccgtcttgcgcgcgcgtcgtgccgcgggacggtgaccggagcaattgcctgcccaaccgctcgtcgcaacggacgtcgcagttggcacaatccttctatctcagcatgcaaatcagaacattcatccagatgaggactaacctgaaggtggttgataactctggggccaagcgggtgatgtccatccagtccttgagggggaagaaaggagcaaggctcggggacatgatcatcggatccgtaaaggaggcccagccttgtggcaaggtcaagaaaggagacgtagtctacggcgtggtcgtccgcgccgccatgaggaaagggcgcagcgacggcagcgaggtccagttcgacaacaacgcggtggtcctcgtgaacaagaagggcgagctgatcggcacccgcgtcttcgtccccgtcccccacgagctgaggaagaagaagcacctcaagatcgtggccctggctgaacacatcgtttgaggtgtgttgcagagccaagtgtttgtgtgggaatgttttttttgtgtgttctctgtttgaataatgcattgtgaaacgatagcatggaccgtttgaactattttgatgatattgctcgcccatttggatggccaatacgtgtcgtgatcga

SEQ ID NO: 123635 - DNA, 1525 bp, Zea Mays
attagcgctacagggggaggcaggaagccgcgcgcgtgcccgtttgtggccgaaatcgcagcgcgggtgggtagaccgtagaagactgcagggccggccagccgagcagagctgccgaagccaccacccacccatggcccccgtccccgtgtcggtgtcggccaccctcgcgccgccgccggcggcgccgccaaaggcaacatccaggagctgggaacggcgtgcgccggctgacgccgcgttcgcggccgcctcttccgtcgccatctcggccgcgttgctgacactgacgccggccgcgcccgccgcggccttgtccaaggaggacgtcgccggctcgcttaccaaggccgtggacacggtgagccaggccatcgacgtcggcggcaaggccgctgagcaggtggcggccgtgctcaaggcgttgggcgaggccgtcaagccggcgcttccggtcctgaagagcgccagcgacgaggccctcaagctggccgcgcccgtggtgtccgccgcctccaagcaggccacggaggcactccagggcgccggcgtcgaccccgcccccgttctgtccgtcgccaagaccgcagcggagcagagcacgaaggtgatcgacgccgcgaagcccgtggcctcggcggccgtggagaccatcacgtcgctgggccccgaggactacgtcgtggccgccggagcggcgtttctcgcgtacctcctcgtgccgccggtctggtcgctggtctcgtccagcctccgcggttacaaaggcgacctgaccccggcgcaagcactggacaaggtgaccacgcagggctacgtcctgatcgacgtgcggagcgacaaggacaaggccaaggcaggattgccgcagctgccatcgaacgcgaagaacaagctcgtctctgtgccgctggaagaccttccgagcaagctgaagggcatggtgcgcaacgcgaagaaagccgaggcggagatcgccgctctgaagatatcctacctcaagaagatcggaaagggctccaacgtcatcatcatggactcgtacagcgacgtcgccaagactgtggcgaagacgctggacagcgtggggttcaagaactgctgggtcatggccggcggcttctctggccggaaagggtgggcgcagagccgtctcggaacggattcctacaacctatccgtggtcgaagtcgtcacgccgtcacgtgtgatccctgctgtcgcaggccgccgcactgggacgaccgctgcacgcattgggacggcctcgtcggcgtccagagcgactactcgcaagcttcttcccggcggcgtagactgatgatgagtggagctgaaactgaaacaactcccaagtgtaaatccatatgtttcttttattttcagatgcaacttttggtctgtgcgttcattttttttcttttgcagtaataacacaattttgtgtccgtaaatagggactgtcatcttctacacagtaaactatctcaaagtatgtctacatactagtcggttgtccgtgcgc

SEQ ID NO: 123636 - DNA, 1121 bp, Zea Mays
acattcccagagtcattagcgctacagggggaggcaggaagccgcgcgcgtgcccgtttgtggccgaaatcgcagcgcgggtgggtagaccgtagaagactgcagggccggccagccgagcagagctgccgaagccaccacccacccatggcccccgtccccgtgtcggtgtcggccaccctcgcgccgccgccggcggcgccgccaaaggcaacatccaggagctgggaacggcgtgcgccggctgacgccgcgttcgcggccgcctcttccgtcgccatctcggccgcgttgctgacactgacgccggccgcgcccgccgcggccttgtccaaggaggacgtcgccggctcgcttaccaaggccgtggacacggtgagccaggccatcgacgtcggcggcaaggccgctgagcaggtggcggccgtgctcaaggcgttgggcgaggccgtcaagccggcgcttccggtcctgaagagcgccagcgacgaggccctcaagctggccgcgcccgtggtgtccgccgcctccaagcaggccacggaggcactccagggcgccggcgtcgaccccgcccccgttctgtccgtcgccaagaccgcagcggagcagagcacgaaggtgatcgacgccgcgaagcccgtggcctcggcggccgtggagaccatcacgtcgctgggccccgaggactacgtcgtggccgccggagcggcgtttctcgcgtacctcctcgtgccgccggtctggtcgctggtctcgtccagcctccgcggttacaaaggcgacctgaccccggcgcaagcactggacaaggtgaccacgcagggctacgtcctgatcgacgtgcggagcgacaaggacaaggccaaggcaggattgccgcagctgccatcgaacgcgaagaacaagctcgtctctgtgccgtatgcagcaatttcttccagtgcattttcttcgttgcaaccgcttcaactcatcacgctgtggtgtgtacgtgcgctctcaggctggaagaccttccgagcaagctgaagggcatggtgcgcaacgcgaagaaagccgaggcggagatcgccgctctgaagatatcctacctcaagaagatcggaaagggctccaac

SEQ ID NO: 123637 - DNA, 333 bp, Zea Mays
atgactgccggtctcctaaatctcggtgcaacccctcggcgtcaagcagaaggtgccgcccatcactcccctctccccccttgcaacagcggcatactcccctctctcccttgcaacaacggcatcaaaggtttctgcaatagcgacatggacgaccagttcccgggtgaagctgttttcagcaacaatgacatcaaagtggtcattctcatagtagcacaactaagtccagtaccaatgaaccaaagaaatgaaccaatggaaatatgttgtgtacaagttttaagtggtgaagctattgatactgccaaggctcttgctttgaaagaatag

SEQ ID NO: 123638 - DNA, 996 bp, Zea Mays
ttttttatagtgctcatttttttaatggaataattaataaataaatgtttcataggcattcctttataagtaaatattaaaacatttaattttgaatatggttaaagatctattctcttgaaaaaaaaatctttgaagggtgcgatttaatttgtagtgagctatatgttttggcgcatttacttaaaagaatggaatagtaacagaagtaaaataaaatatactttgcatcatgcgtgattttcttgtattgttgcactcatatttgaatttataatctggatttggatttgaagtaaggtttaaaacagaaataagacaacaggaaaataaaacaaaaaaatgaagcctaaaatctacgtgaaaacccatggccgtttggccactagtcaagacgtggacataatctttttcgattttattaatcccctagccgatgatgactccatcccatcattcacgtcgcctggtctatttggggcaccgcggtgtgggtcccacgggcagagtaatcaacggatgcctcaatgtcttgcacctctgacgggtggggttgagggtgtcaggttcttctttcctggatgctcggccttgtccgttgctgcagccacaatttcttcgtgccctcgagattttcggaatatggttgagatcctgcctaagcagtacatataacctggtgccagcccactcctctgattaacgaagccgccgaaccacctcctatcgctaccaaaccagcagcgccaatggggtcagggtgaaaccgccgacgccgttcctcaacttcgccatcggtcggagtctgccaggcggcccggtttgggaacgccaatgctgggagagaaattaagatcgacctgtgtggatcttcctcaagcgcgagatgtagggatggatggcctcggccatggtgttcccttgccggtgcgggtctcaccgcggtgccgcaaccccgacgtggaccgatctcgtctcaaccttgtcgctggtgag

SEQ ID NO: 123639 - DNA, 666 bp, Zea Mays
atgcctccagcgccgtgggttactggacccatcgtcccgcagccgtggtactggtcctggacctcggcgccggggaagtacgactcgacgctgctatcgacggccgcgccgccgatcctgccgttgtacaacagcgcgtccgccgcgtccaccaccgcgctcccgccgctgcccgtgctcagcctgtcctcggacttcacctgccgctcctcgaacgccgccgcctctgcctccggctccggctccggctccggttcctcgacgtcatcggccacggaagccctgacaacgcccaccgccggcaacgccgccgcggcgccgttggcgtcgccctccgtcgcctccttctctcgcagcttctcggtcaacgacaccacctgtgagcggaggcggtggttgtcctggagaagggcgtcgtggtccgcgcggagggcgtcgaaggaggccttgaggcggtcgaagtcgcgctccagctgcttggtcttccaccgggcgcgccggttctggaaccacacggccacctgccggggctgcaggcccagcttgcgcgccagctccgtcttgcgctccggctccagcttgttctcctcctcgaagctcctctccagcaggtgcacctgcaccggcgtcaggcggcgcttcttctccggcagctgctcgtcgtag

SEQ ID NO: 123640 - DNA, 793 bp, Zea Mays
ttttttgccaatctatttcagattccagtaggtaattgtctaagttttcttatgcaggaggctcaaaaaaggaacaaaagaaacagtctggtaactcaaaatcaaaggtggctgaggcagaattatccgttgcaaagttggagattcgagtggggcttatcagaaaagcggagaagcatccagacgccgattcgctgtatgtagaggaaatcgatgttggagaggaggctccaagaacggtggttagtggccttgtcaaatacattcctcttgaagaaatacagaaccggaaagtctgtgttctctgcaatctgaaaccggtggtgatgcgtggtataaaatcggatgccatggttttggctgcttctaatgaggaccatactagggttgagctggtcgagccaccagcggatgctgccgtgggggagagggtgacctttgccgggcactccggtgagaccgaggcttctctcagtggcaagagcaaggtgtgggagaagctagcggctgacctgcgtagcaatggcgaccttgtggcctgctaccaagatgtccccttcatgacttcggctggagtctgcaaggtacagacaatagcgaatggggaaatccgctagatgacgcgatgcctgaaggcagcgtgacgccgtggcctaactgccgtctgatgttactgaagtactagctgattggttttttgttgtaaattttctccttggatctgaattttcttgtattgaaaattggcaatagagaaaacgacggtgtttaattaattctgtggtggagatgg

SEQ ID NO: 123641 - DNA, 2647 bp, Zea Mays
gtccgctcgaccaccacgagggagtgggctgtgactcggacagcaccaaaacctcgcccgccatggcgtcgccgtcgtcgtctccgccgccgaagctgccgatccccggccgccgcaacatactcatcaccagcgccttaccctatgtgaataacgtcccgcacctcgggaacatcatcggatgcgttctgagcgccgacgtgttcgcgcgctactgcaggctacgcgggtacaacgcgctctacatatgcgggacggacgagtacgggacggccacggagaccaaggccatggaggaggagtgctcgcccaaggagatctgtgacaagtaccatgctatccacagtgaggtttacaagtggtttgacatagaatttgacaaatttgggcgtacatcctctcctcaacagacaacaatctgccaagcaattttccataaattgatggaaaacaattggctatcagaaaacaccatgcagcagctttactgtgatacatgtcaaaggtttttggcagatagacttgtagaaggagcatgcccaacagaagggtgtactaataaagctgcgcgaggtgatcaatgtgacaattgcagccacatgttgaatccaactgaactaattgatccaaagtgtaaggtctgtaagaatactcctcatattcgtgaaacggatcacttgttcttggatctccctcgaatagaagacaagttggtaaactacattaatgatacttcagtagctggtatgtggagtcaaaatgccattcaagctacaaatgcatggttaaaggaaggactaaaatcacgctgtatcacaagagatcttaaatggggagttcctgttccaattgagaagtataaagataaggttttctatgtctggttcgatgcaccgattggctacgtgtccatcacatcatcttatacacctgagtgggagaggtggtggaagaatcctgataatgtggaattatttcagttcatgggcaaagataatgtgccatttcatacgatcatgtttccttcaacactactaggaactggtgaaaattggacaatgatgaagaccatttgtgtcaccgaatatctaaattacgaaggaggaaaattctccaagagtaagggtatcggagttttcggtaatgatgccaaggataccaatattcctcctgaagtatggcgatactacctgcttatgaatcgacctgaggcatcagatacactctttacctggactgatttgcaagccaaattgaacagcgaattgttaaacaacttgggaaatttcatcaatcgtgtgctaagctttattgcaaaaccagctggggctggatatgattcaattatacccgatgctcctggtgctgagtcacatccatcgacaagtgtcattgcagaaaaagttagtaaatcggttgaacaatatcttgatgcaatggaaaaggtaaagctgaaacaaggactgaagagtgcaatgggcatctctactgatggaaatcgttatttgcaggacagcgaattttggaaactttataaggacaatccagcaagctgtgcgattgtgatgaaaacttcagttggtcttgtatatctccttgcctgtctcctggaacctttcatgccttccttttcaaaagaagtgctacgtcaattaaacctgtccccagaagaaaatatttctttcagtgaagaaaatggcgaaagtgtgaaggcaaaacccccttgggatcttgtaccagcagggcacaaaatagggaggcctgtacctctgtttgaggaattgaaagatgaaaaggtgagtgagtatagggaaaaatatgcgggcagtcaagctgagaggaactcgaaagcagtggctgacgctgaagccacaaaaattgctaaccaaacccaaagcatagcattatctggaggctcaaaaaaggaacaaaagaaacagtctggtaactcaaaatcaaaggtggctgaggcagaattatccgttgcaaagttggagattcgagtggggcttatcagaaaagcggagaagcatccagacgccgattcgctgtatgtagaggaaatcgatgttggagaggaggctccaagaacggtggttagtggccttgtcaaatacattcctcttgaagaaatacagaaccggaaagtctgtgttctctgcaatctgaaaccggtggtgatgcgtggtataaaatcggatgccatggttttggctgcttctaatgaggaccatactagggttgagctggtcgagccaccagcggatgctgccgtgggggagagggtgacctttgccgggcactccggtgagaccgaggcttctctcagtggcaagagcaaggtgtgggagaagctagcggctgacctgcgtagcaatggcgaccttgtggcctgctaccaagatgtccccttcatgacttcggctggagtctgcaaggtacagacaatagcgaatggggaaatccgctagatgacgcgatgcctgaaggcagcgtgacgccgtggcctaactgccgtctgatgttactgaagtactagctgattggttttttgttgtaaattttctccttggatctgaattttcttgtattgaaaattggcaatagagaaaacgacggtgtttaattaattctgtggtggagatgg

SEQ ID NO: 123642 - DNA, 2310 bp, Zea Mays
aactactccggcgctgtcacgcgaccctgcttcccgtcccgagctcgacgctggcctgatatatagcattggagtttgttggacctttggtggctagtcccgtccaaaagaatcgcaactcgcaaggcagcagagagcgaaggaggccaaggccatcgctctcctagcctcggagacttgcctttgcatacacatccccccggagggcggtgtgagggcatggctgcaaccgtgaggagggctgcttcctccgtcctctctcgcttcctcctcacaaagccttcgccttcgcctgcttctgccgccggcaataagtccgctctcctcggagcaggggctgctgctcttcacaggttcagcaccgcaccggcatccgcggccgcggccgcagaggagccgatccagcccgcggtggaggtgaagcacacccagctcctcatcaatggcaacttcgtcgacgctgcttctgggaagacgttcccgacgctggacccgcgcaccggcgaggtcatcgcgcgcgtcgccgagggcgacagcgaggacatcgaccgcgccgtggccgccgcccgcagggccttcgacgagggcccgtggccgaggatgaccgcctacgagcggtgccgcgtgctgctgcgcttcgcggacctgatcgagcggcacgcggaggaggtcgcggcgctggagacgtgggacaacggcaagacgctggcgcaggcggcgggggccgaggtgcccatggtggcgcggtgcgtccggtactacgccgggtgggcggacaagatccacggcctggtggcgccggccgacggcgcgcaccacgtgcaggtgctgcacgagccggtcggcgtggccggccagatcatcccctggaacttcccgctgctcatgttcgcctggaaggtcggcccggcgctcgcctgcggcaacaccgtcgtcctcaagaccgccgagcagacgccgctctccgcgctctacgtggccaacctcctccacgaggctgggctccccgagggcgttctgaacgtggtgtccggcttcggcccgacggccggcgcagcgctctgcagccacatgggtgtcgacaagcttgcgttcacgggatcgacgggcacggggcagatcgtgctcgagctggcggcgaggagcaaccttaagccggtgacgctggagctcggtggcaagtcccctttcatcgtcatggacgacgccgacgtcgaccaggccgtcgagctcgcgcaccaggcggtcttcttcaaccagggccaatgctgctgcgccgggtcgcggacgttcgtgcacgagcgcgtgtacgacgagttcgtggagaagtccaaggcccgcgccctgaagcgcgtcgtcggcgaccccttcagggacggggtcgaacaggggcctcagatcgacggcgagcaattcaacaagatcttgcggtacgtccagtccggcgtcgacagcggtgccaccctcgtcgccggcggcgacagggtaggcgacaggggcttctacatacagccgacggtgtttgccgacgccaaggacgaaatgaagatcgctcgggaggagatattcgggccggtgcaaaccattctcaagttcagcggcgtggaggaggtgatccggcgcgcgaacgcgacgccctacgggctggcggcgggggtgttcacgcggagcctggacgcggccaacaccctgtcgcgggcgctgcgggcgggcaccgtgtgggtgaactgctacgacgtgttcgacgccaccatcccgttcggcggctacaagatgagcggcgtcgggcgggagaagggcatctacgccctccgcaactacctccagacaaaggccgtcgtcacacccatcaagaaccccgcatggctgtaaatcacatcctccgtccttgcccgcacggcgctgcgccggttctcggagaacgtgacgaataaaacaaacggtttggttaaaaagacaaggacgacggaaaatgggtcatttttatctcccttagagcatctccaacaatgcctcaaactaatgcctcaaatcgaaatatagggctctacacaggaaaaaccactccaacagtgcctcaattcaacaaattttgtcaaaaaactatagggcaccctctcaagtgcctcaaatatactacaccgtagtgggctgccctataatctagatttggggctttactgttggagcggggtgttttgttggtgccctaaattctataaaatttacttattttaaaattataaggcatttttataggtcacgttgttggagatgctcttaacaagcaccaccctagtcacgttttca

SEQ ID NO: 123643 - DNA, 2387 bp, Zea Mays
aactactccggcgctgtcacgcgaccctgcttcccgtcccgagctcgacgctggcctgatatatagcattggagtttgttggacctttggtggctagtcccgtccaaaagaatcgcaactcgcaaggcagcagagagcgaaggaggccaaggccatcgctctcctagcctcggagacttgcctttgcatacacatccccccggagggcggtgtgagggcatggctgcaaccgtgaggagggctgcttcctccgtcctctctcgcttcctcctcacaaagccttcgccttcgcctgcttctgccgccggcaataagtccgctctcctcggagcaggggctgctgctcttcacaggttcagcaccgcaccggcatccgcggccgcggccgcagaggagccgatccagcccgcggtggaggtgaagcacacccagctcctcatcaatggcaacttcgtcgacgctgcttctgggaagacgttcccgacgctggacccgcgcaccggcgaggtcatcgcgcgcgtcgccgagggcgacagcgaggacatcgaccgcgccgtggccgccgcccgcagggccttcgacgagggcccgtggccgaggatgaccgcctacgagcggtgccgcgtgctgctgcgcttcgcggacctgatcgagcggcacgcggaggaggtcgcggcgctggagacgtgggacaacggcaagacgctggcgcaggcggcgggggccgaggtgcccatggtggcgcggtgcgtccggtactacgccgggtgggcggacaagatccacggcctggtggcgccggccgacggcgcgcaccacgtgcaggtgctgcacgagccggtcggcgtggccggccagatcatcccctggaacttcccgctgctcatgttcgcctggaaggtcggcccggcgctcgcctgcggcaacaccgtcgtcctcaagaccgccgagcagacgccgctctccgcgctctacgtggccaacctcctccacgaggctgggctccccgagggcgttctgaacgtggtgtccggcttcggcccgacggccggcgcagcgctctgcagccacatgggtgtcgacaagcttgcgttcacgggatcgacgggcacggggcagatcgtgctcgagctggcggcgaggagcaaccttaagccggtgacgctggagctcggtggcaagtcccctttcatcgtcatggacgacgccgacgtcgaccaggccgtcgagctcgcgcaccaggcggtcttcttcaaccaggtgcgtgcgtcactcagtgcgtgtccaactctactgccggttccgaacgctcaaacgctttccccccggacgcacagggccaatgctgctgcgccgggtcgcggacgttcgtgcacgagcgcgtgtacgacgagttcgtggagaagtccaaggcccgcgccctgaagcgcgtcgtcggcgaccccttcagggacggggtcgaacaggggcctcagatcgacggcgagcaattcaacaagatcttgcggtacgtccagtccggcgtcgacagcggtgccaccctcgtcgccggcggcgacagggtaggcgacaggggcttctacatacagccgacggtgtttgccgacgccaaggacgaaatgaagatcgctcgggaggagatattcgggccggtgcaaaccattctcaagttcagcggcgtggaggaggtgatccggcgcgcgaacgcgacgccctacgggctggcggcgggggtgttcacgcggagcctggacgcggccaacaccctgtcgcgggcgctgcgggcgggcaccgtgtgggtgaactgctacgacgtgttcgacgccaccatcccgttcggcggctacaagatgagcggcgtcgggcgggagaagggcatctacgccctccgcaactacctccagacaaaggccgtcgtcacacccatcaagaaccccgcatggctgtaaatcacatcctccgtccttgcccgcacggcgctgcgccggttctcggagaacgtgacgaataaaacaaacggtttggttaaaaagacaaggacgacggaaaatgggtcatttttatctcccttagagcatctccaacaatgcctcaaactaatgcctcaaatcgaaatatagggctctacacaggaaaaaccactccaacagtgcctcaattcaacaaattttgtcaaaaaactatagggcaccctctcaagtgcctcaaatatactacaccgtagtgggctgccctataatctagatttggggctttactgttggagcggggtgttttgttggtgccctaaattctataaaatttacttattttaaaattataaggcatttttataggtcacgttgttggagatgctcttaacaagcaccaccctagtcacgttttca

SEQ ID NO: 123644 - DNA, 2019 bp, Zea Mays
aactactccggcgctgtcacgcgaccctgcttcccgtcccgagctcgacgctggcctgatatatagcattggagtttgttggacctttggtggctagtcccgtccaaaagaatcgcaactcgcaaggcagcagagagcgaaggaggccaaggccatcgctctcctagcctcggagacttgcctttgcatacacatccccccggagggcggtgtgagggcatggctgcaaccgtgaggagggctgcttcctccgtcctctctcgcttcctcctcacaaagccttcgccttcgcctgcttctgccgccggcaataagtccgctctcctcggagcaggggctgctgctcttcacaggttcagcaccgcaccggcatccgcggccgcggccgcagaggagccgatccagcccgcggtggaggtgaagcacacccagctcctcatcaatggcaacttcgtcgacgctgcttctgggaagacgttcccgacgctggacccgcgcaccggcgaggtcatcgcgcgcgtcgccgagggcgacagcgaggacatcgaccgcgccgtggccgccgcccgcagggccttcgacgagggcccgtggccgaggatgaccgcctacgagcggtgccgcgtgctgctgcgcttcgcggacctgatcgagcggcacgcggaggaggtcgcggcgctggagacgtgggacaacggcaagacgctggcgcaggcggcgggggccgaggtgcccatggtggcgcggtgcgtccggtactacgccgggtgggcggacaagatccacggcctggtggcgccggccgacggcgcgcaccacgtgcaggtgctgcacgagccggtcggcgtggccggccagatcatcccctggaacttcccgctgctcatgttcgcctggaaggtcggcccggcgctcgcctgcggcaacaccgtcgtcctcaagaccgccgagcagacgccgctctccgcgctctacgtggccaacctcctccacgaggctgggctccccgagggcgttctgaacgtggtgtccggcttcggcccgacggccggcgcagcgctctgcagccacatgggtgtcgacaagcttgcgttcacgggatcgacgggcacggggcagatcgtgctcgagctggcggcgaggagcaaccttaagccggtgacgctggagctcggtggcaagtcccctttcatcgtcatggacgacgccgacgtcgaccaggccgtcgagctcgcgcaccaggcggtcttcttcaaccagggccaatgctgctgcgccgggtcgcggacgttcgtgcacgagcgcgtgtacgacgagttcgtggagaagtccaaggcccgcgccctgaagcgcgtcgtcggcgaccccttcagggacggggtcgaacaggggcctcagatcgacggcgagcaattcaacaagatcttgcggtacgtccagtccggcgtcgacagcggtgccaccctcgtcgccggcggcgacagggtaggcgacaggggcttctacatacagccgacggtgtttgccgacgccaaggacgaaatgaagatcgctcgggaggagatattcgggccggtgcaaaccattctcaagttcaggtacacacgacgcatgatcttcttctgacgacacagtcacgcagggcaataatggcgttcgagtagcgtgacggctgacggcgcagaggcgccacgcgcgctctctcttcttgctttgtggcagcggcgtggaggaggtgatccggcgcgcgaacgcgacgccctacgggctggcggcgggggtgttcacgcggagcctggacgcggccaacaccctgtcgcgggcgctgcgggcgggcaccgtgtgggtgaactgctacgacgtgttcgacgccaccatcccgttcggcggctacaagatgagcggcgtcgggcgggagaagggcatctacgccctccgcaactacctccagacaaaggccgtcgtcacacccatcaagaaccccgcatggctgtaaatcacatcctccgtccttgcccg

SEQ ID NO: 123645 - DNA, 160 bp, Zea Mays
ttttttctttcttgtttgcgcttatgatcgctacagtttccccttatctttggtcctcctatcagttttttacatacagctctactttcttctgtgcccctgtgtgtgatccatctttctccctctcccggaaaagacaaccaacaggagacgatgtggc

SEQ ID NO: 123646 - DNA, 1569 bp, Zea Mays
attaaccgtacacgcggacgggcgcggggcgccgtaggcccctagctgcggtgatccgccgctctcgcagcaccgtcgcgctcgcctccgcccgcccgctcgtcgagtggacgcgcgctgcaccgcgactccagtcatggctagtgttaccgattctttcgtggcggatcttgatgagctattggagtataggacagagaagactatcctggagatgaaaacgcagagacagaaaacttggaagatgatgctaatgatagtgtccctgacctgaaatctcttgatcttgatagtgtctaaaaacatcagaaggcacaatggtataaagacataatgaagacatgatcacaatggcagaaacgacaactggtggggagcctctttctgaagataatttagtaaatactattgaagcatccgacagagctcttaaccttgatgccgacaaagaagatgatacttgaatttttgaagggcagaatgggatacgttgcacgaaaccttgccgccattgttggcagtgctgttgcctcgaaaccgagtcgtgctgccgtgttggtggtttgggagcactggccaaaatgcccgcttgtaatgtgctgcactgctgcttctcggtgcaaaaaagacaaatctgtctggattctctactgcgtcagtgcagtctcgtattggttatctagaacaaactgaagtattatttgaaagcacacctccatctttaagatttcagtctagtagacttatagctgcaaagtcaacactagcaacaaggatcgattgtataaggctatcttcagcagtttactcattctcatctcttattttaacctacactctataaacagtgcattttacagtacaaaacagtgttttacatgttcatatgcacgatctgctggctatagcctaagagatgatccaactagaacggttgtgcagaacttgttagaagaaattagtaagaagattgaaaactggcaacaactaccacctgcaaggcttccaaagccaattccaattccagactttatgcctaaaaagaaacgaggggttgttggctccggaaaatgaaggaaagataatttatttgaaactttctcatgtccaaattgattaaaactattgtacttcatgtaaaagattgctatataatgcccattcacatgtctcatttgcattttgcaatttgttatattactcgagttccctggttgcattacctgtttggctgtttgtcttagttgcattttgcaacttactttgttatatcactctgagtgacccttcaatttcctcttacctttttgtatttgggaactcaattgtgaagatatgcacagaccaacacgatgaagcttgtgaatcggatgaagtttagcatgccagaggagagcacattgggtgatggcttagggaaaggttacggcttgcttgggcaggctggaagcgggaagctacgtgtgtcagctggtcaaagcaaactttctactaaaattgctaaaatgtaagcgatttatacgtgagtgacggtgttgaaatatataagtgaattgagtattttcttcc

SEQ ID NO: 123647 - DNA, 651 bp, Zea Mays
ccacggctgttcttcctcaagaactcgtacaacaagtttatcacgacccgctttacgaaacccgacccgctcttcgccttcatgtacgagcgtcccaggatgaaggacatgcccgcctccctggcgtccatgagctcctgcagctcgcgccgcacctcgctgtccacctgggcgctctttggtatcatgaacctcgctttctttcgctcgggtgctgcgtcgcgtgggtctgtctccttgcgaggggatgaggatgcatcaggttctccatcctcttcccacatgttaattccagtgctgatggtggacagcttcccggagggcttatctgtgtcctcggcgaagccattcttgtcgtattccgcgctgctgcggatgaactctgcaatgttgccgactagctccttctcgaactctaggtcatctttctggacatcgcgataaccgtatctgacaatgaccctgtatagcctatactctttcggaccaatgcgacccaccagaaatcgttcctcaggttgcacatgcggcacaggaactgatttgacacagaggaataccagtacctggtgaaacgcaggcagattggtgacgaagtgggagaagatagctgggattccagacatcagttctgtatgtattagcccaatg

SEQ ID NO: 123648 - DNA, 585 bp, Zea Mays
atgagatcaaaacgcatatacatacatatattatatatatcaccgccagtaaagagtccaataaccatgatgatgaccaagctcttcctaccaaaactcccaacttctccgttgcacttgtcaaatgctcccctcgagtgcactgatatctctatatcgctccctctcttttccttacactttacaggcagctaccagtacaacggaggacgccaaaacactactaggacggacggaggcaacaatagatctcttcctcgactgcttattgccactggtttagcccatgccgtaactgctgcggaaccgcagcccgttcagctcgaacggcgccacgtcgccgtggttcacgggcttgatctccacgggacggcggcggccggtgtccccctcctgcacggctccgaagacgatctccttcgccgcatcgcagctcggctcgtagaaggtctgcggcccggccgagtactgcctgttgtggtactgctggtgatgcacctgctgctgctgctgctgctgctgcggcggcagcgacgccgcctgctgctgaggagcagcagcagcttctccggtccagccgtgtga

SEQ ID NO: 123649 - DNA, 1516 bp, Zea Mays
aataaaaactgaaacaaacaggcccaatagcgataagaaatatccatgctcgcatctgagttagcccattacatcccgtgaaagtttctgggtccgcggaaacctctgaaatgacggcccatattgctcaagcttgctaaacctcctgctgtcctgccctagtgctcctctcctgttgtttcccggccccctccttcctcccacggtcccaccatcccagggccgccgcgctgcttctctttcccgtcgcacctccaacgctgccgccgcggcagattaatccaacaccgggccgggatacgtgacaggtttctgagctcgcagctctacgccagcgatgccggagacggcggcgccgatcggcctctcatgggcgcccaagcttccttccttcgcaacgaccagcggcggcagcaagagcgaccacgcgccgaacccgagcgctgcgcagggatcgctctggaaccgcgcgagcgacctcgtggacgggctgttcgttgccccgagggaccctaggcagctgaataagctggccaggaagaacgtcaaggacactgccggcaagggctggttcgacatgccagctccgaccatcactcccgagttgaagaaggatctcgagattttgcagctgaggcatgtaattgacccaaaaaggcacttcaagcgggcaggaaaatccaaggcccttcccaagtacttccaagtcggtacggtcgttgagcctgcatctgagttctactcaagtaggctgaaaaatagggaacgcaaggcaacattggttgacgagctgttatcagatcaatctctgaagagctacaggatgcgcaaggtacgtgaaattcaggagatccgtacaccaggaggcaaccaaaagtggaagaacaagggcaagaaaacgctcaagagggccaaggataggaggaaatgagactggcgtgctagccttgtggtccagttgtgagagaacagattggagaagtgaaccaaggagcgccttcaaataccccctctctcgatttgtgcgggctcgtggttgtcaattctgtcggttgggagcagcacagcactgtcatcagccagacacccatcagggatggggcacatgattggagccgaccgggtgaggcggcgaacacgcgcgcttggctcgtgtggtcgtagttttatcatcatctttaaaaaggatgcttgggtagggcaggcgagcacggcacgggctggacgcgatttcatggagttgttgcgccttgtccttttggcgcgacgaacggacggtcctcctccatgctggtgcggtggtgccgtggtgttggtgcggggggacagctgggattgggactggtcggcgtgtggtggacgtggaccggacgaacgttcacatggcgccgtgaatcgagttcagtgccccacttgtgacccatcgaaatggagagagtactacactactgctgtcttcgtctagaaaaacgtatatatgcaattctaacgtgcaactcactttaatatgccagtt

SEQ ID NO: 123650 - DNA, 1182 bp, Zea Mays
taaaaataaaaactgaaacaaacaggcccaatagcgataagaaatatccatgctcgcatctgagttagcccattacatcccgtgaaagtttctgggtccgcggaaacctctgaaatgacggcccatattgctcaagcttgctaaacctcctgctgtcctgccctagtgctcctctcctgttgtttcccggccccctccttcctcccacggtcccaccatcccagggccgccgcgctgcttctctttcccgtcgcacctccaacgctgccgccgcggcagattaatccaacaccgggccgggatacgtgacaggtttctgagctcgcagctctacgccagcgatgccggagacggcggcgccgatcggcctctcatgggcgcccaagcttccttccttcgcaacgaccagcggcggcagcaagagcgaccacgcgccgaacccgagcgctgcgcagggatcgctctggaaccgcgcgagcgacctcgtggacgggctgttcgttgccccgagggaccctaggcagctgaataagctggccaggaagaacgtcaaggacactgccggcaagggctggttcgacatgccagctccgaccatcactcccgagttgaagaaggatctcgagattttgcagctgaggcatgtaattgacccaaaaaggcacttcaagcgggcaggaaaatccaaggcccttcccaagtacttccaagtcggtacggtcgttgagcctgcatctgagttctactcaagtaggctgaaaaatagggaacgcaaggcaacattggttgacgagctgttatcagatcaatctctgaagagctacaggatgcgcaaggtacgtgaaattcaggagatccgtacaccaggaggcaaccaaaagtggaagaacaagggcaagaaaacgctcaagagggccaaggataggaggaaatgagactggcgtgctagccttgtggtccagttgtgagagaacagattggagaagtgaaccaaggagcgccttcaaataccccctctctcgatttgtgcggggtatatagattctggttccagtgtagtgtgatgaacttcagtaacatgatgaattgctttagatacttcaaaaatgttgctgtaacacacatgtatggtttttcagctcgtggttgtcaattctgtcggttgggagcagcacagcactg

SEQ ID NO: 123651 - DNA, 1317 bp, Zea Mays
tctctatgctctgaacttgtctcagaagctgccaaatatctaacttttcagattttataagaatcactttgatgataaccatctaaaattatgtgaacaaaaaaatcagtcgagtcgttatgaaagtaggaatccgttattttctagatcctaaaccctatgaacatcttcatctccctccacacgtaattctctcaatattcagattctctcaacagccagattttctccatagctagattctcagaaaagctcgttaaaaataaaaactgaaacaaacaggcccaatagcgataagaaatatccatgctcgcatctgagttagcccattacatcccgtgaaagtttctgggtccgcggaaacctctgaaatgacggcccatattgctcaagcttgctaaacctcctgctgtcctgccctagtgctcctctcctgttgtttcccggccccctccttcctcccacggtcccaccatcccagggccgccgcgctgcttctctttcccgtcgcacctccaacgctgccgccgcggcagattaatccaacaccgggccgggatacgtgacaggtttctgagctcgcagctctacgccagcgatgccggagacggcggcgccgatcggcctctcatgggcgcccaagcttccttccttcgcaacgaccagcggcggcagcaagagcgaccacgcgccgaacccgagcgctgcgcagggatcgctctggaaccgcgcgagcgacctcgtggacgggctgttcgttgccccgagggaccctaggcagctgaataagctggccaggaagaacgtcaaggacactgccggcaagggctggttcgacatgccagctccgaccatcactcccgagttgaagaaggatctcgagattttgcagctgaggcatgtaattgacccaaaaaggcacttcaagcgggcaggaaaatccaaggcccttcccaagtacttccaagtcggtacggtcgttgagcctgcatctgagttctactcaagtaggctgaaaaatagggaacgcaaggcaacattggttgacgagctgttatcagatcaatctctgaagagctacaggtatacccatcatacttttgccgttttgcatgtacattaatggacagtggcttgtttttcagtgcaagattttctgtaataattgcatatggtcttttggatctctagcaattcatgaaatctagtatctagcattaactggaaacattgtatgtatggatagttgtaacccgtgaaacctattttagatatacacactagagccgtgtaattattatgctggttggactctga

SEQ ID NO: 123652 - DNA, 2148 bp, Zea Mays
tacactccccctagtttcttttcccccggttttttccgtcctctcctcactcgtgtccgatggctcgcccccgccgcctcctctgacgacggtctgactgacccccgcctccccggagagcggctccgctgtctcgccggatatggcgccgcctcgtccccctcctaacccggcgggggagcagcagccgcagctccacggggtggtcatcatcacgctccctcccgcggaccagccctccaagggcaagaccgtcaccgccttcgcctacaccaacgaccccccgccccctcgctcgcccccggatccggttatggggtacccggcggcgacggaggctaggcggcggccgaggcgggcgctctcgacgcggcgggtggcgacggcggcgctcgtgctgggcgcgctcgcggtcgccgcctactattgcttctactcggacgtggccgtgcagttcctggggatggagcaggaggaggagcagaggaacgagaccaggtctttcctgctgccgctctaccccaaggcgcgtcagggccgcgcactgcgcgagttcggggacgtcaagctcgccgccaggagggtcgacgacggcggaagaaaggctaggaacaggatggaggtcgcgaaggcggccacggcgaggaccaattccacggcgttgctcccgatcaagggcaatgtcttccccgatggccagtattacacatctatctttattggcaaccctccaagaccatactttcttgatgttgatactggaagcgacttgacgtggatccagtgtgatgcaccatgtacaaactgcgcaaagggaccacatcctctatataagccagcaaaagaaaagattgtccctcctagagacttgttgtgccaagaattgcaaggcaaccagaactactgcgaaacctgcaagcagtgtgactatgaaattgaatacgcagaccaaagctcctctatgggtgtccttgcaagggatgatatgcatatgatcgcaaccaatggtggaagggaaaaattagattttgtctttgggtgtgcatatgatcagcaaggccagcttttatcttcaccagctaagactgatgggatccttggacttagcagtgcggcgataagctttcccagtcagctggctagtcacgggattattgccaacgtttttggccattgtatcactagagagcaaggtggtggaggatatatgtttctgggagatgattatgtacctagatggggagtaacatggacttctattcgaagtggtccagataacttatatcacacacaagcccaccatgtaaaatatggggatcagcaactccggaggcctgaacaggcaggaagcactgttcaagtaatttttgacagtggaagctcctatacgtacctcccaaatgaaatatatgaaaaccttgttgcagcaatcaaatatgcgtctccgggctttgtccaagacacttcagatcggacattacctttatgctggaaagctgatttccctgtgaggtatctggaagatgtcaagcagttcttcgagcccttgaaccttcacttcgggaagaaatggcttttcatgtctaaaacattcactatttctcctgaggattacttgattattagtgataaaggaaatgtctgtcttgggcttctcaacggaacggagattaatcatgggtcaactatcatagtaggagatgtttctctgcgcggcaagttggttgtgtacgacaatcagcggaagcagattggatgggcagattcagactgcaccaaacctcaatcacaaaagggctttcctttcttcctctgacgaagcatcactctctacataatacatgtgtaaagcgtaaatagtgaacgccattgtattgtagaatacattattaagtggagactgcctttgtgtatgggtatatcgttccattggaactgtcagaaatcctccactgtgttgtacccgtctgtaatgtgtatactatgttgtttacttgtatgatgtatgtacactatctcctctacatggagttgtcccctacacatggattttttgtagattagttacattatgaacattttcgacagaagttgggtactttacacatttgatcatccattcaatactgggtgtgtgtgtgttttatc

SEQ ID NO: 123653 - DNA, 887 bp, Zea Mays
tacactccccctagtttcttttcccccggttttttccgtcctctcctcactcgtgtccgatggctcgcccccgccgcctcctctgacgacggtctgactgacccccgcctccccggagagcggctccgctgtctcgccggatatggcgccgcctcgtccccctcctaacccggcgggggagcagcagccgcagctccacggggtggtcatcatcacgctccctcccgcggaccagccctccaagggcaagaccgtcaccgccttcgcctacaccaacgaccccccgccccctcgctcgcccccggatccggttatggggtacccggcggcgacggaggctaggcggcggccgaggcgggcgctctcgacgcggcgggtggcgacggcggcgctcgtgctgggcgcgctcgcggtcgccgcctactattgcttctactcggacgtggccgtgcagttcctggggatggagcaggaggaggagcagaggaacgagaccaggtctttcctgctgccgctctaccccaaggcgcgtcagggccgcgcactgcgcgagttcggggacgtcaagctcgccgccaggagggtcgacgacggcggaagaaaggctaggaacaggatggaggtcgcgaaggcggccacggcgaggaccaattccacggcgttgctcccgatcaagggcaatgtcttccccgatgggtacgcaaacagtcgcgcaggcgttcgatctgatttcaactcttaagagttggctcatttatgatttgagtcgatagaaagtttagttttcgagtagtctcgaaaaggacgatagcttgggtggatcagatttgggggaatttcctggatcccactgaatggcatgtgaccaaattgggtagtagacatgt

SEQ ID NO: 123654 - DNA, 1459 bp, Zea Mays
ggaaaaaaatatttgtttggtgagccacgcccccgtccagatccgcgggggaggacggcgatttcgtccccagcctcacgaggtcaggaagggattcccgcacccacttttgtgaacctcgctgccgcctcctctgccttcacgaactcgtcgccgcccgtcccctgctcttcctcgcgcacccaccgtcgctcatccccttgtcttccttgcgcacctgctgttgccgcctcctcctcaccctcacgcacttgaggccagctgcgggatgagctcggacgacggagacgaggtcaaggtctgcgacctcctcagcttgcgcaagactgccgagactgcaaggacaagctcattgctgcctcctcaactgcttctcggatactaacaaatgggttctataattgagttgataaggaaacatttgaaataggaggaggaggaggatgatgatgagttattttttgtgttagttccagctatatatgcttccctttattctgaaaagaggccagtacacacttcttgtcgtagtggtgcacaaaaagttagagaaatgctcgatggtcatgagagatggtgcaaatctgagtttcgaatggagccatagatctttagagctgtagcaagctatcttagaaaggaaggattgttgcaagacacttcaaatatgaacattgaggagcatcttgggatattcatgtacatgatatctcaaaatggtagcaatgcgatcttgcaaaaagaatttcagcatagcggggaaaccatacatagaaagataagttagttctttggtataatccttgctataactcaaagatttgtgaagctcccaagtgtaaaccagccacatgtgaagattacatccaatcctcgattttggccttactttcaaaattgtatcggtgcaattgatgggacacacgtccccataactattagtgaagagagagcccctccatttagaaatcgaaaaggaaccctttctcaaaacgtgatgttggcgtgcgacttcgatttgaatttcacattcatctcatgtgggtgggaagggtccgtatctgatgcaggggttcttcaatcagctttaagaaagggtttcatagtgccaaatggtaaatactatcttgtagacgggggatatgcaaacactccttttattgccccatatcgaggagtttcttaccatcttagtgaatatcggaggcgagggtcgagtactgtataggttgattataaggagctatttaatcattctcatgccctccttcgcaaccacatagaaaggtccatcggtgtcttgaagaagcgatttcccatcctcaaagtgggcaccttttatcctatagagactcaagttttgattccatcagcagcagtttcatttcataacatgattagaggtttaaatggtgaagatggatggttgcatcggcacccaactaacatcaattctagt

SEQ ID NO: 123655 - DNA, 1645 bp, Zea Mays
atgggtgtcgatgaagataatgaagctatcacccgagccaacaaagaaatcagtgcagagcctactccacttgatcaggacagcgagtcgacagagcaagcggaggatgtcgtggacttgacggagctgaaagagaaggtgattggggctgttccttttcctccacagcgcctcgacggctggatgcagcaatggccaaccatctacgtggtccccggcgacctagccgccggaaaaacggacccctacgcccccgccaccgtctgcttcgggccgctcttcggtccggcgaggcgtgtgacggacggcatggcgaagctggagcgctacaaattgtgctgtcttcgcaagctcatcgtggggcgcagccctagccctgcaggaactggaacccgacctgcagagccagccgtgtggaagccggaggtgcacgaaccgatgcttcgcagttgcgtggacgcgatgacaagactgctcccgagaattcgtgcttcctacagcatcgcctcatctatggacaccatcgctggcgacgaaaacaccgtgcgagaagtcaagatgctgctctaccccaaccccgaggtcgccgccgtcatgggatcaactctggctgagaacatgctgctggacggctgcttcatcctccaccgcctgctcaagatggcaagcagagcagcagggaaacgctacgacgacgacgacgatgactggacccaggtgtttggtcggcgcggggtatgggcgcttgtcacgcgcgacctgctgctgctccacaaccaaatccccttgtttgtcatcaaggctctgctgaagcagcttaagggtccagctgatatcgaagacgacgacgtcctcgtggacggcggccttcagctcttcagctcgctccatcctcggaggaggctgcagccctcgccggacgactcgctccgcctccgcctccgcgacgcgcaccacctcctgcacctcttctacctgtccatcaccaacatcccgacgcagtcatcagcctcagcgtcgccggacaagaagcttccaccggagctcacgcagtgggtgccgtgcgccaaggagctggaggacgcaggcgtgagattccgggcgaggaaggacggcaccgcgacgggcttcctggacatcaggttctccgccgtcggcgtcctggagatcccgccgctgcagctctacgactacagcgagcctctgttccggaacctaatcgcgttcgagcagacctacccggacacgccgggccacgtcaccgcctacgccatcttcatggactgcctcgtcaagacatccgacgacatgcgactcctccacagccgcgggatactgctcaaccacatgagcggcgacagggaggcggccacggggttcttcagcggcatctgcgccggagcgcacgcctcggccgaccggaactatctcgccccactcatggacgaggtggtcaggtaccagagtggaaggtggccccagtggcgtgccgcgctgctgcgggactacttcggaaacccgtgggcggtcatcgcgtttgttgcggcggcgatcgtgctcgcgcttaccatgctgcagaccttctacactctctacgcctactaccagccacccaagcagtcctagctagcaactcgtgatacac

SEQ ID NO: 123656 - DNA, 416 bp, Zea Mays
tgcagatatacgtgactgataaagcgttcgggaacgatccccgggtgtcgttcttgaagtctgaagccaaggaccacgagttcatttctacttgggggctttatgagctagctgtccgccacctgcagacgtgctggttcgaccgtaattgtcgccacgccatgcatctgccattttcacatgcacgttttgttctgaattcttggaattctggctctctctctctctctctctctctctctctctctctctctctcacaatcaagatgagttcgtttgatgttgctgtgaacgatctggtggtaactgcccaactgctggtagtctggtagacaggtagaggctgtgattggagccgactggtgggtgctcagccgcggctgattgcaaacatgaaactggcatgaaggcaaagg

SEQ ID NO: 123657 - DNA, 142 bp, Zea Mays
tttttattttcttattttttcgtgtgactctaaattattgcgaggattatgttgataatgcccagataatcaggtgtgatcgtccttttctcctgctcattgtttggtacagcgctacggtacgaaactataatacactctt

SEQ ID NO: 123658 - DNA, 1845 bp, Zea Mays
ggcacacgagaaaacaaaaggggagagaagacgtccaccgagctacgttcccaccgctgctggatcgatacagccgagtccaaaagaaaaaaaaaaaaccaccgcaagaatccatccaatccagataacgtcacaaacgactgattttgtgtccatgttgcctccacgcgacggatcgcatcgcctctggtttcgccacgccacggtcccgccagccgccccgaggccagtctaaagccagccgcgcagccgcccacgacacctctcgtctccctagtcctgttgtgccggacccctgcgccgcacccgcacggcaacagcatcgacctaggcccggtcccgtgtcgcttcgtagttcgtccccttccccgcgcccccagcagcagcggattcccctcgagagatccggcccttggcgcggtcgccggagagagcggcatggggctctgggactcgctcctcaactggctccggagcttgtttttcaagcaagaaatggagctctccctcgttgggttgcagaatgctgggaagacgtcgctggtcaatgccgttgctacaggtggctacagtgaggacatgattccaacggtaggcttcaatatgcggaaagtcaccaagggaaatgtcacgattaagctttgggatcttggtgggcagcggagattccgcactatgtgggagcgctattgccgtggagtttctgctattctgtaattcctgctcttctaagatattaaatactgtagatttcatattcattgtaacatacaactcataacctccaaattggagcaatttatggttggtattcatttcttaaagataatcaaatccttggagatcaaaccagcattccatgtagcaaggagatattaaagtctagatacctgcctaacattatattcattttcataccctgattaagcatattttcttcccttacgagcaatgtagatatatttattctgcattctgtttattcctatatgcagatctagaaggatcatataattgtaagttggaaactaacacatgcagagagagagcaggatggcgccactgttgtgcgaggctttattatcaaacatataacaataaaggaactcaattacatttacagagaatatcatataatgcatatatcccttttctttattctcttgaatcataaaaacataaaccctatgtttgttcctgtgtttatcatgttatcttgtgtttgtatgaccgttgttaccgagatatttttcagttatccagccttactggctatccttgatggatcatggtttgttaattttgtgattaattgcaggtatgttgtggacgctgctgaccgagatagtgtcccaatcgcgaaaagtgagttgcatgatctgctgacgaaacagtctttggctgggattcccttgcttgtccttggcaacaaaattgacaagtcagaagcgctttcgaagcaggccttggttgatcaacttggactggaattgataaaggaccgggaggtttgttgctacatgatctcgtgtaaggattctgtgaacatagacgtcgtcatcgactggcttatcaagcactctagaacagcgaagtaggctttctgtgtgtttgtatcgcttgatgcacggtgttttatcttttgtgaatctgcgcttcccagaagcctggttccttggtccccatgttaaaagcggccaccttgtaatttatggtttctttggtgtcacagacgaactgcatggtatctagactagaaacatgtattccctttgtaaatcctttgaacctttgattattcttactgtgaatgccgtccagtgtttttattctgcacataacaaa

SEQ ID NO: 123659 - DNA, 1240 bp, Zea Mays
ggcacacgagaaaacaaaaggggagagaagacgtccaccgagctacgttcccaccgctgctggatcgatacagccgagtccaaaagaaaaaaaaaaaaccaccgcaagaatccatccaatccagataacgtcacaaacgactgattttgtgtccatgttgcctccacgcgacggatcgcatcgcctctggtttcgccacgccacggtcccgccagccgccccgaggccagtctaaagccagccgcgcagccgcccacgacacctctcgtctccctagtcctgttgtgccggacccctgcgccgcacccgcacggcaacagcatcgacctaggcccggtcccgtgtcgcttcgtagttcgtccccttccccgcgcccccagcagcagcggattcccctcgagagatccggcccttggcgcggtcgccggagagagcggcatggggctctgggactcgctcctcaactggctccggagcttgtttttcaagcaagaaatggagctctccctcgttgggttgcagaatgctgggaagacgtcgctggtcaatgccgttgctacaggtggctacagtgaggacatgattccaacggtaggcttcaatatgcggaaagtcaccaagggaaatgtcacgattaagctttgggatcttggtgggcagcggagattccgcactatgtgggagcgctattgccgtggagtttctgctattctgtatgttgtggacgctgctgaccgagatagtgtcccaatcgcgaaaagtgagttgcatgatctgctgacgaaacagtctttggctgggattcccttgcttgtccttggcaacaaaattgacaagtcagaagcgctttcgaagcaggccttggttgatcaacttggactggaattgataaaggaccgggaggtttgttgctacatgatctcgtgtaaggattctgtgaacatagacgtcgtcatcgactggcttatcaagcactctagaacagcgaagtaggctttctgtgtgtttgtatcgcttgatgcacggtgttttatcttttgtgaatctgcgcttcccagaagcctggttccttggtccccatgttaaaagcggccaccttgtaatttatggtttctttggtgtcacagacgaactgcatggtatctagactagaaacatgtattccctttgtaaatcctttgaacctttgattattcttactgtgaatgccgtccagtgtttttattctgcacataacaaa

SEQ ID NO: 123660 - DNA, 113 bp, Zea Mays
catgcagctagcgacggatcggtcggagccggtggtggtggtggcggtggcgctggcgctggcgagacgtggcgaggccggcggagccccaagtgtctggccgcgagcgaacg

SEQ ID NO: 123661 - DNA, 1305 bp, Zea Mays
gcaaattaaggcttcagctcgcgcgagacctcagctttcactcgagtgagtgcgagtccatcgccggagagagagagcgagagagcacgcaatcgagttaaacaagctctgtctcttggttctctgtccacggcgggagagtgtgagagatgggcaggcagccgtgctgcgagaagatcggtatcaagaaggggccgtggaccgcggaggaggaccagaagctggtcaccttcctcctgtctcacggccattgctgctggcggctcgtccccaagctcgcggggctgctgaggtgcgggaagagctgccggctgcggtggaccaactacctgaggccggacctcaagcgcggcctcctctcggaggaggaagaggcgctggtcatcgacctccacgcgcagctcggcaaccggtggtccaagatcgcggcgcggctgccggggaggacggacaacgagatcaagaaccactggaacacccacatcaagaagaagctcaagaagatgggcatcgaccccgtcacccacgggccgctcgctccggccactcaacctctggcgctggcgctggcgcagcagcgcgatcctccgcaggtggtgcgagaagaggaacgttgcgacgacgaccccagcaagcaggcatcgtcgcaagggctggcggcggtcgccgacgaggacgacgacgtggaggagacgccggcgagcgccgcccagccgcacggcgcgacgaccacctcccctgcttccgcagcggctggatccgtctcgccgtcctgctcctcctcggcctccggcgcggacgcggacgcggacgcggccgcctggcccggccccatcgacctcttcctcgaagtggacggcatcatggacatggactgggcgggcatcctttcgggctgcggcgatgacgacgccgccgacataagcggcgtcgatcttttcgaccattacgcaggcgatggctttgatgaacaagtctggatgtgatgcatgctcttcctgcaggtagcagtgagtacactgggcggtaggatggttagaactgtgttgttactggtgatcgtatctctgctcttgcgtttgcgtgtccagttgcctctcttgttttctttggtttcttgggtcaattcaagttcgcccgcgtccatgcatgcatggttgctggtatgggggagaggcacggcctggtttgtgtggtacgttcttcgtgaagattgaggaatgaattgtgattgcgtcaagctgttgatctcaatctcgtggctagggatcgatcattctcggatcaagagcaactgtcaaatcc

SEQ ID NO: 123662 - DNA, 1987 bp, Zea Mays
ggagtttgtgttcccgacctccagcctcctggaaccaggatagggacagagacggagccacggtcgcacagagcagtcttagctccggccacggccaccgggagtagctctggccatgaggacctcaacggctacctgtgctatcctccctccgcctacctgctcctcccgtagtttaccgctccgcagcttcatcggtctccggtggtccgccccccgtttccaggttagggagcgagctggtgcgtccgtagcggttgtcaatggcaagccgggatgcagcttcagactcggagtacctactttaaatgtttgtcaatctcgccaaaggtctgttgtcattagaaatgaacatgctcaaaatgctgaccttccacgaaaatattcaaaaagagagaagaaaccatttcctatcccagtgctggagttaaggcgccgagcaaaggagaggatgaaggcagcacaagggaaaccgaaacaaccaatgcctccaccaaaaaacggaatgttagtgcgtagacttataccagttgcatacaaagtgtacaatgcaagaattttgctgatcaacaacttgaagaggcttatgaaagtagtaccagtaaaaggctgcaagtattgcagcgagatacatgttggatctgttggacatcctttccgaacatgccgaggaatgtcatcagatcaacgtagaggagaacatgactggggaagtactctagtggaggcagttttcttacccgtcgaagcctatcatctagaggaccgtctagggaatcgcattcctcatgatcagaggtttactgtaccccgcattcccgctctcgtggaactttgcatccaagctggagttgacctccccgagtaccccacaaagcgtcgaagaaagcctatcattaaaatcggaagaaaagagtttgttgatgcaaatgaagacgacctaccagaaccagagcctgacagatttaggcagccacttcttgaggaactacgttatgatgagattattgctccatctagcccagaggagacggtggctcttgccgaggagacacttgaagcgtgggaggccgttcgggacggagccttgaagcttatgaagggctatgcagtgagggtttgtggatactgccctgaggtgcatgttgggccaactggccacaaagcacggaactgtggagcttttaagcaccagcagaggaatggacaacatggatggcaagcagcggtgctcgatgacctgatacctcctaggtacgtgtggcacatgccggaatccggggaagaactgcagagggagctaaagaccttctacggtcaggcaccagcagttgttgagatgtgcattcagggtggcgcaaaagttccggagaagtataaagccactatgagactagacataggaatcccctctagtttgaaggaggctgaaatggtcgtctgatcctcccaatgatctgggcagatttgatcaacctgtaattgagttttttcctttgtgttgaaaagatgatgtcgtcaccaagctccatcgtggcttgacataggttgaatctgttagccaatgtgtatatatcagaactcagatgagatgattctcgttcggttttctttcagtccgcaacgatatgtttgtgtatttctttagaaacaaatgtgctatactgtgctgcacctacctcttgatcacaggcagtataattcatgccttgcaaaatagcataaggtaagctgaggctgatttgatactttctgtaggacaatatcatctaaacatataccccaaggccaattttgttccctgcaacttttggtactatctgggcatctacaaaggagtcagaaatctatttattgtacactatatcaggcacaaaaacaaaaaccattagcagtcttgaatagatccagctgaaacagatgaccccaacaaactgaaatgttaaattttatcagaagcataaggagtagtttacatttgcctacc

SEQ ID NO: 123663 - DNA, 228 bp, Zea Mays
atggcggcgtccacgtcgatgggcgcgtcggacgcgaagatcccgttcggtctatggggggaggcggttaggtcggaggcggttagggaggtggagcggaggcagaggggagatggtgagggcgccgagcatggagatggaggaagggagtgggtgtgggaggggagaggggcaggacggcggtgcgggggtggaaggggcgctgggggtgggggcactcctggatga

SEQ ID NO: 123664 - DNA, 733 bp, Zea Mays
aaagctgtcgcacccggccggcaatgggtctcgtcgtctccgccaccgcgtcctgcagcgatatcttcttcagccgacgccgctcctcaagtccgcctcccccagccgcggctagcactcccccgcccacgtacacaataccggagccggccctcgtccgcgtgttccgccacttcgacgcggacggcgacggccgcatctcggcggacgagatgcgcgagttgtgcgggtgcacagccgtggaggcagacgagatggtagctgtcgcggaccgcgatggagatgggttcatcagcctcgaggagctcgaggcgctgtttgaggacggcgaccggtcagacacgttgcgcgctgcgttcgccgagtacgacgagaacggcgacggcgtgatcaccgcggaggagctgcgccgcgctctgtggaggctggggatcgtcggggaggagatgacggccgagcggtgcgcagagatgatcgcggtggtggacatagacggcgacggggtggtctgcttcgacgagttcaaggccatgatggacacggcggcggcgtcatgaaccatacgcgcccggcgctctgcaccacacgtgtacgtgtacgtctgatattgttcgtcgacatgataacaccctaattagcagtaaacccattagttttagggtttcacgttctagtctagttcgagattggtttgtgatcggattaaagttttgcgttgtggcgccgtgtgcaa

SEQ ID NO: 123665 - DNA, 728 bp, Zea Mays
atcccatgcgccgcgccgcgccgcgccgcgttgcgttcgtccagaatccaaacagtacggtacatcacctcctcccttgacctctcgtctccgaagaagagattctgccgagacaagatgatggagaagcagagcagggagcaccaggaaggctggcggcggcagaagcagcagcaggaggaggaggtggtgatggtgatgcacagccaggtgatgcggatcaagcaggaggaggacgagcgggccaaggtgcacgagacgtaccagcaccacgtctccgagatgcgccgaggcctgcgggacctcgacaggcagcgctcccgctccccgctcggccgcgccgcccgcaccgccatctccatcggcggcgactcctagggaatttactggagctggagctggagccgatcgatcccctcggggatgggctgtggggaaggcgtcctcggtcggcgatcgccgtcgtctcgccctcgccctcgccattccctcgctagggtcgattgatcgatcgttggtaggatccgtttcgtatcgtcgtcttcttggcacggtcggagtgctttttgagaagcacgcattttcattctatattggttttagggtgatataatggatcaatcatgtaaatatttttcttcatcattcgatcgatctacaggatgatgcaaaaatctgtttggtttgagaaataagtttatcttctcaatctttatttttttgatttg

SEQ ID NO: 123666 - DNA, 1449 bp, Zea Mays
acctcatgctcctcttctcctgcctgccagctgccactatatataccacccgcgccctcccgctcgccgtcgcccaccacaacaccgacccccgcttcaccaccacaatccacaagcagctccggcctccagctgagactctcgagttccgagtcgtccgtacgtgtcgtacgtcccagcagccggcgctcgtcgtacgtactgcgtacgcgcgcaagcgcttggtacgaccgattcagcacgcatggcgatgaagaagggcggcggcgcggcggggctgaagcagatcctgaggcggtgctcgagcctggggcgtcgtcagcagcacggcgcggggtacgaggaggaggaggacgaggcggcggcgacggggctgccgtccgacgtgccgcgcggccacttcgcggtgtacgtgggcgagcggcgccgccgcttcgtggtgcccatcgcgctgctggaccgccccgagttccgctccctgctgcgccgcgccgaggaggagttcgggttcggcgccggcggcatcctcgtcctcccctgcgaggaggtcgccttccgctccctcacctccgcgcttgcctgcgcccggtgaaggggtgcgggttgcctgccacgccgcgtcgccgccgctatattcgttcgattcattggtatctcggcgagcttactcacctacactagctactagctcggcgagagctccagcggttacgttgatgatggcgtgtgtcgtacgtgtgtaaatatagattactcgtattagagaaaagcgctaagctaagaacaggccggtggcgcggccggccggctgctgcgcatgcgcggaggattgtgccagcgcgcccccggcccggccggcattggagacggccgaccgaagattcgaaggatgaagcacaaggacatcgacggatcagatgcatggagctgagcgagagcgagagctccagatcagcttcgctgcagtcggctacgtacggctatcatcatctatctagccgtacgttgccacgttggccgctgctagctgcattgcatgcatgtacgttgtttgtgatgcgtttcacttactggccccctgctggtgcaacaagtgaaccatcattttttcccttttttttcggtacatgcaaagatactgctggctgactgtggcctgtgggtacgtagccagaggcccagagctaggtagctggtatatgggcgaccgtacgcaccgacatcaagcattcagatatgcacacacagcatacaaacaagtgtgtgttccgtccatccttcaattccttgcagcttcggttcgtttttatatatcctgatgattcatcgatcaataaatataggagtattttttttttgttgccgcaaagcaaaaaacatatatgcatggttcatgacaatgatgtgtcggtcctgtatgcgtgtgacgcgtgctccggaagaagctgg

SEQ ID NO: 123667 - DNA, 1629 bp, Zea Mays
tttacccggctggacgccaaccaactggtttcccgtccttggtcgtcgccattatatagccgccctcctcccgggccgatctcttcgtctcaatcccacgccacatcctcccctccttcctccttgggttcccagcccgtgcgcccgcctgtcgcagtcgcaccgcagccgccggccatggcctgcctcaccgacctcgtcaacctcaacctctcggacaccacagagaagatcatcgccgagtacatatggatcggtggatctggcatggatctcaggagcaaagccaggaccctcccgggcccggtgaccgatcccagcaagctgcccaagtggaactacgacggctccagcaccggccaggcccccggcgaggacagcgaggtcatcctgtacccgcaggccatcttcaaggacccattcaggaggggcaacaacatccttgtcatgtgcgattgctacaccccagctggcgagccaattcccaccaacaagaggtacagcgccgccaagatcttcagcagccttgaggtcgctgccgaggagccctggtatggtatcgagcaggagtacaccctccttcagaaggacaccaactggcccctcgggtggcctattggcggcttccctggccctcagggtccttactactgtggaatcggcgcggagaaatcgttcgggcgtgacatagtcgacgcccactacaaggcctgcctgtacgcaggcatcaacatcagtggcatcaacggggaggtcatgccggggcagtgggagttccaggtcggaccgtccgtcggcatctcttcgggcgatcaggtgtgggttgctcgctacattcttgagaggatcaccgagatcgccggcgtggtggtgacgttcgacccgaagccgatcccgggcgactggaacggcgcgggcgcccacaccaactacagcaccgagtccatgaggaaggagggcgggtacgaggtgatcaaggcggccatcgagaagctgaagctgcggcacaaggagcacatcgcggcctacggcgagggcaacgagcgccggctcaccggcaggcacgagaccgccgacatcaacaccttcagctggggagtcgccaaccgtggcgcgtcggtgcgcgtgggccgcgagacggagcagaacggcaagggctacttcgaggaccgccggccggcgtccaacatggacccctacgtggtcacctccatgatcgccgagaccaccatcgtctggaagccctgaggcaccccgtggccgtgtcgtgtcggtttgctccgcgtacggcgctggccgttgcatcgcagggcccagcggttgcgcaactattttcccttccccgttctgtttgcttgtactactactctaccgctagtcctgcatagcattttagctagaacacaacaacagccaaaaaaaagtattgttgcttgcttcgacgcttgccaccacttccattccatgccgtccgtccgcttccttcctgtgtaatcctcctccaataatagacgtgccatgttgcatcctctattcctctgcattgtataaaagtggtgtaattcttttgctacgcctccaatgtctgtggcttttagctgctgatgcgatgtcagattctgtcacgga

SEQ ID NO: 123668 - DNA, 1539 bp, Zea Mays
tcttcgtctcaatcccacgccacatcctcccctccttcctccttgggttcccagcccgtgcgcccgcctgtcgcagtcgcaccgcagccgccggccatggcctgcctcaccgacctcgtcaacctcaacctctcggacaccacagagaagatcatcgccgagtacatatggatcggtggatctggcatggatctcaggagcaaagccaggaccctcccgggcccggtgaccgatcccagcaagctgcccaagtggaactacgacggctccagcaccggccaggcccccggcgaggacagcgaggtcatcctgtacccgcaggccatcttcaaggacccattcaggaggggcaacaacatccttgtcatgtgcgattgctacaccccagctggcgagccaattcccaccaacaagaggtacagcgccgccaagatcttcagcagccttgaggtcgctgccgaggagccctggtatggtatcgagcaggagtacaccctccttcagaaggacaccaactggcccctcgggtggcctattggcggcttccctggccctcagggtccttactactgtggaatcggcgcggagaaatcgttcgggcgtgacatagtcgacgcccactacaaggcctgcctgtacgcaggcatcaacatcagtggcatcaacggggaggtcatgccggggcagtgggagttccaggtcggaccgtccgtcggcatctcttcgggcgatcaggtgtgggttgctcgctacattcttgagaggatcaccgagatcgccggcgtggtggtgacgttcgacccgaagccgatcccgggcgactggaacggcgcgggcgcccacaccaactacagcaccgagtccatgaggaaggagggcgggtacgaggtgatcaaggcggccatcgagaagctgaagctgcggcacaaggagcacatcgcggcctacggcgagggcaacgagcgccggctcaccggcaggcacgagaccgccgacatcaacaccttcagctgggtacgcttctaattgtgcaactgctgtaccgtggaggatcggcgaaacccgtgtgcctgccaactgttgttgctttgtgccgttgcagggagtcgccaaccgtggcgcgtcggtgcgcgtgggccgcgagacggagcagaacggcaagggctacttcgaggaccgccggccggcgtccaacatggacccctacgtggtcacctccatgatcgccgagaccaccatcgtctggaagccctgaggcaccccgtggccgtgtcgtgtcggtttgctccgcgtacggcgctggccgttgcatcgcagggcccagcggttgcgcaactattttcccttccccgttctgtttgcttgtactactactctaccgctagtcctgcatagcattttagctagaacacaacaacagccaaaaaaaagtattgttgcttgcttcgacgcttgccaccacttccattccatgccgtccgtccgcttccttcctgtgtaatcctcctccaataatagacgtgccatgttgcatcctct

SEQ ID NO: 123669 - DNA, 109 bp, Zea Mays
tatttaaattaaacaacgtggggtcgctgctagtgatcccattattgctgagtcacccttgtcggagtcctgttcattccgccattgctcaattaaccgtggttatcac

SEQ ID NO: 123670 - DNA, 1095 bp, Zea Mays
atggagacggccaccacgtcgccggagcacccgctgctccgccgctcatcaccgtcgtccaataccaacgccgacgctgattctgtcaacctgtcttcgcctcctccctccgcggcgaggccaagccgtctcgcggcactcatcgggcgcgtggggtggccgcgcgggccctcgatgatggtgcacgaggcgacgacgctgcagctgcatcgaaggcgcgcggactgggcgcactcccgccccgtcgtcacgctcgacatcgcctggaacgtcgcctgcgccgccgctgcggccttggtgctcgcgtcctccgccaaggacagccccgtgaagccactccgcctgtggctcgtcgggtacgccgcccagtgcctggtgcacgtcgggatcgtctttacccgtctcgagacgcgggcgcggcacgcctggggcccggcctcagacgttgaatctgccggcgcagggacggacagctcgggaaccgacagcgaagatgacgaaacggcggaagggaggagcagccatgcaagtcgttgtgagacgataaacaggttgatatcatttctgtggtggatcattggattctactggctagtatcaggtggggaggtgctggagtatggcgcgccaaggctttattggttaaccattgtgtttctggcctttgatgtgtttttcgctgtgttttgtgttgctatgtcctgtttcattgggattgcactgtgttgctgcttgccttgtgtcgttgctattctgtatgctctggctggcaaggtgggtgcatcagatggagatattagtgtccttccgagatatagatattatgatccaagtgaggacagtgaggaggaaaccgatgaaggtctgatgatccctatccttaataacagtggaatgtcaacgagtgagcgtattctgcttcgtgaggatgctgaatgttgtgtctgtctctcatcatacgaagatggagctgagttatctgctctcccttgcagacatcacttccactggagttgtattaccacatggctgcgcatgaacgcgacttgtccactctgcaagtataacattctcgaaatcagtgacagtgcatga

SEQ ID NO: 123671 - DNA, 2489 bp, Zea Mays
cgaaaacgaacagcccctcgctttagattgccgcaagttcccccattcctgtagatcgccggcccctcgctcggctcggccatgtcggccggctccacggcgtccctcctcgcggccgtcatctgccttgccctcgccgtgcttgctcccgtcgttcctggagatggtgccacattggaatcagttccagaccttgtgaaggcaatgtacctaaacgttgaaagcttcccttgtgtgaggctgttgaatctttctggtgaaattggctgttctaatcctggaagtgagaaggtcattgcaccaattgtaagacttagaaaaggcagtgatcaattggttcaaccatctactattctcctttccttagatcagatgtcagatttctttctgagggtatccaatgatccagaacttcaccagaaggtggcaggtgtattggttgagtcaaatggtgtcaacaatgacttacaagagctgtctcctgatagaaaatttccacaagatgattttgcaccctactcaaatcacagccatgattggaatcctgctggatcaggtatcatgtggaacaaatataattttcctgtatttctactttcagaagagagtacaaacactcttcaaaagatttcagaaaaaaatgagaagactggcaatggatataaagcaaatgttgcagaattcgaccttgttatgcagacaaccaaagctcaaacacatgattcagcatcctgcctcaaagaacaatcatgcttgcccttaggtggacacagtgtatggacttcattaccgccacttaataacggatctacagagcatccgaaacctttaatattggctattgcgtctcaagactctgcatcattttttcgggaccgtagtcttggttcagattctcccatatctggattgattgctttgctcactgctgttgatgctctttctcacattcatggtctaagcaagcttaagaaacagcttgtgttcgctgtttttaatggtgaggcctggggttatcttggtagtcggaaattcttacaggaattagatgaaggcgctgcttctgtgaatggaattagtagcttaaagattgaccaggtactggagattggttctgttggcaaggctatacttgaggaatatccatcattttatgtgcatgctgaagggaatccatcagcttcaaaggaaatattagatgcactgcaaagtgccagcaagtctcttggttctgataatgttaaagtaaaacaagcagcttcatcaaatcctggtgttccaccatcttcattaatgtcattcataaggaagaacatgtcaacttctggagttgtgttggaggattttgattcccacttctccaatagattttatcatagctatctggataactctgtaaacatcaattcctcgtcaatagctgcagccgccgctttggttgcgaggtcgatgtatattcttgctagtgatgactcagttgttgaccttataacactaaacactataaaagtgaacgtttcattggtcgaagaacttattggatgcctgcttacttgcaatcctggtctttcgtgcggccttgtgaaaagattcatttctccaagcaatccctgcccaagtcattatgttggtgtttttctggatgacccatctggcacgcagcttccttcatatgcagatgacacgtctcggtttgtatggaactttttggcagacagaactaattcagcaggcaataaaagctcatgtactggaaagtgtggtgatgaaggtgaagtatgtgtaggggcagaggtggagggtggaggtagatgtgttgtatctacaaccaggtatgttcctgcttattcaactcgggtgaagtttgaggacaatgcatggcacgttcttccagcgaactcgtcagatccaatgggtgctgcagatcccgtgtggactgaaagcttctggaacactattggcctcagggtctacgccgtgcaagatccagcttacgattggcttattcttcttgccgggctcggaatcactgctgcatcttattgcgctgtacactttggcagagcatacatttcaaaggtggcgaagcttgactgaagcgtcagtgagctgccccactgataatgggtatctagagctggaaatagaactaattaggctggcaattcgtagaacattagcagcgcatgagacagggtgattaagctgcgagaaagccgcaataaattatgagaaccaagcacacccgaagcaagtcctccatcattatgcggacgtccaggtcgatgtaatattaatgaaattgtgaccgtgttacgttttgtgttgaactggtactggtaggtaggttatgacacgcctctagctctagttggtggatgtttccggtaacgtgtttttctgtttgtggatcctgcctactcagttttggttgcgtataagcctgcccctcatgaatcctatgagtttgtgaacaccaactattatac

SEQ ID NO: 123672 - DNA, 4004 bp, Zea Mays
atgggcctcccgcgaggtcatctccgtcccttctccgccgccacggccgcccgccttcaccggcctccctccggttccatttcttacgaggtcaaggacaagaaacaatggcagcaggagctggagcagcacatctcccgcgggcagctggcccttgcccgccaggtgttcgacagaatccccgccccggacgcgcgcgcttacaacgcgctcatccgcgcctactcctggctcggccccttccacgccgctatcgacctttaccgctctatgctccgcttccgcgtggcccccaacaagtacacctttcccttcgtcctcaaggcatgctcagcgctcgtggacctccgtgccggccgcaccatccacgcccacgccgccgccgcgggcctccataccgacctgtttgtctccaccgccctgatcgacctctacatcaggtgcgcccgattcggccccgctcgcaacgtcttcgccaaaatgcccatgagggacgttgttgcatggaacgccatgcttgcaggctatgctaaccatggcatgtaccatcatgccattgcccacctcctcgacatgcaggaccatggtggcctcaggccgaatgcctccacgcttgtttccctccttccgcttcttgcccaacatggggcactcttccaaggaacaagcatccatgcctactgccttcgtgcctgtctcgaacaaaacgaggaacaggtgcttattggaactgcactgctggatatgtatgccaagtgcaagcaattggtttatgcttgcagggtgtttcatggcatgcctgtcaggaatgatgtcacttggagtgcgcttattggaggctttgtgctgtgcgacagaatgacagaagcttttaatctgttcaaggacatgctggtagaaggactgtgctttctctctgcaacctctgttgcaagcgcccttagggtctgtgccagcctggctgatcttcatatgggtacacagctgcatgctttgattgctaaatctggaatccatgctgatctcactgcaagcaactcgcttctttcaatgtatgcgaaggctggcttgataaacgaagcaacaatgttctttgatgagattgctgtcaaggacacaatctcttatggtgcacttttgtcagggtgtgtgcagaatggcaaggcagaggaagcatttcttgtctttaagaagatgcaagcctgcaacatggagccggatatcgcgacgatggtgtctctgatcccagcttgttctcatctggctgctttgcagcatgggaagtgcagtcatggctctgtcataatccgtgggcttgcattagaaacctcgatatgtaattctttgatcgatatgtacgcaaaatgtggaaagattgatctgtccaggcaggtttttgacaagatgccagctcgagatgttgtatcatggaatacaatgattgcaggatatggaattcatggactggggaaggaagctactacattgttccttggtatgaagaatcaaggttttgcaccggatgatgtcacattcatctgtctaatagctgcgtgtagtcattctgggcttgtgactgaagggaagcactggtttgatacgatgacacacaagtatggtatacttccaaggatggagcactatatatgcatggttgatcttttggcaagaggtggtttgcttgatgaggcctatcagtttatccagagcatgccactgaaagctgatgttcgtgtatggggagccctgcttggagcttgtcggattcataagaacattgatttaggaaagcaagtgtcaaggataatccagaaactgggacctgaggggactggcaactttgttctgttgtccaacatatttagtgctgctggaagatttgatgaggcagcagaagttcgaataatacagaaggtcaagggctttaagaagagtcctggctacagttggatcgagataaatggctccttacatgcatttgttggtggagaccaatctcatccatgttcacgtgacatatatcatgaacttgataatatcatggtagacattaagaaactaggctaccaggccgacactagttttgttttgcaagatctggaggaagaggaaaaggaaaaggcacttctttatcatagtgaaaagctagcgatagcttttggtgtcctcagtcttaatgaggataagaccatctttgttacgaagaatctccgtgtatgtggagactgccatactgccatcaaatacatgaccttagttaggaacaggactatcattgttagagataccaatagatttcatcacttcaagaatgggcaatgcagttgtggaaatttctggttgtctatactgttactcatgacgatccatgttgcattcattgcctcatggcatgaatctgagaatttagacaaggtgtcaagaaacaaaattgcaaaacttcagggtaaatctcagatagtgcaagatgaacttgcaaggctaggagaacagatggtacaaagtgctgaaggaacaagagctgttgctctggagctatgtcgagaatttgaagataaatttcttgctcatattacttctggtaaggggtccggttggaaaatagttgcaagttttgaaggcaagtttcctgataggattaaacaacttccattggacaggcattttgatttgaataacatgaagaggattgtgttggaagcggatggctatcaaccttatttgatatctccagagaagggtttacgatccttaaaaaaaggagttcttgaaaaggccaaggagccatcacgactctgtgttgaagaggtacaccgagttttgttagacatagtaaatgctgctgcaaatgctacaccaggactaggaagataccctccattcaagcgggaggtcattgcaattgcatctaatgcattagatgctttcaaaattgacgcgaaaaagatggtggttgcacttgttgatatggagcgagcttttgttcctccacaacacttcatccgattagtacagaggagaatggaaagacagcgccgtgaggatgagttgaaaaataacagagcatctaagaaagggcaagatgcagaacagttcaagatgaaccgggcttcaagcccccaaacagtatctgatgaaggtggtggtaacctgaaatcaatgaaggataaatccaatcagcaagataaggatacaaaggagggaccaaatttgcaggttactttgaagagaagtgcaaaaaataatgaatggagcaaaaggtggtttgttctaaatgagaagagtgggaagcttggatacactaagaagcaagaggagagacatttccgaggcgtcattgtcctggaggaatgtaacctcgtagagatagaggaggaggagatctcaaagagttctaaggattcgaagaaggcaaatggacaagataaaggcccaagtcttgtttttaagattactaatagggttgcctacaaaagtgtcttaaaaagtctgttcctccttagcataatcgtcaccttggccaatgcaaaggatacaatgacccggaggcctgctgatcctgaagaagaacttcgatggatgtctcaagaagttcgtggttatgttgaagctgttttgaacagttttgccgcaaatgttccaaaggctcttgtactttgccaagtggagaaatcaaaagaagatatgctaaaccaattatacagctcaataagtgcacaaagcaatgcaaagatcgaagaactactccaagaagaccacaatgctaaacgtaggcgggaaaaatatgaaaaacaatcatccctcttatcaaagctcactcgctagctcagcattcatgacaatagagcagcttcatatgcgaacgatagttctggagctgagagtagcccacggtctcctggccactctggtgaggactggaagtccgccttcaactcggcagcaaatgtctctgttaacgggtccagttcacagcatgagacaaggtcaagaagtgctgatag

SEQ ID NO: 123673 - DNA, 291 bp, Zea Mays
atggacctcggcgcccttcctacccggcctcgcctcggcctcgtcgatctagcgtgccctggtgcccctgctcgtgttgggtcgaccgtcggcagcttcctagcctccgtcatgctcgacagcaagtatttcatgtcggagcagcggctgcgacgccctccttgcgtcgtgctcgccagatcaggcttcgcgtcgttgatatgtgcaattcctattcggctatcggttttcgccggttgtcgatttcctattcgccatggtcatttcgtcggctgttcctatccgagctag

SEQ ID NO: 123674 - DNA, 567 bp, Zea Mays
ttttttttttttgcactgccgtgtggcccagatgacagctccatctcctatacggatatgcaattctgttaaacgatctaagtcgaggatccatgataaccgggactattttaccaactccaaactgacctcgcttttcgctctaccagccgagcacccttccctatgatatatatatgactgcccacgcaccctgtaggccatcaaatacagctagcgtgtacccacgacggagaaccacgagttctcaccattgccgtaagccgagaaagtcttgctgcctcaagcagagaataagagagagaagccgcagaggatgatcaacgtcgccatgggcacttcttgccaacgcgcccaagcagctaaatgtcggcaaggagggatgcctacgtcagcagatcacatatgagaaccgtagacgatggccacacctagatatatgtattacatttattttttctctatttctttatgtgaccccgatcttactaattaaatcgcggcatgtcacttatttttgtgccatcgtactaatttattaattatatgacatattttgtgttaggc

SEQ ID NO: 123675 - DNA, 155 bp, Zea Mays
atgacctctactacgcctacagcggcaggcacccctggaactgctacttcaacaactccgcgctcgtcgtgcagtctgacccaagctatggctcctgcacgtactactgaggagtggagagacgagacgaggagagagatccatcgtgcctggcg

SEQ ID NO: 123676 - DNA, 103 bp, Zea Mays
tggtttgccaagacgcagatgtttctggaccatgcagctgctttgtcacaaatagataatattaggtgtccattgaaagggaattaggcttacacctagttcc

SEQ ID NO: 123677 - DNA, 1629 bp, Zea Mays
ttctcttctccccaatctgattcactaccccctccgtcgtcgccgccgccgccgcaacagcagccatgtccccgtcgctcctcctgcttcactcctctgcgactccttgtagggggcttctgcctccgccatccagctgcttcgccactttctcgcgcgcctcctcccccctgcggccgcgacaccgcatccgcctcgtgtgcgccgccgagcagcccaacggtgccgcctctcctggctctggctctggaggcgacgccacggcaaacccaaccaacaacggactgcccaagaacaggagggttattctcctcgaatacgtcaaaaatgtccagccagagtttatggagctcttcataaaaagagctccagcacaggttgtcgaggccatgcgccaaacagtgactaatatgatgggcactttaccaccacaatttttcgctgtaactgtctcaacggtcgctgaaaatctggctcagcttatgtacagtgtcctaatgactggatacatgtttaggaatgcacagtaccgtctggaactgcaacagagtttggagcagattgctcttcctgaaccaaaagaagaaaaggattacgctcctggaactcagaaaaaggtaaccggggaagttatccgttggaacaaggccactggacctgagaaaattgatgctgtaaaatatatagaattacttgaagcagaaatcgatgagctgagccgtcaagttgctaggaaaacatcacaaggaagtaatgagctgttggaatatctgaagagtctagagcctcagaatttgaaggaactcacgagtactgctggcgaggatgtcgtctttgccatgaatgcgttcataaagcgcctgttggcggtctctgactcagagcagatgaagacagcagtctcggaaacaagtgcaagtcagctggccaacttgctgttctggctgatgatcgttgggtacagcatgcgcaacattgaggtgcggttggacatggagcgagtgctgggtgctcccccaaaggtcgccgagctaccaccaccaccatctggaggagagaacatataatacgcagttagaagaatagagccaacaaaccaacctggaattgtagatgtagccatgtaagaatgggctctgaaagatgttgattgaatcaacgattggctggtggcattccattgccttgctttgtactaatatacagcagcactagtaccataggtgattgacttgtcatggctgagtgaggaggcaaagatgcatatccttgaattgatactcttgtgtgcaaagaaatggcaatgcaaattggggaggaagctgttgtttgagctgaaattccagttccagtccgcccagacagacacgcagcagttccgagctcccctccgtcaagtggctgatccgcaaccacctgttggtgcataggctaaggttgagttgtctgtcttgttgattctacttgtcttccttctactccatgttggttaccaggagcgagggagggaaggaaggggaatcgataggattagggtgctgtttggttcacgtatttgtaatgtgataaataactgataatgttaaattatgtttgtttaaatctaactgtaactagatgttaaggatt

SEQ ID NO: 123678 - DNA, 702 bp, Zea Mays
ttctcttctccccaatctgattcactaccccctccgtcgtcgccgccgccgccgcaacagcagccatgtccccgtcgctcctcctgcttcactcctctgcgactccttgtagggggcttctgcctccgccatccagctgcttcgccactttctcgcgcgcctcctcccccctgcggccgcgacaccgcatccgcctcgtgtgcgccgccgagcagcccaacggtgccgcctctcctggctctggctctggaggcgacgccacggcaaacccaaccaacaacggactgcccaagaacaggagggttattctcctcgaatacgtcaaaaatgtccagccagagtttatggagctcttcataaaaagagctccagcacaggttgtcgaggccatgcgccaaacagtgactaatatgatgggcactttaccaccacaatttttcgctgtaactgtctcaacggtattgagtacctcctattcctatggctgttttcccaatggaaaatttacattttgcatgacatttgtgtcttttgattgttgctttgttacgattatcttttatcaaaacaggtcgctgaaaatctggctcagcttatgtacagtgtcctaatgactggatacatgtttaggaatgcacagtaccgtctggaactgcaacagagtttggagcagattgctcttcctgaaccaaaagaagaaaa

SEQ ID NO: 123679 - DNA, 355 bp, Zea Mays
cttcagagactcgaccgagagttttggctgtccggcaatggagtcagccctggtagtagaggcagaccacgatgcagcagcccggcgatgtagcaccccgcaggtgaaggattccccggccaccagggcaccctccatgtgactcgacgaccaaactgtctctacctctctctcggcattttcctcgctgtttggcccatggtaacgcagcagaagccccaggcgacggcaatagaggcggccgtgcaccagaggaagcgcggagtcgtcagagggagccccgctcggccgccaaggaagaggagcagggataccgggtgccgagcaccatggatgggcaggagaggagctcggt

SEQ ID NO: 123680 - DNA, 537 bp, Zea Mays
tcatagttggtgcccaacatcttcgtgtcgcccttcgtgtgctgtaacacccccttgctcctcgtcgttgattcatgtcgtatccacgacatgctcgtcaaccccgacgatctatcttccaattacgcgctacttgtgtttgagctccgaagccccctgtcgagctcttcccctggaagtcgccttcgagcacaacccctgccaagtgttcgctgggaggtctgaaccaatactcatcgtcgatctgtgagtatcaaatcattttggtcacggtaagctgataatttattcagaatagttcgatcgttgaataaattaatgtgttagtgcgaggctcattagtgtgctcaataaattgtgtaagtcacgaaactctcgtcgacttcacagttcttgcgattatcgagccaaattcagtatggcgagttatttcgctatttcggttaattagctgaattaatgtaccgagtagaatattagtaggcctgtgtgataaagaaatgtttgagtaattgttgacatgaaaaacatgtgagg

SEQ ID NO: 123681 - DNA, 4312 bp, Zea Mays
ctaccctcgatcccccgatagcagcagcagcagcagatcctcggcggcgacatggacacccccacggcgaaggcggcatggaacgccaactacggcgtcgtcggcagtggggaccgtcgtcttgccttctcccgccaactctcctccaacgccaccacgccgcgcctcgctcggtccgactcctccatctccatgcccgccccccttccccttcccccagtctacgaggggcccaagcccagcaggaagctactccgcctcgccacggccagccgccccatgcgccgcctcgccctcctcctcgccctcaacgttgcctactctgccaccgagttcgccatcggcctcttcaccggacgcgtaggcttagtttcagatgctttccatctcacctttggatgcggcttgttaactttctcattgtttgctatggctgcatcccgaaccaagcctgataacctctacacctatgggtacaagcgattggaggttctggctgcctttacaaatgctctgtttctattgttcctgtctttctccttggctgttgaagcattacatgcatttatgcaagatgaatcggagcacaagcattatctgattgtttctgctgtcaccaatcttttggttaatttacttggtgtttggttcttccggaactacgctcgtgttaacatagtttacaggaatgcagaggatatgaattaccactcggtctgtttgcatgtgttggcagattcaatacggagtgcaggcttgatactagcttcttggtttctttcattggggattgagaatgctgaggttctgtgcctgggaatcgtctcagtggcagtgtttatgcttgttttgccgttatttaaagctactggtaatatcctactgcaaatcgcacctagcaatgtgccaccttcagcctttacaaagtgctcgagacagattgctgcttgtgaagatgtctccgaagtatggcaaggtcgattctgggagcttgttcctggtcaggcagttggatctctctccattagggtgaagagcggcgctgacgaccgggcagtccttgaatacacgcatggtttatatcaggatttgggcatacaggatctgacggtccaaactgatgagtttgtagggcctgttagttagacggtaggggttctatcccagcttcacgaaagtgttgttttcagtttttttttcctaccaagtagtttctttcgcaaccgtgtctatctaaacactgtttttttattaagttcatctcacaacaaaaagttttttcacagctattttctccgagaagacaaacggttataaaaataggttcatcgaaaaagctatttttggagtcaaagctaacaaagatcggttcactaccaaagaggacttattagttattgtttctgagctccacatacatgaacatttttagtcacgaacttattagttattgtttctgagctccacatacatgacactgacacgctgctcactgcatacgacatgttagaatagatcagtgttgtgctgacattgtgtgatgaatcaaaataccaattggatgatgctagtttataaaacacaagacacatacacatacatggtgggtatgtacacgaagagaaagaaggtaacaggcaaatctatgttccatgaacaaacaaatggaaggaaggggaaggaactgctgcaagaaaacaaacgcaaggatcatgccctgcctttggcctggtggaaggcgctggagaagttggggatcctgtccaggtggcggagcgcgcgctccgccgtctgccgcgtgcggacgtcgccgttgcggtaggcctccaccagaacggacgccacggtctggtcggccgccacctccagcgcgatgtcctcgacgcgcaggatgcgctccacggcccacaccgcccgccgctgcagcgcctccgtccggttctccaccagtacctccaccacggggcgcagcccctccgcctccccgatcaccagcaccccctccgtcgcgttggccacgccgtcccccagcagcgtcgacagcgccgctagcgccgcctccaccacgcggggatccgcatgctctaggcacgccaccagccgctccaccgccttgcacccgccctccgcaaggcagaacgtctcccgcagcgagcagaagccgccgtgcacgcggcacgtccccattgccccggggggcgggggcgaccgtccctgcccgaagcacccgcacacgaggctgctcccacgacgaggcgccggcacgtccgtcaacctcgaggactgcagcgacaggttctccagcgccatggccgagtagagcagcacagcctcctgcccgctgctcatcatctgctgcaggagctccacgaagagcggcgccagccccacctcccgcgccagctccacgtacgtctcctcctgctgcagcagcgccagcgcgcacgtcaccctgtacagcaccttcaccgccccctccgtgaagggcgccacgtgccggttgccacggatcgtgccccgccggagctccaccagcttcgtggccagcgcccggaacgcgcccagctcctgcagctgccgcgtcaggttccagtccctctcggggaggtcgcccagcagagcgacggccgccgcctgctcctccgtgacgccgctccggtcctcggtgactgtggccaccccgagcaggctgctcaggttgccggtgctgcccccgaggccgagggcgtccgcgagctccgcgcccatgtacggcgacacgttgcgcagcagcttgagggactccacgcggatctcccggtgcgcggcctccacgaactggatgaggctgatggtggccccggagctccggatggcggagaccacgtcgggcaccgtggccggggaggcggtgaggcccacaaggacgttgaggagcttgcactcgatggcgggcccggtgttgctgatgaggtggagcaggctgtgcaccatctcctccgacagcagcgtctccccgctgtggtccagcgggatggaccggaagctggcgcccgacgccaccaggttggccaggatggcggccgacacctccttgagcctcatgggcaggtggccggcgcccagggagaagaggtccttgaccagcggcggcaggatgcccgcctggagcaggatcctggcgctggactcgttcgacgatatctccctcagggccttgagcgtggcctcccgcgccggaaggctgccctcggtcttcatgatggtgaccagcagggccccgacctgctccgccacaaggaccttcacgtcgttggccagcgcaagctcaccgaggaattcagccatggcgagctggacttggggtggaccttggatgagtttggtaagcagaggctgaagcctgccgttctctgccatctgcttgacgtttgtttcgtacttctccaggttcttgagcgtgttctctgctttctccacagccacaccgtgctctgatttgctactggccatcccaaccagcaggagaatggccccgtagattgcgccgatcctttcgcatgtagggtcgaacttggagagctcgtacaatagcgacactgcaagctccctctcttggaaattctcattggacaggaacttgatgatggtgcgtatggtgtcacctttagcaagctcttcctagcaaggaaggagtatatatattatatattcaggagtagtggattcaggaagcaaggaagaggtgaggtgaggtgacggatcggaccttgttttcatcgtcttcctcgacgatgacaccaaggacttggagggccttgagccgaacccttctactgctgctcttaagcaggtcagctatggtgggtatgacgccttgcctgcgcacgagggtcttcttcatgcgggagacgtagaggagggcgcgcagggtgtcgtcgtcgtcgtcttgagcctgagcctcctgtgtggcggtgagggaagccatggccttgtcgagctccttgtcctcgttcctcgccctccactcttggatgacgttgcgcagggcgatgctgggggtgatgtcggtgctgcgcagctccgcctgcgtgagcgggcacgtcggcttccttccgctgtccctgcactccctgaaccacttgaggatggcctcccgctcgaaggtctgcccggtctcgatggtgacagggtcgtgcatcacctgcttggtgagagggcacatgaaggcctcgaacgccggctcctggttggattgctcgtccagctcgctgtcgccgccgcagaaaccttccatcttgttccactccgatccaattccgatggtgagggc

SEQ ID NO: 123682 - DNA, 4035 bp, Zea Mays
acaggcacggtgtgctttgaccgctaccctcgatcccccgatagcagcagcagcagcagatcctcggcggcgacatggacacccccacggcgaaggcggcatggaacgccaactacggcgtcgtcggcagtggggaccgtcgtcttgccttctcccgccaactctcctccaacgccaccacgccgcgcctcgctcggtacaagcgattggaggttctggctgcctttacaaatgctctgtttctattgttcctgtctttctccttggctgttgaagcattacatgcatttatgcaagatgaatcggagcacaagcattatctgattgtttctgctgtcaccaatcttttggttaatttacttggtgtttggttcttccggaactacgctcgtgttaacatagtttacaggaatgcagaggatatgaattaccactcggtctgtttgcatgtgttggcagattcaatacggagtgcaggcttgatactagcttcttggtttctttcattggggattgagaatgctgaggttctgtgcctgggaatcgtctcagtggcagtgtttatgcttgttttgccgttatttaaagctactggtaatatcctactgcaaatcgcacctagcaatgtgccaccttcagcctttacaaagtgctcgagacagattgctgcttgtgaagatgtctccgaagtatggcaaggtcgattctgggagcttgttcctggtcaggcagttggatctctctccattagggtgaagagcggcgctgacgaccgggcagtccttgaatacacgcatggtttatatcaggatttgggcatacaggatctgacggtccaaactgatgagtttgtagggcctgttagttagacggtaggggttctatcccagcttcacgaaagtgttgttttcagtttttttttcctaccaagtagtttctttcgcaaccgtgtctatctaaacactgtttttttattaagttcatctcacaacaaaaagttttttcacagctattttctccgagaagacaaacggttataaaaataggttcatcgaaaaagctatttttggagtcaaagctaacaaagatcggttcactaccaaagaggacttattagttattgtttctgagctccacatacatgaacatttttagtcacgaacttattagttattgtttctgagctccacatacatgacactgacacgctgctcactgcatacgacatgttagaatagatcagtgttgtgctgacattgtgtgatgaatcaaaataccaattggatgatgctagtttataaaacacaagacacatacacatacatggtgggtatgtacacgaagagaaagaaggtaacaggcaaatctatgttccatgaacaaacaaatggaaggaaggggaaggaactgctgcaagaaaacaaacgcaaggatcatgccctgcctttggcctggtggaaggcgctggagaagttggggatcctgtccaggtggcggagcgcgcgctccgccgtctgccgcgtgcggacgtcgccgttgcggtaggcctccaccagaacggacgccacggtctggtcggccgccacctccagcgcgatgtcctcgacgcgcaggatgcgctccacggcccacaccgcccgccgctgcagcgcctccgtccggttctccaccagtacctccaccacggggcgcagcccctccgcctccccgatcaccagcaccccctccgtcgcgttggccacgccgtcccccagcagcgtcgacagcgccgctagcgccgcctccaccacgcggggatccgcatgctctaggcacgccaccagccgctccaccgccttgcacccgccctccgcaaggcagaacgtctcccgcagcgagcagaagccgccgtgcacgcggcacgtccccattgccccggggggcgggggcgaccgtccctgcccgaagcacccgcacacgaggctgctcccacgacgaggcgccggcacgtccgtcaacctcgaggactgcagcgacaggttctccagcgccatggccgagtagagcagcacagcctcctgcccgctgctcatcatctgctgcaggagctccacgaagagcggcgccagccccacctcccgcgccagctccacgtacgtctcctcctgctgcagcagcgccagcgcgcacgtcaccctgtacagcaccttcaccgccccctccgtgaagggcgccacgtgccggttgccacggatcgtgccccgccggagctccaccagcttcgtggccagcgcccggaacgcgcccagctcctgcagctgccgcgtcaggttccagtccctctcggggaggtcgcccagcagagcgacggccgccgcctgctcctccgtgacgccgctccggtcctcggtgactgtggccaccccgagcaggctgctcaggttgccggtgctgcccccgaggccgagggcgtccgcgagctccgcgcccatgtacggcgacacgttgcgcagcagcttgagggactccacgcggatctcccggtgcgcggcctccacgaactggatgaggctgatggtggccccggagctccggatggcggagaccacgtcgggcaccgtggccggggaggcggtgaggcccacaaggacgttgaggagcttgcactcgatggcgggcccggtgttgctgatgaggtggagcaggctgtgcaccatctcctccgacagcagcgtctccccgctgtggtccagcgggatggaccggaagctggcgcccgacgccaccaggttggccaggatggcggccgacacctccttgagcctcatgggcaggtggccggcgcccagggagaagaggtccttgaccagcggcggcaggatgcccgcctggagcaggatcctggcgctggactcgttcgacgatatctccctcagggccttgagcgtggcctcccgcgccggaaggctgccctcggtcttcatgatggtgaccagcagggccccgacctgctccgccacaaggaccttcacgtcgttggccagcgcaagctcaccgaggaattcagccatggcgagctggacttggggtggaccttggatgagtttggtaagcagaggctgaagcctgccgttctctgccatctgcttgacgtttgtttcgtacttctccaggttcttgagcgtgttctctgctttctccacagccacaccgtgctctgatttgctactggccatcccaaccagcaggagaatggccccgtagattgcgccgatcctttcgcatgtagggtcgaacttggagagctcgtacaatagcgacactgcaagctccctctcttggaaattctcattggacaggaacttgatgatggtgcgtatggtgtcacctttagcaagctcttcctagcaaggaaggagtatatatattatatattcaggagtagtggattcaggaagcaaggaagaggtgaggtgaggtgacggatcggaccttgttttcatcgtcttcctcgacgatgacaccaaggacttggagggccttgagccgaacccttctactgctgctcttaagcaggtcagctatggtgggtatgacgccttgcctgcgcacgagggtcttcttcatgcgggagacgtagaggagggcgcgcagggtgtcgtcgtcgtcgtcttgagcctgagcctcctgtgtggcggtgagggaagccatggccttgtcgagctccttgtcctcgttcctcgccctccactcttggatgacgttgcgcagggcgatgctgggggtgatgtcggtgctgcgcagctccgcctgcgtgagcgggcacgtcggcttccttccgctgtccctgcactccctgaaccacttgaggatggcctcccgctcgaaggtctgcccggtctcgatggtgacagggtcgtgcatcacctgcttggtgagagggcacatgaaggcctcgaacgccggctcctggttggattgctcgtccagctcgctgtcgccgccgcagaaaccttccatcttgttccactccgatccaattccgatggtgagggc

SEQ ID NO: 123683 - DNA, 525 bp, Zea Mays
gcagcgtctccccgctgtggtccagcgggatggaccggaagctggcgcccgacgccaccaggttggccaggatggcggccgacacctccttgagcctcatgggcaggtggccggcgcccagggagaagaggtccttgaccagcggcggcaggatgcccgcctggagcaggatcctggcgctggactcgttcgacgatatctccctcagggccttgagcgtggcctcccgcgccggaaggctgccctcggtcttcatgatggtgaccagcagggccccgacctgctccgccacaaggaccttcacgtcgttggccagcgcaagctcaccgaggaattcagccatggcgagctggacttggggtggaccttggatgagtttgccacaccgtgctctgatttgctactggccatcccaaccagcaggagaatggccccgtagattgcgccgatcctttcgcatgtagggtcgaacttggagagctcgtacaatagcgacactgcaagctccctctcttggaaattctc

SEQ ID NO: 123684 - DNA, 1396 bp, Zea Mays
tgctttgaccgctaccctcgatcccccgatagcagcagcagcagcagatcctcggcggcgacatggacacccccacggcgaaggcggcatggaacgccaactacggcgtcgtcggcagtggggaccgtcgtcttgccttctcccgccaactctcctccatctccatgcccgccccccttccccttcccccagtctacgaggggcccaagcccagcaggaagctactccgcctcgccacggccagccgccccatgcgccgcctcgccctcctcctcgccctcaacgttgcctactctgccaccgagttcgccatcggcctcttcaccggacgcgtaggcttagtttcagatgctttccatctcacctttggatgcggcttgttaactttctcattgtttgctatggctgcatcccgaaccaagcctgataacctctacacctatgggccagtctcctcattccctcccgcctttcaggctctatttctgttcgtctgtgcactaattcacactcacttattgttgtctgctttctttcaggtacaagcgattggaggttctggctgcctttacaaatgctacagctgtttctattgttcctgtctttctccttggctgttgaagcattacatgcatttatgcaagatgaatcggagcacaagcattatctgattgtttctgctgtcaccaatcttttggttaatttacttggtgtttggttcttccggaactacgctcgtgttaacatagtttacaggaatgcagaggatatgaattaccactcggtctgtttgcatgtgttggcagattcaatacggaggcttgatactagcttcttggtttctttcattggggattgagaatgctgaggttctgtgcctgggaatcgtctcagtggcagtgtttatgcttgttttgccgttatttaaagctactggtaatatcctactgcaaatcgcacctagcaatgtgccaccttcagcctttacaaagtgctcgagacagattgctgcttgtgaagatgtctccgaagtatggcaaggtcgattctgggagcttgttcctggtcaggcagttggatctctctccattagggtgaagagcggcgctgacgaccgggcagtccttgaatacacgcatggtttatatcaggatttgggcatacaggatctgacggtccaaactgatgagtttgtagggcctgttagttagacggtaggggttctatcccagcttcacgaaagtgttgttttcagtttttttttcctaccaagtagtttctttcgcaaccgtgtctatctaaacactgtttttttattaagttcatctcacaacaaaaagttttttcacagctattttctccgagaagacaaacggttataaaaataggttcatcg

SEQ ID NO: 123685 - DNA, 1364 bp, Zea Mays
cctcgatcccccgatagcagcagcagcagcagatcctcggcggcgacatggacacccccacggcgaaggcggcatggaacgccaactacggcgtcgtcggcagtggggaccgtcgtcttgccttctcccgccaactctcctccaacgccaccacgccgcgcctcgctcggtccgactcctccatctccatgcccgccccccttccccttcccccagtctacgaggggcccaagcccagcaggaagctactccgcctcgccacggccagccgccccatgcgccgcctcgccctcctcctcgccctcaacgttgcctactctgccaccgagttcgccatcggcctcttcaccggacgcgcttagtttcagatgctttccatctcacctttggatgcggcttgttaactttctcattgtttgctatggctgcatcccgaaccaagcctgataacctctacacctatgggccagtctcctcattccctcccgcctttcaggctctatttctgttcgtctgtgcactaattcacactcacttattgttgtctgctttctttcaggtacaagcgattggaggttctggctgcctttacaaatgctacagctgtttctattgttcctgtctttctccttggctgttgaagcattacatgcatttatgcaagatgaatcggagcacaagcattatctgattgtttctgctgtcaccaatcttttggttaatttacttggtgtttggttcttccggaactacgctcgtgttaacatagtttacaggaatgcagaggatatgaattaccactcggtctgtttgcatgtgttggcagattcaatacggagtgcaggcttgatactagcttcttggtttctttcattggggattgagaatgctgaggttctgtgcctgggaatcgtctcagtggcagtgtttatgcttgttttgccgttatttaaagctactggtaatatcctactgcaaatcgcacctagcaatgtgccaccttcagcctttacaaagtgctcgagacagattgctgcttgtgaagatgtctccgaagtatggcaaggtcgattctgggagcttgttcctggtcaggcagttggatctctctccattagggtgaagagcggcgctgacgaccgggcagtccttgaatacacgcatggtttatatcaggatttgggcatacaggatctgacggtccaaactgatgagtttgtagggcctgttagttagacggtaggggttctatcccagcttcacgaaagtgttgttttcagtttttttttcctaccaagtagtttctttcgcaaccgtgtctatctaaacactgtttttttattaagttcatctcacaacaaaaa

SEQ ID NO: 123686 - DNA, 758 bp, Zea Mays
atcctcgtctcaccagtcagcacaggcacggtgtgctttgaccgctaccctcgatcccccgatagcagcagcagcagcagatcctcggcggcgacatggacacccccacggcgaaggcggcatggaacgccaactacggcgtcgtcggcagtggggaccgtcgtcttgccttctcccgccaactctcctccaacgccaccacgccgcgcctcgctcggtccgactcctccatctccatgcccgccccccttccccttcccccagtctacgaggggcccaagcccagcaggaagctactccgcctcgccacggccagccgccccatgcgccgcctcgccctcctcctcgccctcaacgttgcctactctgccaccgagttcgccatcggcctcttcaccggacgcgtaggcttagtttcagatgctttccatctcacctttggatgcggcttgttaactttctcattgtttgctatggctgcatcccgaaccaagcctgataacctctacacctatgggtacaagcgattggaggttctggctgcctttacaaatgctgtaagcttccaaaaccttccatcttatggatacgtgtgcatacatttgtacagagttctcccagattaataatgtacaagcccatctttcaagtttatgttaaacatttgtttgatgatagagctgaaattcatccatggtttacatctttgcttggttatcacgtgtaatgtccctactccctacaacttgccggaaaaa

SEQ ID NO: 123687 - DNA, 2276 bp, Zea Mays
acatgtattcggaccgactacccacccgtctattctggtcacttcttttggggttctccgttcccctccccattcccctgcccccgcctcttcgagctagggttagggtttgctttgcgttcccttggaaattgatcgaatcgggcacccctaaccggtgtcctcaccgatccatccgttcatccttcgattcgatcaaatttccacctctcgacatcagcaatctcgctgcctctctctctctctcttttgagagagggggaagtaataaaagggaaaaagctagcaaggggatttccttgatcccatcatcgtgctacagatcctttagttctagcaaggaggaggaaaaagagagagcaagcccatggatcccagccagatgatgttccccatctggggggcgccgcctcccgccgccttgaagccgccctccgatgaccacgccgccgcccccaacgcgcaggcgcagcccttcctcccccctcccaatcccaaccgcggctggaagcgcaagaatcccgccgccgccgcctaccagccaccggccctcggcgatctccaggtgcagaaccgcgccaaggctcgccgctggttcaagaacagcggcggcggcaaccccaaccaaagccgcaagtatttcttccccaagaacaagaacaacaaggtcgccgcgccgcgcaacaccacctccttcatcatccgggccaagcgcgccggcggcattgcctccctcgtctccccgtgccccgtcacgcccgccgtgctccccaccccgcgtctctccccctcccgcgagggcctagctgacatggcccaggcgcagtggggcgtcgatgggtacggctccatgaagggcctcatccgcctccgtagctccccccagccagccaaccccaatgctgccgcatcagatgacgatgatgaggggaactccagtggaagcgacgtcgaggagcacgtcgaggtggagcgacgcctcgaccatgacctcagccgttttgagatggtgtaccctggtagaggggaggatgctgggggctacgtgttggaggacgatgacgagtatgaccaggatgcgcatgtggctcgccttgaggaagagaacctgaccctaaaggagaggctcttcttgatggagcaagaggttggtgacatgaggcgccgcctggaggctcttgaggcaaaattttcgctaggtggtggtgttggaggtggcgagaatgaagtggaggaagctcctcctcagaatgatgcagagaggatccatacttggccagagaatagcagcgaggatgatgtagagatggttgatgcgggatctgagaagggcagagcacaaactcagggtgcaatgacttcagagaaatctggcggggatgataccacaaatcagggtgctgcgcgctcagataagactggcggaaatgatgcaggtgaacaggatggtgttggtgttttggagaagactgatgcgcacaatgcagagaagcagcaggttgctgcgggttcagagaaggctggtggaaatgatccaggtgagcaggttgttgttggtgttttggataagaccgatgcgcacaatgcagagaagcagcagggtgctgcaggttcagagaaggctggtggaaacgatgtggatggacaggatgtcgttgttggtgtttcggggaagactggcgcagatagtgcagagaagcagcagggtattgtgggtaccgagaagacaggtgagcacagcatagagatggttgattcactgatagaggagaagatggatgacgacaatggcgagaatgaggttaggcttgcggcttcacagtgatgattgattggagatggacaagagaagtagtagttcattcaatgacggattgaagggatgcgacgtggaatgggcttgctttggagattgacgattgacatgttgtgcgagccttgatattggcgatatattttgttttctgtcgtgttttcactttgtttttcttactacaacttgcagcttcttatgatgatgatgcaaaagtcgcagacatggaggaaataactgagatgatgaatatgttgttgtaatcattgtcccagatgggtggtgtgctgatgtcgtgctgtttatgtgttgcttatttctatccagctgtggtggatatgtatctgaatctgaatgtatcgtctgtttatgtcatttgcttggattgtaaaatggggtagcatgtttatatcttactactctcatcacatgataagtgaatattggactgtcttgttaaata

SEQ ID NO: 123688 - DNA, 1858 bp, Zea Mays
ttgatcccaggcccagcgatgcattggtacggtcaccaccgactgctattggtacggtcaccaccaccacagcagcaacagcatcgccctgtcgtcgtcgtccctgtccctccccgcctgcagcagcactagcagcatcacctactcctgccacctgcagcagcagcggcatcgtcgcaccatgggcggtcaccagctgcacctgtcgtccccgaccgcggtgctgggccacgtcaccccggcgctgcgcgacctctacgcggtggggcgcaagctcgggcaggggcagttcggcaccacgtacctgtgcacggagctgtccacgggcgccgccttcgcctgcaagtccatcgccaagcgcaagctgctcacccccgaggacgtcgacgacgtgcggcgcgagatccagatcatgcaccacctcgccggccacaagagcgtcgtcaccatcaagggcgcctacgaggacccgctctacgtccacatcgtgatggagctctgcgagggcggcgagctcttcgaccgcatcgtcgacagggggtacttctccgagcgcaaggccgccgagatcgcgcgcgtcatcgtcggcgtcgtggaggcgtgccactcgctgggcgtcatgcaccgggacctcaagcccgagaacttcttgctcaaggacaggggccacgacgcgtcgctcaaggccatcgacttcggcctctccgtcttcttcaagcccggccaggtgttcaccgacgtggtgggctccccctactacgtggcgccggaggtgctgtgcaagcactacgggcccgaggcggacgtgtggacggcgggggtcatcgtgtacatcctcctcagcggggtgccgccgttctgggcggagacgcagcagggcatcttcgacgccgtgctgaagggggccatcgacttcgactcggagccgtggccggccatctccgacagcgccaaggacctgatccgccgaatgctgcggtcgccgccggcggacaggctgagcgcgcaccaggtgctgtgccacccgtggatctgcgagaacggggtggccccggacagggcgctggacccggcggtgctgacgcggctgaagcagttctcggccatgaacaggctgaagaagatggcgctgcgggtcatctcgcagagcctgtcggaggaggagctggcggggctgaaggagatgttcaaggccatggacacggacggcagcggcgccatcaccttcgacgagctgaaggaggggctgaagaggcacgggtccaaggacctcagggagagcgagatcagggacctgatggacgccgccgacgtggacaagagcggcagcatcgactacgacgagttcatcgccgccaccgtgcacatgagcaagctggagcgcgaggagcacctgctcgcggcattcgcctacttcgacaaggacggcagcggatacatcaccgtcgacgagctggagcaggcgtgcagggagcacaacatggccgacgtcggcctcgacgacatcatcacagaggtggaccaggacaacgatggccgcatcgactacggcgagttcgtggcaatgatgaagaagggcatcatcggccacggcaggctcaccatgaggcacacctctgacggcagcgtcctccatggcgccggctagctgctgctacctcgctcatcgatcttcaaaatgctagcttgctgcatcttcacctgccttcaaaattctacatacaaatttaacaacgaactccatatacgtatattgtttatatatgcatggtcgggcaagagtagtgtcgtcgtcgactccttttgttgtcatttcctttttttttttctgttttcaagagtcaagacccacccaccc

SEQ ID NO: 123689 - DNA, 2496 bp, Zea Mays
atggcgcgcatcatgacaacaaggcggtcggacagcatcgccgacatgatgcccgaagctctgcgccagagccggtactacatgaagagctgcttccagcggtacgtctcccggggcagcaggctcatgaagcagcagcatctcctggaggagctccacgccggtagctcggacagcttcctcgggcacgtcatttcctgcacgcacgaggccgtggtgctccctccctacgtggccttggccgtgcggaggaaccctggcgtctgggagtacatcaccgtccactccggcgacctcaccgtccagcagatcacgccctccgactacctgaggcgcaaggaaagcctatacgacgaccactgggcgcaggacgacaactccctggaggtgaacttgagcctctgcctctccacgccccgcctcacgctgccttcctccatcggcaacggcatgcacttgctgtccagattcctgtcctccagcctcggcggcgtgaacaagatcaagccactgctggactacctgctggcgctcaggtaccagaacactaagctactcatcagcgacaccctcctcgacacggtgggcaagcttcaggccgcgctgctcctcgcccaggccttcgtctccgagcagcacccggacacgccgttccagcagatggcgcacaggttccacgagtggggactggagaaaggatggggcgacaccgccggggcgtgcggccagacgctgggcttcctctccgagatgctccaggcgccggaccctgtcagcgtggacaggttcttcagcagggtgccgtcggtgttcgacgtcgtcatcttctccgtccatggctacttcgggcagcacaaggtcctggggatgcccgacaccggcggccaggtcgtgtacatcctggaccaagttagagcgcttgaggaggagcttcttcaaagaatcaaagggcagggcctcactttcaagcccaacatccttgtggtcacaaggctcataccagaagcaaagggcaccacctgcaacgtggagctggaacctattgacaagacaaggcactccagcatcctccgtgtgccattcaagacccaagatggccaggatctgccccactgggtctcccgcttcgacatctacccttacctagagagatacgcccaggattcttgtaccaagatccttcatatattggggcgcaaaccagacctggtcatcggcaattacactgatggcaatttagtagcttacctggtgtcaaggaagctaggagttacccaggggacgattgcgcatgctctcgagaagacaaagtatgaggattccgatgtcaagtggagggaaatggaccacaggtatcatttctcatgccagtttactgctgatatgatcgcgatgaacaccagcgacttcatcatcgctagcacctaccaagaaatagcaggaagcaaagacaaacctggccagtatgagagccactatgcgttcacaatgccagggctctgccgcttcgctacaggcatcagcgtcttcgaccccaagttcaatatcgctgcgcctggcgcagatcaatctgtttatttccccttcacactaaagcacaagcgcctcatgggcttgcacccacagatcgaggagctagtctacggcaaagaggaaaatgatgagcacatagggtacttgcaagacaggagcaagccggtcatattttcaatggcaaggcttgacaaggtcaagaacatcactgggctggttgaatggtatggccagaacaagaggctcagggaccttgctaaccttgtagtcgtgggagggctcctggaccccaagcactccaaggacagggaggagattgaggagataaacgagatgcacagtttgatcaacaagtaccagctcaaggggcagatccgctggataaaagcccagacagaccgtgtgcgcaacggggaactttaccgttgcgtagcagataccaggggagcctttgttcagcctgcgctctatgaagcgttcggactaactgtcattgaggcaatgaactgtgggctgccaacctttgcaacaaatcagggaggccccgcagaaatcatcgtcaatgaggtctccggtttccatatcaatccacttgatggcaaagaggcaagcaacaagattgccaacttcttccagaaatgcaacgaagatccaatgtactggaacagaatgtccactgctggactgcaacgcatctacgaatgctacacctggcagatctatgcaaccaaagttctgaacatggggtccatgtatggcttctggaggactctggataaacaagagaagcaggacaaacagcattacctaaacatgttctacaaccttcattataggaagctggcaaatacggtgccaaaagtgggcgaacagcctgagcaagctacggcagcggcattgcctgataggtcggcaacaaggccaaaagaaaggcaagtgtatccactcttaaaaatttactga

SEQ ID NO: 123690 - DNA, 2991 bp, Zea Mays
ggcttggcagattgggatcccctcccctccctcctcccacccccttgccttgagctgggggttcgttcaggaagctgatctgagagctcgcgaccgcaaccacaaccaacccaaaaagctgcagcagatccatccttctcacccgaaacaatcgatcccctcttatagacttcgcctgcctccaacccttaatcttcagctatggattcagccgccgcgcgacccgacgaggaggaggcgcgccgccgccggagcaccgactgcatctacttcctcgcctccccgttgacctgcaaaaagggaagtgaatgcgagtaccgtcatagcgatgctgcgaggatgaatcccagggactgctggtattggttccatggcaactgcgcaaatcctaaatgctcctttaggcacccgccattagacaacatggccggagcaccaacgactccacgtccagctcaacagtctgtaccccatcaagcttcagcttctgttccagctcagccccagggatctgttcctgccactgccaagcagggtgttccatgctattactttcagaagggcatgtgcacgaaaggggacaggtgtgcctttctgcatgcgccccggtctgctggaaaccctgctccacagcctccggccaaggtcttcaccacccctgccttgcagcctaatctccatccaccgttgaacaactcgtggacaaaacccaacttgagtgctcctgcagtagccgtagttgacaagccaaaggccagcacttatcatgatggtaaaccgcttcatcacaaggaaaatctgacgagtaggaccgaaaacccatcaagagtagtttatcagaatcacagtagttcttatgcacagcccggtgcaccaaagcgttaccagcctcagccttcagcccgagatggcttaaccgacaatggtatggaggctggcgaatttgcgagagaaccatccgccggttcttgtgtaactgccggttttaatggtgctggagggatgacgaggcaaacacatggtggctatgaaccagaaaggtcatacagaaattcagcagagaggtcttcgtcagagaaaaggattccccagagagagcatatcccctctgtggctgccggcagttcggatctgcgccataggctactgaagcaaagaaagtccaataataattcaaggtcggctgaagccctgggcaggcatgatacacatcttgaggatgagcgcaatgaccaacatcgtccgcgaggtgaacagcaggatggcctctcacggtctcgactgcatgatagaataagactacctggggagacagcgtttgacagtcttgggtcacggtcagaggagtgggatagagggtctagagccagattgtcgccaccaaaatcctcagatcttcgagggaggcttcatgaaaggctaaagggtagattgggtgaggagataccgggtagcagtgcaaaaggtttggcagtgaaggcaagtagcagtgaggatactgaatcactgaactttgctggtccaaagagccttgcagagttgaaggcaaagaaaggtgtcggcaggtcaggagaagatgccgtcgtcaagggcttaggttcttctcgtatgacttcagaaatagtttggagcagggaggctgcttcgtttgaaggtccaaagcccctaagtgccatactgaagagaaaaagagagccagcttctgaaatccccgctgcccagcctggcatcacacaggaagcagataactacgccgcaggagctgaagaagaaatccaaaccctagcaaatgacacggttggggagaacatggaggggattggagaagaagaggaggaagaggaagctttccatcctgaagatgatgtggcgtacgacgataacgccaatgaagctgcagtggcccaagagctggatgagtatgaagacgcagatgcggcagcacaagactatgacgatgaagctgcagctgcccaagaggtggaggagcatcaagacggagaggcagcagcagaagactacgactatgaggaggcagacgtcaacgccgaggaagagaatgagtaccaggactaccaagacgaggacgacgacgatttggaggatggggacgacgattttgcacgaaaagtgagcgtgatgatctcctgatagcgacagaaagcggttcattccccacaaagtgtttatctcctttggcgcgaggtactttttagttcactgcgcaaaagacagagactaatataggtgggagaagagagatagaagaatggacattgttgagaaaatgagctcctccatccatcggagagctcgcttgttgacctgtctgtctgtactgtactactcacgcaaatgtgatgcggcttctctatagactcctgcatgtatttttagttgacatgagaacagtactgtatccgtatttgctgctgcttctttttttttttgaagaaaacatattgctgcctggtagaagatacatctacagttcattctacacgaacccttgcctccagatgtacagtacagtctgtttattcgatgtctatttgtttgtgaacagcacataactagctagtttacacaataatagaacacagtagaagtgaatactgcgctacattaacagcaagcactgctctcttgtttctgacatccatcatctctaggcttgctgactgcaatataaaacatcgcccagcacgctcttcacctagctaaaaacccttgcaaaatatctaccagactcgtcttgctccacaaccaaccaactagcccagaccacaaccctgcaatagtaatttccttctcaggtccgtccaaatccccgatctgatgttaccacgcaatgcaaaaccagtagatgtcacacctcccttgctagtctttgcacttaatgccatcccctctcactgaggttaccaccaacccacattgaaaaggtctacaaagatacaaatattaggtcacgggaacaaaaaaaaaaaa

SEQ ID NO: 123691 - DNA, 6776 bp, Zea Mays
atggttgctagacacacacctctacctcttttggaagctcttcttcggtggagagaaagtgaatccccgaaaggtgctcacgacgcgtcaacataccaaaagaagcttgctgttgagtgcatattctcttctgcctgcattcggtttgctgagtgttgtccacaagagggaataacagaaaaactttggattggcttagaaagtttcgtatttgattggctaattaatgcagacagggttgtgagccaagtagagtatccgtcattggttgatttacgaggtctactcttagatcttgttgcacagcttttaggagctttatcacgcataagattcagttctgtgactgaaaggtttttcatagagcttaatgtgcggcgtattgattcacttgctcttagaagtgagacactcagcataatcaacgggatgcgctaccttaaattgggggtgaagacagagggtgggctgaatgcttctgtatcctttattgcaaaagcaaatcctctaaatcgtcctcccaacaaaagaaagagtgaattgcaacatgctttgtgtaacatgctctcaagtatacttgccccacttgcggagggtggaaaaaaccattggcctccacttggtgtcgaacctgcactgtcactttggtatgatgctgttgcacgaataagagtccagctcatgtattggatggataagcagagcaaacatgttgctgttggctttccacttgtcacccttctactttgtcttggtgatgccaatgcattcaactctagtttttcccagcatatggaaatcctgtataagtatctcaaggataagaaccatcgatcaatggctttggattgtcttcatcggctagtaaaattctatttgaatatttatgccgattaccaacctcgaaatcatgtttgggactatttagacagtgtaacctctcaattactgactgttctgaagaaaggcttgctgacccaagatgtgcagcatgataaacttgttgagttctgtgtgaccttagctcagagcaatctggattttgcaatgaatcatatgatactggaattattgaaaccagatagtttgagtgaagcaaaggttgttggtcttagggctttgctcgagatagttgtttctccatcaaatcaacaaattggcttggatgttttgcaagtatttggtattgggcactatattcctaaggtgaagtcagcaattgagtcaatactaaggtcttgcaacaaggcatatagcctggcacttctcacatcatcaaagactacaatagataatgtaaccaaggataaatctcagggatcactcttcaggtctgtgcttaaatgtatcccatacttgatagaagaggcgggccgtaatgataaaatgactgagattatacctcagcatggcataagtattgaccctggtgttcgtgaagaagcagtgcaagtgttgaacaggatcgtacgttgcctaccaaatcgtaggtttgctgtgttgaaaggaatggccaatttcatcctaaaacttcctgatgaatttcctctcttaattcaaacatcacttggacgcctggtggagctaatgcgtttgtggagagtatgcctatctgaggaggccttggcaaaagacatgcaaagtggtaggcgtttgagtataggaggggatgcactacagaggtctccttttcataggtccagggatgtatctgaatttcgcgcctcagaaatggatgcagttggccttgtctttctcagttctgctgatgttcaaataaggctcactgccctggagttactgcgatgtgttcgagcactgcaaaataatctcagggattactcagcaaatgaatggggtgacaataagctgaaacttgaaccagagccaatatttatcatagatatcatagaggagaatggggaagacattgttcaaagctgttattgggatccgggacgaccttatgatctaagacgtgaaatggaccctattcctttggatgtgactcttcaatccattttggagagtgtagataaaaacagatgggcgcgctacctcagtgaaattgtgaaatatgcagctgaactttgcccgagttctgtgcaggatgcaaggcatgaactctggtcttttctggaacgtctgcacgcacaatttactataattgggcatcttattaactttactgcaaaactccacagattagaggttattagaaggcttgaacagattactcctgccgatctcggtgggaaggctcagcaaccacaagattctgaaactaaacttgaccaatggttgatatatgccatgtttgcatgctcttgtccacctgatattagagaagaattttccatcaaatcagcaagagaagtcttccatatgatttttccatcattgcgtcatggttcagaagcatatgcacttgctgctacatctgcccttggtcactcacatttagaagtatgtgaaatcatgtttggagatctggcattatttgttgaggaggtgtcatcagaaactgaaggaaaacctaaatggaagaatatggtactgaatactgatactctgcagaatcctaggtcccgccgtgaggatctgcgcactcatgttgctaatatacaccgaattctagctgagaaggtttggcctgggatgcttagtcggaaacctgtcctctgccagcattttttgaagttcattgaagaaacataccgccaaattactatttccttggctgatagctttcaagacttgcagcctctgcgatacgcattagcatctgttctgagatacctagctccagaatttgttgatgcgaaagctgagcgatttgacaacagaatacgtaagaagctttttgatcttctccttacttggagtgaggattctggtagttcatggggacaggaaagcagcagcgactatcgtcgtgaaattgaacgatataaaagtaatcaacatacgaggtcaagggaatcatttgacaaacttgcatttgacagggaaatggctgaacagctagaagctattaattgggcttccatgaatgctattgcttcattgctttatgggccttgttttgatgataatgcgagaaagatgtctggccgggtgatatcatggattaatagtttattcatggaaccatctgcaagagcaccttttgggcattcaccagttgatccacgaacaccatcatattcaaagcatactgatggacgttttggtgggagggacaaacagaaaactagccacttgcgactcctcttagcaaaaactgcgctgaagaatattttgcagacaaatctggacttgtttcctgcttgcatagatcagtgctactctccagaccctcaaatagcagatggctatttcagtgttctggctgaagtctacatgcgccaggagattccaaaatgtgaaatccagagacttgtgagcttgatcctctacaaggtggttgatcagacaaaactaatccgtgacagtgccctccagatgttggagactctctctcttcgcgaatgggctgaagacgatactgatggtgttgggcattaccgggcttctgtcgttggcaacctccccgattcctaccaacaattccagtataagttgtcttcaaagcttgccaaggaccatcctgagctcagtgagcatctgtgcgaggaaataatgcaacgtcagcttgatgcagtggacattattgcacaacatcaggtccttacatgcatggctccttggatagaaaatctcaactttgtgagactgaaggaatctggctggagcgagaggttactgaaaagtctttattatgtgacatggaaacatggtgatcagtttcctgatgagattgagaaactttggagcactgtggcaagcaatactcgcaatatcatcccagttttgaacttcttgatcaccagagggattgaggactgcgatgccaatccatcggcagagatcactggtgcatttgcaacttatttttctgttgcaaagcgtgttagtctatatcttgctcggatctgcccacagcagaccatcgatcacttggtcttcgagctatctcagagaatgctcgaggacgacgaagaaccagtcaggcttgggaaggttgatgtctctgcaaatgttgtattggagttttctcaagggcctactgcctctcaggttgcaacagttgtggatagccagcctcacatgtccccccttcttgttcgtggttcacttgatggtgcagttagaaatgtcagtggaaacctgagctggcggacatctgcagttaccggccgaagtgtatctggcccattgagtccgttggctcatgaggtaagcattccaaacccaacggcaggccgatcaggacagctacttccagcgttaattactatgtcggggccattgagtggtgttcgaagctctgctggtaatctgaggagccgccatgtttccagagatagtggtgactactactttgataccccaaactcaacagatgatattttgcatcaagggggcagtggaattcacgggatcaatgccaatgagctccagtcagcactacaagggcaccaacacttgctttcacgtgctgacatagctttgattcttctggctgaaattgcttatgaaaatgatgaagactttcgtgaaaatttacctctgttgttccacgtcacatgtgtttcgatggatagctcagaagacattgtgctcgagcattgccaagatttgctcgtgaatctcctctactcgttggctggacgtcatcttgaactgtatgagatcgaaagtagtgaaagagagaataagcatcatgtggtgagcttgatcaaatacatccagtctaagaggggcagcttgatgtgggagaacgaggaccctacccttttccggatcgaacttcccagcgcttcactcttatcagcacttgtgcaaagcatggttagtgctattttcttccagggggaccttcgtgagacttggggttctgaagctcttaagtgggccatggagtgcacatctcgtcacctggcttgccggtcgcaccagatataccgtgccttgcgtcccagtgttaaaagtgatagctgcgtattgcttctgagatgcatccatagatgcttggggaatcctgttccagccgttctgggctttgcaatggagatactgctgactttacaggtcatggttgaaaacatggagcctgagaaggttatactttacccgcagctcttttggggctgcgttgcactgatgcataccgactttgtgcacatctactgccaggtgcttgagttgttttgtagagtaatcgatcgcttgacattccgtgaccggacaacagaaaacgtgttgctctcaagcatgccacgtgatgagtttgacatcaatgggtatgcaagtgacctccacaggctggagtctagaactacttcagagagattgctatctgtgactgggaccgggaaggtgcctgcttttgaaggggtgcagccgctggtgctgaaggggctcatgtccacagttagccatggatctgcaatcgagttgctatctaggatcacgatacctacgtgcgactctatatttgggagccccgatacaaggttactgatgcacatcacaggccttcttccatggctcggattgcagctcacgagggaagcaccaccttcccttgggtcagcttcgccactgcaagagcagaaccagaaagcttactatgtgtcatccaatatttcggcatggtgccgtgccaagtctctggacgatttggccgaagtgttcagagcgtattccttcggggaaatcatgtcgttggaagatctgtttgcacgagcttcaccaccaatctgtgcggagtggttccctaggcactcatctttggcctttgggcacctgctgaggctcctggagagaggccctctggattaccagcgggtggttcttctgatgcttaaatcgctgctgcagcaaacccctgtggatccgtcacagataccccaggtgtacaacttcgtgtcgcagctggtggagagcacattatgctcggaggcgctgaatgtgctggaggcgctgctgcggagctgcggcggcggcgggcaaggcgaggaggctgggtttggtgataacggcgggcatgggagcggggagaaggtcctccagagcatgctgcttcctcagtcgtctttcaaggcaaggagtgggccgctgcagtacgctgcggggtcggggttggggtccttgatggggcaaggcggcggtggcagcagcagcgccgcagatagcgggttggtggcacgggatgtagcgctgcagaacacccggctgctgcttgggcgagttcttgatacctgcgcgcttgggcgcaagagggatcacaagcggctggtgccatttgtggcgaacgtcgggtagaccttgccaacatatagcagcacaattttgagtgggcagggcagcagccgccagcagagcgcacgcagagtgcgtgcgtgcgtttgtgaccgggtcagtgtcgtgcaaaggtggccacgcacatagacgtagctgcagttcttgaaactatttatttatttgtttatttattttattgttttgttttgatgagtgaggccgtgtgtgatgtatgtatgcatgtaattcgaaaccaactatggccgtggatggcatttgtattgtggaaaggagagtagaaattgatgatgaaacacaacaaacaggtttggaggcgtccttgtgtggtgtgtggatatgatcagcca

SEQ ID NO: 123692 - DNA, 3832 bp, Zea Mays
cctacgcctacacgacggcgctgcggcaagcgccgaccaatccatggcagacgaggcggagtggaacgaggctgaggccgggatcgcggccccgggcgcgggcgtggctcctccagcgcccggaggcggcgaggaaaccaagaggaagagggggaggcccaaaggtagcctcgacacgtataagaggcggaggcggaggcggcgcaccggcgacctggtgtcggcggtgcccgcggctagcctcggggatatgggccactcatgtggctgcattcccgctcccccactccctcccccctgcactgtgtacactgtacgcgacggcggcgtggcaatcacccctcaatccatggaggacgaagcggagggggtcgaggctgagtccgggaatgcgggcgcggcctccgccgccagagacggcgaggaaaccaagcggaagaggggaagtcccgaaggtagcttgaatgagaggaacaaggacaggacgcctaagcccaaggccaaggggaggcggaggcggcgcaccgacgaccagaccttgtcggtgtccgcggtgagcctcggggatctagggctcggggtagcggcggggaccaggtcgatcagagagaggaggccggcgcccaatgcgttcttcgacgtgggcagcgacagcgatactgagcatgatgatgatgatgatgaggagcaaactacgattgatcaggccaatcacgagagtgctaaaacaggtgattctgtaaagaagggaggaagacccaggaaaatggaagcgggccaattgcatactaggacgcagatttccaatggtaaaagcaacggccatacaaatgggaatcctgctgggaagaagaggggaaggggaagacccaagaaactgacagtagaacaagcgattactaggtgccagttctccaatggtgaaacaaacaagagtggtgccgaggcagcaaggagcaaacagtcaaggaatcgtaggatttcacagaatgcaaagaagcggaaaagagatgaagggaaggagtctatgacaaaaaagttgaacaaacggagtaagatgttgactggggaaaatgccctcatgtgccacaagtgcccatattgtcgcaagaactgtaattgcaaggcatgcctaaggatgaggggagttgaagagcctccaaaaaaggagatctctaaagaaaatgaaattcgctatgcttttcatattgtaaccatgctgcttccctggatgagagaactgcgacaagaacagttggaggagaaggaagtagaggctaatatacaaggagtttcaatgaatgagataaaagtggaacaagctgagtttgacctagatgatcgtgtatattgcgataggtgtaaaacatctattgttgattttcatagaagctgcaagcgttgtttctacgatctttgccttaattgctgcaaggagcttcgcaaaggtgagatcccaggaggagaagaggtggaatatgtgccacctgaacctaaaggtaggagttattcttttggcaagattcatctactgaaggatgctgatagaagtaagaactcctcaaatggcgagtcttacaacggcatgcctgctgttgggaactccaataatggtctgttgctctggaaagcaaaaagtaatggtagcataccttgtccaccaaaggaagtaggaggctgtggtagtacacttctggacctcaagtgtttgtttccagagaagatgtttgccgagctagaatatagagctgacaaagttctcaggagtgggacattagctaaagcaatggttagtagaagtgatcggtgcccttgcttcaatcaatcaggcaagataagaactgaaagcaaatcagtaagggaggctgcaagcaggaagggctcaagcgataacttcctatactgtccagttgctattggtattcaagatgatgacatagtgcattttcagatgcattgggcaaagggtgagccagttgttgtttctgatgtccttcagttaacctctggtctgagttgggagccaatggtggaaattaacatacataggttcttttcgggatatacaacaggcagaactcatgctaggactcactggcctcagatgcttaagctaaaagactggcctccttctagttcctttgacaagcgattgccgcggcatggtgccgaatttattagcgcattgccatttcgtgagtatactgatccacgatatggcccgctaaatcttgcagccaagcttcctgctggtgtcttgaagccagatcttggacccaaaagttacattgcttatgggttctacaaagaattgggcaggggcgattctgtgaccaagcttcactgtgacatgtctgatgcagtaaatatcttaacacacacagctgaagtcacttgtcagactgatattggcttaattgaaaaaatccaaaaagacatgagagagcaagatctgcaggaactatatgggggtctaaattcccgctctgagctcaagttgtcaccagctccaactgaatgcagggatgaatctgttgatgaaggattgaagacctcatatagtagagaaggcaattgtgtaaatagagacaattataatggtttggacatcaatgcattaccacctgatgacgatggagatattgcaaaggataaagaatcatctcctggatcagagtggcaaagtgaactaggtcagagttcagatcacaacaatggggtcaacacaactgatgagatgtacaatggagctcattacatttcacacaatcaaaaaagcactggcaggaaagttggcattaaacctcaagaagagaaatctgaaaaggctgattgcagtggcacatgtgcttatctaaaaggaagttctgaagataatccggaaatgcctattgtggagagctcagaggagcagagcaccggtggtgctctatgggatatcttccgcagacaggattctgataaattgcaagattatcttaggaagcattgctctgaattccggcatatttactgcaatccagtcaaaaaggtattccacccaattcatgatcagtccttttacttaactgaggagcataagagaaagctcaaggaagaatatggtattgaaccctggacgtttgaacagaagcttggtgaagctgttttcattcctgctggatgtcctcaccaagtgagaaatttgaagtcctgcatcaaagttgcgcttgattttgtttccccagaaaatgttggtgagtgtgttaagctgacggaggagtttagacgacttccatctttccacaaggctaaagaagacaaactagagatcaagaagatggctgttcatgccctgaacgaagctgtaaacttcctggatcctcgttcctcagaagagttgaaaattggggttggtgagaacatctgtgaggatgaatctgtagatgagaaggagctgccgcctagaagaggagttgaagtgtcaggcgttgatgagaagcctaaatagaaggcgagggaggcatcaagtccaaaagtgaagctgctgatgaggtcgcccattttaggttctcggaatcgtggttaattgatttgtcaaagcccctgttcatgtatggtgatcgctggctgacaccgatggatgaagagaagcaggacacgtgtgtgctgctgatatgtcgtgtcggcgagtgacatgaatatcatccctatccctatggtattattggtcgtttatgtttatgtttgatcatttgtcttattcagttttttttacaaataataaaacaagaggttaaaagtaaatgacgtcatttatttaattttaagacggggcagatgcaaaactgaa

SEQ ID NO: 123693 - DNA, 2184 bp, Zea Mays
cggcattgagtagtgaccagcctaagtaaagccgagcctgcgtttgcatccagaagaaaagaacacatattataatagtattgacaaacttcatcgttctatcagtgaagttctcatttcaactggggatgtttatgagtcgccctaaatttagatgtgccttgtttccttcttatgccgcttcatgcacgcatttaatatccttatatgttgcaggtggaaattaacatacataggttcttttcgggatatacaacaggcagaactcatgctaggactcactggcctcagatgcttaagctaaaagactggcctccttctagttcctttgacaagcgattgccgcggcatggtgccgaatttattagcgcattgccatttcgtgagtatactgatccacgatatggcccgctaaatcttgcagccaagcttcctgctggtgtcttgaagccagatcttggacccaaaagttacattgcttatgggttctacaaagaattgggcaggggcgattctgtgaccaagcttcactgtgacatgtctgatgcagtatgttgtttttattaatgattatatgcattcttttgttgtccatgtggtttagcactgaacaaaaatatagcagcaaggctcctgccgaacctgctcattttctaatgctctcctagcagatgtatctcattgctatctacctgctcatttttttgacattttgatagttcttatttttcttatcaactactttggtttacccaaaaaaaaaactgcttgggtcttattagtcaaacctgtgtgatgtaaacaggtaaatatcttaacacacacagctgaagtcacttgtcagactgatattggcttaattgaaaaaatccaaaaagacatgagagagcaagatctgcaggaactatatgggggtctaaattcccgctctgagctcaagttgtcaccagctccaactgaatgcagggatgaatctgttgatgaaggattgaagacctcatatagtagagaaggcaattgtgtaaatagagacaattataatggtttggacatcaatgcattaccacctgatgacgatggagatattgcaaaggataaagaatcatctcctggatcagagtggcaaagtgaactaggtcagagttcagatcacaacaatggggtcaacacaactgatgagatgtacaatggagctcattacatttcacacaatcaaaaaagcactggcaggaaagttggcattaaacctcaagaagagaaatctgaaaaggctgattgcagtggcacatgtgcttatctaaaaggaagttctgaagataatccggaaatgcctattgtggagagctcagaggagcagagcaccggtggtgctctatgggatatcttccgcagacaggattctgataaattgcaagattatcttaggaagcattgctctgaattccggcatatttactgcaatccagtcaaaaaggtattccacccaattcatgatcagtccttttacttaactgaggagcataagagaaagctcaaggaagaatatggtattgaaccctggacgtttgaacagaagcttggtgaagctgttttcattcctgctggatgtcctcaccaagtgagaaatttgaagtcctgcatcaaagttgcgcttgattttgtttccccagaaaatgttggtgagtgtgttaagctgacggaggagtttagacgacttccatctttccacaaggctaaagaagacaaactagagatcaagaagatggctgttcatgccctgaacgaagctgtaaacttcctggatcctcgttcctcagaagagttgaaaattggggttggtgagaacatctgtgaggatgaatctgtagatgagaaggagctgccgcctagaagaggagttgaagtgtcaggcgttgatgagaagcctaaatagaaggcgagggaggcatcaagtccaaaagtgaagctgctgatgaggtcgcccattttaggttctcggaatcgtggttaattgatttgtcaaagcccctgttcatgtatggtgatcgctggctgacaccgatggatgaagagaagcaggacacgtgtgtgctgctgatatgtcgtgtcggcgagtgacatgaatatcatccctatccctatggtattattggtcgtttatgtttatgtttgatcatttgtctt

SEQ ID NO: 123694 - DNA, 2238 bp, Zea Mays
cggcattgagtagtgaccagcctaagtaaagccgagcctgcgtttgcatccagaagaaaagaacacatattataatagtattgacaaacttcatcgttctatcagtgaagttctcatttcaactggggatgtttatgagtcgccctaaatttagatgtgccttgtttccttcttatgccgcttcatgcacgcatttaatatccttatatgttgcaggtggaaattaacatacataggttcttttcgggatatacaacaggcagaactcatgctaggactcactggcctcagatgcttaagctaaaagactggcctccttctagttcctttgacaagcgattgccgcggcatggtgccgaatttattagcgcattgccatttcgtgagtatactgatccacgatatggcccgctaaatcttgcagccaagcttcctgctggtgtcttgaagccagatcttggacccaaaagttacattgcttatgggttctacaaagaattgggcaggggcgattctgtgaccaagcttcactgtgacatgtctgatgcagtatgttgtttttattaatgattatatgcattcttttgttgtccatgtggtttagcactgaacaaaaatatagcagcaaggctcctgccgaacctgctcattttctaatgctctcctagcagatgtatctcattgctatctacctgctcatttttttgacattttgatagttcttatttttcttatcaactactttggtttacccaaaaaaaaaactgcttgggtcttattagtcaaacctgtgtgatgtaaacaggtaaatatcttaacacacacagctgaagtcacttgtcagactgatattggcttaattgaaaaaatccaaaaagacatgagagagcaagatctgcaggaactatatgggggtctaaattcccgctctgagctcaagttgtcaccagctccaactgaatgcagggatgaatctgttgatgaaggattgaagacctcatatagtagagaaggcaattgtgtaaatagagacaattataatggtttggacatcaatgcattaccacctgatgacgatggagatattgcaaaggataaagaatcatctcctggatcagagtggcaaagtgaactaggtcagagttcagatcacaacaatggggtcaacacaactgatgagatgtacaatggagctcattacatttcacacaatcaaaaaagcactggcaggaaagttggcattaaacctcaagaagagaaatctgaaaaggctgattgcagtggcacatgtgcttatctaaaaggaagttctgaagataatccggaaatgcctattgtggagagctcagaggagcagagcaccggtggtgctctatgggatatcttccgcagacaggattctgataaattgcaagattatcttaggaagcattgctctgaattccggcatatttactgcaatccagtcaaaaaggtattccacccaattcatgatcagtccttttacttaactgaggagcataagagaaagctcaaggaagaatatggtattgaaccctggacgtttgaacagaagcttggtgaagctgttttcattcctgctggatgtcctcaccaagtgagaaatttgaagtcctgcatcaaagttgcgcttgattttgtttccccagaaaatgttggtgagtgtgttaagctgacggaggagtttagacgacttccatctttccacaaggctaaagaagacaaactagaggttagcaatgtgcacttgcagtgatctatctggtctatccgatgtgatggatatgttttttttccagatcaagaagatggctgttcatgccctgaacgaagctgtaaacttcctggatcctcgttcctcagaagagttgaaaattggggttggtgagaacatctgtgaggatgaatctgtagatgagaaggagctgccgcctagaagaggagttgaagtgtcaggcgttgatgagaagcctaaatagaaggcgagggaggcatcaagtccaaaagtgaagctgctgatgaggtcgcccattttaggttctcggaatcgtggttaattgatttgtcaaagcccctgttcatgtatggtgatcgctggctgacaccgatggatgaagagaagcaggacacgtgtgtgctgctgatatgtcgtgtcggcgagtgacatgaatatcatccctatccctatggtattattggtcgtttatgtttatgttt

SEQ ID NO: 123695 - DNA, 118 bp, Zea Mays
caaaattcaagaaaatggggaaaagggtatgaaaaatttaaaatcatggcttgggccaattataaacattgaagtatattcattaagcaacaagaaaggttcaggaagcttggccaaa

SEQ ID NO: 123696 - DNA, 384 bp, Zea Mays
atgggaatctccagcactaggtcgctttttttactaactggaaccataagatataagatgcattcaaagcaccttcatcaaccatgtgaaagaaggtttccttggcttcatctagctccttggcttgcagaatccatggatgagagccttgtaagtgaactgattgaactgctgcccatcaatcagtgtggtctaggtcacattgtccggcatcacctgtgtcgctaccatctccgtgaagagctgagccgcctccttcaccctggcatccttgaacaggccatggatcaaggggttccatgtgacagtgtccgctcgtatcccctccttgcccatgccatgcagtcccgcgcacacatggcctcgtacctcatgcccttcctg

SEQ ID NO: 123697 - DNA, 660 bp, Zea Mays
atgcccctgctaggattgcttgtcgccatctccctcaacgtcgttgccaccacctctcccaagcacggtggggagttcgggcatgggcgtggggtgcgggttcggactggcgctgtacaccatgagctctgtcctcgtcttcaccacgtgggcactggtcggcacggtgccgtgccaggacctggcgtccgcggccaccggcccccagtcgcgccgccgaagcaggcacagtgggtggcgcccatgtccacgctccaggagcggatcgcggaggagtggaggcgcaaggaaaagaagggatcttgctccggctccgcgaccacgtcggggcacctcgcggagatgcatgccgtggagcgcgccgcgcgcgagctcaatagcgtgctcgaggagatcgccgaggaggaagaggaggaggaggacgaggggcggcggcggcaggggatcgtggacgaggagcgcgcgagggacgtgacggagcgcgccgaggagctggcggcggcttgccggacgctcgaggagacctgcagcgccctgtggagaccggcgctgtgcgacccctgctggacctcattgccgacccagagggagcgcgggattcgagggtgggagatccgcgaggatggaagggagcgttggggatccacccgtcaaagctaa

SEQ ID NO: 123698 - DNA, 385 bp, Zea Mays
caagattcatgtatgaatgtttcccttttatttgccaacagatttctgctatgttcaagattgggaacagcaaggaagttcctccaatacctgattacctttcggagcactacaaggatttcattaggaacaaatgtgtaacaaataaaaaatagcttataatttcttagtgtatgtcaagttgcccagtatagacagtattgggccagatagctcattgaagctaagatccctggatcattgcaaagtaaaaatgaaaaaaagtccattagtgccaccacctttgcttaaaatttaagaaacctcagaagcacaatttaacttataatattgcaagtgtctgcataaggccaatcactgatggtatagggctagaaaacttcct

SEQ ID NO: 123699 - DNA, 2697 bp, Zea Mays
atggcgccgctgcccttcctgctgggtttcctcctcggcgccctggcgctggcggctgtcgaggcggcggcgatccttctgctgctccgccgcctccgccgcagtcaggctgcggcgggggacgcgctaccagccgccgacgagctgcccggggaacgccccttcccctacgagaagcagggttttctgtggatactggagccagaaaaaatgccaaaactcagtaatgaccgcttatcggctggaggtcctagagagacaaaagacaagaagaatattgtggaagtttttcctgcaaagaagatggctaaaatcaagggaaactctctttgtttgtctggtcctgatggctcccaagcaaccattgagcttttgaactgcacggtacttgcagtttctgcatcaagtatgccctcgcgtaaatgggccaagaggttcccagtaaaattagaaagcaaggacaatgagatttataatggaagcaaggtgtgctatctttatacagacacttcctgggagaaggaatcatggtgtaaagcactccgtattgcagctactgctgacaaggaaaaattaaattggcatgccaagctgagcgaaaaattcctcaattacatatcatcattaaattctgaatacccatgttttctaaagcctccaatactctctggtgaggatcatgaggttatggacaagacatcaaagactgatgggtcttcaaaagtacgtcttttcctcaagaagttggcgaagaaggcatctacgaaggctgccttagagagcaaaacaagttcaggaatgtcagtgcaaggtgaaaaaaagatacttgataaattgcgcagctatcagggtgcaccatttattgaagcattaataggtccacaagaggacaagcttggtggcaattcatcgcaagatactgtaaaagccactgccccgcctgctgcattgaatcaaattggacagctttcaacttcacctgatgtgaatgcggatgaccgagttgcggatgaaggcacactttgttggaacctcctgtcatcacggttgtttttcgatgctaaaatgagtgatgagataaacaaggccatcaaagcacgcattcagaggactttgtcaaatatgaggacccccacctacgtgggtgaaattacacttacggactttagccttggagaacttccaccttatgtgcatgcgatgagagtccttccgctggatcttaatgaattatgggcctttgaagttgactttgagtattcgggtgggatactgctgcacattgaaacaaggcttgaggttcaggaaccagagttgcaaaaggacatcatgaaaagtaattttggagcagatgctaatggagatgttgattctgatcttcttgagagtattgaacagtatggtaaccaatttaaaggctcgcacaattcagcttcttcaattggggagaatgatgaagcagatgcttcaagtcagtcaaagagcattggatggacttcagcatatatatcaagatggaaaactatcctgcactcaatagccgaccatgtctcacaggttcctctttctctggcaataaggatttcatctgttcgaggtatcttgcggatacaaatgaagccccctccttctgatcaaatttggtatggatttacgtcaatgcctgatctagaatgggatttggaatcttctgttggggataggaaaatcaccaacagtcatatcgctgcacttattggtaacagattcaaggcttcgcttcgagatagcttagtgcttccgaattgtgaaagcatctccatgccgtggatgttggctgaaaaggatgattgggtacctcgcaaggatgctccttttatttggctaaatcatgagcccactgagatgagaatccatgccacagctacagcatcaactcagtccgaggaaggtggcttgaaggatggtgggagtgaggaatcatcgagagtagtggcatccattgacgaggcaaaacaagagcccaaggcagaggcatcattgcacggccagtcttcatctgctccaggcagtgaatctgcccacagcgatgcaaatgatgagctgaggaaaccgctgttgatcacagagaaactccaggaagaagcttcagaaggtatagccatgtctcccatgtccacatctcggagggcggtgataccagcaggggagcagccgcaggtgtcagcatcacccattggagaggacgcgaagcgaaaaagcgggaggcgagctcggatgatggatttcgggaagaggatgggggacaagctggaggagaagaggcggaccatcgaagagaaagggaggcacatcgtggagaagatgcgagagaatgctaggaccaacagcatggagaggaccagtagctagcgaggatgcaaggatcggcatcttgtttcgttgatttgggaagtggtgtataggctgaacttgtatgttttctttgtagagttgtgcaacatttagggttccacgagagctgatctattatgtgggtgtggcggcggcaaatatgcatggatgggatgagcggtgtacttgtgacctcatgttagtatcagcttgtggaatactatgaaaaatgcaggtgccaatgcctttcaccatgctactagttagtttgtctgctacttgttcccaagtttaagaatgtgatcaactgtgacaccttgttta

SEQ ID NO: 123700 - DNA, 333 bp, Zea Mays
ataaatgcaaaaaaactatgtattagagcttgcgtacgtgccaccgtccttcccaaccaaaaaattctacacccaatttacctcccaatccaatcaatcacacaaggactgagttcgaattgttcttcctctcagtctcaggaggcctcgccggcggctatacactacacctcagtgcaacgccgcggcgcgaagcccagccgattgttctgcaggtcatacacgacgtggaagttctgctgctggaagttaccgatgatggacatgccggtgcgcgaggtgcccaggactgccaggcacatgatgtcgtccgggtccagccgaacgaagtag

SEQ ID NO: 123701 - DNA, 2247 bp, Zea Mays
tacatctcaataatcaacattggccatgagacttgacaaattgagattcttctgtctgccaggtcatcatgctattcatttcaatctcttctcatcccaagagcatcaagtgtatgttgctgctttgtgtgaggaccgaattgaaaatggtgtgccacttatacaaatctggatgggtatgcttgctgtcttagatgtcaaaagtgagcttctcgttgttcatggcagctgctacaacacaatggcactataggaaaactgaatataggaacacgctactcgtcgaacacaaagttaggatcctcaacaacaaatacaaaggggtgagtgtagtagtgacacatagaagagacatgccgggcgcggcacaacaaaggtggtcaaaagtgattgtatgagcacataagctccgtgaccacgggatacgttacaggtggagacagtcgtcccgcagtcaacagtcaccacctgaactgaacctgatgcggaggcggtggtgcggcggcccccggttttggcattgggcaggcacggacggagacaaatccgcggcacggacggagagacggctgcaccgccccacacccacccttttccgcgcccgcgaagaaaacgaaggcagtggaacccgaagcggaggggccagaaagcgacccgaccgtctctccgctccctccctcccccacaccacccacctgtgatctcccgcgcgggagatccgcccgccccatggcgccgtcgcgcccgctcatgcgggggatccgcccgccgcgcgtcttcccgacccgcggcggccgcgcctcgccgtacgctgtcgccctcacggccctgctcctcgtctccgccgccctcctcgcgctcatcgccttcggcgtcttctcgctccccgtgtcagcgccgaacgccgccgccaccaccacagccggaggggagaccgaatccgccgacacccgccccgcgcgcccccgcgcccgccgggacctgggggaggggctgggagagcgcggcgcgcagtggaccgaggtcatctcgtgggagccaagggcattcgtctaccacaacttcctgtctaaggaagagtgtgaatacctaattggattggccaagcctcacatggtaaaatcaacagttgtcgacagcactactggtaaaagcaaggacagcagggtccggacaagttcgggcatgtttcttcaaagaggaagggacaaggttattcgagtaattgaaaagaggattgcagactataccttcatacctgtagatcatggagagggactccaagtactgcattatgaagtcgggcagaagtatgagcctcactttgattattttcttgatgagtttaacaccaagaatggtggtcagaggatggctactcttctgatgtatctatcagatgttgaagaagggggcgagactattttccctgatgcaaatgtgaacgtcagttctttaccatggtacaatgagctttcagagtgtgccaagagaggcctttctgtcaaaccaaagatgggagatgcacttcttttctggagcatgaaaccagatgccaccctggacccattaagtttgcatgggggttgtcctgtgattagaggaaataaatggtcgtcaaccaagtggatgcatatccacgagtacaaagcttgagccttcaagactcgagagtcgagcgtaccaaagatggatctctatgcatgtgacttggggctgtctactgggttgacacccatgtatgctttacagacccactgaagctgtattctttgctcctttgttggaggggggagaattgcagataataggggccaataagcaggggccttgctcatccctgcagtatttttgggtctgatccttgctgacttggcttttgtcttttcttttctttttcttaccttgccgtaccccagctatagaggaatggtgtagtgtctgggggcatagagtttgagattttgttttgtgccacacctgtgttactagtataagctttggtactaatgaataacgaggcctaagctcacatctactacatgaatggtgtaatattgttgaagatagaaagcatctaatgttcggtggttttcgttatggtttcggttattacgacacaagattattgtgacaaaaagtgtgttttgagagataatagagctcacatctagtacatgaatgttgtattactgtttaatgatgacacgagattatttgataattatgactgaaagtcgcctagag

SEQ ID NO: 123702 - DNA, 2639 bp, Zea Mays
ggcccggccaccccagcaggcttgggccgtggtctgctactctgctcgccctctcgcctcacttccactctcacccaccaccgcctttctccttcccccgcgccgatcacgccacggcggccacgccatagggctagggtcggagatccgctcgcccggtgatcgattcgcacctcctcctctacccggatttggaggttagagtaatgaaataaaatgctgctcaaaagcaagtttaagttggccacaaccattggcatcgtgctgtcgatgctatcgctgctcgtgcacctttttattgctaattattcagctgggggcattacaaattacagcatgcacatggacgatatccttccatttggactgaggcctcgaccacggaggctgtggggtccattggtcccactcgatcacttgcatccttttgcgaaacctagcaaaccatatgctgctcccagtaagcataatggttttatttatgcaaagatatatggtggctttgagaagatacagtctacaatctgtgaccttgttgccgttgccaggctattaaatgccactctggttattcctgagatacaagcaacaactcgtgcaaaaggcataagtccgaagttcaaaagcttttcatatatatacgatgaagatcatttcatacatgcactttccagtgatgtggttattgtgcatggcttgccaaaggatctcagagaggctaggaaaaagataaaatttcccacactatctcctaggaattctgctactccagaatactacatcgaagaagtattacccagacttgtaaaatcgaaagttcttgggataattgttaatggaggtaattgtcttcagtcaattctccctgcaagcttggaggaatttcagaagcttagatgcagggtagccttccatgctctaaggttgcgccctcaaattcaggctcttgggagccaaatagtaggaagattgcgagcatctggccgtccttatgtggcctatcacccaggactgcttagagatactctagctttttatggttgcgctgaactgttccaggatattcatacagagcttattcagtatagaaggaatcagatgattaaacgaggaacagtaaaggagcagctagcagttgattcagtgtccaggaagatggctggtttgtgtccactcatgccagaagaggttggacttctacttcaagcagtaggttacccaccaactacaataatattcttggccggttctgagacttttggtggacaaagaatgcttattcctctacgagctatgttcgctaacctagtagaccgcacttcattatgtagtcagagggagctgtttgatttagttgggccagaagatcctcgaaccccagatttgccacagcctccacctcccaaaagtgaaaaacaacttattgaagaatggaggagagcagggcctcgtccaaggccgctgcctccacctcctgcaaggccattctatgcacatgagaaggaaggctggtatggttggattggtgagaatgacacagaaccggatgcttcactgatcgagttcaggaggcaagcacaccagttgctctgggatgcacttgattattttgtttctgttgaagctgatgccttcttccccgggtttcacaatgacggtagtggttggccagactactcaagtttggtcatggggcaccggttgtaccaaacaccttccggtataacctacaggccggacagaaagattattgctgcactgtttgaagatgttaatgatcatcggtatcatccacctcggaattggacaattgctgcacgtgagcacctcaacaggagtgcaaatgtggagggcgtagtgtcatcagctatgttatcaagacctgtatcttttctcgcccaccctttgccagagtgctcttgcagcacatcgaagtcacctgctgttgaaccggtgaaagatagcaatggcagattcctatttggaggtgaggaagagtgtgctggttggatggcacgcagccctgcgatggcgtctgccaggaataatgaacctcaaattgaggactatgaggataatttgcctgaagaaggctctagttcagacatgcaggaatctgacagaagtgactcgaataaatcttcggagcaagatgaggagatggatctggatgattagagatatgtggagcatggatgtatggcacacctttcaaccgctaccagctccaggtccaggctactcgaagacaagcatacatacgctcagaatctcctggacaggtgggaatcatcttgcatcgcgcagcgacacatcagcatctggattagtcccaggatcacaattcacaaggtcatccagcgtgggagcttgcctggaccgtactcggtatacaacaaggctttaatacgaaactaacactttgttcccttcttcattcacgtgtcattttttgtgggtacagccctaagaaactgtttatgtacaaatgtcttaactgggaatacatcattttttttgggtgagtttgatatctaatggcgactatgagctaatgagattggcttatggtggacagatgtgcacctgtatacaggacaacattgcaattgtttgtgagttttattgatcgccgaaga

SEQ ID NO: 123703 - DNA, 2584 bp, Zea Mays
ggcccggccaccccagcaggcttgggccgtggtctgctactctgctcgccctctcgcctcacttccactctcacccaccaccgcctttctccttcccccgcgccgatcacgccacggcggccacgccatagggctagggtcggagatccgctcgcccggtgatcgattcgcacctcctcctctacccggatttggaggttagagtaatgaaataaaatgctgctcaaaagcaagtttaagttggccacaaccattggcatcgtgctgtcgatgctatcgctgctcgtgcacctttttattgctaattattcagctgggggcattacaaattacagcatgcacatggacgatatccttccatttggactgaggcctcgaccacggaggctgtggggtccattggtcccactcgatcacttgcatccttttgcgaaacctagcaaaccatatgctgctcccagtaagcataatggttttatttatgcaaagatatatggtggctttgagaagatacagtctacagctattaaatgccactctggttattcctgagatacaagcaacaactcgtgcaaaaggcataagtccgaagttcaaaagcttttcatatatatacgatgaagatcatttcatacatgcactttccagtgatgtggttattgtgcatggcttgccaaaggatctcagagaggctaggaaaaagataaaatttcccacactatctcctaggaattctgctactccagaatactacatcgaagaagtattacccagacttgtaaaatcgaaagttcttgggataattgttaatggaggtaattgtcttcagtcaattctccctgcaagcttggaggaatttcagaagcttagatgcagggtagccttccatgctctaaggttgcgccctcaaattcaggctcttgggagccaaatagtaggaagattgcgagcatctggccgtccttatgtggcctatcacccaggactgcttagagatactctagctttttatggttgcgctgaactgttccaggatattcatacagagcttattcagtatagaaggaatcagatgattaaacgaggaacagtaaaggagcagctagcagttgattcagtgtccaggaagatggctggtttgtgtccactcatgccagaagaggttggacttctacttcaagcagtaggttacccaccaactacaataatattcttggccggttctgagacttttggtggacaaagaatgcttattcctctacgagctatgttcgctaacctagtagaccgcacttcattatgtagtcagagggagctgtttgatttagttgggccagaagatcctcgaaccccagatttgccacagcctccacctcccaaaagtgaaaaacaacttattgaagaatggaggagagcagggcctcgtccaaggccgctgcctccacctcctgcaaggccattctatgcacatgagaaggaaggctggtatggttggattggtgagaatgacacagaaccggatgcttcactgatcgagttcaggaggcaagcacaccagttgctctgggatgcacttgattattttgtttctgttgaagctgatgccttcttccccgggtttcacaatgacggtagtggttggccagactactcaagtttggtcatggggcaccggttgtaccaaacaccttccggtataacctacaggccggacagaaagattattgctgcactgtttgaagatgttaatgatcatcggtatcatccacctcggaattggacaattgctgcacgtgagcacctcaacaggagtgcaaatgtggagggcgtagtgtcatcagctatgttatcaagacctgtatcttttctcgcccaccctttgccagagtgctcttgcagcacatcgaagtcacctgctgttgaaccggtgaaagatagcaatggcagattcctatttggaggtgaggaagagtgtgctggttggatggcacgcagccctgcgatggcgtctgccaggaataatgaacctcaaattgaggactatgaggataatttgcctgaagaaggctctagttcagacatgcaggaatctgacagaagtgactcgaataaatcttcggagcaagatgaggagatggatctggatgattagagatatgtggagcatggatgtatggcacacctttcaaccgctaccagctccaggtccaggctactcgaagacaagcatacatacgctcagaatctcctggacaggtgggaatcatcttgcatcgcgcagcgacacatcagcatctggattagtcccaggatcacaattcacaaggtcatccagcgtgggagcttgcctggaccgtactcggtatacaacaaggctttaatacgaaactaacactttgttcccttcttcattcacgtgtcattttttgtgggtacagccctaagaaactgtttatgtacaaatgtcttaactgggaatacatcattttttttgggtgagtttgatatctaatggcgactatgagctaatgagattggcttatggtggacagatgtgcacctgtatacaggacaacattgcaat

SEQ ID NO: 123704 - DNA, 700 bp, Zea Mays
aaaccctatctctctctctctctctctctctctctctctctaacatatgcagtgagcatgttcttccggcggcacttgctctcttgcttcctcctgctcctgctactgtcacgcttgccaagctcgatcgtcctcggcttcagaacatcgagaggagaggaaggcaagagcgagttgatgaggcgccatgatgagcatgagtttccgccagccgtatctccttcaaaagaggtggacgccgccagtaagttcacggtttcaagaagaatggttcctcaaggtccgaaccctctccacaacagatgagaggatcggagcagcacatgcatatgccacctcttctcaagtctcagctactacgggtgtgcagtgcactcgacaaagtacccttctcctcttccttttttttttgtttagcctagactggacgatacagatggatgcatatataattcctatggatgtaatgtagtgtgtgtgtgtgtgtgtttttgttgcattgatttaatttgcaggcggctcagctctgtacatacatcttttttatctttatgatactattaaggtgtacctgtatggatctggattctctacgtctatttaatttacgcattggctgtactgtacctgtatggtaggttcttactcctgtgttacttggaaacaagagagataatcagcgagtcatatatgatttagc

SEQ ID NO: 123705 - DNA, 1921 bp, Zea Mays
gacagaacacaccaccacaagctagctagcagcctagcactagcagcggccgggcaagccacctctctccctcgatccctcgccgatcgatcaccgtctttgcactgatctctgcagaaagctagcattagtatggacggcgccgtagcgatagcggcggcggcggtcctgctgctctgcgccttcatctacgcggcgtggctggcaccggccgcagccaggcgccgcctccgcggggcgggcttcgacgggccacgcccgtccttccccttcggcaacctccccgagatcacggcctcgctgcaggcccaggcccaggccaacaacaacaagtcctccgccgtcgccagcggcgacatccacgccgccgtcttcccctacttcgcccgctggcgcgagtccttcggcaaggtcttcgtctactggctgggcacggagccgttcctgtacgtggcccacccggagttcctcaaggccgccaccgccggcgcgctgggcaagcgctgggggaagcccgacgtgttccgccgcgaccgcatgcccatgttcggccggggcctcgtcatggccgagggcgaagagtggacccggcaccgacacatcatcgcgccagccttctccgccacaaacctcaacgacatgatcgggctcatgcaggagaccaccgccaagatgctggccgagtggggcgacgcggtggcggcgtccggcgaccagcaggacggcgccgtcgtcgacgtggagcggggcgtggtccggaacgccgccgagatcatcgccaaggcgagctttggggtgaccgacgacgaggccggcgcgcgggtgttccggaagctgcaggccatgcaggcgatgctgttccagtccaaccgcctcgtcggggtgccgctggcgcgcctgctgcacgtgcggaaaacctacgacgcgtggcgcctgggacgccagatcgacgcgctgctcatggacatcatccacgacgcgcgccgccgccgccgccaggggaaggacctcctgtcgctgctgctggccgggacggaggaagccaccgaccggcggctcaccacgagggagctggtggacgagtgcaagaccttcttcttcggcgggcacgagaccacggcgctggcgctgtcgtggacgctgctcatgctcgccgcgcacccggactggcaggacgcgctgcgggaggaggtggagcgcgagctcggcaataaggacgaccaaggccagaagctcgacgccgccgcgcttggccgcctcaccaagatggggtgggtcatgagcgaggtgctgcgcctctacccgccgtcgcccaacgtgcagcggcaggctctggaggacgtgcaggtggcggagggcaagggggccgctgtcgtcatcccgcgtggcaccaacatgtgggtggacgtggtggccatgcaccacgacgtggacctgtggggcgacgacgcgcacgagttccggccggagcggttcgctcgtgaccccatgcagggcgggtgccgccaccgcatgggcttcctccccttcggcttcggcggccgcatctgcgtcggacgcaacctcaccgccatggagtaccgcgtcgtgctggccatgctgctgcgccgcttcagggtgtcggtggcgccggagtaccggcacgcgcccaagatcatgctctcgctcaggccctctaacggcatccagctccgtctcacaccactggtcactgccgatgccaagtcatcgtcggcctaagctaagctagctaggtatctacgacttaattaactaatagctggaggagtattaattaggttgatctgctccacttggtatatatatagatgttatatatgaagctaattatattaggcatgtgacgagcatctgctagtaataagctcctatatataaagtggatgcttattttgtatct

SEQ ID NO: 123706 - DNA, 128 bp, Zea Mays
cggtggttacaatggccaattgtgctataatttgtcacctaaatacacgaggatttagtttatatactaatgcatattaggctcgtcccatatttgtcaaatacggaataaatacgggttcaatctgg

SEQ ID NO: 123707 - DNA, 4533 bp, Zea Mays
cctccgaaaggccttaaccccaaacgaaaccaccctccgcgacaaagccgactactataggctgtcgtagccaacaagcgcgacatcctccgcccccacctcgccgccggcgatggagccgccttcgcctccggcgacccactccgcggccgtccgtgtcctctcccgcactcctccgccgacctccccgaacccctcctccacgggcccggcggccccgtcgcccgcctcccgcgacggggtcgtcgccgtcggcttcgtgggcgccgcggggaccgcccgcctcgcggaccggatcctcgacgcccacgtcttctctcccggtggctcggcggggagcctcgcgggaagggtaaggtaccaccgcgacgccggcaagaggatggtgttccttcacctcacgccgccgccgcccgcgccgctcgaggcggtggcaggatgctgcgatgacggcgaactaccggagatgctcttcatgttctctgtctgccacgtaattatatttctgcaacaaggcttcagatttaacacacaaaccttaaagaagttccgactgctgcaatcttcaaagcatgctctcgctccatttgtcaagccattggtggcagctgcaatgcctgccagaactgttgcctctgacaccccaacaagagcaacccacagggcttcttccgtctcccctccaacacgccgaggaggtcacgctgggcgtcagtcctcggctatctcacttatgtctggaaccagttcaactccttctgtcttgccaggccaatgcattcctgtattgctctttgtctttgaggatgatgcggttgatgtttcaagtgctgcagcaagtcccgatgatataggtgatgcatcttcatcaaatcagggttctacccctgatggactaccaaaacagagcttagcttcaaaaagttctggttcagtaattatgctttcccgggcagcaaacaaatctgagggcagttcaggcaaaaaactgcattcgtcactggagggacagatccgtgtcttgatcaagaagtgcagggtgcttgcaggcatggagcctggacatattggcccaaggggcgtaagtaacatgagtcatcatttacccctgttctcactcgatacctcgagggtagttgcactgttggaacggtatattaataagaaacaggaaccactggacaccattgcaggactatttgaagattctttgtgctccaaatcgccattggatattctttcgctcgaaaacaactaccatccaacaaaccatgatgactttcagttgatcaaggattttatatttcggcagtctgatgcgctgagagggaaagggggatattcaagcaatgcaagtgccgggtctgttgcaggtgttggcatggtggctgctgctgctgcagcagctgcagcatcagctgcatctgggaaaccagttaatgcacctgacctccctacttttgataaatggttgtccataagtacctctattctaactgcactgttgagtggaagaaatgtgctgagatgtcagtctgaaagcaagactcatacaagtcctactgagaagaatggccaacttcctgtaggatctaatgctattgagatcgcattatcgtgcttggaaagtaacaatgggctgaacatgaaattttcttcatcatggtgtcaaagggtgcttccagctgctaaggagatatacctgaaaggtttgcctgccttttaccccacaagaatgcatgaagtgcagctacagaaggcattgcggtcctttggctcaatggttaaaggaccagcagtcagggtattctcaaagaagctagaagatgagtgccgggcaatatgggaatctggaaggcagcaatgtgacgctgttagcctaactggcagaccatgtaagcaccgcaggcatggcgatttcttttcatcagatgcaatggagcaacattctagtggatatgtcttcctccatgcatgttcctgtggccggtcacgccgccttagagatgatccttttgactttcagacagccaacgtgtcttttaattgtttccaaaattgcgatgacctattacctacccttgcgcttccaagaggcagcaatgatggttcattttcagtatcctcttggtgcttggtgcgtcttggaggagcaaggtactacaagccaacaaaaggactccttcaaagtggatttagctccaaggagaggtatcttctaaggtggattgtatctgttcataaggggcaagtgagaaatgacattcgttctaatactattacttcatccgcaagatctggtatgaacccgcagactcccccaatagtcactggtgaagtaaaatctgccataacccaagtcacagcacaaattaaatatgcaaagcttgaaaattctggaaaacaagctgaagttgaaccagtgagcaacttaggcattaattttggtaaaggtctgccaaattttactatgaaaaagcccttttctgaagttgttgctggcaccacatcaaaagataccgagtttcctgctcttcagcagacaaggccaccaaaacctggtggtcgaaaagatgagcagcgtcaaatgaatatagtagaccagactaatggccgaggtcatgtggctgtcagccaagggtctgtagctgaaactgaatcggcaaaagcaagcagaaacaagagtagtgaaaatgctgatgggaagccctttttacagatagggagcaatatagtaccagtgattgctggaaatgagactagagaaactagtcagccagtacaacagtttgttgtgtatattggatttgagcatgagtgtccctatggtcatcgcttcttactgtcagagaaacatatgaaggagatcgagtcttcctgtttgcagtatcaaagacctcatctaaacaaagaagcagaagtcaagcatgcacaaaagttgctccaaaatgcatctggtttaatagcatctgcagtggacataaacagtgcacggaaaaacagtaagccattggaatcatcagggagaaacagccagcagcaatcactgcagctgaggattgatgcagagacctcacagccttctcctcggctttcagatccacagaatgccaaaaggtgggagcattattttcgaagcgttacaattgatgatggtggagaagcattttcactgatgaacagaaacttgccaatatatatgcgctgtccacattgcaaggtctcagaaaggaaggaacatcaagatgtaaagtttgctggtgttgtgtctcaacttcagcggattttcattgtgacacctgatttccctgttctgttggcaagctgcccacttgtacagtttgaggcaagtacgctcacctatattcagcagtgttaaagacataatttcctttactcacacatagagtagttatgggaagacattattttaacctagatgtaatgaagttattgccttttccctttttcttgcatcaggggtcatgtttgccatcaaatgtctctgatcatgatcgagaaggatcattcagtattgggtgccgagttatcctcccacctgagagctttcttactatgaggcttccctttgtctatggtgttgagacaaaggagggaagtaaatttcccctcaaatactttgagcgacaaccagaactcacagcatggcttgttgcaggcacagccctgcaaatcgtgtcggtaggggatgtcactgagaaagaaaccgttatgaagtgatagacatgtcatataaagctttactggctttagcatgttctagtcatatatcagtgatttgctatcggcattgaataggtctgttgatggttatattctgtctgaagttttcacttctactcctgaacttgtgctgctaagctgttgacacaactattgcttgctttcactgtgctggaagcattgtgaaatagaagttccgctgatatctgcctgacctggatggtgtatatagatgcaagcagagggggcaggcccacaggcaatcacgccgttcttgtctttgtacatgaaaggtgccaggaggttaagtttagctggttatgtaaaggtccgctttttgaggacctgtccagtggatcaatcccattcctagactggtttgccttgaggcttggagattttgtagtaagactattagttcaattgagctgtttgtccagttgatgagttgttttattcctaggcttgttgagaaatctggccttggaatatagaacccagaagaaaggatttttctgaatgatgttgtagcaaacggttgcttgagatgcatgatctcctcaaataaacttgactgatctgcctgtatcccttattctttcttgtatataatgtatgcagtacaggtatttccccgcagtctttggagaagaagatggatttgtgaagtgatagcacaaaaaaaaaagtcatcaggcgcttctggtggtagactggagactgggctggagaaatgttggagctggaaggaaacgcacggatggctcctgcttgacaagtgtaaaggca

SEQ ID NO: 123708 - DNA, 3439 bp, Zea Mays
atcgaaaataaataaaaacagatcgcgtctccattcgagtgtgcccgtcgtgattgggattcgggctcgtgattttcggcgcggggccgacggggtcatgtgaatgtgatcaggccgttgcagtcttgggagtctccagatcacacacgagtcccgtccgccgctgtagcagtactgcagtagaaatcctgtcctgtcgctccctccaccacacactgaactgaacacgcgcgcgcgcacgccattcccctcccgtagcgtgcggcgtgccgtcaatccaaaccaccaaaagcaatgccgccgccgtccgcaaacggcgccaccgccgccgccgccgccgcgagggacgacatgtccccggcggaggccaggctggcgatgatggagctggcgaacatggtgtcggtgccgatggcgctggcggccgtgatccggctgggcgtgccggccgcggtgtgggcgggcggcgccaacgcgcccatgtcagcggccgacctcctcccgccgggccacccggacccgtccgtcctggagcggctgctccgcctgctggcgtcccgcggcgttttctccgagtccaccgagtccacgcccaccacgcggcggcggctattcgcgctcaccgcggtgggccgcaccctggtgccggggcccgcctcgggcgcgtcctacgccgactacgtgctgcagcaccaccaggacgcgctggtggcggcgtggccccgcctgcacgaggccgtgcttgaccccgcggggcccgagccgttcgcgcgcgccaacgccggggtcaccgcctacgcctactacggcaaggaccaggacgccaaccgggtcatgctccgcgccatggcgggggtatccgagcccttcatgggtgccctcctcgacggctacggcgccgccggcgggtttcgcggcgtcgccacgctcgtagacgtcgggggaagctccggcgcctgcctcgagatgatcatgcgcagggtccccacaatcaccgagggcatcaacttcgacctccccgacgtcgtcgccgcagcgccgcccatcgccggagtgaggcatgttggcggagatatgttcaagtccatcccctccggtgatgccattttcatgaagtgggttctgacgacgtggaccgacgacgagtgcacggccatcctgaggaactgccacgccgctctgccggacggcggcaagctcgtggcctgcgagccggtggtgccggaggagacggacagcagcaccaggacgagggcgctgctggagaacgacatcttcgtcatgaccacctaccggacgcaggggagggagcgctccgaggaggagttccgccacctcggcgtcgacgccgcaggcttcaccgccttccgagccatctatctcgaccccttctatgctgtcctcgagtataccaagtgatctccactccatccgcccaaatctccttgcgagttgaatagcagaataacgaacagataaataaagctattccattcacgttggaatccgaatctctgcctactgtactcaacgttagcttctgtaaccaggatatctctttcaagcatttccaagcttttgatgacaaaatcataattttgagctcattattcaagcattatattctatacgaaagccttggacaacaagattcactctcgctattacatttgcgactgcaagttcaactcccttctattcagacagaccagaccagcagcagtgattagtaatgcaactggtaaggatccggagtgtcataacaagttcaacccatcaaccaagtacataaccatccacaacaattattgtttcttagctaaccacacagagccgtggccaccattttaagcgcctgctgcatcattccactttcttatcttctgccgccgcagcaccagcaccgtgcggttcggccaggggttttgattcactcgcaccctgcaaacacagcaccgtaggatgagcacaaaaagggcatggaagtaggatgaacatgtaggatgggcatacctcatcgttcttctgagctgcaggcttgtatggacatgcaggtgggactctttcaggtctccggtactcccatccaaatagccgatacaccttgctctggatacgataccgtccaataacataagcaacacaactttattaaaaaaacaaacggtgatcttcttcactggtgtggccagatgcacatgtaaatctacgaggctatgcccagttagaaagcacgccgccgtcggaattgctgcttcacaaagcaggtgtgcggttgtcacagaattgttggtaagcgactgaccatataaacctagaaaatataacgccaagctggctgttccaattcacatactcgaatctttgcgattcacagctacatcttccctagaggatcattgatttaatgttgttccagctaatacctcaaggcctaggcaaacttacgcatgagtacatggctagaactgggccggcatcactgaaccaatatgttgtaaaaaggtgcatattacttccccgcacaaaaaaaaacgatgtcttccatgccacctgccaacaaattgaaaataccgttccctttatttgctaaagtgtaaggacgttgatttattctcaacagttacctgtgtagtgctatccaatcaaaacaaggtatatttatgttaggagtggctgccatgtggggccattgccagggggcaagtggatttctacatctataaaaggacagttgtatgggctaataggaatcatcaattaccaattatcagaaatcaaacactatcatcccttatctcgtctctccagtttactactagctttctctctgctctctctacttgctatttctctctaggagcatctgtgacgctaacaatttagttattcatccactgcatctagaagttgagttttcagtttactgcacaagaagctgacatctagtgtcaacaatccgatacctgggctctcaaaaagctggacgcactgcgcacagggattcacagctcaaaatgcatactgctcatccatccatttactggacgaggagatcattgcgatgcaaatctgatgaggtgatctgggtctgggtgggtatgaactgctgacaggaaacgtgatcatgaaatccagaccaagtcgtcatagagaatgaaagcatctccggccgtagctggctcatacgaacgaatcacaaccgataaccggcagctaggtctgtctagttttgtttgtctgtaggaacggttgagttgacctctactttcctgctccgacgaatccacgagcccaagacagtagactagtagacaaacacgctccaagacccacaaggaccgctgaattgatagaaaccccaaccaccaccacgccgatgttctggatggatcttacagaaacccggggggtcggggagagagagagaggagggagg

SEQ ID NO: 123709 - DNA, 2109 bp, Zea Mays
atcgaaaataaataaaaacagatcgcgtctccattcgagtgtgcccgtcgtgattgggattcgggctcgtgattttcggcgcggggccgacggggtcatgtgaatgtgatcaggccgttgcagtcttgggagtctccagatcacacacgagtcccgtccgccgctgtagcagtactgcagtagaaatcctgtcctgtcgctccctccaccacacactgaactgaacacgcgcgcgcgcacgccattcccctcccgtagcgtgcggcgtgccgtcaatccaaaccaccaaaagcaatgccgccgccgtccgcaaacggcgccaccgccgccgccgccgccgcgagggacgacatgtccccggcggaggccaggctggcgatgatggagctggcgaacatggtgtcggtgccgatggcgctggcggccgtgatccggctgggcgtgccggccgcggtgtgggcgggcggcgccaacgcgcccatgtcagcggccgacctcctcccgccgggccacccggacccgtccgtcctggagcggctgctccgcctgctggcgtcccgcggcgttttctccgagtccaccgagtccacgcccaccacgcggcggcggctattcgcgctcaccgcggtgggccgcaccctggtgccggggcccgcctcgggcgcgtcctacgccgactacgtgctgcagcaccaccaggacgcgctggtggcggcgtggccccgcctgcacgaggccgtgcttgaccccgcggggcccgagccgttcgcgcgcgccaacgccggggtcaccgcctacgcctactacggcaaggaccaggacgccaaccgggtcatgctccgcgccatggcgggggtatccgagcccttcatgggtgccctcctcgacggctacggcgccgccggcgggtttcgcggcgtcgccacgctcgtagacgtcgggggaagctccggcgcctgcctcgagatgatcatgcgcagggtccccacaatcaccgagggcatcaacttcgacctccccgacgtcgtcgccgcagcgccgcccatcgccggagtgaggcatgttggcggagatatgttcaagtccatcccctccggtgatgccattttcatgaagtgggttctgacgacgtggaccgacgacgagtgcacggccatcctgaggaactgccacgccgctctgccggacggcggcaagctcgtggcctgcgagccggtggtgccggaggagacggacagcagcaccaggacgagggcgctgctggagaacgacatcttcgtcatgaccacctaccggacgcaggggagggagcgctccgaggaggagttccgccacctcggcgtcgacgccgcaggcttcaccgccttccgagccatctatctcgaccccttctatgctgtcctcgagtataccaagtgatctccactccatccgcccaaatctccttgcgagttgaatagcagaataacgaacagataaataaagctattccattcacgttggaatccgaatctctgcctactgtactcaacgttagcttctgtaaccaggatatctctttcaagcatttccaagcttttgatgacaaaatcataattttgagctcattattcaagcattatattctatacgaaagccttggacaacaagattcactctcgctattacatttgcgactgcaagttcaactcccttctattcagacagaccagaccagcagcagtgattagtaatgcaactggtaaggatccggagtgtcataacaagttcaacccatcaaccaagtacataaccatccacaacaattattgtttcttagctaaccacacagagccgtggccaccattttaagcgcctgctgcatcattccactttcttatcttctgccgccgcagcaccagcaccgtgcggttcggccaggggttttgattcactcgcaccctgcaaacacagcaccgtaggatgagcacaaaaagggcatggaagtaggatgaacatgtaggatgggcatacctcatcgttcttctgagctgcaggcttgtatggacatgcaggtgggactctttcaggtctccggtactcccatccaaatagccgatacaccttgct

SEQ ID NO: 123710 - DNA, 3165 bp, Zea Mays
acctccaatcgctcgcgaatgccgcctcctcgccgcggccccaaccccgccctaatccccaccccgtcgcctccgcattagccatttcccagccaacaatctcttctcctcgcgttagggttagggcaccccatctatctattgcgacagacaaaacgacatggacgagtaccaccaccaccaccagcgcatgggcgccgccgccgacttccgccgcgacctcgaggacctcgtctgcgaccacctcggcggctgcttctccccggccccgtcctcctcctcctcctgctccgccgcggcgggcggaggcgccgcggaccatgagcccgacggcgaggccgagtcgtcggcggtgcgcaggcggaggcgggagtcgcgcctcctcagccgctgggtcgcgcgccaggctgaggaggtgctctcctccatggagcgcgaggtcgagcgccgcaaccgcgaggccgagctcctcgcgctcgcgcgcctccacccggtctccaccctcgacccctcctccttcctcctctcctcgaccgccgcgccgccgccgccgcgcccgcaggcgccctccctcaacgcgccctcctcgctcctgcagatgtggcgcgagctcgagcacccccgcgccgacgccgcccaccccttcgaccgcgagccttccccggacaacgccgaccgtgaccgcgagcgcgtgcgccagatcgcgcgacgcctcacggacaccgccgccgccgctgccaccgccaccgccggtggggagtggctcggcgagacggagcggcagagggtcaggctcgtaagggagtgggtacagatggcgagccagccgcgcgactcccgtgcgggcacgcgcagggacgagcctgcagccgggaccgacagggacaggcgaggggagctggagcctcctcggctacgaggccggcaggcgcgattggatgtcatcagccgtatggccagggagcgtcagcgcgagctgcagggcatatcagggtaccatgtggtgtcggagtttcctcgccgcagccgcaaccgcatccagggactgcttaggggaaggttcttaaggaatggggcgcttgaagaggagcgaccaccatctgtggcagcgagggagcttgggcagttgaggcagagccatcgtatgcccgccttgagaccagagagtattgcaagtagtcaagatgttagccaatctgatgcttctgtggttgagagtgttagattactagataacgatgaatctcagcaaggggctgaggtggcttttactgatagtgaggataccacccaaactgtgctggagaatgtggatttacaagaaatgggtgcagatggtgctgaggcacactcaccaagtatacctatggatgacatggttatgatgcaagagtctctaactcaaggtgacaacatgcagcaagatgggacagaagatgacacgggattctggcagacatctttggatgccagtcttaataggtggcccagtgagattggtggaggtgccgacagaacttgggaagataatgcagaagacttacacagtgaaaccatggaggaggatgacagggagcatggtcatctacaagaagagcatgatggatggcatgataacgagtctcatggtaccatggagaactggcaagatgattaccaagattccgcacttgatacaggccccattcctaggaacgaaaataggtttatcccacctgacgatgacaatgtgtacagcatggaacttagagaattacttagcaggcgaagtgtgtccaatcttcttagtaatggttttggtgaaagtttggagcgattaataaggtcatatgttcaacagcgtggtcatggtcccctcaactggaatcttgatgcagccatgcacccttcaaatggaccaaatgcaaatcaggaacaagaacggaaccctgaaactcagcaattccaggctcctgtcaatagacctgcccttgttatccctcctccacctttgccaccacgacaaccattatggcacagagaactgcgtcataacaactggaacagcagacacagggaatgggatgctattaatgatttaagagctgacatgggtagacttcagcaagggatgagcagcatgcagaggatgctggaagcgtgcatggacatgcagctggaattgcagcgttctgtgagacaagaagtgtcagctgccttgaatcggtttgcaggacctgaaggattgtcgatggatctgtgtgacgatggatcaaaatggaatcaggtgaggacaggaacctgctgcgtatgctgtgattcacagattgattctctactgtacaggtgtgggcacatgtgtacttgctcgaaatgtgcaaatgagctggtgcgcagcggcggcaagtgcccgctctgccgggctcccatcgtggaggtggtccgcgcatactcggtaatgtaaggtggtggaagatacagtcagtaggaaaggaataagttgacggcaagcgaagttttgctgcaagtgaagaaaagcttgtttaggaaatggaccccctcccaatcccccaaaaaagaactctgtttttcctcctttgtgaatctataggggaggctacttacgttgcctgcatattcgttgccttgctgctcgtgtcgccgagacgcaggcggcaaagggcgtgccattaatttttggaagagcttgcgttgggaagtggtgtccccagtgcaagctgtttcactgtatatttatacactgactgatcctcaactgaagcagacaccagcaatgcattggtatataccaggttccttgatcactctctggtcctcccagtgagcattgagctgtgatgtgtcagtgtttggtgcgttacatctgcgtatcagtccgtagtgtggtagtgggtatgtagctttcagctcccgttgcctttggttgagtcgacttctctttcaaatgcacggtccgtgatgtttcgagctgctgttgtacgctacacggagaatgtacgcttacaaacatatcacatatgaatattgatgaaatatagtacagtattattgtgctgtgcatacgtctttcgcactcaggagcaacaggcatggtctgcaagatgacgtgcgacgcgtttgcaatcgcaaccatgctggggctgggccaaacagacgacaacccca

SEQ ID NO: 123711 - DNA, 127 bp, Zea Mays
cccgtttctcaccccaaaccaaacccgcttccaaattcgcgtgtaaaaacttcacatcccgtggcctccgctaaacaaaatttcgctgtattttgtccaaacttcaaatatgtttaattatgcagta

SEQ ID NO: 123712 - DNA, 1408 bp, Zea Mays
cccgctataaaaagctccggaaagccatcccctcgcttcacactcacacagccatctctcccagtgtcccagctcagcttagcaatccgtctctctatctacaggcgggggaattaatagatggagggcaaggaggaggacgttcgcctgggcgccaaccgctactcggagcgccagccaatcggcacggcggcgcagggcacggaggagaaggactacaaggagcctccgccggcgccgctgttcgaggcggaggagctgacgtcgtggtccttctaccgggccgggatcgccgagttcgtggccaccttcctgttcctgtacatcagcatcctgactgtgatgggcgtgagcaagtcgtccagcaagtgcgccaccgtgggcatccagggcatcgcgtggtccttcggcggcatgatcttcgcgctggtgtactgcacggcgggcatctccggcggccacatcaacccggccgtcaccttcggcctcttcctggcgcggaagctgtcgctcacgcgcgcgctcttctacatggtcatgcagtgcctgggcgccatctgcggcgccggcgtcgtcaagggcttccaggagggcctctacatgggcgccggcggcggcgccaacgccgtcaaccccgggtacaccaagggcgacgggctcggggcggagatcgtcggcaccttcgtgctcgtctacaccgtcttctccgccaccgacgccaagcgcagcgcccgcgactcccacgtgcccatcctcgcgccgctccccataggcttcgccgtcttcctcgtgcacctggcgaccatccccatcaccggcaccggcatcaaccccgcgcgcagcctcggcgccgccatcgtctacaacaggtcccacgcatggaacgaccactggatcttctgggttggccccttcatcggtgctgctcttgccgccatctaccacgtggtcatcatcagggccctccccttcaagagccgtgactgattatacgtacattgtttattaccaacagcaaccatgcagcatacgaatcatcgttattaagctatatatgtataatatccagcatgtcttgttaattactagtatatgtgctagtaagtggtgcgtgctcgctcttccatcgctgtcgtcgtctcatctgctattgttcgtcatatatatatgtccatgtgagctagctagtgtgtatcacgcgcggaggccagttcagctagccatcagtctgcaatgcactttgtgacttctctgtttagtcctctctcgcttgggttttggtacggtgaagtatataaactaagcatgcatatgtgtaaaaattcaaattcaagtgtatgcatgcatgccaataatgaaagttaagaagaagactccctgtttatgataagatgttgttgtaccgatt

SEQ ID NO: 123713 - DNA, 2196 bp, Zea Mays
cgaaagcggagggaaaagcgagggaggcagccttctattttctgtcaaaacaagggcgatactcctcctactccagcgcacacgcagatcagcgtcgaaatccgtcgcatcgtgcccgcctcgctgtctccgctgggcgctggtggtcatggcccgcagggcgctggagctcgcggcggttctgctcgcgctggcggcgctggcggccgtggcggccggaggggacatcgtgcaccaggacgacgaggcgcccaagatccccggctgctccaacgacttcgtgctggtaaaagtgcagacctggatcaacaaaaaagataaagatgagtttgttggtgttggtgctcgatttggccccaagatagagtcaaaggaaaagcatgccaactggacaaacttgctgttagcagacccttctgattgctgcacccctccaagagagaaggttgctggagatattttgttagtggagaggggaaactgtaagttcactacaaaagctaaggtggctgaatctgctggtgcttctgcgattataattatcaatgataagcacgagttatacaagatggtatgtgagaccaatgaaacaaatttagatattggcatacatgctgttcttctgccaaaagatgcaggctcttctttacaaaggtctctctctagtggtgaagtcttagtggagctgtactctccagatcgtcctctggttgatactgcagaggtgtttctgtggcttatggcagttggtaccattctttgtgcatcatactggtcagcatggagtgcccgagaagcagatattgaacaagagaagcttctgaaggatggtcgtgaagtagcaccaaactttgagcctggaggttctagtggtatggtagatatcaacatggtatccgcaatactgtttgtggtgattgcatcatgcttcttgataacactctacaagctgatgtcccattggtttgtggagcttctggtggttatcttttgcataggtggtgtggagggtctgcaaacatgcttggtggccttactgtcaatgtcaaggcggtttaaacctgctgcagaatcgtatgtgaaagtgccattttttggagctgtttcataccttacattggcagtttgtccgttttgcattctgtttgctgttctgtggggtgtttatcgtcggttgccttatgcttggattgggcaagatattcttggtattaccttgatcgttacagtcatccaaattgttagaatacctaaccttaaggtgggttcagccctcctgggttgtgccttcttatatgacatcttctgggtttttatctccaagatgttgttccatgaaagtgtgatgattgtggttgcacgtggtgacaagactgatgaggatggtgtacccatgctgttaaagattcctcggatgtttgatccatggggtggatacagcatcataggctttggtgatatccttcttcctgggctgttggttgcttttgcattaaggtatgattgggctgccaagaagaccttgcaatctggctactttttgtggtcaatggtggcatatggttccggtctcctaattacatacgttgccttgaaccttatggatggccatggccagccggctctcctttacatcgtgcctttcacaatcggcaccttcttagcactgggcatgaagagaggcgagctcagaaacctgtggacaaaaggacagcccgagagagtgtgcacgcacatgcacccatcccccaaggattcgcctgttgcggtcagctcgctgtcgtagacaaggctaacgaccttacctgatgttgcctggccccggagaatgttgctgatgaccaaaaaaagtttccagggttaatgaaggagtctactgatttgtaatgaaccttacatagggataagccaagatcccctgatcgtgatcctcgttgtacagtaggtggtgtatttgtatagtgagtgatgactattgagatgtgcggctgacactggataaaaaaggcgcaggagcttgatgtgggagcagcactgcatctgcatcatgtggctggtgtatggttttgaatgatctctgccgcctcattcttgttcttgacatggacctgttcctggtcttatgaggcgcacacgtggcaagacgctgctggttttgtcggtgaagcgatgtgacgcagtgtatatgtgtgtgta

SEQ ID NO: 123714 - DNA, 2730 bp, Zea Mays
ggccgcctcgctggcgtcattgcgtgcgcatacacctttctctgctgaagctgaagcttcgccactgcctatggaggagacggcggcaccgctaccgctaacagtgcgggccgcgggtgctgcccccgacggcgatgagcgaaggcagccgcagctggaaggaggaggacaccaccagattcagagccaggagacggaggaggagcacgcgcaggcggtgtactgcgccgtggggattgggaccggcagcggcagccaggagtggaaggacaacctgcgctgggtgctcgccgccctcgccccccgccggagcagcagcaggtgcctcgtgctcgcgcacctgcgccgacccacctcccggatcaacatcatgggggcgtgggtcccagtgagccagcttgcagaggaggaggtggctgcgtacaggcagctggaggaagagaggatcggcaaagtcctagacgacctcgtggaactctgccaaagtcaaaaggtgaacgcgagcaagatcgtcatcgcgagcgacgacatcggcaggggtctcgtgcagttggttgacgaccatggggtcaccgagctcgtcatgggcgctgcgtctgatcgggcgtacagcaggaagatgcggacaccaaggtctaagaaggcgctgacggtgcagtggaaggcgaacccctcttgcaagatctggttcctttgcaggggaaatctcatctgcaccagggaggcgagcgagggacaagcgcatagtagagctgagtcgtccacagctagtacaagctccaggtcaagcacttccggctactcgacccctgctgcaagggaccgcagcatagaggatcaagctgttggaaccctcgatggtgcagctgtgcagttgctacaagagattgaagaggaccggccggagacgcccacgtcggatgctggtgagatggacgacgccttgtacgataagctgaagcgtgcgctcatggaagccgagagcctcaagcacgaggcgtacgaagagactcgccggcgtcagatggccgagcgcgagctcgctgaagcgtccaggatggccgacgaagcagagagatcgaaccagagagaggcgaggcaccggaaggaggtggaggagatggtggcgagagagcgcgcggccattgagcaggacaggcgagagctcgacgacatcctggagaagatacggaaggtcgacgaccggagcgccgagctggagcttcagatcacgagctcggagcgcacgatgaacgacctcgaagccagactgtcggaatcgtacaacctcctccacacactccggcaaggagatccctggtcgactgcgacggagtccgcgtccgagtccacagaggacggcggcggcgagcagagagtgagcttcttgcagctgggttactcggagctggacgaggccaccaagcatttcgacgagtctgtcaggatcgacggcggaggcgacggcagccggggcaaagtgtacggaggggagctgcgcggcatggccgtcgccgtgaaggtggtgaaccctgacgtggccgtgcacgaggcccggttcgcccgagcggtggaacgcatcggccgggcgagacacccgaacctggtgacgctcgtgggcgcgtgcccggcggcgcgcgccgtcgtgtacgagctggtgccgggcgggagcctggaggagcgcctggacccgggaggcgggagcgggtcggcgccgccgccgctgccgtggcacgcgcggtgcggcgtcgcctacggggcgtgctccgcgctggcgttcctgcactccacgctgccgcggccgacggtgcacggcgacgtgaggccggcgaacatcctggtgctggcggacaacgcgccgcacgggtggtcatgcaaactggccggcctcggcgcgcgcgggctcgtggaggagcgagagcagccccgccccggcgccgcggatcgggcgtacgcggacccgcggtacctcgctgcgacgggggagctgaacccgcaccgcgacgtgtacgcgctaggcgtggtcctcctccggctggtgaccgggagaccggcgttcctggcgaggaaggcagcgcgggaggccgtggacggcagggcgtcgtggcaggaggtggcgggagggtggccgacggagcgcgccagggaggtggccctgctcgggctgagatgctgcggcgtggacgtggaggcggagcagaggccgcggctccccgccgcgctgttgctggaggaggcccgcggcgtgctggaggccgcggtgagcgcagcgccgagcaggtcgccatcgtcgctgtccgagtccgacggcgccccatcctacttcctctgcccgatactcaaggaggtgatgagggacccgcagatctccggcgacgggttcacgtacgaggcggaggccatccgggagtggctgcgcagcggccacgacacgtcgccgatgacaaatctgaagctcccgacacagcaactggtccccaaccatgcgctccgctccgccatccacgagtggcgccaccgccagctccgtgctcatcatcggctgcactgatccggtgttaacttttaacttgtattgtatataaacgcgggagagctagttagtctttttctttcgttttgtttttggtaaatgttatctgattgcctgagtgtgtagcatcgatggtcttgacaacgtacactgtacagtcgcggatgcatgggagaaatgaatttttttcgcctttc

SEQ ID NO: 123715 - DNA, 2844 bp, Zea Mays
ggccgcctcgctggcgtcattgcgtgcgcatacacctttctctgctgaagctgaagcttcgccactgcctatggaggagacggcggcaccgctaccgctaacagtgcgggccgcgggtgctgcccccgacggcgatgagcgaaggcagccgcagctggaaggaggaggacaccaccagattcagagccaggagacggaggaggagcacgcgcaggcggtgtactgcgccgtggggattgggaccggcagcggcagccaggagtggaaggacaacctgcgctgggtgctcgccgccctcgccccccgccggagcagcagcaggtgcctcgtgctcgcgcacctgcgccgacccacctcccggatcaacatcatgggggcgtgggtcccagtgagccagcttgcagaggaggaggtggctgcgtacaggcagctggaggaagagaggatcggcaaagtcctagacgacctcgtggaactctgccaaagtcaaaaggtgaacgcgagcaagatcgtcatcgcgagcgacgacatcggcaggggtctcgtgcagttggttgacgaccatggggtcaccgagctcgtcatgggcgctgcgtctgatcgggcgtacagcaggaagatgcggacaccaaggtctaagaaggcgctgacggtgcagtggaaggcgaacccctcttgcaagatctggttcctttgcaggggaaatctcatctgcaccagggaggcgagcgagggacaagcgcatagtagagctgagtcgtccacagctagtacaagctccaggtcaagcacttccggctactcgacccctgctgcaagggaccgcagcatagaggatcaagctgttggaaccctcgatggtgcagctgtgcagttgctacaagagattgaagaggaccggccggagacgcccacgtcggatgctggtgagatggacgacgccttgtacgataagctgaagcgtgcgctcatggaagccgagagcctcaagcacgaggcgtacgaagagactcgccggcgtcagatggccgagcgcgagctcgctgaagcgtccaggatggtcgtcgtgacgaaacttcaccacttccttcctgtcaaaattcatgctgacgaccatattgtatgtagctggcgaccgtgtttgtttatgtgtgtacgtatatgatggatgcaggccgacgaagcagagagatcgaaccagagagaggcgaggcaccggaaggaggtggaggagatggtggcgagagagcgcgcggccattgagcaggacaggcgagagctcgacgacatcctggagaagatacggaaggtcgacgaccggagcgccgagctggagcttcagatcacgagctcggagcgcacgatgaacgacctcgaagccagactgtcggaatcgtacaacctcctccacacactccggcaaggagatccctggtcgactgcgacggagtccgcgtccgagtccacagaggacggcggcggcgagcagagagtgagcttcttgcagctgggttactcggagctggacgaggccaccaagcatttcgacgagtctgtcaggatcgacggcggaggcgacggcagccggggcaaagtgtacggaggggagctgcgcggcatggccgtcgccgtgaaggtggtgaaccctgacgtggccgtgcacgaggcccggttcgcccgagcggtggaacgcatcggccgggcgagacacccgaacctggtgacgctcgtgggcgcgtgcccggcggcgcgcgccgtcgtgtacgagctggtgccgggcgggagcctggaggagcgcctggacccgggaggcgggagcgggtcggcgccgccgccgctgccgtggcacgcgcggtgcggcgtcgcctacggggcgtgctccgcgctggcgttcctgcactccacgctgccgcggccgacggtgcacggcgacgtgaggccggcgaacatcctggtgctggcggacaacgcgccgcacgggtggtcatgcaaactggccggcctcggcgcgcgcgggctcgtggaggagcgagagcagccccgccccggcgccgcggatcgggcgtacgcggacccgcggtacctcgctgcgacgggggagctgaacccgcaccgcgacgtgtacgcgctaggcgtggtcctcctccggctggtgaccgggagaccggcgttcctggcgaggaaggcagcgcgggaggccgtggacggcagggcgtcgtggcaggaggtggcgggagggtggccgacggagcgcgccagggaggtggccctgctcgggctgagatgctgcggcgtggacgtggaggcggagcagaggccgcggctccccgccgcgctgttgctggaggaggcccgcggcgtgctggaggccgcggtgagcgcagcgccgagcaggtcgccatcgtcgctgtccgagtccgacggcgccccatcctacttcctctgcccgatactcaaggaggtgatgagggacccgcagatctccggcgacgggttcacgtacgaggcggaggccatccgggagtggctgcgcagcggccacgacacgtcgccgatgacaaatctgaagctcccgacacagcaactggtccccaaccatgcgctccgctccgccatccacgagtggcgccaccgccagctccgtgctcatcatcggctgcactgatccggtgttaacttttaacttgtattgtatataaacgcgggagagctagttagtctttttctttcgttttgtttttggtaaatgttatctgattgcctgagtgtgtagcatcgatggtcttgacaacgtacactgtacagtcgcggatgcatgggagaaatgaatttttttcgcctttc

SEQ ID NO: 123716 - DNA, 1525 bp, Zea Mays
atggaagagatccttctccccgtggccgcccacgacgcggcagccttcgtgctgtcccgcctgccccaccccggcacagcggccgccgacgctgccgccttcgtagacgccgccacgggcgcaagcctctctttctccgcgctccgccgggccgcgctgtccctcgcctccgcgctccgcctcggcctcggcctccgccgcggcgacgccgtcctcgtcctcgcgcgcgactcgctcctgctcccgcagatactcctcggcgtcctcgccgccggcgccgtcgtggcggtcaccgacacggacgccacgcccgccgaggtcgccgccgccgcgcgcgcctcggccgcggtcatggtcgtcgctgcgccggacctggccgccaagctctccctcgacgccggcgccgccgtgggcctgccgccgcttctcctcacgtcgcgctcgccggaggatcccgcggcgctctcggccgaggagctcatcgacggcggtgaccctgtcgctgctgaggcggtggccgtgtccgactccgatgtggcgttcctggcctacccgtcggcgagagcgacagccgccgtcgcgatgacgcacgccgacctcgtcgctgctatggcccacgtcgtcgcggacgacggccgggtgtgcctggcgtcccttcccatgtgcagcgcccacggcctgccgctagtcgccctcgggctccccgctgccggagtcacgacggtgctcatgcccccgccatcgtcgcagtccggtacgaaggcggcgagagaggctgtagccgtgcacgccgcgacggacttcgtggcgactcctgaggtggcggtggcagctctcaccgctcccgtgccgctcgacgggaagctctcctcgctgaggagggtaatcgtggcgcctacaccgttggcgccaggggcacgggaggagttccgccggaggctgccgtgggtccagctgacgcagctgtccggcacgccggagaaccaaacagagatgctatcactgccacctgaggtgatcacaccacctgcaggcgcagccgttatacagcaaaacagcctgccagcagatcaagtatccgcgacaaacgaggctgcctccttggtgccaccaccgaagaagataaacaagattatttcgggagacatattttcgagatcaaccatgagcaagaccttgaggaagcacccggcaactggcaacagacaagctgcctcaaaactgtagcagatcctccgcttacgtttcctgttcggaagctgcttgtcaacctgatgaagcatgattagtcagtcgaaatttctagtatcaaatgttgagttatacagcaagagctgatagtttctactatcagattgtatggaagcagtccgtaagttcatgatatgaatagggaaaaaaagttgcagagtttacccccatacgtagggctgatttggtgaccagaaaattaaaagggatactttgaatagcaaaggggattcctacaccatggatcccctccaattgcatggtcaccaaatca

SEQ ID NO: 123717 - DNA, 2702 bp, Zea Mays
gggagagggaagcgaaatgcgaaaggcagccgaggccgcgagccgacgcacgcggctcgttgcttcctccatcccctttcctcacgccgacgccaaagtataccaacgaattcctcctcgggctcccacctaatcgtgttcgccgcctgcctctcccaaaccctagcaacccacgatcgaacccaaatccgctcctcccacccgaggaattatgcgaaattccccgagatcctagcccagcactagcagatcgatccatcgcttgcccacctgccggccaccaacccttgtagtctcagtcaatctgtagattgagactacgatgagcctgtcaccgctcgactcctcctccccgccggccgcggctgcggctgctgctacggaggtgcccctcgccccgggcttccgcttccaccccaccgacgaggagctcgtctcctactacctccgccgccgcgtcctcggccgccgcctccgcgtcgacgccatcgccgagatcgacctctaccgcctcgagccctgggacctcccctccctctcccgcatccgcagccgcgacgcccagtggtacttcttcgcccgtctcgaccgcaaggtcgccggcgctggcgccgggggccggggcggtcccggcaacaggaccaaccgcgctacgccgagggggtactggaagaccacgggcaaggaccgcgaggtgcaccaccgcggcaagcccgtcgggatgaagaagacgctcgtcttccacgccgggagggcgcctaagggcgagaggaccaactgggtcatgcacgagtaccgcctcctcgatgcagacggacctcaggatctgcatgtggtttgtagaatcttccagaagcatgggtctggaccacagaacggtgcgcagtatggtgcaccatacatggaagaggaatgggaagaggatgatgatgctattgagaatggttctacccacgatgcatctggtcaaattgctgcaaccacctgtgctgtagatgaggagtcaaatgaggacgatgagaatgcatattgtgaaacaaacagacctgctcgagtagaaccatctcatctgccttcggtccatgaaatgctcaatccaccagagatggctcctctccaaggtcaagattctaaagagacaagcgatggaagttgttctgatgttgctatttctctggaagagattttgcaggaacctttgtcaaatattagtgtggagaatatgcatagacttgaagggcagaatgccactgatgataacatcagtgttgataacttgttatcagcatatcccacgaaagataatggctacgtaggccagtataacactatgaatgggagtgctccagcagatgaagctcacgcacgctggcctttgagaacatatagtaatcagaattatgtcaatggccctcttgctgatgagttctttgacacagggaatgataccaatggggttgcatattccaggcagcagcaagctgatggcttcccagcacctcgccaagttgatgaaagtatggtattttatgatgccccatctgattacaacttggtggatggaaaagatgacttcgtatatctgaacgacattctgaatgagccacttggaaatgaatcgctctttgatggagatgatatgatggcttactttgatgccacagagaatgatttcaagtatgacattttgggctctggtcagggtttggattatccacttgcagacatgccgttgaactttgcccaaaagagtgacaaggaagacaagtttacattcgaagggatctctgaggttccggaagcaaatcctcagtacggtgcatcctcatctggttcacatgaagatctgtatactgatactgaatttctaggtgtaccaacagatgacactgctgataaaacttacggaaatcgcctggccagcatgttaggctctatcccagctccacctgcaatggcctcagaattcccgccgtcaacagggaaatctgctgggatgctttcggctgtcagctcgagctcaattcgttttactgctggtatcatccaacttgatggcctcactttcagcagcggctccggtcagtggcccttgcagaagaatggagacttgagtttgcttgtctcttttgctgtggagggcgacgtggcatccaagctccctgttggtcttgggcgtgctactcggattagcaccgttcccatggtgctgcgcagtggtttttaccttttctttatgtcggccatgattctcttgtttagctacaaagtagggtcgtgtatctacagcaggtaagttgaagttgatggcgcctcttgtccggccagacctgtgggctgtttattttagttcaacacgtggatcattccctcagtgatgggggtatagcagtcgttcgacaccttttttacacatttaccattttgacctgtcaaaacatacagcaataaactttcgaactggtggtggtgatcatgccgggaccatgttctcgtcagggaaagcagtgcactgtgaatttggtgctctgctcttattattgtaaccaaaattaactgcaatatgttatattctgtcctgtagaggaaaagctattttatctggttattgtaaccaagattataccttggtgggttgctgtcaaagaaacaatggaaatatgattattatcaggccgtgttatttgctccaggccagataa

SEQ ID NO: 123718 - DNA, 1900 bp, Zea Mays
gaagtccaaaaaggcccaaccagcccccctccctctcctttcttcacttggaaatccatggtgtaggcccagagagatctagctagagtttcctgcatccgcctccgccccccaccgcctccacctccgccccccaccgccccgccccacagcaggaaggatggaagccccgggctccccctacgcctcctcgccggaatccgcccccaagcgtgccccacgctcccctccgcagcagcagcagtctccctccgaggaaggagatgacaaggagaaaccaacacatttgagatttctagtgtctaatacggcagcagggtgcatcattggcaagggtggatcaaccattaatgattttcagtcccagtctggggctcgtattcagttatcacgtagcaatgagtttttccctggtacaaatgacagaatcatcatggtttctggactgtttgatgaagtaatgaaggccatggagctgattcttgagaaactgttggctgagggtgaagaattcaacgaagcagaagctagacctaaagttagacttgtagttcctaatagctcttgtggtggtataattggtaaaggtggagcaacaataaagtcgtttattgaagaatcacatgctggaatcaaaatctcgccacaggataacaactatgttggtttgcatgataggcttgttacaatcacagggacctttgataaccaaatgaatgcaatagatttgatactgaaaaagttatctgaggatgttcactatccacctaatttgagctccccatttccttatgcaggccttactttcccaagctaccctggtgttcctgttggttatatgattccacaggtgccatatagtaatgctgtgaactatggacctaataatggttacggaggaaggtatcaaaataacaagccaactacacctatgagatcacctgctagtaatgaagcccaagaatctttgaccattggtatagccgatgaacacattggtgctgttgtaggtcgagcaggaaggaacataacagagatcattcaggctagtggtgctcggatcaagatatcagataggggtgactatatatctgggacatctgacaggaaagtgacgattactggaacacccgaagctatccggaccgcggagtccatgatcatgcagagggtgtcagccagttcagagaggtgatgagccccttctgaaggaagggcgtaggccattgctgtgtccgagcacagcagcgtgtttgatgcaagttaggaggatgtgggaactgctttccttttattttccccccttttttcttttttcctagcaagctcgagcagaaaaaagaaacaagctgttattgtttgttgcattgcgtccaaccgatggttttatgttagtataaactgctagtcgaagataattaggtgcagcgtttgaattgatttgggtttacggttgagttatatcccgtgtatgccataacaaaggcagtcgccgctctgttgctagtggcaagcgctgcctgtcctgtgtctgtttgtacgttgacaatttgattccgttgctcaaggatagaagaatattgatacaggagacccgaggactggtttggtttttgcagtgcttttgagtcgtgtgtgtagatctgtgctactgaggtgctatcttttacgtgatcaggaagagtatcggtggaagctttcaggtgttccattcacccatctgcgtgttgcgggtctcggcggttggcgaccgagcgtgtttgcctgcagtattgggaaacctgtctgactgagacgtctggctggatcgagctgcctggccgcggctcctatcccaggtcaagacaacgactaaacagcaaaaaccattaaatggatgtactgtgcaaaaaaaaaaaac

SEQ ID NO: 123719 - DNA, 240 bp, Zea Mays
atgaacaagacttccgccacagaatcattgagcaagtcgcttaaggaggtgatatcggcagttgaaaccgtcacacagaagatcatcatgaaggaagagaagttcaagaattggaaggccaaaaacattcggaggaagcacaactacatccctttcctgttcaacgaagatgcttgcaaagaagcaacagctaaaacctctggtcgagaaagccaaacagcagaagtcgtcaagccctag

SEQ ID NO: 123720 - DNA, 741 bp, Zea Mays
gctgcattctctccctccccacttctctctcgtggcgacagcgacgagccgacgactgtgcggccgtcgctgccactctactcgccagttgcccggatcttcttcgtccccttggaaatcgacggccacaaccagggcaaacaggaagtttcgcaaggatgccctggtgcacgattgatgagtctgaccctggtgttttcaccgagctgattcagcaaatgcaagtggaaggtgtacaggttagcttccagggttctgttgcgtcccctgtctgaactgtttgttttctcatccttcgaactattgttgtacctgcaatagcagtatgcactcagcctgctcattcggtagtgtatttttcttcttctgaggatttgtttcttccccatgctgtgaaactgatagcaacctggaactctcgttttagaaactaccttactgtcgtactatctgactgtaggacaaacataattaatatatggcatgcttagctgattgtaaacttgtatggcaacaagattgtgaagacgtgcactttagtgtagagaagaataactgataatttgctgtcaatagtttttttttacctttatgcaaccgccaactcaatttcaggaggggcatcctcttatcaaaaagtaagaggagtggggccttgagtaagattttattctagacttgcttattcacttgcacttgtttagtatggtacctgtagtcacatgatgacatgctagcaac

SEQ ID NO: 123721 - DNA, 2635 bp, Zea Mays
tccgatgtcacgcagaaattttatacaaggaaaatatcccaggccatgtgttgctgttgcattccatctccatagacaagtaatcccaatcccgtcctacctggatggttcctgcctgtctgtcgcctcgtgacgtctgtccaagaacactcgctccccacctgttcgctgcttcttcttcttgccaatctgctccttcttctagctagatcttggatggagctggggatgacgatggaggtagcgaagatcatcgaggtatgtagagtacgcggctgctagttagttcaccaggccagcaagcgagctccagcttcgtccgatcgatagatgcgagctgtagcagcgtggcagccattcatcagttgtcagatcttagattccccccatccccgctactagttggtggttagcaaatcccaccaagcaggaagcagccgcgagcgagccatggccatggatcccgttctgaaggtggccctgggctcggcggcgttcgccgtgttctgggtgctggcggtgttcccggcggtgccgttcctgcccatcgggcgcacggcgggctccctgctgggcgccatgctgatggtgctgctgggcgtgatgagcgccgacgacgcctacgccgccgtggacctgcccatcctgggcctgctgttcggcaccatggtggtgagcgtgtacctggagcgcgccgacatgttccggcacctggggcgcctgctgtcgtggcggagccagggcgggcgggacctgctggtgcgcacctgcgccgtgtccgcgctcgcctccgcgctcttcaccaacgacacctgctgcgtcgtgctcaccgagttcatcctcaagatcgcgcgccagaacaacctgcccccgcgccccttcctgctggcgctggcgtccagcgccaacatcggctccgccgccacgcccatcggcaaccctcagaacctggtcatcgccgtgcagagcggcatctccttcggcggcttcgtcttcggcatcctcccggccacgctcgtcggctccgtagtcaacgccgccatcctgctcgccctctactggaaccagctggacggcggatgcaagcccgccgccggagcccaggaggtggtcgccgtgcccaccgaggtcgtcgaggaggaggacgtcacgtcgcaccgcttctcgcccgccaccatgtcgcacctcctcctccgacgcgcccagtcccagcaggtgccggccggctacgacgacgcggcgaatcaagaccccgtcaagccgcccaacggcgtccaccacagaaggaaagcagcggtgaacggcgattgcgacggcgacggcgaccgctactactcctccttctcctccacgtcgtcgtcgacggaggaggccagcgccaaacaaccagaagatgacgaagaagaagtagaagaggagtggcagagcagggtgtggaagatgtgcgtgtacgtcatcaccctgggcatgctggtggcgctgctgctgggcctgaacatgtcgtggagcgccatcaccgccgccctggcgctcatcgtgctggacttcaaggacgcccgcccctgcctggagaaggtgtcgtacccgctgctgctcttcttctgcggcatgttcatcaccgtggacggcttcaacaagacgggcatccccagcgcgttctgggacttcatggagccgtacgcgcggatcgacacgcccacggggacggccgtgctcgcgctcgtcatcctcctgctctccaacgtcgcgtccaacgtgccgacggtcctgctgctgggcgcgcgcgtggcggcgtcggcggcggccatctcccccgcggcggagaccaacgcctggctcatcctggcatggacgagcacggtggccggcaacctctcgctgctgggctccgccgccaacctgatcgtgtgcgagcaagcgcgccgctcccagcagtacggctacacgctctccttcttcagccacctccagttcggcttcccggcgacgctcgtcgtcaccggcatcggcctgctgctcatcagaacctactgatgcgtaccggaagggatgtctggagggggaagaagaatgtggattctttctcagcgccgtgtatcgcgtcacaggtcgttttgtttttgttgttgaatttgtgcaaggattcgttcgattggggggatatcatatcatggtcgctgcctcctgtcctgtaaaatggtggagaagcgtagcaccagagatagatagatagatcagcatggtgctcgcttgctcggagctggaggcgttttgggatgcacgtacatacatacatacattcattctctgcttttagtaagaaatctgtgcattatggagtagcacaccatgtatgtatatatcagacataagaaacaaaacaacaaaaaaaggaggtgtatatcatcgtatttctacgtgtaataagccagtgtattcagatcgaataatgttaggaatcgggttaatcagagccagaaccgatggggttcttattcttcctcttacttgcataatgatgatgattgtgtcagacatggtcgaatggtccagctgctgtttgtttaggtcagttttagtagttctatcaggtgtatctatttaataaactgttgtataagttttttttctctct

SEQ ID NO: 123722 - DNA, 2152 bp, Zea Mays
ctccttctattccatcacccccagcgtgcgcgctgcactccctccctgcccctgttctctctctcgtggcgacggcgacggcgacgactgggcggccgttgctgccgccctactcgccaggcgcccaggtattcttcggccccttcgccggcgacgagtgtcaccaggttcctcgtctccggaacgcagtgcaaagcagatcgatctcggcccagcaggggcctcacgacttgactcccaagggctcccaaccttgcaggctgactcgatctctttggtttcgtggaccgtgatcagactccagggctggatcgtgtttcttccagtgtgcaagcttggatctcgtaggtctggtttagaaaggaccgtgcttgctctttgctgccgcaatcatgcagagtgggggcgacatgaggcctgtgcacaacagtgtcgatacagttaacgctgctgctgttgccatcgtcaccgcggagagccgcacacagcctcctgctgaacagagaaggaaatgggctgaccggttgagcgtgtacttctgctttggatcacagaagaatggccggcgcatgcgtgtcaaccatgccgcacttgtcccagaacctgcacctcaaaggacagatgcgcctgcagcagaaattccaaaccacccaccgcctcctgtgttcccctttgtggcaccgccatcctctcctgcttctttccttcaatcagaacccacatcaatcgtacaatcaccaagggctggagctccagctttttcgcccctctcaccaaattcccaatccccgacggggccaccatccatctttgctattgggccgtatgcacatgagacacaactcgtctcgcctccagtgttctcggccttcacaactgaaccatcaactgcccctttcactcctcctccggagtctgtccatctgacaaccccttcctctccagaggtcccatatgcaaagcttctgacatcgatcaacaatagcaagaatggtgaagcagggggtgatctccagtcgtatccaaactacccagacagcccaattgggcgcctgatatctccaagctcgggctgttctggcacatcctccccattccctgaccctgagatgcaggcttcttcacgcagcgctttacgcttgttcccagttcgtgagccccctaagatattggatggcgagggcgttgcgacacagaagttgatacctcgccatatgcgcaacggtgggtccctcttggatggccagatctcagcagctgtaccagttgtggacttctctgcccgacttcaacccaacgagcacgcaatggatcaccgggtgtcattcgagttgaccgtcgaagatgtcgcgcgctgccttgagaagaagactgcaatctccggggattctggcacggcatcattccaccttgcaccgaccggcagcggcgaccaccacagagaatccaacgaggcaagggcagggctctacgtcgacgaatcataccatgacttgcccgagaaagcgaggcggtccctgtccctgcgcctggccaaagagttcaatttcaacaacgtcgacgtcggtagcgtggagccgagcgtgggatccgactggtgggcgaacgagaaagtcgccgggatgacaactgagccaaaaaagaactggtctttccacccggtggtgcagcctggggtcagctaacctttgcactgaccataatgatcttatacagggatgaaggaattagcttcttctgcttctgcttctgcttcagtggtcgattccttagggatgacttgccagcttgttctaaacatgcagctagtggtaagttctggatttagatagtaataagtaatggggtgtccaccgtctaatatcgtcatgggatactaaaggtttttattctgggagatgtgacaaaccgcaaactctttggttaggggtcggtcggaactgtcctgttcgtctgttttatcctgataccggtgctgtgttgtgtatgtacataatgaagtagttttttttaaaaaaagtcaattaaaagggtagaacagtttccttcgataagttgccagatgctaccaaattgcttgtgattgttccctgcctgttcatgatattgttattacagaatttgtgagagaggaaacttctgggatttttct

SEQ ID NO: 123723 - DNA, 2132 bp, Zea Mays
ctccttctattccatcacccccagcgtgcgcgctgcactccctccctgcccctgttctctctctcgtggcgacggcgacggcgacgactgggcggccgttgctgccgccctactcgccaggcgcccaggtattcttcggccccttcgccggcgacgagtgtcaccaggttcctcgtctccggaacgcagtgcaaagcagatcgatctcggcccagcaggggcctcacgacttgactcccaaggctgactcgatctctttggtttcgtggaccgtgatcagactccagggctggatcgtgtttcttccagtgtgcaagcttggatctcgtaggtctggtttagaaaggaccgtgcttgctctttgctgccgcaatcatgcagagtgggggcgacatgaggcctgtgcacaacagtgtcgatacagttaacgctgctgctgttgccatcgtcaccgcggagagccgcacacagcctcctgctgaacagagaaggaaatgggctgaccggttgagcgtgtacttctgctttggatcacagaagaatggccggcgcatgcgtgtcaaccatgccgcacttgtcccagaacctgcacctcaaaggacagatgcgcctgcagcagaaattccaaaccacccaccgcctcctgtgttcccctttgtggcaccgccatcctctcctgcttctttccttcaatcagaacccacatcaatcgtacaatcaccaagggctggagctccagctttttcgcccctctcaccaaattcccaatccccgacggggccaccatccatctttgctattgggccgtatgcacatgagacacaactcgtctcgcctccagtgttctcggccttcacaactgaaccatcaactgcccctttcactcctcctccggagtctgtccatctgacaaccccttcctctccagaggtcccatatgcaaagcttctgacatcgatcaacaatagcaagaatggtgaagcagggggtgatctccagtcgtatccaaactacccagacagcccaattgggcgcctgatatctccaagctcgggctgttctggcacatcctccccattccctgaccctgagatgcaggcttcttcacgcagcgctttacgcttgttcccagttcgtgagccccctaagatattggatggcgagggcgttgcgacacagaagttgatacctcgccatatgcgcaacggtgggtccctcttggatggccagatctcagcagctgtaccagttgtggacttctctgcccgacttcaacccaacgagcacgcaatggatcaccgggtgtcattcgagttgaccgtcgaagatgtcgcgcgctgccttgagaagaagactgcaatctccggggattctggcacggcatcattccaccttgcaccgaccggcagcggcgaccaccacagagaatccaacgaggcaagggcagggctctacgtcgacgaatcataccatgacttgcccgagaaagcgaggcggtccctgtccctgcgcctggccaaagagttcaatttcaacaacgtcgacgtcggtagcgtggagccgagcgtgggatccgactggtgggcgaacgagaaagtcgccgggatgacaactgagccaaaaaagaactggtctttccacccggtggtgcagcctggggtcagctaacctttgcactgaccataatgatcttatacagggatgaaggaattagcttcttctgcttctgcttctgcttcagtggtcgattccttagggatgacttgccagcttgttctaaacatgcagctagtggtaagttctggatttagatagtaataagtaatggggtgtccaccgtctaatatcgtcatgggatactaaaggtttttattctgggagatgtgacaaaccgcaaactctttggttaggggtcggtcggaactgtcctgttcgtctgttttatcctgataccggtgctgtgttgtgtatgtacataatgaagtagttttttttaaaaaaagtcaattaaaagggtagaacagtttccttcgataagttgccagatgctaccaaattgcttgtgattgttccctgcctgttcatgatattgttattacagaatttgtgagagaggaaacttctgggatttt

SEQ ID NO: 123724 - DNA, 1999 bp, Zea Mays
ctccttctattccatcacccccagcgtgcgcgctgcactccctccctgcccctgttctctctctcgtggcgacggcgacggcgacgactgggcggccgttgctgccgccctactcgccaggcgcccaggtattcttcggccccttcgccggcgacgagtgtcaccaggttcctcgtctccggaacgcagtgcaaagcagatcgatctcggcccagcaggggcctcacgacttgactcccaagactccagggctggatcgtgtttcttccagtgtgcaagcttggatctcgtaggtctggtttagaaaggaccgtgcttgctctttgctgccgcaatcatgcagagtgggggcgacatgaggcctgtgcacaacagtgtcgatacagttaacgctgctgctgttgccatcgtcaccgcggagagccgcacacagcctcctgctgaacagagaaggaaatgggctgaccggttgagcgtgtacttctgctttggatcacagaagaatggccggcgcatgcgtgtcaaccatgccgcacttgtcccagaacctgcacctcaaaggacagatgcgcctgcagcagaaattccaaaccacccaccgcctcctgtgttcccctttgtggcaccgccatcctctcctgcttctttccttcaatcagaacccacatcaatcgtacaatcaccaagggctggagctccagctttttcgcccctctcaccaaattcccaatccccgacggggccaccatccatctttgctattgggccgtatgcacatgagacacaactcgtctcgcctccagtgttctcggccttcacaactgaaccatcaactgcccctttcactcctcctccggagtctgtccatctgacaaccccttcctctccagaggtcccatatgcaaagcttctgacatcgatcaacaatagcaagaatggtgaagcagggggtgatctccagtcgtatccaaactacccagacagcccaattgggcgcctgatatctccaagctcgggctgttctggcacatcctccccattccctgaccctgagatgcaggcttcttcacgcagcgctttacgcttgttcccagttcgtgagccccctaagatattggatggcgagggcgttgcgacacagaagttgatacctcgccatatgcgcaacggtgggtccctcttggatggccagatctcagcagctgtaccagttgtggacttctctgcccgacttcaacccaacgagcacgcaatggatcaccgggtgtcattcgagttgaccgtcgaagatgtcgcgcgctgccttgagaagaagactgcaatctccggggattctggcacggcatcattccaccttgcaccgaccggcagcggcgaccaccacagagaatccaacgaggcaagggcagggctctacgtcgacgaatcataccatgacttgcccgagaaagcgaggcggtccctgtccctgcgcctggccaaagagttcaatttcaacaacgtcgacgtcggtagcgtggagccgagcgtgggatccgactggtgggcgaacgagaaagtcgccgggatgacaactgagccaaaaaagaactggtctttccacccggtggtgcagcctggggtcagctaacctttgcactgaccataatgatcttatacagggatgaaggaattagcttcttctgcttctgcttctgcttcagtggtcgattccttagggatgacttgccagcttgttctaaacatgcagctagtggtaagttctggatttagatagtaataagtaatggggtgtccaccgtctaatatcgtcatgggatactaaaggtttttattctgggagatgtgacaaaccgcaaactctttggttaggggtcggtcggaactgtcctgttcgtctgttttatcctgataccggtgctgtgttgtgtatgtacataatgaagtagttttttttaaaaaaagtcaattaaaagggtagaacagtttccttcgataa

SEQ ID NO: 123725 - DNA, 2260 bp, Zea Mays
ctccttctattccatcacccccagcgtgcgcgctgcactccctccctgcccctgttctctctctcgtggcgacggcgacggcgacgactgggcggccgttgctgccgccctactcgccaggcgcccaggtattcttcggccccttcgccggcgacgagtgtcaccaggtacgcccactccccttggtcttccctttctgccgtgcgaaaccgagcatccaaaccctaacggactgtttttacccggatctgatccaaccactactgtatatgcatgaattttgcctactagcttcgatcgcgttgcaaaaaatatcgggcgatgcccttaaccggctcctcgcctgtgtgcgggaaccctaccgatcggaattctgctaactctgtccatccatggttcgattaggttcctcgtctccggaacgcagtgcaaagcagatcgatctcggcccagcaggggcctcacgacttgactcccaagggctcccaaccttgcaggctgactcgatctctttggtttcgtggaccgtgatcagactccagggctggatcgtgtttcttccagtgtgcaagcttggatctcgtaggtctggtttagaaaggaccgtgcttgctctttgctgccgcaatcatgcagagtgggggcgacatgaggcctgtgcacaacagtgtcgatacagttaacgctgctgctgttgccatcgtcaccgcggagagccgcacacagcctcctgctgaacagagaaggaaatgggctgaccggttgagcgtgtacttctgctttggatcacagaagaatggccggcgcatgcgtgtcaaccatgccgcacttgtcccagaacctgcacctcaaaggacagatgcgcctgcagcagaaattccaaaccacccaccgcctcctgtgttcccctttgtggcaccgccatcctctcctgcttctttccttcaatcagaacccacatcaatcgtacaatcaccaagggctggagctccagctttttcgcccctctcaccaaattcccaatccccgacggggccaccatccatctttgctattgggccgtatgcacatgagacacaactcgtctcgcctccagtgttctcggccttcacaactgaaccatcaactgcccctttcactcctcctccggagtctgtccatctgacaaccccttcctctccagaggtcccatatgcaaagcttctgacatcgatcaacaatagcaagaatggtgaagcagggggtgatctccagtcgtatccaaactacccagacagcccaattgggcgcctgatatctccaagctcgggctgttctggcacatcctccccattccctgaccctgagatgcaggcttcttcacgcagcgctttacgcttgttcccagttcgtgagccccctaagatattggatggcgagggcgttgcgacacagaagttgatacctcgccatatgcgcaacggtgggtccctcttggatggccagatctcagcagctgtaccagttgtggacttctctgcccgacttcaacccaacgagcacgcaatggatcaccgggtgtcattcgagttgaccgtcgaagatgtcgcgcgctgccttgagaagaagactgcaatctccggggattctggcacggcatcattccaccttgcaccgaccggcagcggcgaccaccacagagaatccaacgaggcaagggcagggctctacgtcgacgaatcataccatgacttgcccgagaaagcgaggcggtccctgtccctgcgcctggccaaagagttcaatttcaacaacgtcgacgtcggtagcgtggagccgagcgtgggatccgactggtgggcgaacgagaaagtcgccgggatgacaactgagccaaaaaagaactggtctttccacccggtggtgcagcctggggtcagctaacctttgcactgaccataatgatcttatacagggatgaaggaattagcttcttctgcttctgcttctgcttcagtggtcgattccttagggatgacttgccagcttgttctaaacatgcagctagtggtaagttctggatttagatagtaataagtaatggggtgtccaccgtctaatatcgtcatgggatactaaaggtttttattctgggagatgtgacaaaccgcaaactctttggttaggggtcggtcggaactgtcctgttcgtctgttttatcctgataccggtgctgtgttgtgtatgtacataatgaagtagttttttttaaaaaaagtc

SEQ ID NO: 123726 - DNA, 1485 bp, Zea Mays
gaagcgaagaaaacgtctccgccgcacgcaacgccagaaacccccttccttcccattcccactgctcggattgctttccccacctccaccgccaccagaccagatagcaagcaaccgacccctcctcgctggtacgcgcgtctctcctctcttccccaatcaacccggccttattagtattcgcagggaaggagaagatggagcctggccagagcgggactgagcaggcctctccacgcgggaacgattgggaggtcgtgcagctcaccgcgtccgcatacgccgccgcgcccgctccgaggaagcccgagccctccgacgaagcggaagctaagagatacggcgcaaagggggacgatctagccgccggcctactcatgtccggccacttctccgtgtctcagagcgaggtcgagagcctcctcgtaggcgccgacaccaaagaaccaccgcccaaggacaaggaggagccttgcgagcatactaagctgctggaggacgacgtccccaccatcccgttcgatgacggcaaggcgctgaaaggcatgggtctggtcggggaagagccggccgggttctcgtcgcctgtctacagctccatcacggagagcaggagtgacaagaggagcgaggagcctactactctgcatagtttcaaccccgtgactggctcaacaaaggtcgtctcacctgacgagcagagcgagcctgctgctgggtctgggtccgggtctgggtcaggcccgcgtgaagcgtggtggaagaagcagcttctctccctttacaggaacgccaaggagagcaagcatctctggcctatcgtcgccaccactgctgctttggtgggcctggcgtatctggggcggcgctggcataagggcaggctgcagtttcagctgctcaagatatcgccttctaccaacaaggagaaaatcagcgacgcggttggaccgttaaaccgcatcaacgacattctcgttgctggcaaccacccaagtcacggtgtccatgggcatgcccgtgcaggctgaatgcagtcagttcgcgaacccatcgggcgtcctggacccatatactatcatgtgtcgctttgagaatcggctcaagacaaaccatcgggcaggactggagtagttgtccaaggactgaggatgtttatgcagacacaagtatgtttggtggctcgatgtatgtgaattccaaaactccatctgggtatgtaaatatttgtatgggtttagtttggttgctttttcgtttggtcatctcatgaaacctctgctggtggtttccttgtctatattactgtcttatttggggttcgttcatgcatgcatacatgtgatggggcataatatcactggattttatttcaccgtcatgttggctggctggctgctaccgtgaaggtagcctggttgttgcagtcccttgtatattttctgctgcagagttgacctgataataatgttttattgtggcttg

SEQ ID NO: 123727 - DNA, 2178 bp, Zea Mays
atccatttggtttggtggaaattgccatgccagtgttttacggcttttaaacattgcgtgaatgtgttatatcctgcaggctaggatcttagcacttaatgcttcatacttcttgaagaacggtggccactttgtcatttcaatcaaggctaactgcatcgactccaccctgcctgctgaggccgtgtttgcagcggaagtggagaagctcaaggcggatcagttcaagcccgcggagcaggtgacgttggagccctacgagcgtgaccatgcatgtgttgtgggtgggtacagggtgcccaagaagcagaaggccacctcttaggatcggaatccgtgctcgtcttgcctaccaaagatgcttcgttgtattgtggtttattaagaaactttgaaggattagtcaaagtatgtgaaccttctgcagtgaaggctggtttagcagcgacagctgttagggtctgatgcagtgtttgctggtttaacagcattattattattattgttgatgaaacatgggtttggtttcgttgatctcactaaaagtgtcaatcttttggatacctctccattgtgcttgtggtggtctgtgctctctgtcgaccggtacgctcccctctgtaactgctgtgtgttcccgtcttaaagctggtttgaaggcccaatccggaaaaaacgatgggcccaacccaaccatggagatgccgttccgtccgggtggagtggcaactgggtcgcggaagcgaagaaaacgtctccgccgcacgcaacgccagaaacccccttccttcccattcccactgctcggattgctttccccacctccaccgccaccagaccagatagcaagcaaccgacccctcctcgctgtattcgcagggaaggagaagatggagcctggccagagcgggactgagcaggcctctccacgcgggaacgattgggaggtcgtgcagctcaccgcgtccgcatacgccgccgcgcccgctccgaggaagcccgagccctccgacgaagcggaagctaagagatacggcgcaaagggggacgatctagccgccggcctactcatgtccggccacttctccgtgtctcagagcgaggtcgagagcctcctcgtaggcgccgacaccaaagaaccaccgcccaaggacaaggaggagccttgcgagcatactaagctgctggaggacgacgtccccaccatcccgttcgatgacggcaaggcgctgaaaggcatgggtctggtcggggaagagccggccgggttctcgtcgcctgtctacagctccatcacggagagcaggagtgacaagaggagcgaggagcctactactctgcatagtttcaaccccgtgactggctcaacaaaggtcgtctcacctgacgagcagagcgagcctgctgctgggtctgggtccgggtctgggtcaggcccgcgtgaagcgtggtggaagaagcagcttctctccctttacaggaacgccaaggagagcaagcatctctggcctatcgtcgccaccactgctgctttggtgggcctggcgtatctggggcggcgctggcataagggcaggctgcagtttcagctgctcaagatatcgccttctaccaacaaggagaaaatcagcgacgcggttggaccgttaaaccgcatcaacgacattctcgttgctggcaaccacccaagtcacggtgtccatgggcatgcccgtgcaggctgaatgcagtcagttcgcgaacccatcgggcgtcctggacccatatactatcatgtgtcgctttgagaatcggctcaagacaaaccatcgggcaggactggagtagttgtccaaggactgaggatgtttatgcagacacaagtatgtttggtggctcgatgtatgtgaattccaaaactccatctgggtatgtaaatatttgtatgggtttagtttggttgctttttcgtttggtcatctcatgaaacctctgctggtggtttccttgtctatattactgtcttatttggggttcgttcatgcatgcatacatgtgatggggcataatatcactggattttatttcaccgtcatgttggctggctggctgctaccgtgaaggtagcctggttgttgcagtcccttgtatattttctgctgcagagttgacctgataataatgttttattgtggcttg

SEQ ID NO: 123728 - DNA, 879 bp, Zea Mays
tgtgctgattttttctgctgtttgattatctgggcattgtagaatgaggatggaacaaaagtcgaatacagggtgtggaaccccttccgttccaagctggctgctgctgtgcttggtggtgttgacaacatctggattgctcctggtacccgtgtgctgtatcttggtgctgcttctggcacaactgtatctcatgtgtctgatattgtagggccggatggtctggtctacgctgttgagttctctcacaggagtggaagagaccttgtcaacatggcaaagaagaggaccaatgtgatccccattattgaggatgccaggcatccggcaaggtaccggatgttggttggcatggttgatgttatcttctctgatgttgcacagccagaccaggctaggatcttagcacttaatgcttcatacttcttgaagaacggtggccactttgtcatttcaatcaaggctaactgcatcgactccaccctgcctgctgaggccgtgtttgcagcggaagtggagaagctcaaggcggatcagttcaagcccgcggagcaggtgacgttggagccctacgagcgtgaccatgcatgtgttgtgggtgggtacagggtgcccaagaagcagaaggccacctcttaggatcggaatccgtgctcgtcttgcctaccaaagatgcttcgttgtattgtggtttattaagaaactttgaaggattagtcaaagtatgtgaaccttctgcagtgaaggctggtttagcagcgacagctgttagggtctgatgcagtgtttgctggtttaacagcattattattattattgttgatgaaacatgggtttggtttcgttgatctcactaaaagtgtcaatcttttggatacc

SEQ ID NO: 123729 - DNA, 1025 bp, Zea Mays
ctaatccccacgaaaaccctaaaccctcgctacccggcggcggtggcatgaagggcgggagcaaggccgtcgtggtggcgcacaagcacgccggtgtcttcatctccaagtccaaggaggatgcgctctgcaccaagaacatggtcccgggagagtccgtgtacggagagaagcgtgtctccgttcagaatgaggatggaacaaaagtcgaatacagggtgtggaaccccttccgttccaagctggctgctgctgtgcttggtggtgttgacaacatctggattgctcctggtacccgtgtgctgtatcttggtgctgcttctggcacaactgtatctcatgtgtctgatattgtagggccggatggtctggtctacgctgttgagttctctcacaggagtggaagagaccttgtcaacatggcaaagaagaggaccaatgtgatccccattattgaggatgccaggcatccggcaaggtaccggatgttggttggcatggttgatgttatcttctctgatgttgcacagccagaccaggctaggatcttagcacttaatgcttcatacttcttgaagaacggtggccactttgtcatttcaatcaaggctaactgcatcgactccaccctgcctgctgaggccgtgtttgcagcggaagtggagaagctcaaggcggatcagttcaagcccgcggagcaggtgacgttggagccctacgagcgtgaccatgcatgtgttgtgggtgggtacagggtgcccaagaagcagaaggccacctcttaggatcggaatccgtgctcgtcttgcctaccaaagatgcttcgttgtattgtggtttattaagaaactttgaaggattagtcaaagtatgtgaaccttctgcagtgaaggctggtttagcagcgacagctgttagggtctgatgcagtgtttgctggtttaacagcattattattattattgttgatgaaacatgggtttggtttcgttgatctcactaaaagtgtcaatcttttggatacc

SEQ ID NO: 123730 - DNA, 1241 bp, Zea Mays
aagcctaatccccacgaaaaccctaaaccctcgctacccggcggcggctacaagctcttcgtcggttcagcaccatgaggccaccggctagaggaggacgtggtgggaggggtggcaggttcgatggcggcggccgtgggggcggcggcggcggccgtgggtttggcggtggtagaggcgggagaggggacaggggagggagaggtggcaggacccccagaggcggccgtggcggcggtggcaggggtggccgcggcggtggcatgaagggcgggagcaaggccgtcgtggtggcgcacaagcacgccggtgtcttcatctccaagtccaaggaggatgcgctctgcaccaagaacatggtcccgggagagtccgtgtacggagagaagcgtgtctccgttcagaatgaggatggaacaaaagtcgaatacagggtgtggaaccccttccgttccaagctggctgctgctgtgcttggtggtgttgacaacatctggattgctcctggtacccgtgtgctgtatcttggtgctgcttctggcacaactgtatctcatgtgtctgatattgtagggccggatggtctggtctacgctgttgagttctctcacaggagtggaagagaccttgtcaacatggcaaagaagaggaccaatgtgatccccattattgaggatgccaggcatccggcaaggtaccggatgttggttggcatggttgatgttatcttctctgatgttgcacagccagaccaggctaggatcttagcacttaatgcttcatacttcttgaagaacggtggccactttgtcatttcaatcaaggctaactgcatcgactccaccctgcctgctgaggccgtgtttgcagcggaagtggagaagctcaaggcggatcagttcaagcccgcggagcaggtgacgttggagccctacgagcgtgaccatgcatgtgttgtgggtgggtacagggtgcccaagaagcagaaggccacctcttaggatcggaatccgtgctcgtcttgcctaccaaagatgcttcgttgtattgtggtttattaagaaactttgaaggattagtcaaagtatgtgaaccttctgcagtgaaggctggtttagcagcgacagctgttagggtctgatgcagtgtttgctggtttaacagcattattattattattgttgatgaaacatgggtttggtttcgttgatctcactaaaagtgtcaatcttttggatacc

SEQ ID NO: 123731 - DNA, 1334 bp, Zea Mays
gagtatctgaccgtccactcagaatatgccgccccaacggtcctgatcagacacaaaccctaaaactcctctataaaatcctccacgctcatctcctttgccaagcctaatccccacgaaaaccctaaaccctcgctacccggcggcggctacaagctcttcgtcggttcagcaccatgaggccaccggctagaggaggacgtggtgggaggggtggcaggttcgatggcggcggccgtgggggcggcggcggcggccgtgggtttggcggtggtagaggcgggagaggggacaggggagggagaggtggcaggacccccagaggcggccgtggcggcggtggcaggggtggccgcggcggtggcatgaagggcgggagcaaggccgtcgtggtggcgcacaagcacgccggtgtcttcatctccaagtccaaggaggatgcgctctgcaccaagaacatggtcccgggagagtccgtgtacggagagaagcgtgtctccgttcagaatgaggatggaacaaaagtcgaatacagggtgtggaaccccttccgttccaagctggctgctgctgtgcttggtggtgttgacaacatctggattgctcctggtacccgtgtgctgtatcttggtgctgcttctggcacaactgtatctcatgtgtctgatattgatggtctggtctacgctgttgagttctctcacaggagtggaagagaccttgtcaacatggcaaagaagaggaccaatgtgatccccattattgaggatgccaggcatccggcaaggtaccggatgttggttggcatggttgatgttatcttctctgatgttgcacagccagaccaggctaggatcttagcacttaatgcttcatacttcttgaagaacggtggccactttgtcatttcaatcaaggctaactgcatcgactccaccctgcctgctgaggccgtgtttgcagcggaagtggagaagctcaaggcggatcagttcaagcccgcggagcaggtgacgttggagccctacgagcgtgaccatgcatgtgttgtgggtgggtacagggtgcccaagaagcagaaggccacctcttaggatcggaatccgtgctcgtcttgcctaccaaagatgcttcgttgtattgtggtttattaagaaactttgaaggattagtcaaagtatgtgaaccttctgcagtgaaggctggtttagcagcgacagctgttagggtctgatgcagtgtttgctggtttaacagcattattattattattgttgatgaaacatgggtttggtttcgttgatctcactaaaagtgtcaatcttttggatacc

SEQ ID NO: 123732 - DNA, 546 bp, Zea Mays
aagcctaatccccacgaaaaccctaaaccctcgctacccggcggcggctacaagctcttcgtcggttcagcaccatgaggccaccggctagaggaggacgtggtgggaggggtggcaggttcgatggcggcggccgtgggggcggcggcggcggccgtgggtttggcggtggtagaggcgggagaggggacaggggagggagaggtggcaggacccccagaggcggccgtggcggcggtggcaggggtggccgcggcggtggcatgaagggcgggagcaaggccgtcgtggtggcgcacaagcacgccggtgtcttcatctccaagtccaaggaggatgcgctctgcaccaagaacatggtcccgggagagtccgtgtacggagagaagcgtgtctccgttcaggtgcacgattgcttattcttgtcctgttttatcttctccttttattattgtattggtattgcttgtgttttctgtaccgagaatgagctgacctgttgtagataggcgattttgctgtttgaataaatgtgtacgttttcaa

SEQ ID NO: 123733 - DNA, 2495 bp, Zea Mays
tagcttctagagtcgtcctaagaacgttgtgtctgaaaaagaaatgaaccacatggacgtactgggcttgcagctttgcgttggtgcttagtatatacagattacagagccgagtcgagccttctccttttaactcgtgagccgagccgtttccggccctaaccaaatctatgggaaaaaaagacgccgcacaaacagcaacctccgtagcaggaggggttgtttcggtgctctccgatgcctatgggaattgggaatttgggaaggaagtgatattttttggatccgacgattacgaatggatgcagattcagttcaaagtgtttctttcccatgcagcacgcacaaacggatcagatccatctgttggatttggatctgtaacagcaacgcaaaaatccctccgcccctctctctctctctctctttcttcttgcgatcacgtcgggcggcgtaaaaatgcaacgaacccaatccaatcccgatccatatatgcacgtgcattcaggtcagggccgggcgttcgtcaggccaagaaaagcaaagacgccaagaaaggcaaacgggagcgagcgggcgtggcagcaccaccggcggcggcgccccttccccaccccgcaccctccgccatgagctacacggagcgcctgctctacaccagcagcccgcgccaccctggcatttttgcccccggcacccccacggccacacccgacatggtggcagcggatgagtgcgacggcgacgaggccggcgcgctggtcgccgccgcctgcaccggcaccggcaccgataccggctcgacccaggacgcgccggcggtgcggtccccgcgcgccgcgtgggcgctgttcgtggaggagtcgcggaggctgtgggcgatcggcgcgcccatcgccctgaacatcatctgcctctacggcaccaactccacgacgcagatcttcgcgggccacatcggcaacctggagctctcggcggtggccgttggcctctccgtcgtctccaacttctccttcggcttcctcctcgggatgggcagcgcgctggagacgctgtgcggccaggcgttcggggccggccaggtgtccatgctgggcgtctacatgcagcgctcctggatcatcctcgccgcctccgccgcgctgctcacgccgctctacgtgtacgcggcgccgcttctgcggctgctggggcaggacccggccatggccgccgccgcgggggacttcaccatcgccatcatcccgcagatgttcgcgctcgcgctcaacttccccgcgcagaagttcctgcaggcgcagagcaaggtgggcgtgctggcgtggatcggcgtcgccgcgctgctggcccacgtcgcgctcctcgcgctgttcgtcaccgcgctcggctggggcgtcgccggggccgcgctcgcctacgacttgtcgtcgtggctcacctcgctcgcgcagctggcctacgtcgtggggtggtgccgggacggctggacggggctgtccagggccgcattcaccgacctctgggcctttgtcaggctctcgctcgcatccgccgtcatgctctgcctcgagatgtggtacatgatgctgctcgtcgtgctcaccggacaccttgacgacgccgagatcgccgtggactccatagccatctgcatgaacatcaacgggtgggaggggatgctgttcatcggcctcagcgcggccatcagcgtccgcgtgtccaacgagctgggttcggggcggccccgggcgaccaagtacgcggtggcggtggtgctggcgcagtcgctggcgttggggctgctggccatggcgctcgtgctggcgacgcggggccagttcccagccatcttcacgggcgacaggcagctgcagaaagccgtctccagcatcgcctacctgctggccgtgaccatggttctcaacagcatccagcccgtcatctcgggcgtcgccgtgggcggtggctggcaggccgtcgtcgcctacatcaacctcggctgctactacgccttcggcctcccgctcggcttcatcttcggctacctcttcagattcggggtcaagggcatctgggcgggcatgctctgcgggacagcgttgcagacagccatcctcagctacatagtctggacgaccgactgggaagcagaggcgtcgctggcgttggagagagtcagaatatggggcggccaccacgaaaagcttcctacctctgattcagaacaggaggtcgcggttgtctgacgaagatccggcaaaagacactgttgcttgcattgtaaattcctccatgtccatctactcggttaggaacttaatggcgtagctatacggatggccacacaacttattggcgtcaaagtagcactctttcttacctattagtttacacaacacctagttgatcttataattattagcatcacaatttggtgatgatttctttttgtcttgggcatggcacaagttctcttaaatgtcgttcatccg

SEQ ID NO: 123734 - DNA, 327 bp, Zea Mays
atgtcgtcctccgtgctgagggctgcggccgatagggctattcgcaggcatgccctcacgctgacggacgccgcggcgtccaggatccggcagctcctcagcctcaggcagcgtccattcctgcgtctcggcgtcaaagcgcgaggtttcaacggcctctcgtacacgctcaactatgccggtatacttaccgcttccttatcgcacggatcaacttcctgcaccaattttccattgtttcacattaacaacatccgatttcatccacaacagaaagagacggagatggattaagtgataagcttatgttatgttacacatcttgct

SEQ ID NO: 123735 - DNA, 1476 bp, Zea Mays
atggccgggcgcgaccgccgcggggccttcctggcctcgtcgtcgtcgtcggggtcagggtcggggaggcgggcgccggagcacgagtggtggccgcgcagcccagcgtggtcgcgcccgctgtccgacagcggcggagcccgcggacgcaagagcggctcctccacgtcctcctcctccttcaggtccctgttccgctccatcggagtgtggttcagctcgctctctaccgcgtcgccgtcgcccgcgtcctcgtccatgaagcagaagagcagggacgccggggccaagaagccgcctttgccggggtacgccgggacgaagacgtccgcgcgcgggctgtacagcggcggcggcggcggcaggcagcaccggccttcgttccagaactccgtcttctccattgaggagatccttagcgccaccaacaacttctcgccggcgctcaagatcgggcagggtggcttcggcgcggtctacaagggcgtcctccccgatggcaccgtcgtcgccgtcaagcgagccaagctgcggatgcagaaccctcacgtggacgtggagttccggagcgaaatcaagatcatggcgcgcatcgagcaccagagccttgttcgcttctacggctacatggagtgcggcgaggagcgcatcgtcgtcgtcgagtacgtccctaacggcaccctccgggagcacctcgacagtaagcgaccacctgccattgctgctgctctgcttccaactccatctgccatctctcacctcgcaagaaccaactccaaccaagcagggtgcaacgggcggttcctggacttcggcacgcggctcgacatcgccatcgacgtcgcgcacgccgtcacgtacctgcacatgtactccgaccaccccatcatccaccgcgacatcaagtcctccaacatcctcctcaccgactcgatgcgggccaaggtggccgacttcggcttcgcgcgcctcggcgccggcctgggcgccggcggggaggccacgcacgtcaccacccaggtgaagggcacggcggggtacctggacccggagtacctcaagacgtgccagctcacggaccgcagcgacgtctactcctttggcgtgctcctcgtggagctcgcctcggcgcgccgcccaatcgagaccaagcgcgagatgaaggagcgcctcaccgcgcgctgggccatgggcaggttcatcggtggcgcctcggccgacgtgctggacccgcacctcgcccgcacgcccgccgccgaccgcgcgctggaggcggtgctggagctcgcgttccggtgcatgggacccgtcaggcaggacaggcccgccatgagcgactgctgcagggcgctctgggccatcaggaagacgtaccgggacatgctcgccgccgatgccacgccgcagttctccgatcggcgggccaccaccagcagcagcagcgccgacagcagcggcgacctctggaggatctga

SEQ ID NO: 123736 - DNA, 3450 bp, Zea Mays
cttgattcctcttgccggggttccttggcctgcctatccttgctaatcgggcgggccagtccgccgcctgcagatctgaacgctgccctcccctgctccccgagcgcggcgaggatcgccgctccacggacgcaagaacaagtgcccttgatcttttccccccatttgattgattcatccagtgctgctggtactggtacccagcaacagttttcggtaggaaactactatggcaacttctccaggtacatacagatggtgctagtgagggagaggtccgcgagccgtcgccgccatttcggaccaaccaaggcggcgctagtatgcttctgcttgctttccttctacctggacactactgcaatgccgtcaacgtcattgtaaaccgtcagtgctagccacatggtaacgctagactgcgaaagttgcgatctttttctcgcatctcctcggcaacttgccaatttggtcagcatcgtcatcaccaccaccatcagcggcgcagctgaactgacgatgctttgcccgagatccggatgctcatccagatcgagacgccattcatctccccccccccccccccccccccgccgtgcggatgcggtggctcctcctcttggcgttcgccgccgcccccgccgccggcgagatggggtacgcgcattgcggctgcgacggcagcggcggcgctggcggtggaagcgggttctggagcctggacaacatcttcaagtggcagaaggtgagcgacctgctcatcgcggcggcctacttctccatcccgcttgagatcctctacttcgtcgcggggctccgccacctgctcccgttccggtgggtgctggtccagttcggcgccttcatcgtgctgtgcggcctcacccacctgctggcggccttcacctacgagccccacccgttcatggtcgtgctgctcctcactgccgccaagttcctcacggcgctcgtctccttcctcaccgccatcacgctgctcacgctcatcccgcaactgctgcgcgtcaaggtccgcgagagcctgctgtggatcaaggcccgcgagctggaccgcgaggtggttctcatgaagcggcaggaggaggcgagctggcacgtccgcatgctcacccaggagatccgccgctcgctggaccgccacaccgtgctctacaccacgctcatcgagctctccagggtgctcgcgctcgacaactgcgccgtctggatgccatccgaggacaagtccggaatgtgcctcacacacgagctccggcggggcagcgacgacggcgaggccgtagtgggcgctgacgacgcggacgtcctcgaggtcaagggcgccgacggggtcaagctgctgccgccgggctcggtacttggctccgccagcggcggcggcaaggaggggaccggcacggtggcggcgatccgaatgccgatgctcagggtcgccgacttcaagggtgggacgccccaggtgatcaaggcaagctacgccgtgctggttctggtgccgcccagcggcaggaagtgggcgccgcacgagctggagatcgtggaggtggtcgccgaccaggtggccgtggcgctctcgcacgcctcgctgctggaggagtcgcaggcgatgcgtgacaggctggccgagcagaaccgcgagctgctgcaggcgaggcgggacgctctcatggcgaacgaggccagggacgcgttccagcgcgtcatgagccagggaatgcggaggcccatccactccgtccagggactggtgtccgtggtgcaggaggaggagggactggcgtccgagcagaggctcgtcgtcgacgctgtggcgcggaccgcaaccgtcgtctcgacgctcatcaacgacgtcatggagatgtccgcggccaccagccaggagcgcttcccgctggagacgcggccgttccgcctgcgctccatggtgagggacgccgcctgcgtggccaggtgtctctgtgacctgagcgggcggtttggtttcgcggtgcacgtggagaacgtgctgccggaccttgtcatcggcgatgagcggaggatcttccacgtcctgctgcacatggtaggcaatctgatcggtcgggtcgacgagggggacgtcacgttccgggtgcgcgccgatgatgaggcgacggaggaccagaggtgggatccgtggaggccgagctactccggtgggcactcgtcggtcaggtttgtggtcggggtgaagaggcagcagaacgcaggcgactcgcttccgcggttcttgcggcggccaaggacccatgacgggttggatctcaggctcagcttcagcatgtgcaggaagcttgtgcagacgatgcaagggaacatctgggcagttctcgacggccaaggactcccggagagcatgaccctggtcctgaggttccagctccaaccatcgctggcgagctccaacctcctcggagggtcgtttgatcaggagcactactcatcattgccatctaaccaaatagccgggctgaaggttctgctcatcgatgacgacgagatcaacctggtggtggcccggaagctcctggagaggctaggctgcaccgtttcctcaggctcgggactcatggactcttcctctgcctgtgcctcgttccagctcgtcatggttaacctcgagatgtcagcgatagatcccctggatgctgcctcgaggatcaggcagcagtacaggagctcgcactggcccctggtgatggccatgacgtcggagcagaacgtgtgggagaagtgcgcgcagtccgggatcaacggcgtcctgaagaagccgcttgttctgctggaagtgaaagaagagctcgagcggatccttcagaacacatgatgcctgccatgacccatgagctactaccatgatgaatacgacccccgtccgtccgtctagcatactacatagcagaggggaggggacatggatctcgagttgagaagtggatgcaagtctcctacgctgctgtagttgagtgactgctgtgaggacggaggtggtgacgacgacggatttggcaggcaagcacgagggccgcgttatccgatccatgcccatgccgcgtaaggaggcttcacctcgattcaccaactacataatcacctcgattcacacacgtcaggctttcagtcgataaattcattagtttcatcagaaacggaatgcagttgccagttataatgttggcgtcagtcgcaggggatcttcggccatcgtcgccgcatcagaagcaatgcgcagctccagtggcctcgaccgaacaggacaagaaataggtctagttggatttcttttcgcctttgggtttttgttttaaaagaaagagaacttgattttccttaaactagaattctctgtcttccattatagtgcacccttttttatactcagattcaaaaccaaaatataaaagaattaagtag

SEQ ID NO: 123737 - DNA, 867 bp, Zea Mays
ctagatgagatatagaaggattatggataagcttctagacaactatacatttgttattaggtactgaaagctcttttactttcctgtagttgtcaggtgatatccacgaagaggtggagactcataacagaatgctagaccgaatggggagcgacatggatacatcaaggggctttctctctggcaccgtgggcaaattcaagacggtgttcgagaccaaatctactggtttactacttgaccaggtagaatcatccacggtgaaagttttgtggggctgggcgtgttcaagaacattctgaaaatggacgtgctgatctggtggtgccgtgccgcgtatatatatactcatgagtagcagagtatgctgatgtgggttccgtgaacaccgcagcgtgttgggtcgaacctctctctgctacaggaaattgttgtccgttcctttggcatgatatgtgtgtatggagggagtatgtacatgtggtattaccgtactagtaaggtcctctttagaagcaattattttttagctaagagagattagcttcttagtttttaacaaactaataatttaattcttataaactaaggtatataccggtatgtttggaatcacttcaatttctataaaacagttttttaaaaaaactgggtgcatctaaacatgtagtacgtggaatctcgaccacagagatgtatctactaggtttccttgtggctgggactcgacttgtttgagcactgtgtgaggtcgacacgtgtctctcccccgcatctggcaagacggatccagatgaaaggaatgacattgtggctgcaccaagagcaaccggtataataacacttgacaaggagtattatatgctt

SEQ ID NO: 123738 - DNA, 850 bp, Zea Mays
catggtcaaaattctttctgttagtgtggtatgcatttggaagctaacaactagaatgtctacattaataagttgtcaggtgatatccacgaagaggtggagactcataacagaatgctagaccgaatggggagcgacatggatacatcaaggggctttctctctggcaccgtgggcaaattcaagacggtgttcgagaccaaatctactggtttactacttgaccaggtagaatcatccacggtgaaagttttgtggggctgggcgtgttcaagaacattctgaaaatggacgtgctgatctggtggtgccgtgccgcgtatatatatactcatgagtagcagagtatgctgatgtgggttccgtgaacaccgcagcgtgttgggtcgaacctctctctgctacaggaaattgttgtccgttcctttggcatgatatgtgtgtatggagggagtatgtacatgtggtattaccgtactagtaaggtcctctttagaagcaattattttttagctaagagagattagcttcttagtttttaacaaactaataatttaattcttataaactaaggtatataccggtatgtttggaatcacttcaatttctataaaacagttttttaaaaaaactgggtgcatctaaacatgtagtacgtggaatctcgaccacagagatgtatctactaggtttccttgtggctgggactcgacttgtttgagcactgtgtgaggtcgacacgtgtctctcccccgcatctggcaagacggatccagatgaaaggaatgacattgtggctgcaccaagagcaaccggtataataacacttgacaaggagtattatatgctt

SEQ ID NO: 123739 - DNA, 894 bp, Zea Mays
gcctccaacgttgttgccgcccgggcttctgcacaaacccctccaaagggcatcaacgcgccgccgcaatgctgcgtcggccgccaccactccggctgggcacacggaaccgggcaacaacttgccacatgcgtcacactgccgcgcaccaaagccgaagcccgctgtcgctgtcggccctggcacccgcgggcaccaaagccacctgccgtcgggcgctccaccgccgtcgccaccatcttgtgcctgcccaggtcacttgttgtcgttgccatgccatcaaacgagaggagggccccgtcgccgccgccatctcggccgaccgcgtagccctgctggcgcacctcgccgggccactggacgcctctctccatccgtgcagcctcccaacgcccaagcaggttccacccctcctccccacaagcaccaccacctcaatggtgtcgatccagcaagggagggccagatacaggccgacggggcctagatctgccggcaagcgcagcccttacacccacctctcctcctccccacccccaagtcgtttctcacgcagaggaccgcgctcgtgagaggcaggggcgcggggtctacgttaacacctgcccttgaatccgcctgcatcgacaaccttcatgccgccgccgcccttcaagtagtcgccaatgccgcgtggcacccgcccttgaggtgcgggtgtgggtgggaggggagagctgaggagctcctcgccgccgccttcctcgtgcccgcgtgagcctctctgcaggtcgctccggcgatggcgagactggggagcgggagggaggtattggcgagcgcgccgccttggctccgcctgtgttgcccgtggggaacgacacgggcgtggggagtggggactctcccgtcctc

SEQ ID NO: 123740 - DNA, 264 bp, Zea Mays
atggccgcggagcggaatgagtcccggcgtcaggtcgccgaagcttccctccgcgtcgactccctctccaagcacttggaggccaagcggtccgagagccgagctttgagggctcggacgggagagctcaagaaggatctggagaccgccgcccagaccatggaccagaaggtggccgagctgaaggagatatcggacactgtggcggaattcagccgagaccttgatgcggcggatatccacggagccgtatgcaagccctga

SEQ ID NO: 123741 - DNA, 519 bp, Zea Mays
atggggatggtgatggccatgtcatgtcaaccctcctctacggaaatccaagcacaaaaacagcagctcccacgcccgtgtcgctcgccgaagcccaaagaagaaaccctggcgtcgtccgcattcatcacaagcaccgaaatccatggaccatgggagtcccaggccaggcataggcaatggatggatcaggcgagcgccgtccttgttgaacccaaccagatcatcatgctacgcccgcctgccaagggggagaagcggggatcagacagacaccaacggctctgccgactgaccaccttagccgagcaaccacagctgatcctcgtctcgtgggagtatgcgcgcttcgcaaggatgtcaatggcagtctgcgccctgacaagcaagatatcgttcaatacaaagtataatgagcaaatggatgatgctccatcgtcacaaaactcaccatggaactctgtagcgccgagcagctatttccaggcgtttcacaaggggcctccagctgcgacttga

SEQ ID NO: 123742 - DNA, 933 bp, Zea Mays
atggacgcgggccggggcagcagcgccaccatcttcccggtgccgcaggtcccggcgctagctctgctcttccccccgccgccgccggcggcggcggcattgccatcttcttccctctccctttcctcctcctcctcctcgcgccacgcgccatccatcaccagcttcccgatcctcgtgctcacggtgctgggcatcctcgccgcctgcgtcctcatccttgcctactacgtcttcgtcatccgctgctgcctcacctggcaccgcgaccgtagcgcgtccgacgccgtctcccgccgcccccagcgcgcccgcgcccgcgtccgcaccagcactggcggcaccccggcctccagcgccgagccgcgcggcctcgaggacgccgtcatccgggcgctgccggcgttcagttacaggaagaagcccgccgacttaccgccgtccgcacccgcgcccgcgagcgagtgcgcggtgtgcctcggcgagttcgaggagggagacagcgtgaggatgctgcccgcctgcctccacgtcttccacgtcggctgcgtcgacgcctggctccagggcaacgccagctgcccgctctgcagggccagggcggacgtcgatgccgccagctgctgccgcctgctcccgccgccgccacccgaggaggaggaggacgtagcggccatccaggtcgtcgtcgtcgtccccggcgcagaggaagacgaccgccaaggcacggtgccacagcggcagcgagaaaccaccgtggctcctgctgctgctgccgaggttgaaggagaagatcctcctcaggtcggtggtgaaaaggagaggaggaaggatggagatgttgcaccgaggacgaggtccttctccacggacggtgacggtggcgaggaggttcagagcatcttgcagaggaacggacagggactcccgtag

SEQ ID NO: 123743 - DNA, 1399 bp, Zea Mays
caagaaacccggccgccgaaggagatgaccgaacccctctccaatggcgccgtctaccagtcggtgcctgagtcctacgtgctcccggagcaccagaggcctaggagctcgccgccgtcttccgcggcggcgatacctgtagttgacctcggcggcgatgatcccgacaggacggcggaacagatcgtcgccgcggggaaagagttcggtttctttcaggtgatcaaccacggcgtggcggaggacgtgatggcctccatgatgagcgccgcggaggagttcttcaggctcccgacggacgagaagatggcgcactactccaccgacagcacgaagctgccgcggttccacacgagcgtcgggaaggagcaggagaaggtgctgtactggagagattgcctgaagatcggctgctacccgttcgaagagttcaggcaccggtggcccgagaagccggccgggctcggcgccgcgctggaggcgtacacggcagcggtgaggagcgtggcgctgcgcgtgctgcggctggccgcgtcggggctggggctcgaggacgaggcgcacttcgagggcggggagctgaccgcggggccggtggtgatgaacgtgaaccactacgtggcgtgcccggatccgagcctgacgctgggcatcgcgccgcactgcgaccccaacgtggtcaccgtcctcatggacaacggcgtccgcggcctgcaggcgcggcggcggcgcggcgaaggcgaaggcgaaggcgaaggcggagggtgggtcgacgtggaccccccgcccggcgcgctcgtcgtcaacttcgggcaccagatggaagcggtcaccaacgggcgcgtgcgcgccggcgagcaccgcgcggtgaccagcgcccgcgccgcgcgcacgtcgctcgccgcgttcgtcatgcccgccatgggctacgtcgtgtcgccggcgcccggggtggtggcggagggagaggcgctcctgttccggtcctacacgtaccaggagttcgtcagcgtgtacaccgcggcaaccggcgacagggacgccgtcctggcgcggtttcggaacaacaatggctgactgacgctcgtcgccggccgccttctctttacctcaagaaggaactccttgctgattgtttttgtcaaaaaagaaaaacagcaagaattgcatattccgtgtcaactgtaatttgtcgttatcttgggtgcggtgcaacgtttttccaacgacgacgtattcctctcggttttactttttagccatgttttcaaacaatttgatcatgcccttaactacatggactatgattgttgattaagagcatgttagatagacaagatttttatagtccttaaggacccgttcggtagacatggaacggaggaccggaattgttctt

SEQ ID NO: 123744 - DNA, 1660 bp, Zea Mays
ccggcgaaaaaagaggaccaagctgccttcccttccctgcatcgcctagcaggcccggcactccaatcacgaggcgaccgcgacacgactagtacaagaggtgggggccggtggacggtggttgccccgatcggccgcctcccatggtcggccccaagccgaatcggatgtgcaaatccaagagcgccatcgccacctcctccccttccccctccatggcggcggccgctgcggcatccacgccgcggcaccgccggtcgccgcgcacgaccgcgaccacctccttccccgcggcgtcgtcctactccacctcctcctccaccacggtgtcctcctccgcggcgtcgctcgccgcgctccgcgactccctcccggagctgccgctcctcttcaccttccaggacctcgccgccgccaccgccaacttctcctccgcgcaccgcctcgcccccgccgcgccctcctcctcgtccaactccttccgctgcgcgctgcgcgggcaccccgccgccgtcttccgccgcccgctccgccgcgacgccagggacgtggccgcgcgcctcgccgtgctgggccactgccaccacgccgccatcgcgcgcctcctcggcgccgccgcgtcgcccgaccgcaccacgctgttcctcgcctacgagctcgtcccggacgcgtccccgctgtccgtgctcctccggaaccccaagaacccgtccttcaccccgctcgcgacctggcactcgcgcctccagctcgccgccgacgtctgcgacgcgctctactacgtccacctccaggctgacaccgtgcacaaccgcctctccgcgtcctccgtcctcgtctgcggcgacgggcccctcccccgcgccaagatcgcgcatttcggcgcggccgaccttgccggcgagctcccggtcgagcacaaggatgacgacggagggtccaagggctccggctccggcagccaccgccgcaccagcagccgggggaggcggatcgagggcacgcgcgggtacatggcgccggaactcgtggctggtggcccgccgtcgcgccgctccgacgtgttcgcgctcggcgtcgtgctgctggagctggtgtccgggcaggagccggtgcggtacgagatagtaaaccggggcacgggcgagtacgagaggacgtcgctgatcgacaccgcggcggccgccgtcgcggagggcggcggggaggggatgcggcgttgggtggaccggaggctcagggactcgttccccgtcgaagcggcggagtcgctcaccgcgctggcgctgcgctgcgtcagcaaggaccccctggcgcggccggacatgtcgttggtggccgccaaggtgtccaagctcttcctggaggcgcaggagtgggccgccaagttcaatgtccccaccgacatctccatctccatagcccccaggtgatgatggatcatggatggatggttcccgctgctgctagcgccattgcccaaggcgacttgccgattgactcttgaagatgctgacagatagcagtatagaacccactgagcagattgccttgggctccagttgattcattgttaattttggaggagcttaggctttagacagattaaacttggttctccctccccctctcttgttcttatcgacgatgtacacaggag

SEQ ID NO: 123745 - DNA, 772 bp, Zea Mays
ataccaccgtctctatgaacacctactactaccatatacttgcagcaccggatccaccaccgcctccctccctcagaggtccttcacgacctcaggcttcctgccccgccgcaggacaacgtgccggcagccggacctgaattcccggaacctcctcctcagcgaccctttctcggcgcgcttggcacccggctcggaggccgagccatggtggtagtgcagcagcgggggctgcggcgggccggtcccgacgccgtccacgatcctctggaccatgccgtacacctcgctcatcttggggcgggacttgggcagccggaccatgcaccggttcgcgacgctcgccagcttcgtcgcggacttgaggttgtagtgcccctccagccgcgggtcgatgatcacggggaaccgcttcacgtccgagatgtatggcttcacccagtccagaagcttctgctcgctctttggacggttctggtcgatggggcggcggcctgtgatgagctcgtacaggacgactccgtagctccatatgtcgctcttcgccgtgaggtgtccagtctgcatgtattctggagctgtgtagcctagagttccaaccacctgttcaaaatgaaacataacaaaaagagggtcgtagttacatggaatggtaacttcagactgctctaggaacgaactagtgagatggcatggagaggacatagatgtaaaactgtctgtggcaaattcatatggcagctggtaacttagcaaaaaaaaagtacttaat

SEQ ID NO: 123746 - DNA, 3801 bp, Zea Mays
cgctctcgcctgccgccttcccttcgcgtctcctcgctccggccgcagcagccgcctccgccctccatccgcaaaattacccaatccatcatccccgaaccctaaataaatcctcgatcggccgcgcgcgggaatcaacggatgggaccgcggccggcggctccgtagcggattggaggcgctcggttcgcgggggccgcggttcggctgccgggtggcgcccgcttctagagggaaaccaagaaggaaggaaggagattggaataaagacaggcactgcaacgatggctccatctcaagcggcggcagcggctggccccacctttgaggacctcgagcgcgacctgcaggcagttctcatggaccaaaaccacatgtccccagtggacgacctcggcatgtttcgcagcggcagcgctccccccaccgtcgagggatctcgcacggccattggcgcactcttctctggtccaccgcttcacgccaacagccttggcgccggcggcggcagcggtgggactgcttctggccttgacgtgctcactgatgaggagatacggtcacacccagcgtatctgtcgtactactattctaatgagcacctcaacccaaggcttccgccaccaatggtttccaaagaggactggcgtgcagcgcagtggttccaggctgtgtctggaggtattggggataggaggaggaggcctgcggaggtcgggagtggaaactccctgttctcggtgcagccaggggcaaacgaggttggtggagagaaggcgctgctgagtgatagaatggagaggagtggaaggaatgggctcgcacgacagcagtcttcagagtggcttgggagaggctccgatgggctcatcggcttgtcagatgccagtgcccttgggtctccgcgcaagagctttgctgatgcattgcaggaaaatattagccgtcctgctgttatagccggtcatctttcacgttctaatagccgtaatgttcttgagggcccaactccaatcaggtcatctgattcacgcaagccacaactgcagaataggtcagaatccatgaatggcctgcgatctggatccacttcaccgagtctggtcagggtccaaagtcttggttcttcgatgtctcataccttcgcttctgctgttggttcatctatctcaagaagcaccacccctgacccccagctgatacggagaactcctagtccttgccttcctccagttggagttcggatggggagttctgataaaaaagttgaagcttctgtttcttcacttaatcatgatggtgctgacattgtggcaactctgtctagcttaagcctatctggaaataagatgtcgaatgtggaaaatgaagttcagactcatgcttaccagaactttggtgatcaggctgatgtgttgtttaatgtaccaaaggaacataggcaattttcaccacggaatttaactcaaaaaactgatgaagacttgcttaatgcccctgaatatgcagttttcccaaatggggggagtaacttcagtaatttgcatgctagtaaggtggcatctcatagcaatagcaagttccctatgcaatcaccacacggtaatgccaacaagaaaggatctttgatgagctcagctggatcagtttctcagtaccagcacttgaatggtgatagccatgacattgatgtatctggatggcatactcatacaggtggttttacttcatccatgctgaacaatcaactgaatcctgatggtgactatggcaatgttctttcgaatcatggtggatcgagttatcagggccaaccaacagagacgatgtacgcacaatgcttgcaggcaaaccctgattcaccccttggcgcagctgcaagcatgagccctttccaagggaggggttttactggttcaggacacttggatagtcctggataccaaaaagcttaccttgggtcattatttggccagcaaaagctacaatatgggatgccatacctgggcaattctggtgctcttaatcaaaatatctatggcaatgattctgcctttggcattggaatgacttatctaacaagcccgccatctactccatatatctcatctccccaaggccatgttgggcaaggaaaccgtctgactcgacttccagcagtggtgaggaacaccgctggaggatccatgggatcgtggaattcagagaatggtctgatggataatggttatgggtcctccttgctggaggaattcaaaagtaacaaaactagatcttttgagctgttagatattgtaggccatgtggtagagttcagttcggatcagtatgggagtcgctttatacagcagaaactagaaactgcttctactgaacagaagaatatgatttttcctgagatccttccccaggcacgtactttgatgactgatgtttttggaaactatgttatacagaagttctttgaatacggaactgaaacgcaaacgaagcaactggcaaccctgcttaagggttttgtgttacagctgagtcttcaaatgtatggctgccgggtgattcagaaggctttggaagttgttgaagtggaacaacaaacacaaatggctttggagcttgatggatctatcatgagatgtgttcgtgatcagaatggcaaccatgtcatccaaaaatgtatagaatgcatccctcaggagaggatacgatttatcatttctgcattttacggacatgtcgtggagctttctatgcatccttatggttgtcgtgttattcagaggatcttggagcattgtgacgatgaaagcactcaaaatgccatgatggaagagatcatgcagtccgtggttactttaacggaggaccagtatggtaattatgtaatccagcatgtcctgcaatatgggaaaccagaagagcgttctactataattgcacaactcgctggacagatagtgaagatgagccagcagaaatttgcatccaatgttgttgagaagtgtcttacttttggttctcctgagcaacggcagattctaatcaatgaaatgcttggcacaactgatgagaacgagccgttacaggcaatgatgaaagaccagttcgcaaactatgttgtgcagaaggttctggagacatgtgatgaccagaaccgtgaattgattctttcccgtatcaaggtccacttgaatgcactgaaaaggtacacctatgggaagcatattgtgacacgtgttgagaagcttattgccgcaggagaacggcgcattggcgcactaccctcctgctgagatggcaatggttaggtcacctgtacagcagaagatagcgaggcctagctttttaccattaccagtagtcgttaatattgagcaagtacaaccgcagaagttaaaaaagaaaggctcccaaatcctttgtaaataaaggagagcctctggaaataaataagaatgagaaaagatgagattttacttgtcctcgaggaaagacttgtatatttgtattgtttttcccccctcttgcaagcagcaggataaagaagttttaaatattttgtcgagaagcaaagcagttactagaaggataaaggttttaggatcatagatgatgggaaggactgctgtagattctccttttttccttgggtttcatcagtcagtgtataagtactaatgtccatgctgatgttaatctctgtaagactgccttcagtttactgaatcttttttttctcttctggtgcctgccaagtgccagcatctgagcagttcttcaaatattacttgtttccaacca

SEQ ID NO: 123747 - DNA, 3884 bp, Zea Mays
cgctctcgcctgccgccttcccttcgcgtctcctcgctccggccgcagcagccgcctccgccctccatccgcaaaattacccaatccatcatccccgaaccctaaataaatcctcgatcggccgcgcgcgggaatcaacggatgggaccgcggccggcggctccgtagcggattggaggcgctcggttcgcgggggccgcggttcggctgccgggtggcgcccgcttctagagggaaaccaagaaggaaggaaggagattggaataaagacaggcactgcaacgatggctccatctcaagcggcggcagcggctggccccacctttgaggacctcgagcgcgacctgcaggcagttctcatggaccaaaaccacatgtccccagtggacgacctcggcatgtttcgcagcggcagcgctccccccaccgtcgagggatctcgcacggccattggcgcactcttctctggtccaccgcttcacgccaacagccttggcgccggcggcggcagcggtgggactgcttctggccttgacgtgctcactgatgaggagatacggtcacacccagcgtatctgtcgtactactattctaatgagcacctcaacccaaggcttccgccaccaatggtttccaaagaggactggcgtgcagcgcagtggttccaggctgtgtctggaggtattggggataggaggaggaggcctgcggaggtcgggagtggaaactccctgttctcggtgcagccaggggcaaacgaggttggtggagagaaggcgctgctgagtgatagaatggagaggagtggaaggaatgggctcgcacgacagcagtcttcagagtggcttgggagaggctccgatgggctcatcggcttgtcagatgccagtgcccttgggtctccgcgcaagagctttgctgatgcattgcaggaaaatattagccgtcctgctgttatagccggtcatctttcacgttctaatagccgtaatgttcttgagggcccaactccaatcaggtcatctgattcacgcaagccacaactgcagaataggtcagaatccatgaatggcctgcgatctggatccacttcaccgagtctggtcagggtccaaagtcttggttcttcgatgtctcataccttcgcttctgctgttggttcatctatctcaagaagcaccacccctgacccccagctgatacggagaactcctagtccttgccttcctccagttggagttcggatggggagttctgataaaaaagttgaagcttctgtttcttcacttaatcatgatggtgctgacattgtggcaactctgtctagcttaagcctatctggaaataagatgtcgaatgtggaaaatgaagttcagactcatgcttaccagaactttggtgatcaggctgatgtgttgtttaatgtaccaaaggaacataggcaattttcaccacggaatttaactcaaaaaactgatgaagacttgcttaatgcccctgaatatgcagttttcccaaatggggggagtaacttcagtaatttgcatgctagtaaggtggcatctcatagcaatagcaagttccctatgcaatcaccacacggtaatgccaacaagaaaggatctttgatgagctcagctggatcagtttctcagtaccagcacttgaatggtgatagccatgacattgatgtatctggatggcatactcatacaggtggttttacttcatccatgctgaacaatcaactgaatcctgatggtgactatggcaatgttctttcgaatcatggtggatcgagttatcagggccaaccaacagagacgatgtacgcacaatgcttgcaggcaaaccctgattcaccccttggcgcagctgcaagcatgagccctttccaagggaggggttttactggttcaggacacttggatagtcctggataccaaaaagcttaccttgggtcattatttggccagcaaaagctacaatatgggatgccatacctgggcaattctggtgctcttaatcaaaatatctatggcaatgattctgcctttggcattggaatgacttatctaacaagcccgccatctactccatatatctcatctccccaaggccatgttgggcaaggaaaccgtctgactcgacttccagcagtggtgaggaacaccgctggaggatccatgggatcgtggaattcagagaatggtctgatggataatggttatgggtcctccttgctggaggaattcaaaagtaacaaaactagatcttttgagctgttagatattgtaggccatgtggtagagttcaggtattatttccttgaaattctaacgtagtcaagttcatttattttggtatgaatctactatggttctctctcttacctttcagttcggatcagtatgggagtcgctttatacagcagaaactagaaactgcttctactgaacagaagaatatgatttttcctgagatccttccccaggcacgtactttgatgactgatgtttttggaaactatgttatacagaagttctttgaatacggaactgaaacgcaaacgaagcaactggcaaccctgcttaagggttttgtgttacagctgagtcttcaaatgtatggctgccgggtgattcagaaggctttggaagttgttgaagtggaacaacaaacacaaatggctttggagcttgatggatctatcatgagatgtgttcgtgatcagaatggcaaccatgtcatccaaaaatgtatagaatgcatccctcaggagaggatacgatttatcatttctgcattttacggacatgtcgtggagctttctatgcatccttatggttgtcgtgttattcagaggatcttggagcattgtgacgatgaaagcactcaaaatgccatgatggaagagatcatgcagtccgtggttactttaacggaggaccagtatggtaattatgtaatccagcatgtcctgcaatatgggaaaccagaagagcgttctactataattgcacaactcgctggacagatagtgaagatgagccagcagaaatttgcatccaatgttgttgagaagtgtcttacttttggttctcctgagcaacggcagattctaatcaatgaaatgcttggcacaactgatgagaacgagccgttacaggcaatgatgaaagaccagttcgcaaactatgttgtgcagaaggttctggagacatgtgatgaccagaaccgtgaattgattctttcccgtatcaaggtccacttgaatgcactgaaaaggtacacctatgggaagcatattgtgacacgtgttgagaagcttattgccgcaggagaacggcgcattggcgcactaccctcctgctgagatggcaatggttaggtcacctgtacagcagaagatagcgaggcctagctttttaccattaccagtagtcgttaatattgagcaagtacaaccgcagaagttaaaaaagaaaggctcccaaatcctttgtaaataaaggagagcctctggaaataaataagaatgagaaaagatgagattttacttgtcctcgaggaaagacttgtatatttgtattgtttttcccccctcttgcaagcagcaggataaagaagttttaaatattttgtcgagaagcaaagcagttactagaaggataaaggttttaggatcatagatgatgggaaggactgctgtagattctccttttttccttgggtttcatcagtcagtgtataagtactaatgtccatgctgatgttaatctctgtaagactgccttcagtttactgaatcttttttttctcttctggtgcctgccaagtgccagcatctgagcagttcttcaaatattacttgtttccaacca

SEQ ID NO: 123748 - DNA, 719 bp, Zea Mays
agtattagtagcagcagcagcagcattgttcaatgctgttgagctaggaagcggaccgatcgaggaattaatctgatggagtttggttgtgctgccatggcgataatgcagccggtggtcgcgacggtggtgctgaggatcggttccacggggctccactgcgacggctgcatgaaccgcatccgcaggaagctgtacaagatcaaaggagtggagcaggtgcgcatggacatgggcaagaaccaggtgacggtgacggggaccatggacgccaaggccctgccggagaagctgcgcaagaagctgcggcggcccgtggacgtggtggcgccggggtcgggcaacaaggacggcaaggacaaggacggaggcggtggcggcggcaaggagaaggagaaggagaaggatgggaaggacgggaaggacgcggcgatcaccaaggccctgtcggctgagctggaggcgtggaaggcggccttctacgaccagcagtcgctgagcaacgccgagttcatgctgagcgacgagaaccccaacgccgcctgcgccgtgatgtgattaagctcagctctgtagcagtagcaccacaccagcacgggggtggttagattagcgtcagatagcattacaccacacagacaagacaggagaggtatgcagagtgcaaagcttctgggaagtcaaatttgaacataacaaatttgagattttggtcacaa

SEQ ID NO: 123749 - DNA, 1343 bp, Zea Mays
atggccaagaagaagcgcagcggcggcggcggagggcagcagcagaagccggcgaccgcggaggagggcgaggagcaggcgggcgacgcgcccccggcggcggagggcaacaaggacagggagcacgagaaggggaaggacaaggaccaggaggagaaggggagcaaggggaaggacaaggacggcaagaagccgccgccgcagccgcccgtggtgacggcggtgctcaaggtggacatgcactgcgacggctgcgccaagcgcatccgcggctccgtccgccgctacccaggcaagcaacgcaacgcaatgaaagccccatgcgtggagggcgtggcgatggacgtggacaagggcatcatgacggtggtgggccgcctcgacgccaagaagctgcgggaccgcgtcgccgacaagaccaagaagaaggtcgacctcgtcctcggcggcggcggtgggaacagcagcaacaacaagggcggcggcggaaacaacaacaagcagggaggcgggaaccagcacaagggcgggcacgaagaggacggcaagcagtcggacaaagagcacggaggcggcgagcaggagggcaaggagaaggacaagggcgatcgccaggagggggaggaggggacgaaggggaaggacaacaacaagggcggcagtggtggaggtgggaaggggaagggcggcggcggaggaggaggaggaggaaaggacaacaagaagcccgtggcgccggtggtcgcgacggtggtgctgaggatcggttccacggggctccactgcgacggctgcatgaaccgcatccgcaggaagctgtacaagatcaaaggagtggagcaggtgcgcatggacatgggcaagaaccaggtgacggtgacggggaccatggacgccaaggccctgccggagaagctgcgcaagaagctgcggcggcccgtggacgtggtggcgccggggtcgggcaacaaggacggcaaggacaaggacggaggcggtggcggcggcaaggagaaggagaaggagaaggatgggaaggacgggaaggacgcggcgatcaccaaggccctgtcggctgagctggaggcgtggaaggcggccttctacgaccagcagtcgctgagcaacgccgagttcatgctgagcgacgagaaccccaacgccgcctgcgccgtgatgtgattaagctcagctctgtagcagtagcaccacaccagcacgggggtggttagattagcgtcagatagcattacaccacacagacaagacaggagaggtatgcagagtgcaaagcttctgggaagtcaaatttgaacataacaaatttgagattttggtcacaa

SEQ ID NO: 123750 - DNA, 1663 bp, Zea Mays
gcattcctatccacctcggcccacctccacctccctgacagtcattttgttatataaaacccatcaagctcccctgcaaggagatacagaaccctgcaactgcaagctaaggagagtgtgatcaccaacagctagtgctagtcccccttccttccatccatccatggcatgcgtcagcaccttccagagctgccccattgccagaagagcaaagatcaacaccaggtccaggggcagcagcagtagcgtggcgaaggggtcaccaccaccagccttccagttccagtgcagggcgtcgactttcgcggcggacaccagcctccggctcgagctggacgagaaccccgaggcgatcatctcgggggcgtggcccgggaactgctccctcctcagctacgacgacctccgcgcctacctcgagtcgcaggagacggcggcccaggcagacgatcagcgcggcgtggcgctcctgagcgagaccatgtccacacccgtgctggtggccacagcagaccagaccctggaggacgtcgagtgccacttcgaggccgtgtcggggcttccggtcgtcgacagcggcctcagatgcgtcggggtgatcgtcaagaacgaccgggcaagagcctctcatgggtccaagacgaagatatcggaagtgatgacatctccagctatcacactatcgtctgacaaaaccgtgatggatgctgctgttctcatgctcaagaagaagatccacagattaccagttgtaaaccaggacgaaaaagtaataggtatagttacccgcgctgatgttcttcgcgtgttggaaggcatgttgaagatttaggagcgcagatacccatgctcggaagccacagcctcttgtaaatatgtagatgtgcccgggcatggtgtttctgagtagcagcaaagagatctaccatgtataggagtttctccttgtaaataatagtagcacgccaggagactccatcccaggttccgtactgcttgcgcgaccagatgctgtaaactagccagatacttgaagaccaatataaatggatatgtctaaagtagtgtttcggaaaataccagcacatgaacatactgcgggggggggggggcagctctagggttctcctccttgactacaaaaacgtggttcaatttcatgtcagtgcttgttcgttttgttctcaatccatttggattggatgagttacaatcccaaacaagttaaaacatttccaatccaaataggaatataggatagaaataaccgaacaaggccttacagtttcacatcctttagaagccttgcagccatagccccacatcttctgatttcccaatcatccaggctgccgctcttagcttctggtgacgagccggaacaagattcgctcttcagtccattgtcttcgtcttcccccagatttgaaacaacctcttcgtcgtcgttcccattatcgtcggtagcctcaacctcagggatcaatggtgccttcaggtccatcatgtagagatgtatgtttggatgttgatatttcacatccatctgtctcagaatacacatcataagcatatatatcagtcccggaactgacagcaaacatcaatacgagacttgcgttgtctgaaaccacttctccacatatccataccttcgatttag

SEQ ID NO: 123751 - DNA, 1803 bp, Zea Mays
gcattcctatccacctcggcccacctccacctccctgacagtcattttgttatataaaacccatcaagctcccctgcaaggagatacagaaccctgcaactgcaagctaaggagagtgtgatcaccaacagctagtgctagtcccccttccttccatccatccatggcatgcgtcagcaccttccagagctgccccattgccagaagagcaaagatcaacaccaggtccaggggcagcagcagtagcgtggcgaaggggtcaccaccaccagccttccagttccagtgcagggcgtcgactttcgcggcggacaccagcctccggctcgagctggacgagaaccccgaggcgatcatctcgggggcgtggcccgggaactgctccctcctcagctacgacgacctccgcgcctacctcgagtcgcaggagacggcggcccaggcagacgatcaggtacacttcgatctcgcggcttcttcagttcttgttaccattgtttacatctcctccagctcttgctaacccggcctggacgggtctcctcctctgtggatatatacagcgcggcgtggcgctcctgagcgagaccatgtccacacccgtgctggtggccacagcagaccagaccctggaggacgtcgagtgccacttcgaggccgtgtcggggcttccggtcgtcgacagcggcctcagatgcgtcggggtgatcgtcaagaacgaccgggcaagagcctctcatggggtcagcacctcgctcctctccctccacctctttctttctcatggggccagggccatgcatgcgcatcaagctgctagtttctcatagacaggcaaataagaacgacgtacgtccgttcagtttaccggtctgtttctacttgtgacagtccaagacgaagatatcggaagtgatgacatctccagctatcacactatcgtctgacaaaaccgtgatggatgctgctgttctcatgctcaagaagaagatccacagattaccagttgtaaaccaggacgaaaaagtaataggtatagttacccgcgctgatgttcttcgcgtgttggaaggcatgttgaagatttaggagcgcagatacccatgctcggaagccacagcctcttgtaaatatgtagatgtgcccgggcatggtgtttctgagtagcagcaaagagatctaccatgtataggagtttctccttgtaaataatagtagcacgccaggagactccatcccaggttccgtactgcttgcgcgaccagatgctgtaaactagccagatacttgaagaccaatataaatggatatgtctaaagtagtgtttcggaaaataccagcacatgaacatactgcgggggggggggggcagctctagggttctcctccttgactacaaaaacgtggttcaatttcatgtcagtgcttgttcgttttgttctcaatccatttggattggatgagttacaatcccaaacaagttaaaacatttccaatccaaataggaatataggatagaaataaccgaacaaggccttacagtttcacatcctttagaagccttgcagccatagccccacatcttctgatttcccaatcatccaggctgccgctcttagcttctggtgacgagccggaacaagattcgctcttcagtccattgtcttcgtcttcccccagatttgaaacaacctcttcgtcgtcgttcccattatcgtcggtagcctcaacctcagggatcaatggtgccttcaggtccatcatgtagagatgtatgtttggatgttgatatttcacatccat

SEQ ID NO: 123752 - DNA, 1867 bp, Zea Mays
agtcacttcactggtcaagcattcctatccacctcggcccacctccacctccctgacagtcattttgttatataaaacccatcaagctcccctgcaaggagatacagaaccctgcaactgcaagctaaggagagtgtgatcaccaacagctagtgctagtcccccttccttccatccatccatggcatgcgtcagcaccttccagagctgccccattgccagaagagcaaagatcaacaccaggtccaggggcagcagcagtagcgtggcgaaggggtcaccaccaccagccttccagttccagtgcagggcgtcgactttcgcggcggacaccagcctccggctcgagctggacgagaaccccgaggcgatcatctcgggggcgtggcccgggaactgctccctcctcagctacgacgacctccgcgcctacctcgagtcgcaggagacggcggcccaggcagacgatcagcgcggcgtggcgctcctgagcgagaccatgtccacacccgtgctggtggccacagcagaccagaccctggaggacgtcgagtgccacttcgaggccgtgtcggggcttccggtcgtcgacagcggcctcagatgcgtcggggtgatcgtcaagaacgaccgggcaagagcctctcatggggtcagcacctcgctcctctccctccacctctttctttctcatggggccagggccatgcatgcgcatcaagctgctagtttctcatagacaggcaaataagaacgacgtacgtccgttcagtttaccggtctgtttctacttgtgacagtccaagacgaagatatcggaagtgatgacatctccagctatcacactatcgtctgacaaaaccgtgatggatgctgctgttctcatgctcaagaagaagatccacagattaccagttgtaaaccaggacgaaaaagtaataggtacggtgagtgagtgtcagaatgctcacaagccagcagagattaaaaaaaaaaactgcatgccatacacttaattagtattatccttaattatcattgacaacacagagattatatgttgcaagggctaatggggttctaaacactgtcaacaggtatagttacccgcgctgatgttcttcgcgtgttggaaggcatgttgaagatttaggagcgcagatacccatgctcggaagccacagcctcttgtaaatatgtagatgtgcccgggcatggtgtttctgagtagcagcaaagagatctaccatgtataggagtttctccttgtaaataatagtagcacgccaggagactccatcccaggttccgtactgcttgcgcgaccagatgctgtaaactagccagatacttgaagaccaatataaatggatatgtctaaagtagtgtttcggaaaataccagcacatgaacatactgcgggggggggggggcagctctagggttctcctccttgactacaaaaacgtggttcaatttcatgtcagtgcttgttcgttttgttctcaatccatttggattggatgagttacaatcccaaacaagttaaaacatttccaatccaaataggaatataggatagaaataaccgaacaaggccttacagtttcacatcctttagaagccttgcagccatagccccacatcttctgatttcccaatcatccaggctgccgctcttagcttctggtgacgagccggaacaagattcgctcttcagtccattgtcttcgtcttcccccagatttgaaacaacctcttcgtcgtcgttcccattatcgtcggtagcctcaacctcagggatcaatggtgccttcaggtccatcatgtagagatgtatgtttggatgttgatatttcacatccat

SEQ ID NO: 123753 - DNA, 1569 bp, Zea Mays
agtcacttcactggtcaagcattcctatccacctcggcccacctccacctccctgacagtcattttgttatataaaacccatcaagctcccctgcaaggagatacagaaccctgcaactgcaagctaaggagagtgtgatcaccaacagctagtgctagtcccccttccttccatccatccatggcatgcgtcagcaccttccagagctgccccattgccagaagagcaaagatcaacaccaggtccaggggcagcagcagtagcgtggcgaaggggtcaccaccaccagccttccagttccagtgcagggcgtcgactttcgcggcggacaccagcctccggctcgagctggacgagaaccccgaggcgatcatctcgggggcgtggcccgggaactgctccctcctcagctacgacgacctccgcgcctacctcgagtcgcaggagacggcggcccaggcagacgatcagcgcggcgtggcgctcctgagcgagaccatgtccacacccgtgctggtggccacagcagaccagaccctggaggacgtcgagtgccacttcgaggccgtgtcggggcttccggtcgtcgacagcggcctcagatgcgtcggggtgatcgtcaagaacgaccgggcaagagcctctcatgggtccaagacgaagatatcggaagtgatgacatctccagctatcacactatcgtctgacaaaaccgtgatggatgctgctgttctcatgctcaagaagaagatccacagattaccagttgtaaaccaggacgaaaaagtaataggtacggtatagttacccgcgctgatgttcttcgcgtgttggaaggcatgttgaagatttaggagcgcagatacccatgctcggaagccacagcctcttgtaaatatgtagatgtgcccgggcatggtgtttctgagtagcagcaaagagatctaccatgtataggagtttctccttgtaaataatagtagcacgccaggagactccatcccaggttccgtactgcttgcgcgaccagatgctgtaaactagccagatacttgaagaccaatataaatggatatgtctaaagtagtgtttcggaaaataccagcacatgaacatactgcgggggggggggggcagctctagggttctcctccttgactacaaaaacgtggttcaatttcatgtcagtgcttgttcgttttgttctcaatccatttggattggatgagttacaatcccaaacaagttaaaacatttccaatccaaataggaatataggatagaaataaccgaacaaggccttacagtttcacatcctttagaagccttgcagccatagccccacatcttctgatttcccaatcatccaggctgccgctcttagcttctggtgacgagccggaacaagattcgctcttcagtccattgtcttcgtcttcccccagatttgaaacaacctcttcgtcgtcgttcccattatcgtcggtagcctcaacctcagggatcaatggtgccttcaggtccatcatgtagagatgtatgtttggatgttgatatttcacatccat

SEQ ID NO: 123754 - DNA, 1383 bp, Zea Mays
agttcaaatgagcagtcgtagccggccttcctcctcctcgccccccttcccctccgttgttatcttgtcaagttgcggttgtctccctcctccggcgctcccttccgcccctcccttcccgcctcctccgcgcagatcgccaggcgaggaaccagaccgcagggcaggatgcagtacaagaacctggggcggtcgggcctccgcgtcagccagctctcgtacggcgcgtgggtcaccttcgggaaccagctggacgtgaaggaggccaaggtgctactgcaggcgtgccgggacgctggcgtcaacttcttcgacaacgccgaggtgtacgccaacgggcgcgccgaggagatcatgggccaggccatccgggacctgggctggcgccgctccgacgtcgtcatctccaccaagctcttctggggcggccagggccccaacgacaagggcctctcccggaagcacgtcgtcgagggcctccgcggctcgctccgccgcctcgccctggactacgtcgacgtcgtctactgccaccgccccgacgcgtccacgcccgtcgaggagacggtgcgcgccatgaactgggtcatcgaccagggctgggccttctactggggcacctccgagtggtccgcgcagcagatcaccgaggcctgggccgtcgccaaccgactcgacctcgtcggacccatcgtcgagcagcccgagtacaacctcttctccagacacaaggttgagtctgagttcttgccactttacagcacctatggcattggtttgactacatggagtcctctggcttcaggagtactatctggaaaatatggcaaaggggacatacctgctgatagcaggtttgccctagacaattacaagaacctggcgaacaggtccctggttgacgacacgcttcgaaaagtgaatgggctaaaacctatcgccgctgaacttggcgtttcgttagctcagctctcgattgcttggtgcgcgtcgaaccccaatgtgtcgtctgtgatcactggagccaccaaagaaagccaggtacattttccgaacttctcctaagcaagtgcggtagtgaatactgaccgtttggcgaaccgcacgagcagattgtggagaacatgaaggccctagatgtcatcccactgctgacgccggaggtcgtcgacaggatcgaggcggtggtccaaagcaagcccaaacgcaacgtcgagtcatacaggtgaaaattcggtgttcatccgacggagttcaggcctcctccacgaaacttcatccatgatccgtgtgtattctgggcgtggtgctgtgttcacaaacacaagtctgtcagtcctgtgttgtgtattctgctttccgatacagattttggaccaattc

SEQ ID NO: 123755 - DNA, 1284 bp, Zea Mays
agttcaaatgagcagtcgtagccggccttcctcctcctcgccccccttcccctccgttgttatcttgtcaagttgcggttgtctccctcctccggcgctcccttccgcccctcccttcccgcctcctccgcgcagatcgccaggcgaggaaccagaccgcagggcaggatgcagtacaagaacctggggcggtcgggcctccgcgtcagccagctctcgtacggcgcgtgggtcaccttcgggaaccagctggacgtgaaggaggccaaggtgctactgcaggcgtgccgggacgctggcgtcaacttcttcgacaacgccgaggtgtacgccaacgggcgcgccgaggagatcatgggccaggccatccgggacctgggctggcgccgctccgacgtcgtcatctccaccaagctcttctggggcggccagggccccaacgacaagggcctctcccggaagcacgtcgtcgagggcctccgcggctcgctccgccgcctcgccctggactacgtcgacgtcgtctactgccaccgccccgacgcgtccacgcccgtcgaggagacggtgcgcgccatgaactgggtcatcgaccagggctgggccttctactggggcacctccgagtggtccgcgcagcagatcaccgaggcctgggccgtcgccaaccgactcgacctcgtcggacccatcgtcgagcagcccgagtacaacctcttctccagacacaaggttgagtctgagttcttgccactttacagcacctatggcattggtttgactacatggagtcctctggcttcaggagtactatctggaaaatatggcaaaggggacatacctgctgatagcaggtttgccctagacaattacaagaacctggcgaacaggtccctggttgacgacacgcttcgaaaagtgaatgggctaaaacctatcgccgctgaacttggcgtttcgttagctcagctctcgattgcttggtgcgcgtcgaaccccaatgtgtcgtctgtgatcactggagccaccaaagaaagccagattgtggagaacatgaaggccctagatgtcatcccactgctgacgccggaggtcgtcgacaggatcgaggcggtggtccaaagcaagcccaaacgcaacgtcgagtcatacaggtgaaaattcggtgttcatccgacggagttcaggcctcctccacgaaacttcatccatgatccgtgtgtattctgggcgtggtgctgtgttcacaaacacaagtctgtcagtcctgtgttgtgtattctg

SEQ ID NO: 123756 - DNA, 1417 bp, Zea Mays
atggtagggaagctgccacagcaccgccatcaccatggctcctcctcactcggggcagaggagctcaacctcttacacatggccagggggggctccccgccggacggtggcggtggaggcggcgagagccggggcgcgctgggccagtggaagtgcaggctgctgggctccctccgtccgtgccgcgcgcgctgcgtggtgtgcctgcaggtgcagcacgtcaccggcctgcccccggccgcggagggccacgggctggtggtgggctggcggagcaagggcggcgagggggagcacacggcgcctgcccgggttgcgcggggcgccgccgcgttcgacgaggtgttcctgcagcacttcaccgccggcagcgccacgctgcggggcttcaccgtgtgggcggcgctcctggacgcgcctgccgataatggggatctcggcgcgttccccgtcgacctcgccgaggtcgccgcggccgcggcggagacctccaactccaacgccagcaagttcggaggcaaggcgctcagcttcccgctgggcggggcggcggccggtgcggtgctcagcgtcagcgtctactgcagagtgatggatcagcacgaggacagccatggggctgctaacaataatgcaagagagaagaaaaagaacaagggcaaagcaggctcctacgcctcctgcctgccggacctgagctgcctccgcaaccggcaggtggcggcggcgtccggcgggtcggcgcgccgcgccccgtccatccgctccgatcgcggcggcttcatcaccatcgagaactccatgtccgagataattggcggcggcggggcggccttcggcgtggcggaggacgtggacgagggggcggaaggcgcggggttcatcacgatggaggagggcagggtgtcgtcgaggcggccgctgacgccggacacggtggcgtcggaggaggaggacgagaagccgtgcctgttgatggagctgtcgtcggaggaggcggcggtggacgtggagaaggtggaggacgagttcctggcgatgctggaggacaggtacttggcgaggagcaaggagatcgagaaggggctgggcgtgagcctggacatcgggctggacctgggcctggacctggactcgctcatcaaggacgccgagatggagctcgccaaggcggagcaggcgtggaagagcaaggtcggcgccgccatcgtggaggaggaagagtacagggagctagtccggaggtggagcgccagggagaccgccagccaccactctgcgggctgctcctggggctttggattcgggagcccgatctgaaacactatacctactggctactgttgctgctgttctgtctacctcatgtcacgcgtgcttaatgttaatatatatatatatatatatataagatttt

SEQ ID NO: 123757 - DNA, 1351 bp, Zea Mays
gctgtgtttacaaattacacctgcttgctgttgatcttcgtttcccgtccagccgtttttcgcatccacgtgggccagccggccaggcgaccgccgccaccgccgccctactcctggtcccagctctgctgcacccttcgccggcgacgagcgtccaccgcggcagccgaagctcccagcgtcctcctgcaggccgagctgaaggttcagcgcgccggtggagttcgacgacgaaactccgtcacgtcatacctctccgcctcccgtctccaatcggggctcccagcgtctcggagaagaggagcagcacggcacggcggctgtggcgaggaaggctcctgtcccatcccaacccagttagcagccgcccaaggaggaggagatccaatcggcgtgcgggcgtccgcggtccatccatcgatccaattccaatctgcagcgaggaggtcggctacctttctcctccggcgagctccacgagggcgccgacgaggggatggacgcgcagcctaactggagaggtggaccggcggcgactaggatatcgtacaagaacgccaccatcgtcatgtgcgcctttaacctcttcgttgcggccctcctcctccacaactactactcgtcctggacgcgtatcgccggaggcaacaagctcgattctgctcagcttcggtatatatgggaatctgaggagctgcgtcgtgctatggagcctgtggatttgattagaagagtgaaggaaattgagcaagaagcttatggtgagcatggcatggcgacagatgaagatcctaagcaaactgccgctgttgatttatcaaaacggcttaaggatttgagggcaggcaatgatggcagtagccaaaaagctctcgaagaatggcgtaaacggaagatggagcgtgcaaggcagcgagccatcgaaaagaatgggacttctagtgtgaaaactaaatgaggtgaggagtgtaatgcagcacaagggattttgttttcatgtgtctcggagctgctccatgatgcattcaagtcaatccgtccatcgtaagcgagtgtagctgtgatgacccatgtttttaaagccacaggcagcggtgttcttgtagaaacgtgaagttttaatatttgtgattgtccatgttgccgtgttttttaaccgtcatgtatcagtatcaactttgtttgttcatggaatcatccctgcaaatactttatgcttttgcttgagtcctcatagtgtttggtttgacgagaagggtgaatgggatggggtcatctgtggatttggaaatatgaatatgtatgatatctgtttggttgaatggatgaggcaagttcttttggtttggtt

SEQ ID NO: 123758 - DNA, 1599 bp, Zea Mays
gctgtgtttacaaattacacctgcttgctgttgatcttcgtttcccgtccagccgtttttcgcatccacgtgggccagccggccaggcgaccgccgccaccgccgccctactcctggtcccagctctgctgcacccttcgccggcgacgagcgtccaccgcggcaggtacacccacccccctcacttttgcccctccaaccaaaagcgccggcatctcaaaccggacggcgctctcttctctatcctctgtgtcccctccaccaaaaccgacgacgacgtcgctctcctccaccggtgctcggcgctctccctccaccagcggcggtccaccgacgctcggcgagctccaccggcgggcgctggtcagatcctctcggcagtcatccacctggcacgtcggatagctcgcgcctccgttggcagtcccaccgccgcccggccctcccccagcgcccccggtgatccggaccgcacccgcttgctcggcctaacgaccggctcctgccccgccgcagccgaagctcccagcgtcctcctgcaggccgagctgaaggttcagcgcgccggtggagttcgacgacgaaactccgtcacgtcatacctctccgcctcccgtctccaatcggggctcccagcgtctcggagaagaggagcagcacggcacggcggctgtggcgaggaaggctcctgtcccatcccaacccagttagcagccgcccaaggaggaggagatccaatcggcgtgcgggcgtccgcggtccatccatcgatccaattccaatctgcagcgaggaggtcggctacctttctcctccggcgagctccacgagggcgccgacgaggggatggacgcgcagcctaactggagaggtggaccggcggcgactaggatatcgtacaagaacgccaccatcgtcatgtgcgcctttaacctcttcgttgcggccctcctcctccacaactactactcgtcctggacgcgtatcgccggaggcaacaagctcgattctgctcagcttcggtatatatgggaatctgaggagctgcgtcgtgctatggagcctgtggatttgattagaagagtatgtttccgtgcactttgtgaaggaaattgagcaagaagcttatggtgagcatggcatggcgacagatgaagatcctaagcaaactgccgctgttgatttatcaaaacggcttaaggatttgagggcaggcaatgatggcagtagccaaaaagctctcgaagaatggcgtaaacggaagatggagcgtgcaaggcagcgagccatcgaaaagaatgggacttctagtgtgaaaactaaatgaggtgaggagtgtaatgcagcacaagggattttgttttcatgtgtctcggagctgctccatgatgcattcaagtcaatccgtccatcgtaagcgagtgtagctgtgatgacccatgtttttaaagccacaggcagcggtgttcttgtagaaacgtgaagttttaatatttgtgattgtccatgttgccgtgttttttaaccgtcatgtatcagtatcaactttgtttgttcatggaatcatccctgcaaatactttatgcttttgcttgagtc

SEQ ID NO: 123759 - DNA, 1729 bp, Zea Mays
atggccggcgggagaaccggcgcggtgggcgccctgctgcggtggtggcggacccaggacctgttggactggtcggggtccgcgctgcgcgccggggcgtgggcgttctccctgctggccttcctcgtcatggcctgcaacgagcatggggactggaggcagttcgaccgctacgaggagtacaggtacatcgttgccatcggcctgctggccttcgtctacacgacgctgcagctcctccggcacggcgtctgcctcaccggtggccaggacctggagcccaagaccggcctcctcgtcgacttcgccggagaccagatgtgtggcactgtgacctttagaattcgatttaatatgaatgatactgagaagctgaaggatgccattgcaatgcacaacactgctcattgcagcattggcccacctgttggagttggcgatgttggtgtattcgtcatttttagtaacatattgttcttcctattgtcatttgtcatcactgccatcatctacatcaccaacactgaaggcctaccatcgtttactttatccaatatcctttgttgctctcttcactacaagatagtgatgggcactagcctggtgatttcagcgggatcatgtgccatcatgcctggtttagtgaccaagtggagaaggtgttgttccaagggaaaccagactaccaaaatgtcatcagttctacactcacagccgaaatctacagttggaactcctgcatacattgctcctgaggttcttctgaagaaggaatacgatggaaaggtcgctgatgcgtggtcatgtggagtaacgctgtacgtgatgctggtcggtgcatatccgtttgaggacccagatgagcctaagaatttcaggaagacaattcagagaatattaggtgtgcagtactcaattccagactatgtctacatatctccagagtgccaaaatcttgtctctaggattttcgtcgccgacccagccaccaggatcaccatccctgagatagggaaccatccatggttcttgaagaacctgccagctgacctaatggatgacagcacgatgagcaagcagtacaaggagcctgagcaaccgatgtagagcatggatgaaatcatgcagatcctggccgaggcgaccattccagcagctggttcccgtggactcaatcagttcctgaacgacggccttgacctcgacggtgacatggacgacctggactcagataccgatcttgacctggaaagtagtggggaaatggtgtatgctatttgacagcagcaaggcaatgcgaatatcagtcgtgctcagatcatttgttgcgtcgcaggttaccaagataattagagagacaagggggaggtatctgctgcagatgctgctcgtgtctgatgccgtgatgccccctttttcatcctgttatgtttggctgttgtttggttggtgcatctccagtgttttacaatagtttggcccttcagaattggtagtgctagaacctcgttcatctgagaagaccctttgtttttgcatccccagctaagagacagtgaagtacttgtattattacactgtttgtgtcatatgtatttggtgtaagaaaataaagaaactccattgcccgttcttgttccatccgtgtctcaggattttgagaacctctcaattttagtgtctttttggctgttgtatctcacggctgaatcaccaaggcgcaatcttt

SEQ ID NO: 123760 - DNA, 1590 bp, Zea Mays
agaaattatgaatcgcctgaaaatttatataaattattacaagaagctgtcctgctatatgacaattgacaggatacggtcgtcactatcacacaattaaacacctgcactgcagcacacacacgaacgaacgaacgaaaccctgcagaaaaccacatccggaaactgatggcacatgatgcactagctaggtactctcactacacacgcatacgaaactgatctgacgatgtggcaatggcgacgcacgaagctgatcaggcagctgatgaagcggatgacgacatcacgtcacgtacgcagctgctgcttctggaggtcgacggcgaggacggtgctgaggttcatgggcgtgatgtagtcggtggagccggacatgaactgctgcacgatgaggcggttggcgcgctccgtggggtggaaggcgtcccagaacacgtaggtgtcgcggtcggcgcagaggctggacaccatggtgcagagccccatgccgttgaagcggccctggccgcagcacgcgtcggtggcggtctggaagccgtacgccttggggtcgtcgatgaagtcgttgtggatgcgctgcatgttgacgccgacgaacacggggtcgccgccgccgtggcgcgcgttgagctcctccagcagcgccatgagccgcgggttgtacatctcggcggcgcgctgcagctcggcgtcgcaggtgccgtcgaggctgtgcagcgccagctccgcggggacgcagccgatgggccccaccccctgcaccagcacccgccgcgcgccgaggtcgtagaggcggtccagcacctgcgcgtactccgacagcaggtaggtgacgtagtccggcagcgagaactcccgcgaccgcgccgagtagggcaccaggtagtagttgttcacgaagtcgttgccgcccagcgtgatgagcaccagcgcgccgcgcaccacgcgggacgccgcctccgggccgatcagcgcggccaggcgcctctggtactgctcgaagtagcgcagctgcttggagatatggatgatgttggcctgcagcggacagcggtgcagatgcattattagtttaggcgcttagctgtaccagagctccgagctcaccagtgcaagcaggatagggcggcgatggatcgcgtgtgttacgtacgaactggattccggtgtcgttgaggatgccgacgccggcggacgcgaagttggcgccgacgagcatcttgtcgccgtcgagctccgggctcaggtacggcagcacgggctccgcgccgaggtgctcacctgcggcgtgcagtcgtgcaccatgcatgcaagtttagttagttagttagtaactggaaaggcaggaaggactcgggaagcattccggcatgcaagcgacgacgactcaactgatgatgtccggcacgttcttgccgttgctgaaccggcccgtggcgcggtggtcgggcgtgtcgatgccgtagggcggcgagtcggcgcgcgcctccgtgagcaggtagttgttgttgccgttgtcgacgagggagtcgccgaagacgaagaaggcgcgggcggccgcgtcggcgccccgggccgcctggagcg

SEQ ID NO: 123761 - DNA, 932 bp, Zea Mays
cgcctccccgtccccagctagccggcgggacatgatgccggcgccgccaggcaacgtggacgggtcgtccccgtcgcacctgcttgaggtgaccgtcatctcggcgcaggacctgcagcggcggcggctgggccggcgcgtgcgcgcgtacgccgtggcgtgggcggacgcgaggcagaagctgcgcacgggcgtggaccacgcgggcggcgccgcgcccacgtggaacgaccggttcctgttccgcgtcgacggcgccttcctgcgctccgagacggcggcggtgaccgtggaggtgcgcggcgcgggggtcctgggcggggacacggtgctgggcgtcacgcgcatcgtggtgagcacgttcgtgcgccccgccggaggcgcgcaggtggcggcgctgcagctgcggcggccgcgctcgctccgcccgcaggggatcgtcaacgtggccgtcgcgctgctggacgccgcccgcgcgccgccgctcgacggcgtgcctggctcgcccgacgccgtcgccgtcaaggacctcgtgatgcggcgcccggcggcgccgccgctgcgcaaggtgggcgaggccagcgaggccagcgatgagccggagatgggcgtggacgatgggccagcgcaaggcgaccaagaggcgcgaaacaacccggagctggtcggtcagtccgggcacctggaccccaggggcaccgccgtggagcagaggaagctggagctgacgctggcgaagtggaaggcggagatgtggcctggcctcaaggaaggccggcgcagcggcaggcggaggcggcgccgggcggcgttctgctttcggggcagcggcgactgggacaggtagcagcagagcagacagtggccctgtttgtttcagctttttggagcttctggccaccaaaagctgctgcggactgccaaacgcttag

SEQ ID NO: 123762 - DNA, 328 bp, Zea Mays
ataacatgtaccttcttcttatatgcatcattcaccggagacatgtagccgcccaacacagaataacctcgcagctcgagttcatcctttgccagctctgcatcaaacagggagagcaaggaacttcactagtcgctcccaaagtcacgaaccgaagggggtgccaactgccaaagaggtggcggaagctttgcagcataccaaacatgcgcaggtgcatgtaggtgggagggttaaagctcccagtggccacgagcacgacgccacctccgtccctgacgcatcaagagaacccggagatcagatgacagacgagcccccatccacc

SEQ ID NO: 123763 - DNA, 1623 bp, Zea Mays
tcttcgatctaatcgctgcagaggggagatggagagccgttctatctccagtagagaagtcattcggacatgtgggccacatctccaccgccgctcccactccagctccggcgaccgccgcatcctcgcttcatcgcccgccgccgtaacaagcggctggaccgcatcgcggcctcacaggacccgctaaccgcgctgacccgggtgctgtggggaggcgcgctgccgccggcgcagctcgtcgtcgccgtgcgccacggctggaccacggcgtggcagctcctgatgcggcagctggcgccgtccgaccccgcgacgggcggcttcgcccgtgcccctgcccgcttccccgccgtcgtggggaagcccagctcccggctccacctctacgtgggcctcccctgcccctgggcgcaccgcgccctcgtcgtccgcgcgctgctcggcctcgaggcccgcctcccggtctccgtcgccgtccccggggacgacggcgcgtggtccttcacgcccggcagccccgacctgctctacggcaagcggaagctccgggaggtgtacgccctgcgcggcggcgggttcgagggcagggcatcggtgccgatgctttgggacgccgagcgctgcgaggtggtctgcaacgagagcatcgagatcgtcaagttcctctgcgacctcgctggcgacggcgccggtgacctcgacctgtggccgccggagctgcgccaggacatcgaccgctggtacagcatcatctaccccagcgtcaacaacggcgtgtacaggtgtgggtttgcgcagagccaggaggcgtacgacgccgcggcgagcgagctgttcggcgcgctcgacaggctggaggcccacctcgccggctgccgttacctgtgcggggacaggctcacgctggcggacgtctgcctcttcacgacgctcatccgattcgatctcgtctacaacacgctgttcaggtgcaccaggcggaagctggccgagtaccctagcctccatgcctacacgcgcgacatctaccagatgcccaaggtcgccgagacgtgcgacatggaggccatcatggcaggatacttcaagacactcttccccctcaaccccggcgggatccagccacacccgccggccacctgcgatagggagtcgctcttgaggccgcatggtagggaggccttgtcctctgctgctggcacgccgcttgaagcagctgcggtttcataattcattcaggctttgaacaaaacttctgaaactgcagaaagagtttatagttctaccagatactgatgcttcagcttcacaggatcaaatcacatcgcagtaactgccatgtgcaaattcttattttgtccatataagtcactggttaattatattggcaagatctgtgctgccaatggtgattatgatagtctctttggatgaagatatatttggttctgctcagtgtacctaaactagaatacttagtgtaaaaaatcgctcatgtttgaacatgtaaataaattttgtaaagcagttgatcagttgtataatggcatgtgttctgttcaatagaatccgttacagagacatcttttgtctgtgcttatatacatcagaactgtctgc

SEQ ID NO: 123764 - DNA, 1553 bp, Zea Mays
tcttcgatctaatcgctgcagaggggagatggagagccgttctatctccagtagagaagtcattcggacatgtgggccacatctccaccgccgctcccactccagctccggcgaccgccgcatcctcgcttcatcgcccgccgccgtaacaagcggctggaccgcatcgcggcctcacaggacccgctaaccgcgctgacccgggtgctgtggggaggcgcgctgccgccggcgcagctcgtcgtcgccgtgcgccacggctggaccacggcgtggcagctcctgatgcggcagctggcgccgtccgaccccgcgacgggcggcttcgcccgtgcccctgcccgcttccccgccgtcgtggggaagcccagctcccggctccacctctacgtgggcctcccctgcccctgggcgcaccgcgccctcgtcgtccgcgcgctgctcggcctcgaggcccgcctcccggtctccgtcgccgtccccggggacgacggcgcgtggtccttcacgcccggcagccccgacctgctctacggcaagcggaagctccgggaggtgtacgccctgcgcggcggcgggttcgagggcagggcatcggtgccgatgctttgggacgccgagcgctgcgaggtggtctgcaacgagagcatcgagatcgtcaagttcctctgcgacctcgctggcgacggcgccggtgacctcgacctgtggccgccggagctgcgccaggacatcgaccgctggtacagcatcatctaccccagcgtcaacaacggcgtgtacagagccaggaggcgtacgacgccgcggcgagcgagctgttcggcgcgctcgacaggctggaggcccacctcgccggctgccgttacctgtgcggggacaggctcacgctggcggacgtctgcctcttcacgacgctcatccgattcgatctcgtctacaacacgctgttcaggtgcaccaggcggaagctggccgagtaccctagcctccatgcctacacgcgcgacatctaccagatgcccaaggtcgccgagacgtgcgacatggaggccatcatggcaggatacttcaagacactcttccccctcaaccccggcgggatccagccacacccgccggccacctgcgatagggagtcgctcttgaggccgcatggtagggaggccttgtcctctgctgctggcacgccgcttgaagcagctgcggtttcataattcattcaggctttgaacaaaacttctgaaactgcagaaagagtttatagttctaccagatactgatgcttcagcttcacaggatcaaatcacatcgcagtaactgccatgtgcaaattcttattttgtccatataagtcactggttaattatattggcaagatctgtgctgccaatggtgattatgatagtctctttggatgaagatatatttggttctgctcagtgtacctaaactagaatacttagtgtaaaaaatcgctcatgtttgaacatgtaaataaattttgtaaagcagttgatcagttgtataatggcatgtgttctgttcaatag

SEQ ID NO: 123765 - DNA, 1876 bp, Zea Mays
gaacgtacagcagcaagaccctgcacatgtaacagaactcactacatgtaaaaccccccagaataaccgcagacaccatacaagctatggagaagcaccttagggaactcgggacttgaagtgagctcaaggagtgccgcatcgagttctcttgcagaatcctcgtactggcccgagtcgagcagacttctagcataagaaagcggaacggagaagacgttatgaagtcgaagggcaggaggcgagagggatcgccactgacctcctcgaagaagagcgcccaccggagggccttcttgatctcgtcggcgctccaagtagcagcggcgccggacgaggtgcggccgccggcaaggacaaggacgtcgacgaaaccccgcaccagacggagcacctcctccatggtcaccgccgggtgcgcccaccccatttcccgagcctccttctcacgatcctgacttccgaagggactaacgcgcaagaaatcccgaactttttactttgcacccagaaccctatacttatgcattttattttttctatcactcactcggttctatggttcgcgcacctcgcactacatactagcctgaggacctgaaaattcagctgaaattgttacaaggggtactcgaataatagccgcaaaaccctaaccttggcaccgtataaacgagccaacctgtccaccccgcgccgccgccactccgccgctcctctccgcttccaagatgtcgaagcgaggacgtggaggttctgctggtaacaagttccggatgtcactgggtctaccagtggcagccactgtgaactgtgctgataacactggagccaagaacctttacatcatttctgtgaagggaatcaaggggcgccttaacaggcttccttctgcctgtgttggtgacatggttatggcaactgtgaagaagggaaagcctgaccttaggaagaaggtgatgccagctgtcattgtgaggcagcgcaagccatggcgccgaaaggatggtgtctacatgtactttgaagacaatgctggagtgattgtgaacccaaagggagagatgaaaggctctgccatcactggacccatcggaaaggagtgtgctgatctgtggcctaggattgccagcgcggcaaatgcgattgtctagtggaatcagttgatcgaaatttacttcaaataacatttgtttgtgttgcgaattgggaagagagtttttagttagacgagcttttgatggccctaaagatgttttcccggatgatgtttgtgctgctggaccgtttcctgttagcttcgatggcatcctccccatatcgataaactgttgcttagcctgacaatcggaagagtttaaatgttaaagatttgatatctctctcgctgtttcgcattgcttttcttttacttgcgggagctgaaatgttggcgcttttggaatggaatgcaggaatttcatgggaatggcgtagaatctggaggtaatcagctcattttcattgaaataagatactgtatgttgagaacttgttctcaaatgctataaattaagaacaaggcaacataaaatgttaaatattaatacccttcgtccgtggaagcattatttccccaaggatttaatgacctccgaacgaaggctataaacgaaatatcacgaagatcatgtcttcgtggttagacttgaaaaacaatatgaagtaaaatacttgaaaaacaatatgaagtaaaatacagaacacaaaacattattgaaagatataccgaaaatgaataacaatatttttatatatattctattatatgaacctaaatattatgtttaatatttaggtatatttgtaccttcgtcttagcagaaagcaataatcc

SEQ ID NO: 123766 - DNA, 1100 bp, Zea Mays
gaacgtacagcagcaagaccctgcacatgtaacagaactcactacatgtaaaaccccccagaataaccgcagacaccatacaagctatggagaagcaccttagggaactcgggacttgaagtgagctcaaggagtgccgcatcgagttctcttgcagaatcctcgtactggcccgagtcgagcagacttctagcataagaaagcggaacggagaagacgttatgaagtcgaagggcaggaggcgagagggatcgccactgacctcctcgaagaagagcgcccaccggagggccttcttgatctcgtcggcgctccaagtagcagcggcgccggacgaggtgcggccgccggcaaggacaaggacgtcgacgaaaccccgcaccagacggagcacctcctccatggtcaccgccgggtgcgcccaccccatttcccgagcctccttctcacgatcctgacttccgaagggactaacgcgcaagaaatcccgaactttttactttgcacccagaaccctatacttatgcattttattttttctatcactcactcggttctatggttcgcgcacctcgcactacatactagcctgaggacctgaaaattcagctgaaattgttacaaggggtactcgaataatagccgcaaaaccctaaccttggcaccgtataaacgagccaacctgtccaccccgcgccgccgccactccgccgctcctctccgcttccaagatgtcgaagcgaggacgtggaggttctgctggtaacaagttccggatgtcactgggtctaccagtggcagccactggaatcaaggggcgccttaacaggcttccttctgcctgtgttggtgacatggttatggcaactgtgaagaagggaaagcctgaccttaggaagaaggtgatgccagctgtcattgtgaggcagcgcaagccatggcgccgaaaggatggtgtctacatgtactttgaagacaatgctggagtgattgtgaacccaaagggagagatgaaaggctctgccatcactggacccatcggaaaggagtgtgctgatctgtggcctaggattgccagcgcggcaaatgcgattgtctag

SEQ ID NO: 123767 - DNA, 336 bp, Zea Mays
atggcgatcattctctactgggtatacacagttaccttctcgcccatcgtgctgtactgggtgtacactgacggctaccagctgatccttcacccgcttgagcggtacaggctccacacactggacgaggaggaggagaacttcgttagcctctgcaccgttgtatgtggcatactcctacatcatcttgtgcatgccatccacgtgatggtcttattcatgttgcctcgtgtgatggagaatgatgttattgctcgctattacggacaaggcaaggggattgttgttaaggctatatacgatcgcgaggcaacgccctacaacttctctgtgtag

SEQ ID NO: 123768 - DNA, 974 bp, Zea Mays
accctttccatgaccatgagtccatgaccataactgcactgcatgcatggttgcacatccttctgccatcaaagaaaccatgtgaccgatcgacccatcaggttcccggaggtggtgaagctgcaggacgtgtgctggctggagatcagcgggaagctcagtctgtcgctgctgtctccggggacgacctacgcggcgcacctcgtcttcgccatagccgacgactcgtacggcctcgagtgccacgtcgggatgccggcgcttaaggccacggtcaccgtcaccgtctccggcaagacaacgatggcggagcacgacatctgcctgcaccacatgcagggcgaggcggaggccgcggcgcaccggcggacgcagcagtacgtgcgcctccgcaggggctacggcggcggagggaaggcgacggtgctgacgacgacgagggaggccgaccccgacatcaggtgcccccggcggaggggcgacgggtgggccgaggtcgaggtgggcgagttcgccgtggcgggcgacgagggcgacgccgcggacgtggaggtgacggtgcaggaggatagcctgcgctggaagaggggcctcgtggtgctgggcgtcgacatccggcccaagcagcacacgccaacgccatgctagctagctagcgcaatggccggtgcccgctgcccggtggattttattttttatacaaaaatctagggagaaattaacaagctaagtgctgatcaaattagatccagtcaggaacaggtaggcgatgtgcccactgctcaataaggccaagctttaaaacctgtatcttttatggacagactagtgcacttttaaaacggccgtccatttcttagcgctttagcttctctgaatatgcgcatggtgtattatttattattgtgtcagttgcttgcatgcaggctacgtacgtagcccataaaaccgtgatgaaattataggtgtgtttt

SEQ ID NO: 123769 - DNA, 1413 bp, Zea Mays
catctgtcgactggtagcagagagaagagatagaccgagagagggagggagagagagaacctgacactgagactgaagcatcggcgctagctagcttgggcagcaacatcacgatgtcgtccaactgcggcgaggatgagaaggagctggtgtgcgtgaccggcgccggcggcttcatcggctcgtgggtggtgaatgagctgctccagcggggttaccgcgtcaggggaaccgcgagggaccctgcggacagcaagaacgcgcacctgctggctctggagggagccaaggagcgcctcaccctgtgccgcgccgacgtcctcgaccgcgcctccctgcgcgccgccttcgccggctgccacggcgtcttccacgtcgcctccccggtgtccaacgacccggagcttgtcccggtggcggtggagggcaccaggaacgtcatcaacgccgcggcggacgagggcgcgcgccgtgtcgtcttcacctcctcctatggcgccgtgcacatggaccccagccggagccccgacgccgtcctcgacgagacctgctggagcgactacgacttctgcaagcgaaccgacaacctgtactgctgcgccaagatgatggcggaggtgacggcggcggcggaggcggacgcgcggggcctgcagctggccgtggtgctgccctgcatgaccacgggccccatgctgcagcagacgctcaacttcagcaccaaccacgtcgcgcgctacctcatgggcaccaagcgctccatccccaacgccgtcgccgcctacgtcgacgtccgcgacgtcgcgcgcgcgcacgtgctcgcctacgagcgccccggagccaggggccggtacctctgcatcggcaccgtgctgcaccgcgccgacctcgtcgacatgctcagagacctctttccgcagtaccccgtcacggccaagtgcgaggaggacggcaagccaatggcgaagccgttcaagttctccaaccagaggctcagggacctggggctggagttcactccgctgaggaagagcctgtacgagaccgtgctgtgcctgcagcagaagggccacctgcctgtcatccaaccgcagcagcgcgcgtacctgtgatgtgaaacaaccgacatatataaacatgcatgcaatgaggcaaacgacacacacgtcagtggaagaacgagaagatgacataaggaatctgagaactttttattaagtgtatattcatgttacttttcagtatctacgggtgtattacgttttacgttcttaaaacaaaagcttttgctgttgtacaattattatatagacaagttacttatgaatagtaagttttatttagacaactattaaaacaaaaacctagagggttcacattaagaaagaccgtcgaagatactctgacaaaaac

SEQ ID NO: 123770 - DNA, 1752 bp, Zea Mays
ccagcgacggccgctggctaatcttttcccatccccgaaccaaacccacctaccgttattaagccgcccccttctcctcccactcccgcgcctccctcctttcacacccatctcgatcctcccaacccaaaccctagcggacgcaccgctgccatggccgaatccggcgagtcgtccccgaactcagccgcggccacggacgacacgcaccacgagatgccggaggccggagcggctgcggcggcggtgcatgcgcagccgcgcccgccgccgccgccatccaaggtgcggctgatggtcagctacgggggccgcatccagccgcggccgaacgacaaccagctcgcgtacgtcaacggcgagaccaagatcctgtcgctcgagaggccgctctgcttcccggacttcgccgcgcgcctcgccgcgcttgtggggaacgccgcggacgtccgcgtcaagtaccagctgcccggggaggacctggacgcgctcgtctccgtcaccaacgacgaggatctggagcacctcgtccacgagtacgaccgcctccacgtccatcgccacgccacggcctcctccgccggctccagccgcggcggatccgcgcccaggctcagggtcttcctcttccccgtccagtcgcccccgcctccgccgcagccggccgggatcctcgagcctaaggttgagcagcgccaatggttcgtcgatgcgctcaacaccgtcctgctgccctcgtccaagcaggacccgccgcccgtgcccccgcagcagcagaagcaggagcaggagtcggtcttcgcgcagcagtcgccaccgccgcaggccaagcacgaggcggtgttcgtccagcagtccccgcctcagccgcagacggtggtgcagatgcagatgccgccgccgcagcacgtggtgctcgcggcggcgagccccgactacctgttcggcctcgacaatggcttcgtccatccccccgcggtgaaggtcaaggacccggcgggcgatcctcctgcggtcagggagagcgtgcccgtggagttaccagccaaaaacgaggaccgccatcccattcccaaccccgcgggcgacaacgtggctgtctcccctgcggagtaccagcgccagatcccggggctcgagaagctgcaggtcgccgacaacgccgcccaccaaccacctcctcctgcgccagcgcctgcgccggcaccttccctcgccccgactcccgtccccgccgcgctcccgagaaacggcagcgacgactccctgacccgtggctaccctctcgcgacccccaccccgaactccagcgcggagtactaccttccaaagttcccggagaagccccccgtgccgccgccgccgcagtcatccgctccgcccccaccgacctatctgcaggtgcagggcaggtacacatccgtggcccctggctccggcgcagaccgtggccccgtgttcttcatcccggcgccccacggctacttcgccgccacggcctcgccaggcaaaactactgctagtagtgtggttctgcgctgatcacgggacatcagcgtggtgcatttatgcatctactggtacgtatgtgggtggggtgttgaacagatgagtcaggttgtggcgatgcggttcttgtccgtgatgtctgtttaaatgttgtttggcgatggtgtgtgtgatgaagccgctgtgtcaggttgtcagcgatgtgtactgctgccgtcaatcgttcttgaactgcattttgat

SEQ ID NO: 123771 - DNA, 2075 bp, Zea Mays
attaagccgcccccttctcctcccactcccgcgcctccctcctttcacacccatctcgatcctcccaacccaaaccctagcggacgcaccgctgccatggccgaatccggcgagtcgtccccgaactcagccgcggccacggacgacacgcaccacgagatgccggaggccggagcggctgcggcggcggtgcatgcgcagccgcgcccgccgccgccgccatccaaggtgcggctgatggtcagctacgggggccgcatccagccgcggccgaacgacaaccagctcgcgtacgtcaacggcgagaccaagatcctgtcgctcgagaggccgctctgcttcccggacttcgccgcgcgcctcgccgcgcttgtggggaacgccgcggacgtccgcgtcaagtaccagctgcccggggaggacctggacgcgctcgtctccgtcaccaacgacgaggatctggagcacctcgtccacgagtacgaccgcctccacgtccatcgccacgccacggcctcctccgccggctccagccgcggcggatccgcgcccaggctcagggtcttcctcttccccgtccagtcgcccccgcctccgccgcagccggccgggatcctcgagcctaaggttgagcagcgccaatggttcgtcgatgcgctcaacaccgtcctgctgccctcgtccaagcaggacccgccgcccgtgcccccgcagcagcagaagcaggagcaggagtcggtcttcgcgcagcagtcgccaccgccgcaggccaagcacgaggcggtgttcgtccagcagtccccgcctcagccgcagacggtggtgcagatgcagatgccgccgccgcagcacgtggtgctcgcggcggcgagccccgactacctgttcggcctcgacaatggcttcgtccatccccccgcggtgaaggtcaaggacccggcgggcgatcctcctgcggtcagggagagcgtgcccgtggagttaccagccaaaaacgaggaccgccatcccattcccaaccccgcgggcgacaacgtggctgtctcccctgcggagtaccagcgccagatcccggggctcgagaagctgcaggtcgccgacaacgccgcccaccaaccacctcctcctgcgccagcgcctgcgccggcaccttccctcgccccgactcccgtccccgccgcgctcccgagaaacggcagcgacgactccctgacccgtggctaccctctcgcgacccccaccccgaactccagcgcggagtactaccttccaaagttcccggagaagccccccgtgccgccgccgccgcagtcatccgctccgcccccaccgacctatctgcaggtgcagggcaggtacacatccgtggcccctggctccggcgcagaccgtggccccgtgttcttcatcccggcgccccacggctacttcgccgccacggcctcgccaggtgcgacctcctaccccgccgtgtacgccgtcgcgccacccagtaccgccgccaacggctccgccgcgtcgcccgcggcgtcgaatgccacggcctactcccccgcccccacgcaggtcgcgtacgacagcaacggccgcgccatctactacaccagcatgctcccccagtacccgtcggctgtcaatggcatgtcctcggcgggcgccgttctcgggacagagcccgtgaatccggtggccgtgaagccgaccgtgtcgtgaccaccccagcttacacctcgcctcatcacaaacaccaatggatcaaaattttctttcatcctcaccagtggtcaatggactgtctagagttgtttttttgtgcctgttggtgttctgggttcatgatatgatgacgatgcaagtatgagtagttgtttgttgtgcttagctgtacatacagagcctgtggctgtggacataatgtataagtattatattgtattggcctgcctgttgtagagttgagtggagttgggagttgtttaacaatcttgtgctacaatcttgtgctagtaaaatttgttaattctttgggttgctgtatctcgattaactatagaaattcaatttggcatgtgata

SEQ ID NO: 123772 - DNA, 779 bp, Zea Mays
ggcgcttcgaaaagtcgggcggcgagaccgagaccgagacctttccttcctcggccggcccatgggcgttggccgcggctcttgctgcagccactgaagacgcccgcccgcggctcctcccccgctgctcatggcaggagctcaatgcgccgccacagctgggccgcgcgccgccgcgccgccgccgctcctcctcgccctactcctgctgtgcgccttcctctgcgccgtgctcgtgctgctcgcgccggcggctcggcagcacggggacgacagcgacgagacggaggagctccacgccgcgtcttctccgtggggccgccgcgacctcccgcgcccggcagccgcggcggcgtggcggccccggccgcgcgggaggtggaactccgcggggcaggggctccgggacggcaagcacgaggtccccagcggccccaacccggactccaatcggtaggcggaggccagagagaggtaggtggtagatccgtgacgtgagccccgcccgccgtccgttttcgttccggcgagcggtgatggtcgaaggctcgaagcccagctcctgttcctcctggtggtcgctcggccgtgtagctaggcgtctcgtgtcagcttgttctttttgcttatatcttctgtcttcttaattcttctccgcctctcctctctttcttctttatcagagatgatgaaaatggatgtacaaaaagatgagcatcgaacgcgcgcgttactactacttgataaacttccgctattgctgctgtgctcaactcaaa

SEQ ID NO: 123773 - DNA, 567 bp, Zea Mays
aaccgatgacaaatattcgaaaacagaggtagcaccggtatggtttgctcgtgctactgagatacagtagaaacagaagtgagagcatcctgattccatatctacctgaacttgttgaggaggtcgaggccgcggtagagggcgaggaaggcgtcgcggatgctcttctcggcgtgctggaccttcttgcggtggacgaaggcggcggcggggtcggcgccgtccttgcggagcacgttgacgagctcctcccacaccttgagcgccgcccggccggggctggtgggcgggacgtcgatgcgcaccgtggccggcagcgcggccgcgcgccccgtgagctgcttcccgccgccgtccttcttggccttgctgcccagcccgctgcccacgaagctcacgccgttgcgctccagcgccgccatcacctcctccgccacgcgcgcctgcggcagctccgcgctcccatctgcgcgggtgggaggaacatatctctctttttttaagaacttgtatcaacttagtgtgttgacttgaaattcagtaaaagcttccattacgggaaaagaa

SEQ ID NO: 123774 - DNA, 3533 bp, Zea Mays
agcgacctttcctctcgccccatcttccccgaatccccggatcccccaaaccctagcactgcatcccctcccgctatgtcctcccgcctcaaggatcgcggcggcggcagggccacggccgcggccacccgcccgctcaccccgaagcccttctccatttcgtcatccgcccggcagacgaccgccgccgccgggaaggagaacacggcgtccaagccgtccaagcccacctccgccgtgcggtggtccacgtcgtcgctcccgcgggccagcaggatccaaagctcggtggactcctccaagctcgcctccaccctcagggctcccgtgctgccggggaggacttccatcagtaaggatcccgtggtggaggcaggcttgcggcggagcgtcagtggtgggatcagggcttcttctgtagagaaagggaggaggtcgattagtgttgttggatccagggcctccgaggctaggagagggagtgctggcgctggtagtgatgacactggtagaagggcgaggtttgatgcgaaggcgaaggggtcggatgagatcagcaggaaaagaggtgaccttgatgccaaggggaagcagactgatgagattggcaggaaaagggagagctttgatgcaaaggccaagcagatcggtgggaaaagagatagcttttgtgtgaatgtgttgaagcaatgtgatgagaacaaagggaaaacaaatgcattcgtgactaatatgaagaagcaatgtgaagatgttggtgggcaaataaagggctctgattcaaaggtaaaggcagctgaagaaatcaatatgaagaaagaggggcccaataaattgatgaaggagatgaataccaaaaaggctgatccaggagaggctgcttccaaatctgtggaatgttgtgccatccagaaggatgacgatataggcaagacttctgtcatccctgttttcactgtccatgtggtgaattcaaatgatgtccctgatccaataaggaaacagcaaaagaataatgaagagggcaggaagcaggaagaaaaggtaaaattggcagacaggataggagtttttgagaaagtggctgcaggtggggagggagggtcagcaaaacccgtgtctgctatgaacaggtacccaagcaaattacatgagaaactagccgcgctggaagggagggttcagaagattgctaccgatatcaagaaaaccaaagaaatgcttgatgagaacaacccgaatgagccaaaacagatcttgtcaaatatccagaaggaaatcactgccattgagaaggcaatttctcatgtaaaggatgataataagatacagctgggtactgcagatagcagtgaatgtgagagctctcaccctgaaacagctgaaaaatgtaccataacaaagccaggtaacctgaagcaagctggaaaaggcttgaatgctgatgagctggaggcaaggttctttccacaccacaaattgttgaggggtcgcatatcttcaacttctactcaacaggagttatctgtggatgcaaaaaaagattgtagtggaaaaacaagacctgccgcatctgatcctggcgatgatgagaacagtatagccatggagtttctggcttctttagatggggaagaaaatgatttcttcaaggatcgtcgagctaagaaattggaaaagaataaaatatgtgaagtagcagatgctaccagcaagacatcaagtcaaggtagcacaaagaatccagttgctcccaatcataaggatgaagttgaattgcttgctacagaggagctagaagaatttgatgatcaggaaaacaagtcatccatgatgttacaggaagaaactgaggagtcatgcaatagtcagttatcgggtataggaaacaagtcttcaactggtggatggtttgtttcagagggggaagctgtgcttcttgctcatggagatggcacatgctcctattatgacattgcaaaccatgagttcaaatctgagtacaagcctcccagcttggtatcaaataatacgtggggcgattgctggttgattcgtgccccaggcgtagatggatgttctggtagatttgttgttgctgcatcggctgggaatgcattggagcctgggttttgcagctgggattactataccagagaagtaaaatcatttcatgtcgaggaggaagcttctcaaacttttgctccaacatccagggctattcttggtgctctctctaatgtaggctcatcaagatccagctctgcgctgtcaaatacagagaggcagcaatggtggtataaaccatgcggacctctcctgctatctactgctagcaagcaaaagatggtcacagcttatgatatacgtgacggtgatgttgtgatgaaatgggaagttagcaatctagtaatgggaatggaatactccagcccactacaatggcgtagcagggggaaagtagtaattgctgggagtgaatcaatagggctgtgggatgtgaattcacttaacccacaacccttgttgtctgttgcttctggtaagaaagtgtactgccttcacgtgaataacactgatgctgaggtgggcggcggagtgcgtcaaagggttagttcatctgaggtggaaggaaatgatggtgttttcagcacacaggaaagtgtcaatgtatttgattttcgtgtacctgctggcattgggcttaaaatagcaagacatggcggcacagcaaactcaatcttttcacgtggggactcggtatttattggtagcacagaaggaaggctgcaaataaaaggagggtcaagatcacgagttcagcaatactcgttgagaaaggggaaacttgtcgccacctatgagttacccgaattcaacgctcatatccatcactctgcgataacccaagtatggggcgactcaaaccttgtcttggctgcatgtggtatggggctgttcgcctttgacacgtttaaggaagacacgcagccaacctacagctttgaccgtggaaacaccattgcagcgagagaagctattggccctgatgatctgtactgtcctacatttgactactcatcatcaagggttcttctcgtctcaagagaccgcccggcacattggaggtacttgtaggctgtagctagctatttcttgtttattttgtgtgcaacatgccatgtaatatatgcactttgtttatgcttcacatgtggtgtcatctgccgtgtcaaccatctcgcgctttcactgtaatattatctagtttttacccctgcaattataaattattttcagtcttctgtacttctctcttattttgtgccttgcatgttttcatgctgtttctcatctcttggttgaaacactatttatggaaacatggttcaaattctgtttgaccaccatgtattttcatgcaatatttttcagtcatcagttcccagatacattcataggttaatgaatcgacgaagtcaaggatttgttagtcgattagcatgcaacaatcctcaatcaaccaataaaga

SEQ ID NO: 123775 - DNA, 297 bp, Zea Mays
atgaatgtgttggatgagctcgatggcgttctatgccgattagagccagatattggatgtaatgagtcaacagatgttagtgatgatgaggaagataaggaaggagaattgaataaaaataatgctggcgatgggatggaagatgacaatacaattacatgccataaaatggaggacaacatgagaattccacctgaggttggtgatacaagttctccgtgtcacgtagcacatgaacaaatggaacatattaccgcatcctcagaagctaaaaagaggttgatgtggatgttataa

SEQ ID NO: 123776 - DNA, 618 bp, Zea Mays
agatttatgccattcctaaatgagatatatgcaaggtttgctgttaaggattttaaaacaacattccagtctattatacatcatccattaactcctcatgagtttgaatgtgcctgggaaatgatgctagaggagttcaatcttcatgaagatatgaatctacgcaaattatatgaaataagaaaagaatggatacctgcattttttaaaaacgacttctgtggggtaatggtatctacacaacgaagtgagagcatgaacagattagtgaagcagtcacatgtagatgtgaacaccccactgcatgagttcgctaaacaaatgatggaaatgttgcacagcaggaaaatgaaagaatcaaaggaggcattggtgagcaaggtatgtcgtgcttgttatcaataacgtttggcatacattttatgtaaataatttgtttaattatgataataatgtcttatagggaccaaggacaacagatacattgtataggttcgaagtgagagtctctagagcatacaccagagctgttatgaatagatttgaggaatcaatgaaatacgccactgcatacaaaatattaaaggacgcagacggttgtgataaagattggatcgt

SEQ ID NO: 123777 - DNA, 2757 bp, Zea Mays
gcatcaaaccttgcttagcaagtgaaaccactcgatgccgatcacttgcatcaacagccattccgcactagcttggttgcctgtgggcgtgtggcctcctctcccctggtctcgtcttcgtccctaacgggcgtccgagccagcgcgcgcgcgagagacagagagagagagaagggaggaaggggaaaaataaccacagaatataggaggaccacttccctcccctccgactccggccaacccgcccctccctcccaccgctcgtccgcccctcgcccgcaccaccggcgccggcaccggcgccggagcgcgacccggaggagcgtccgcacccgcgccgcgccagatctggccccgcccgcagctcccatgcccctccctccccagacccgcctgacctagctacgaccggccggccggacccgccccaccccccgccatggatgacgtgtccaagtatgcgcacagcccggcgcacctcgccgtcctgcggcgcgaccacgcggcgctgcgtcgactggtggcggccctcccgcgcctgccgcgcgccggggaggtggccaccgaggaggagtccgtcgcgggggaggccgtggcggacgcggtctcggccgtcatcgaccgccgcgacgtgccgcggagggagaccccgctccacctcgccgtgcgcctccgggaccccgtcgccgccgacatcctcatgtcggccggcgccgactggtcgctgcagaacgccgacggctggtccgcgctccaggaggccgtctgcacgcgcgaggaggccatcgccaccatcatcgcgcgccactaccagccgctcgcctgggccaagtggtgccgccgcctcccgcgcatcctcgcctccatctcccgcatccgcgacttctacatggagatctccttccacttcgagtcctccgtcatcccgttcatcggccgcatcgcgccctccgacacctaccgcatctggaagcgcggcgccgcgctccggaccgacatgacgctcgctggcttcgacggcttccgcatccagcgctcggaccagacgttcctcttcctcggtgacggcgccaggcccgaggatgccgggggcaaggagctgcactcgggctcgctaatagtgctggcgcacaaggataaggagattacggatgcgctggagggggcgggggtgcagcccacagagtctgaggtggcgcatgaggtagcgctcatgtccaagaccaacatgtaccgtccggggatcgacgtcacgcaggcagagctcgtgccgcacctgaattggcgccgccaagagaggacagaagccgtcgggcaatggaaagccaaggtgtatgacatgctgaatgtcctggtcaccgtgaagtctaggcgcgtgcctggggcgatgacagacgaggagctgtttgccatggatggggaggagaagaatgggaggggcgcagagcttgatgctgagttagacgaagtgttgacagccgaggagaggaagcaacttgattctgcgcttaggatggggaacaacgaagaggaatctgaggagaggggcgacgaaggtgatgctggtgctgatcatacggatgcgagtggcgtgaccaaagataagaagggatggtttggttggggcgccaagaaaggtgccaagggcgatgacaagccatcaaaggtggggagtaaggatgaaacaagtgacccagggaagcaaaaggagaagggcagtgggaagaagaaaaagggtggctcatctgctgagtctgtaaaacatgagagcgagtacaagaaggggttaagaccagtgttgtggttgacaccggatttccctctgaagacagatgaactcatccctctgcttgatgtcctagcaaacaaagtgaaggctatcaggaggcttagggaactcttgacaaccaaacttcctacaggcacatttccagtcaagatcgccatccctattgttccaacgatacgagtcatcatcacattcacaaagtttgaagaactacagcctctagacgagtttgccaccccaccttcaagcccgacacagtttcaagacgcgaaagccaaagaaccagaaggatcaggctcatggtattcatgggtaaagggtggccgaggtacgcagtccggtgacagtggtgatgggcggaactggaaagacgaggttgatccgttccacataccgtcggactacacctgggtcgatgccaccgagaagaagcggaggatgaaggcaaagaaagccaagagcaggcggaccacagcccgaaaacagtcctcgaagaacacttcttcggaaggaggccaccgccccatgatggatggcttcgaggagtaaaccgcgttctcacaagcatagtaagttgtatttgcattcttaaaatgttagttgttgatggcagctgcacgccagaggcagattgattgatgttgtgcctggagcaccccctcccttggcgtggcaatgaatcggagtcgaatctccttgagaacgtacaggatggcttatacccaccccactaatctgtaattcagccagcgctatttttttttgcccccctccgtgtttcatcttgctggatgtatcatgtatgtttgacagatgatgacgatgatacgaccctgttgttgaaaaaaaaatgtgtttgaggggactgtagtgttccctccccctgttgtaatggaagatttaccaatatgcagcgattttctcgcaaagaggaagctccaatgcacatgcttgtttgttcgcactcc

SEQ ID NO: 123778 - DNA, 1802 bp, Zea Mays
ggtagaagacgagggtcttgcgcatgccgacgacgatggcggacctggggtcgtggatggcgcggtccttgccggtggccttccagtagcccgacctggtggcgcggttggcgcgctgccccgtcgcgtacttgcggtcgcggaagctgaagaagtaccagtcgttggtgctcagcttcgccacgtctgttgtaatacgcgtatgcatggattcatcatcagtttatcagtcagtaagcttcagatgtgtagagcaatcggtattcggtgtttactattaactggatcgtcagttgtgaaagggaaaaatatattgtataagcatcttcttccaataataataattaacagacaactaacaagaacaaaacaaacaagaatcaacatggctgaagctgaaccaataaaccgaggttgcgtgcgtgcgtaattactcgttccatgacacggaatcgagttaataattacgcacggagattgcttgctagagacgctaaattaagcaaacaactgaattaactgccaaggcaccgagtacgagtacgtaccagggagctcccacggctcgtgggtgtgcagatccacctccaccatggctgcgccggcgcctgcgagctgctcgttggccaccttgccgtgcaggtagtggcacaccagctcctcgtcgctggggtagaaccggaaccccggcggcagcgtgagctcgatgtcccgcagccccatgctagctagcttctgctccagctactacactttttccctgtatatctatctatctttatgtgcggagctggaagaacaacgaactgtatattatatacgcagtctgcactctgcaaccagcacgtcgatctgaagagaagaggagagagacagagggaaggccccggggagtaagaactaagaaggaattggctgcgctgcgcgcgctgcacacatctacgactgctacggttgcttgctgtagccggatgggtttgtggtggcctctggcagtggctggtaggaaaggatgggagtatatatatagcttggtgccgactgccgggactatttaatcattatatgtgtagttattattagatacataaatagaggaagaagatatatatagctagataggggaagagagatcgagaaagaaataaaacaagaagtttggggaagcaagcaacaacagattcaaggagatcgatcggaggggtgctgctggtactacaattaatcccagcccgggcagaggcagaggcagagatggatcgaggaggaggacgaggacggagctgagatctagcctgagagaggaggccgggggcgtacgccgttagcgcatgcgatcgacaggtatacgtgtacgatgcaggatgatgagagaaggggatcggagggaagacgacgacgacgacaacgaccccgccggttccattccatctatcggtctacaggtatatacggcgcgcggagagggaggagatagatcgtatcagacgcactgttcatccatgattgacgtctctgtcgccccttgcgccggacgcaggcagcacgggccggacatggggcgggaccgcgggagagaggccggaggagaggatcatcggaggtgacgcgtgcgcgcctgtggcattcgccggcgcgcgatgcgcttgcgcagcactaacgcgagcgacagccgatacgtgggcggaggggaaggaggagggaaaatgcggtggagtggagctcttgaagagaagctagggaccgatcgaggagcggagacccaggctcacaagaaacttgttggctaggagaaagagaaa

SEQ ID NO: 123779 - DNA, 1682 bp, Zea Mays
ggtagaagacgagggtcttgcgcatgccgacgacgatggcggacctggggtcgtggatggcgcggtccttgccggtggccttccagtagcccgacctggtggcgcggttggcgcgctgccccgtcgcgtacttgcggtcgcggaagctgaagaagtaccagtcgttggtgctcagcttcgccacgtctgttgtaatacgcgtatgcatggattcatcatcagtttatcagtcagtaagcttcagatgtgtagagcaatcggtattcggtgtttactattaactggatcgtcagttgtgaaagggaaaaatatattgtataagcatcttcttccaataataataattaacagacaactaacaagaacaaaacaaacaagaatcaacatggctgaagctgaaccaataaaccgaggttgcgtgcgtgcgtaattactcgttccatgacacggaatcgagttaataattacgcacggagattgcttgctagagacgctaaattaagcaaacaactgaattaactgccaaggcaccgagtacgagtacgtaccagggagctcccacggctcgtgggtgtgcagatccacctccaccatggctgcgccggcgcctgcgagctgctcgttggccaccttgccgtgcaggtagtggcacaccagctcctcgtcgctggggtagaaccggaaccccggcggcagcgtgagctcgatgtcccgcagccccatgctagctagcttctgctccagctactacactttttccctgtatatctatctatctttatgtgcggagctggaagaacaacgaactgtatattatatacgcagtctgcactctgcaaccagcacgtcgatctgaagagaagaggagagagacagagggaaggccccggggagtaagaactaagaaggaattggctgcgctgcgcgcgctgcacacatctacgactgctacggttgcttgctgtagccggatgggtttgtggtggcctctggcagtggctggtaggaaaggatgggagtatatatatagcttggtgccgactgccgggactatttaatcattatatgtgtagttattattagatacataaatagaggaagaagatatatatagctagataggggaagagagatcgagaaagaaataaaacaagaagtttggggaagcaagcaacaacagattcaaggagatcgatcggaggggtgctgctggtactacaattaatcccagcccgggcagaggcagaggcagagatggatcgaggaggaggacgaggacggagctgagatctagcctgagagaggaggccgggggcgtacgccgttagcgcatgcgatcgacaggtatacgtgtacgatgcaggatgatgagagaaggggatcggagggaagacgacgacgacgacaacgaccccgccggttccattccatctatcggtctacaggtatatacggcgcgcggagagggaggagatagatcgtatcagacgcactgttcatccatgattgacgtctctgtcgccccttgcgccggacgcaggcagcacgggccggacatggggcgggaccgcgggagagaggccggaggagaggatcatcggaggtgacgcgtgcgcgcctgtggcattcgccggcgcgcgatgcgcttgcgcagcactaacgcgagcgacagccgatacgtg

SEQ ID NO: 123780 - DNA, 1784 bp, Zea Mays
ctcagatctcaatgcctgcctgcctaaccaaaaggctaaaaacctatcccctccaaccccagccttccttccagcatccactgccaccatctccagagcttcatgctgactcccaaggatggcttgaccacctgagctgctgagcgtcagagagcatggcatagcatttcttggtgtcgctggatggatggggatgactggatcactcatcaagaggcggatcacaaaagagtactagctaaccactgccaagattccgccgcgcgcacgcatgcatctgtgttgagcttcttacacgccgcagagaaaactagatcacggcgctgcacataccgcagcgcgcgcaggaagcaagcggctaaggatcgatggatcaccatcaccaccaccaccatcacatgatcccgggccaagagccaccggcggcggatagctcagccccggacagcttcttcctcggccccgcgggagccatcatattctccggaggcgccggggtgtcgggggccggctcgtcgtcgggcgccgcggccctcggatcatccgcgggggcaggaggtgggccgtcgccgtccagctcgtcaccgtcgctgagccggtacgagtcccagaagcgccgggactggaacacgttcgggcagtacctccgaaaccaccggccgccactgtcgttgtcgcggtgcagcggtgcacacgtgctggagttcctcaaatatatggatcagttcggcaagaccaaggtgcacacgccggtgtgccccttctacgggcaccccaacccgcccgcgccgtgcccgtgcccgctgcgccaggcctggggttccctcgacgcgctcatcggccgcctccgcgccgcctacgaggagaacggcggcacgcccgagatgaacccgttcggcgcgcgcgccgtgcggctctacctgcgcgaggtgcgcgagtcgcaggcgcgtgccagggggatcagctacgagaagaagaagcgcaagaagccgtcggcagcctcggccgcggcccctgggccgtcgtccgagggaagcccaccaccaggaccgtccggcggaggaggaggattcggcacgtcggcgtcgccgcggttcatcatgccgtgagtttttttttttcctggctagctagccaagtgatccatcgccggcatctacaccccttgatcgtctattttaatctgatgagctagccaggacagcacagctggagttggaattcttgcatggaacgccattgttctggtagtagagcaaacaaaagtctaagccattgttctttgcctcctcctcctccttcggtggcttgcatttcgggaaaaaaaattctcgatccccttttcttttctttcctttttcttttctctgtttcatccgtgcgtgagtactggtttaatcgtggatgttttatttagctttcaatccattggcaacaagagcagtttatgatagttttgcttggtttatatatgctcctcccgagggatgcaaacttggcagaacagtttgagattccctagtccctaccaatgctagcttatatatgcatgtcatgtcatgtcatgccatggtgtaggagaagagtttagtttgcagttagcaacaacagtggcaaaaggctgtagctagctgtatgactagctactagtagcatcttttcagaatttgttcttgtatgcaacttgcaaagcaacactagtagtttggttctgttgcagaagccagcagccaaactaggttgctgtgctattcattatattggctgaacagaaattgatacaa

SEQ ID NO: 123781 - DNA, 1505 bp, Zea Mays
ctactcctcagatctcaatgcctgcctgcctaaccaaaaggctaaaaacctatcccctccaaccccagccttccttccagcatccactgccaccatctccagagcttcatgctgactcccaaggatggcttgaccacctgagctgctgagcgtcagagagcatggcatagcatttcttggtgtcgctggatggatggggatgactggatcactcatcaagaggcggatcacaaaagagtactagctaaccactgccaagattccgccgcgcgcacgcatgcatctgtgttgagcttcttacacgccgcagagaaaactagatcacggcgctgcacataccgcgcgcgcaggaagcaagcggctaaggatcgatggatcaccatcaccaccaccaccatcacatgatcccgggccaagagccaccggcggcggatagctcagccccggacagcttcttcctcggccccgcgggagccatcatattctccggaggcgccggggtgtcgggggccggctcgtcgtcgggcgccgcggccctcggatcatccgcgggggcaggaggtgggccgtcgccgtccagctcgtcaccgtcgctgagccggtacgagtcccagaagcgccgggactggaacacgttcgggcagtacctccgaaaccaccggccgccactgtcgttgtcgcggtgcagcggtgcacacgtgctggagttcctcaaatatatggatcagttcggcaagaccaaggtgcacacgccggtgtgccccttctacgggcaccccaacccgcccgcgccgtgcccgtgcccgctgcgccaggcctggggttccctcgacgcgctcatcggccgcctccgcgccgcctacgaggagaacggcggcacgcccgagatgaacccgttcggcgcgcgcgccgtgcggctctacctgcgcgaggtgcgcgagtcgcaggcgcgtgccagggggatcagctacgagaagaagaagcgcaagaagccgtcggcagcctcggccgcggcccctgggccgtcgtccgagggaagcccaccaccaggaccgtccggcggaggaggaggattcggcacgtcggcgtcgccgcggttcatcatgccgtgagtttttttttttcctggctagctagccaagtgatccatcgccggcatctacaccccttgatcgtctattttaatctgatgagctagccaggacagcacagctggagttggaattcttgcatggaacgccattgttctggtagtagagcaaacaaaagtctaagccattgttctttgcctcctcctcctccttcggtggcttgcatttcgggaaaaaaaattctcgatccccttttcttttctttcctttttcttttctctgtttcatccgtgcgtgagtactggtttaatcgtggatgttttatttagctttcaatccattggcaacaagagcagtttatgatagttttgcttggtttatatatgctcctcccgagggatgcaaacttggcag

SEQ ID NO: 123782 - DNA, 609 bp, Zea Mays
caccagaacggtcagtattccgtcaagtccttttatgatttcataatcgataatggacgggttaggcatgaccaaacggtgtggaagctcaaaattctgcttaaaattaagattttctcttggtatttaaggaggggggttatactaactaaggataatttggcaaaaagaaattggaacggcgacagaaagtgtgtgttttgttcagacgacgagtcgatccaacatcttttctttgattgccattatgctaagtttatttggcgggttgttagctttacttttggcctaaaagaaccgactaacaccgaggacatttacaatagttggcttataaatgtaaatgctaggtggaggacgttgattttggttggtgctactgccatttgctaggcattatggttgtgtagaaatgatattgtttttgataaaagccctatacaaacttatatgcaggtactcttcagaggaatttattggtgtcgttcttgggcgctcctccaaaagcatgaagacgatgccaaaactatgaaggatacctgcaggaggttacaagtgtcggtgatgcaaatcttcgctcatcaggggtgacaatttggtaatagaatt

SEQ ID NO: 123783 - DNA, 598 bp, Zea Mays
agaatttgtgcgaacaccttgcacgtcccccctggcacgggcctgctcctacttctctcgctttcgctttatcacctctcgtcgccaccaacactccaacagtcgcttcaccgtcggcgccgtcggagggacgctccagttggctgcccccggcagcggaaagtttcctgcggcccctgctctctttcaccaccgcggtggatgaagactggcaattattggcctgcgctgcggtctcgacgccgtgcagaggcgtcatgtggtttcgtgatccacgcggggatgggaggagccgcatgagatgctgagtgattggacggttagttggcctcctcacgtggcgcgtctctgcacctttgtctctctggctgactgactggctctgctttcgcctgcgcctgggcatatcgtggaaccctgattggcctagctcgatacggccgcagctatcatgtggtgtttgtttcagcttattttcagcttctggcagctgtggaacatttagctttttaactcgtttttgtgagaatcgatttggtaaaaaccgttaaaaatcaatttaaacatataatcggctgattcgtcatccgttaccttc

SEQ ID NO: 123784 - DNA, 734 bp, Zea Mays
agaatttgtgcgaacaccttgcacgtcccccctggcacgggcctgctcctacttctctcgctttcgctttatcacctctcgtcgccaccaacactccaacagtcgcttcaccgtcggcgccgtcggagggacgctccagttggctgcccccggcagcggaaagtttcctgcggcccctgctctctttcaccaccgcggtggatgaagactggcaattattggcctgcgctgcggtctcgacgccgtgcagaggtagctgcagctttgctcattgggtttgttgcttgcttttgtccagagactagggcaggacaggactgtgttaaggcaggcggccgcgttattgcctgtgcttctgttgttaccttgtgctatgctatatgctaatcatttggcaggcgtcatgtggtttcgtgatccacgcggggatgggaggagccgcatgagatgctgagtgattggacggttagttggcctcctcacgtggcgcgtctctgcacctttgtctctctggctgactgactggctctgctttcgcctgcgcctgggcatatcgtggaaccctgattggcctagctcgatacggccgcagctatcatgtggtgtttgtttcagcttattttcagcttctggcagctgtggaacatttagctttttaactcgtttttgtgagaatcgatttggtaaaaaccgttaaaaatcaatttaaacatataatcggctgattcgtcatc

SEQ ID NO: 123785 - DNA, 885 bp, Zea Mays
agaatttgtgcgaacaccttgcacgtcccccctggcacgggcctgctcctacttctctcgctttcgctttatcacctctcgtcgccaccaacactccaacagtcgcttcaccgtcggcgccgtcggagggacgctccagttggctgcccccggcagcggaaagtttcctgcggcccctgctctctttcaccaccgcgattcataaaaaatgtgcagatctactcttaggcggactccagcggctgccgtatgcggatccgcatacttcgtgccgtgatgcggagcgtctcccgcagagaagagaagccgcggaaatgcgcgaccgcacattttgtgacgcatccacaacctgttggaagcgtgaatagtgcgctgcggtcacgcaaggcctgtttggtttcctgcctaagacaccacaacgtgcctaagctcagtcgctcgaattgaagaactaactttagacagaaaagttaagcaagttgtggtgctttaggtaggaaaccaaacaggtccaaaatgcacatcggcaggtgtttgtgtgcgctgttggacacagccttactgtatggccattacctccacttgtgatgtaggtatgtactctggggatgtacagataggccacataaatggcacatacgctttaagtgtcttatcatgtgtccatgttcaagctatgacttgtgacttccgttttagactgaaaggtgaatttgggcttgtttagcacttcatttttcgtataaacactgtagttcattttttttccttctgatacctttcgtctttcctcaaaaagattctgtaagttacttttatgtcatccaagtgggttttgtgcatactgactttgacatgatatttccaccaagacgtttatatctg

SEQ ID NO: 123786 - DNA, 195 bp, Zea Mays
agttttagatattggtagtcaaaggtaaaaggaattgacttaggataaacaaacatacatgaatatatggttgtggtcagaggaggtagatgctatctaccttcatgttgggtcatgatattgcgatggcaactggcaaatgtacagtggatgacaaatgcaccgttccaactaaatagcctcttgtttttggtt

SEQ ID NO: 123787 - DNA, 2613 bp, Zea Mays
cgcacgccgaacggcgcctcctcgcaccgatcagcgcagcggctcagcgcccgccagccgccatcaggcagcagcctcgcctctggccattgaagcacacggaattgtctctttcacctgggcaatccgcggagaggtacggcgcgcatagctaaccaaggaggcgtacgagcagcgtgcgtagcaggcaaccatggagacgccgcgcctcgtggtcggtgcggcgtcgcgggccccgccaccagctcctcgatcacagcgacggcgtatcctgcgtccgtgcggcggggcacattgctccccctccgcccgcgctgctccaccggtgcttctaacccggtgctcctcctactcctcttccagggaggggaacggcgattctcatggtaaggcccgccgcgagagctccggttccgtccggttggacgtcgaagcagatagcgatcaggtaccaagtttggctgacgagcaacgtgagggtgatattacagagctcttcaacctggctcaacggaatatcctgtacattaacaagcagcggcttattgccatggaggagatgaagaaactgcatgatgaaaataatttgcttctcgaggaaatacaaggactagaaacagaaatgcaaggtattcccctagaagcagcacagtcgtcaagtttcagtgagttactcctgcggatagatacaatggtcatttctggaatgatcagcatgacggaagcatctgatttaagagagaaacttgtcactaatagaagcataatacaaagcaccttttgtgatattcatcataagccaaatactgaattgctgtctgaactgcaactctttttgcgtaaaccaatagagaaacctcttcatattgtgcacatctgtagtgaaatgtacccagtagcatcatgtggaccattatcagcatatgttgccagtttatcttgtgagattcaaaaaaaggctaacttggtggaggtgatactacccaagtacaccagcataaacttggatggaattcatggtctaaggagatctgaggcagaatatgaatcttatttcggtggcctttggcataaaaataaaatatggactggtacgtcaagtggtgttggtcttgtaataatagaaccatctcagctctcctattttagtcgtgatatgttacgtggctaccctgatgactttgagcgattttcctatttttcccgtgcatccctggattatattgttaaatctggaaagcggccagacattatacacatacataactgggaaactgctatagtggcaccgcttttctgggaaatatttgctcaccagggacttgggaacactcggatattactgacatgccaagacttgaattcagaatgcctagaggagccaaataaactggagatgtgtgggcttgatccccgtaagcttcatcgtcctgatcgtctgcaggatacaaacaagacacatcttgttaatattcttaagggaggcattgtttattcaaataaagtcgttttgatgtcctcaacacattcaaaagatgctcttattcagggttcacgacatgagctgcaatcaacattagccgcacatagggagaagatattggttgcatcttatggattggatggtgaactttgggatccattcaaagacatttatcttcctcgaaggtattctgccaatgatattgaggggaagtccatttgcagacaagcacttaggcgtagacttcggttcaatggtgattcatccattatagtaggatgtatctgtgatgataattcagatgtccatagtcttaaagaagcagttcatgttgctctgcacaggaatactcaggtcatcatcatggaaacgttagggtctgttgtgaactcaattttgcaagcattaaagggagagataaagggagacaaaatagcatttgttgaggcatatgatgaagctctggcacatttaatatatgcaggctctgatatcattctttgctcttccttccaagatccatcactgcaaatagcgatgaaggcaatgaagtatggatctgtgccagtacagttaaacttttccagcgatgaatcaagggagtcaaaggggcatgagtgccgcaatacagtaatgtctcagtacatcatctcaacctatggagatttgtctctttctcaagcacttgatgactttaaaaatgacccttcgcattgggatcgacagatcaaggatgggatggctaggggttcttcatgggacgcaaagtgctatagccttcattgggaggcttattcatccataacgaagctgtgaactgggcatctgctagagaagcacatgacctacatgaggcaccatctccccaaattaagggtaccattttttggcatataattagactatcatttaatttcttagatgaacatttaatcaagcaaaaggtcagtgaataaaaaatggtatgtagagctgcactggatttcacaatatttccaatttactattttgagtgtgcgtttttaggaacaagcatgaacagtgtcagtgcacttggcacatacacatcattctggacaaacaaacagtacccctccgttttaggggcctttttaaagcgtttttcaagg

SEQ ID NO: 123788 - DNA, 686 bp, Zea Mays
cgcacgccgaacggcgcctcctcgcaccgatcagcgcagcggctcagcgcccgccagccgccatcaggcagcagcctcgcctctggccattgaagcacacggaattgtctctttcacctgggcaatccgcggagaggtacggcgcgcatagctaaccaaggaggcgtacgagcagcgtgcgtagcaggcaaccatggagacgccgcgcctcgtggtcggtgcggcgtcgcgggccccgccaccagctcctcgatcacagcgacggcgtatcctgcgtccgtgcggcggggcacattgctccccctccgcccgcgctgctccaccggtgcttctaacccggtgctcctcctactcctcttccagggaggggaacggcgattctcatggtaaggcccgccgcgagagctccggttccgtccggttggacgtcgaagcagatagcgatcaggtaccaagtttggctgacgagcaacgtgagggtgatattacagagctcttcaacctggctcaacggaatatcctgtacattaacaagcagcggcttattgccatggaggagatgaagaaactgcatgatgaaaataatttgcttctcgaggaaatacaaggactagaaacagaaatgcaaggtgcggtctcggttgccaacattttcaggcttaggaactatatggatgataatgtga

SEQ ID NO: 123789 - DNA, 320 bp, Zea Mays
ttttttttttttgaaatctagctcgttatatgcccagctctacgtcctcctcggctggacacctgaggaggcgggcggggcggcggagcagatcggcccggcgcgccgcggcgacgcgcgggggatggacggggggcgggagtccacggggattccacaactcggactaggcggcgggggaggggggggggtagggcgtggcggtggtcgcgcccgcttcccttggctttcgtgcctttttcttccgcctccctcgctcccctccttgtcttcctgagctgtcggtgtcgcccgcccgcccgctcgccgcgacgcgctgc

SEQ ID NO: 123790 - DNA, 1963 bp, Zea Mays
gtcattcatggcagatacacaggtagtaagtagtaactgcagctgcaaagctggcagtgtcggtgtcggtgtcgtcgtcggcgtcggtgctggggagcgggcgagcggcgcgtcgcatgattctgtcctcctgacgtggcagctaacgattccgattccctttggttgcagtgcgacgacattgacatggacatggacatggcgcagctggagtggctgtcggggctcttcgacgacgcatccatcccgcacgagccggcgttccccggcgcggcgcccatcatcaagagctccgcgctggcggccggcgcgctgctgccgccggacaagatggaggacgcgctgctgttccgcagctccagccccatctcggtgctggagcacggcagcttcaacaacgccaacggcggtggcggcggctgctccgcgtcgtcggagtcgtcctcggcgtcctcgtcctcggagtctttctccggcagcgggagcgggagcggcgaaggccacgcgtggtcggcgcccgtgtcgccgccgcccgtgctcgtcataccggcgcgcgcgcggagcaagcgctcccgcccgtccgcgttcacgcgcgccggggcggaggcgcccaccatcctcgtgccgacgcccatgtactcgtccgggccgtcccactcggaccccgagagcatcgctgagtccagcccgcacccggcgccgcccatgaagaaaaagaagaaggccaagaagccgccggcgccgcccgcgcccgcctcttccgacgacaacgacggcgacgccgactacgaggaaggcggcgagcgcgcggagccgcagggcggcgccgtcaggaggtgcacgcactgccagatcgagaagacgccgcagtggcgcgcggggccgctggggcccaagacgctgtgcaacgcctgtggcgtgcgctacaagtccggccgcctgttcccggagtaccgtcccgcggcgagccccaccttcgtgccgtccatccactccaactcgcacaagaaggtggtggagatgcgccagaaggctgtccggagcggtgacccgtcgtgcgacctcctgcagttcatccgccgccgggattgacgtcccggcacggcgtcgccggactgtcggtcggtctcgtcccccttatagctagctatatagtatatgtatacatgctagtatgtatgcatgcatggttgcttcagcagtcgtcggtcgtcgtcgtcgtcgtccatcatggtcatcatcaccacttcaccggtcaccgccatggcatggatcccacccctcatcacatgcattggtttctgtcaacatccatccaatcccaatccatcgccgggcatcccggcgcgtttagttcattaggtcttctttctcatcgggggctagtgttattttacctttcttcttttctgtctattggttaattggttccccctgaatgtttttttgtttgtatagagagagaaagagagaggagggtgagaggagaggcaggagaaatagatgaatcagagtggttgctgcattgcagttgcagttgcttgcaggttaggtactaggtgagaaggagagctaaaccagcagcagagggagacagatctagagaggaaactttgcagctagtcagtcagtcagtcaatcaattagaagaaagcatggagagtgcttttaagcaaatgaaaggggaatttgttggtttgctaattagaagggaggttatgcagggcaggtcagtagtagctatcatcgtccatgatgattttaaaacttaagaagagggggacagccatcatccatcatagtctgtactctgtatccggagcttggtgtactgaactctgaaacttctttttgcagttcatctatgtttagggatttgataagtgttgtttggtttcttctatactagtagtgctacctcttagcgaataattaattatatatgcttttgctctcgttcttt

SEQ ID NO: 123791 - DNA, 1710 bp, Zea Mays
gtcattcatggcagatacacagtgcgacgacattgacatggacatggacatggcgcagctggagtggctgtcggggctcttcgacgacgcatccatcccgcacgagccggcgttccccggcgcggcgcccatcatcaagagctccgcgctggcggccggcgcgctgctgccgccggacaagatggaggacgcgctgctgttccgcagctccagccccatctcggtgctggagcacggcagcttcaacaacgccaacggcggtggcggcggctgctccgcgtcgtcggagtcgtcctcggcgtcctcgtcctcggagtctttctccggcagcgggagcgggagcggcgaaggccacgcgtggtcggcgcccgtgtcgccgccgcccgtgctcgtcataccggcgcgcgcgcggagcaagcgctcccgcccgtccgcgttcacgcgcgccggggcggaggcgcccaccatcctcgtgccgacgcccatgtactcgtccgggccgtcccactcggaccccgagagcatcgctgagtccagcccgcacccggcgccgcccatgaagaaaaagaagaaggccaagaagccgccggcgccgcccgcgcccgcctcttccgacgacaacgacggcgacgccgactacgaggaaggcggcgagcgcgcggagccgcagggcggcgccgtcaggaggtgcacgcactgccagatcgagaagacgccgcagtggcgcgcggggccgctggggcccaagacgctgtgcaacgcctgtggcgtgcgctacaagtccggccgcctgttcccggagtaccgtcccgcggcgagccccaccttcgtgccgtccatccactccaactcgcacaagaaggtggtggagatgcgccagaaggctgtccggagcggtgacccgtcgtgcgacctcctgcagttcatccgccgccgggattgacgtcccggcacggcgtcgccggactgtcggtcggtctcgtcccccttatagctagctatatagtatatgtatacatgctagtatgtatgcatgcatggttgcttcagcagtcgtcggtcgtcgtcgtcgtcgtccatcatggtcatcatcaccacttcaccggtcaccgccatggcatggatcccacccctcatcacatgcattggtttctgtcaacatccatccaatcccaatccatcgccgggcatcccggcgcgtttagttcattaggtcttctttctcatcgggggctagtgttattttacctttcttcttttctgtctattggttaattggttccccctgaatgtttttttgtttgtatagagagagaaagagagaggagggtgagaggagaggcaggagaaatagatgaatcagagtggttgctgcattgcagttgcagttgcttgcaggttaggtactaggtgagaaggagagctaaaccagcagcagagggagacagatctagagaggaaactttgcagctagtcagtcagtcagtcaatcaattagaagaaagcatggagagtgcttttaagcaaatgaaaggggaatttgttggtttgctaattagaagggaggttatgcagggcaggtcagtagtagctatcatcgtccatgatgattttaaaacttaagaagagggggacagccatcatccatcatagtctgtactctgtatccggagcttggtgtactgaactctgaaacttctttttgcagtt

SEQ ID NO: 123792 - DNA, 2096 bp, Zea Mays
tcgtatctttggaataagtaaatagcagccccggaggcgactgactgactggcgcaactgtgttgctcgatccatcgaagcagacgcaggcggcggattcgcggaggagagatgatgagggagcagagcctcctggaggcgacgtgcggcgacctcttcgaccacatcgacgacctgctcgacttccccaaggaggactcggccgccgacgtgctcctgctggacgcgccggcgccggggagcccgctgtcgtcggcgcgcatcatcgacgtcggccgcgccggcagtgcgcccgctccccccgcgctggcgccgtcgcttcccgcgcagcaagacaccaccgccttcttcgccgccgcggggcccgacgtgttcgaccccagggacgtcggcgctcacctcggctcgtgcgacgacattgacatggacatggacatggcgcagctggagtggctgtcggggctcttcgacgacgcatccatcccgcacgagccggcgttccccggcgcggcgcccatcatcaagagctccgcgctggcggccggcgcgctgctgccgccggacaagatggaggacgcgctgctgttccgcagctccagccccatctcggtgctggagcacggcagcttcaacaacgccaacggcggtggcggcggctgctccgcgtcgtcggagtcgtcctcggcgtcctcgtcctcggagtctttctccggcagcgggagcgggagcggcgaaggccacgcgtggtcggcgcccgtgtcgccgccgcccgtgctcgtcataccggcgcgcgcgcggagcaagcgctcccgcccgtccgcgttcacgcgcgccggggcggaggcgcccaccatcctcgtgccgacgcccatgtactcgtccgggccgtcccactcggaccccgagagcatcgctgagtccagcccgcacccggcgccgcccatgaagaaaaagaagaaggccaagaagccgccggcgccgcccgcgcccgcctcttccgacgacaacgacggcgacgccgactacgaggaaggcggcgagcgcgcggagccgcagggcggcgccgtcaggaggtgcacgcactgccagatcgagaagacgccgcagtggcgcgcggggccgctggggcccaagacgctgtgcaacgcctgtggcgtgcgctacaagtccggccgcctgttcccggagtaccgtcccgcggcgagccccaccttcgtgccgtccatccactccaactcgcacaagaaggtggtggagatgcgccagaaggctgtccggagcggtgacccgtcgtgcgacctcctgcagttcatccgccgccgggattgacgtcccggcacggcgtcgccggactgtcggtcggtctcgtcccccttatagctagctatatagtatatgtatacatgctagtatgtatgcatgcatggttgcttcagcagtcgtcggtcgtcgtcgtcgtcgtccatcatggtcatcatcaccacttcaccggtcaccgccatggcatggatcccacccctcatcacatgcattggtttctgtcaacatccatccaatcccaatccatcgccgggcatcccggcgcgtttagttcattaggtcttctttctcatcgggggctagtgttattttacctttcttcttttctgtctattggttaattggttccccctgaatgtttttttgtttgtatagagagagaaagagagaggagggtgagaggagaggcaggagaaatagatgaatcagagtggttgctgcattgcagttgcagttgcttgcaggttaggtactaggtgagaaggagagctaaaccagcagcagagggagacagatctagagaggaaactttgcagctagtcagtcagtcagtcaatcaattagaagaaagcatggagagtgcttttaagcaaatgaaaggggaatttgttggtttgctaattagaagggaggttatgcagggcaggtcagtagtagctatcatcgtccatgatgattttaaaacttaagaagagggggacagccatcatccatcatagtctgtactctgtatccggagcttggtgtactgaactctgaaacttctttttgcagtt

SEQ ID NO: 123793 - DNA, 2332 bp, Zea Mays
aaaaagaatacgaattcattcgcctccctgccctccatatgcagtcgtcgtcgtatctttggaataagtaaatagcaggtgaaagtataatcggcgttgccttagtttcattccatttttttgtgattagtgcatgcgtatccagcctgatttgcatgcattttgcgcattgatatggaggatattcatcgtcttctatcttctgcctatctatcccttcctttacactttatttattcataaatatacgtccatccaacgcagccccggaggcgactgactgactggcgcaactgtgttgctcgatccatcgaagcagacgcaggcggcggattcgcggaggagagatgatgagggagcagagcctcctggaggcgacgtgcggcgacctcttcgaccacatcgacgacctgctcgacttccccaaggaggactcggccgccgacgtgctcctgctggacgcgccggcgccggggagcccgctgtcgtcggcgcgcatcatcgacgtcggccgcgccggcagtgcgcccgctccccccgcgctggcgccgtcgcttcccgcgcagcaagacaccaccgccttcttcgccgccgcggggcccgacgtgttcgaccccagggacgtcggcgctcacctcggctcgtgcgacgacattgacatggacatggacatggcgcagctggagtggctgtcggggctcttcgacgacgcatccatcccgcacgagccggcgttccccggcgcggcgcccatcatcaagagctccgcgctggcggccggcgcgctgctgccgccggacaagatggaggacgcgctgctgttccgcagctccagccccatctcggtgctggagcacggcagcttcaacaacgccaacggcggtggcggcggctgctccgcgtcgtcggagtcgtcctcggcgtcctcgtcctcggagtctttctccggcagcgggagcgggagcggcgaaggccacgcgtggtcggcgcccgtgtcgccgccgcccgtgctcgtcataccggcgcgcgcgcggagcaagcgctcccgcccgtccgcgttcacgcgcgccggggcggaggcgcccaccatcctcgtgccgacgcccatgtactcgtccgggccgtcccactcggaccccgagagcatcgctgagtccagcccgcacccggcgccgcccatgaagaaaaagaagaaggccaagaagccgccggcgccgcccgcgcccgcctcttccgacgacaacgacggcgacgccgactacgaggaaggcggcgagcgcgcggagccgcagggcggcgccgtcaggaggtgcacgcactgccagatcgagaagacgccgcagtggcgcgcggggccgctggggcccaagacgctgtgcaacgcctgtggcgtgcgctacaagtccggccgcctgttcccggagtaccgtcccgcggcgagccccaccttcgtgccgtccatccactccaactcgcacaagaaggtggtggagatgcgccagaaggctgtccggagcggtgacccgtcgtgcgacctcctgcagttcatccgccgccgggattgacgtcccggcacggcgtcgccggactgtcggtcggtctcgtcccccttatagctagctatatagtatatgtatacatgctagtatgtatgcatgcatggttgcttcagcagtcgtcggtcgtcgtcgtcgtcgtccatcatggtcatcatcaccacttcaccggtcaccgccatggcatggatcccacccctcatcacatgcattggtttctgtcaacatccatccaatcccaatccatcgccgggcatcccggcgcgtttagttcattaggtcttctttctcatcgggggctagtgttattttacctttcttcttttctgtctattggttaattggttccccctgaatgtttttttgtttgtatagagagagaaagagagaggagggtgagaggagaggcaggagaaatagatgaatcagagtggttgctgcattgcagttgcagttgcttgcaggttaggtactaggtgagaaggagagctaaaccagcagcagagggagacagatctagagaggaaactttgcagctagtcagtcagtcagtcaatcaattagaagaaagcatggagagtgcttttaagcaaatgaaaggggaatttgttggtttgctaattagaagggaggttatgcagggcaggtcagtagtagctatcatcgtccatgatgattttaaaacttaagaagagggggacagccatcatccatcatagtctgtactctgtatccggagcttggtgtactgaactctgaaacttctttttgcagtt

SEQ ID NO: 123794 - DNA, 2464 bp, Zea Mays
cagtcctccttataattggagttgcacaagccgctcagcaaccttcttcttcatcttctccagtcctccctcccgccccgtccatcgacacagcagcttgcttgtcaccaagctagccaagcaggaggagtaagagtacagccagagagagagagagagagagagagagagagtgcaccaccctgattccacccaccgctgtcccttgcttatttacaggcgttcgtgatcaccaacagctactcgtcagctagagagagtgcaacgggccgggcagagctagagagagagagagagaaagcggccttctttttctgtgttcaccaagcaacaaccccagtccaagctctccgtgttggccgatcgtttccggcgaacagagcaagcaactcacagccccggaggcgactgactgactggcgcaactgtgttgctcgatccatcgaagcagacgcaggcggcggattcgcggaggagagatgatgagggagcagagcctcctggaggcgacgtgcggcgacctcttcgaccacatcgacgacctgctcgacttccccaaggaggactcggccgccgacgtgctcctgctggacgcgccggcgccggggagcccgctgtcgtcggcgcgcatcatcgacgtcggccgcgccggcagtgcgcccgctccccccgcgctggcgccgtcgcttcccgcgcagcaagacaccaccgccttcttcgccgccgcggggcccgacgtgttcgaccccagggacgtcggcgctcacctcggctcgtgcgacgacattgacatggacatggacatggcgcagctggagtggctgtcggggctcttcgacgacgcatccatcccgcacgagccggcgttccccggcgcggcgcccatcatcaagagctccgcgctggcggccggcgcgctgctgccgccggacaagatggaggacgcgctgctgttccgcagctccagccccatctcggtgctggagcacggcagcttcaacaacgccaacggcggtggcggcggctgctccgcgtcgtcggagtcgtcctcggcgtcctcgtcctcggagtctttctccggcagcgggagcgggagcggcgaaggccacgcgtggtcggcgcccgtgtcgccgccgcccgtgctcgtcataccggcgcgcgcgcggagcaagcgctcccgcccgtccgcgttcacgcgcgccggggcggaggcgcccaccatcctcgtgccgacgcccatgtactcgtccgggccgtcccactcggaccccgagagcatcgctgagtccagcccgcacccggcgccgcccatgaagaaaaagaagaaggccaagaagccgccggcgccgcccgcgcccgcctcttccgacgacaacgacggcgacgccgactacgaggaaggcggcgagcgcgcggagccgcagggcggcgccgtcaggaggtgcacgcactgccagatcgagaagacgccgcagtggcgcgcggggccgctggggcccaagacgctgtgcaacgcctgtggcgtgcgctacaagtccggccgcctgttcccggagtaccgtcccgcggcgagccccaccttcgtgccgtccatccactccaactcgcacaagaaggtggtggagatgcgccagaaggctgtccggagcggtgacccgtcgtgcgacctcctgcagttcatccgccgccgggattgacgtcccggcacggcgtcgccggactgtcggtcggtctcgtcccccttatagctagctatatagtatatgtatacatgctagtatgtatgcatgcatggttgcttcagcagtcgtcggtcgtcgtcgtcgtcgtccatcatggtcatcatcaccacttcaccggtcaccgccatggcatggatcccacccctcatcacatgcattggtttctgtcaacatccatccaatcccaatccatcgccgggcatcccggcgcgtttagttcattaggtcttctttctcatcgggggctagtgttattttacctttcttcttttctgtctattggttaattggttccccctgaatgtttttttgtttgtatagagagagaaagagagaggagggtgagaggagaggcaggagaaatagatgaatcagagtggttgctgcattgcagttgcagttgcttgcaggttaggtactaggtgagaaggagagctaaaccagcagcagagggagacagatctagagaggaaactttgcagctagtcagtcagtcagtcaatcaattagaagaaagcatggagagtgcttttaagcaaatgaaaggggaatttgttggtttgctaattagaagggaggttatgcagggcaggtcagtagtagctatcatcgtccatgatgattttaaaacttaagaagagggggacagccatcatccatcatagtctgtactctgtatccggagcttggtgtactgaactctgaaacttctttttgcagtt

SEQ ID NO: 123795 - DNA, 205 bp, Zea Mays
gaggcgagctgcagtggcgcggcacaggaaaatggacagagcagaactgaagcaccactacgcgcagtggagagccacgacgcgggcgcaggagaagcagagaggtccggccgacggcgtcgttggacgagcaggagccagggaggaagaagaacacatagagcagggagacttggcgaccgagcaccagagagctgcagcgcgg

SEQ ID NO: 123796 - DNA, 504 bp, Zea Mays
atgaaactgcaactgatcacttgggacggaaatatgcagctcgccattggtataacagacggtcactatggtcttggtctaccagagctatgttctcaatccttttcgtacgtcctaattcctagacctcaatctagttttcctccctctggtgctgctggacaaacaaaaggcattccttccttgcccttaaccttgcctagttttcaatggagagtgcaattgcattgctgcctcagtgattcggtctgccgcttctgcaactcgttatccttctgcaacaactcaagatgcctggctgcaccagctaatgaggccttaacctttgaaagttcatcatgcaactgcctgtttttctctatttctttatcatatttcatcctccattcggcagattcatccatcgcttctaggtttgcttgttcaaattgcctccggagctcctcgcggtcgtcggcggtgaaggaggggtcgctggactggcgggcccagatgcggaagtag

SEQ ID NO: 123797 - DNA, 551 bp, Zea Mays
caacaacgtttctacattgcagtgatgcccaagacgtgctgttacgacatattgctggttgattgtagaattcctaagttttgtgttcttttaacacctggttctaatgatcttgtgagtgcagctgctggactgcgcggcagaagcgctgctagtaaaacccagatcgtcagtgaggtggagaagaacgtgtggcccgccgtcgctgctggcaaggtgaacccggtgatctacaagacattcccgttatccgaagcagctgatgctcatcggttgatcgaatctagcatgcacattggcaaaatactgctgctcccatgactccatgtccagtgtctgctgtcaaactcttggagagagtcagctaaagcgagctacaaactcctgtaacgacctctaaacatactactatcatgtactggtgtgtagcatgcctttctatattttgttagttcgatccttgatactgccgatgaaactgttctgtgaaccgtggtgcacagtaatacattatggttggttgctacagtaccttgatgtcagcttgttta

SEQ ID NO: 123798 - DNA, 1368 bp, Zea Mays
tgttcccagcagagccagtgcaattatcggaagcaactgcagagctgcagcgaccaagcggacgacgcgagagagatgagggcggtggtgatcacgcgcggcggcggcggcccggaggtgctggaggcgcaggaggtagaggaccccgcgccgctgggcgacggcgaggtcctcctccaggtggtcgccgcgggcgtcaaccgcgccgacacgctccagcgccacggccgccacccgccgcccgccggcgcccccccgtacccggggctcgagtgctccggcaccatcctcgcgctcggccccaacgccccaccacggtgggccgtcggcgacaaggtctgcgcgctgcttagcggcggcgggtacgccgagaaggtggtggtgccggcgggacagctgctgccggtgccggagggcgtgtcccttgcggacgcggccggcttacccgaggtggcatgcaccgtctggtccaccgtcttcatgaagtcatgaccagccacctctcccccggagaatcgttccttatacatgggggatcaagtggaattggtacgttcgctatacagattgcgaagcacctcggaattatggtttttgtcacagcaggaactgaagaaaaattagcggcctgcaaaggtttgggtgccgatgtatgcataaactacaaaaccgaagattttgttgagcgtgtcaaacaggaaacaaatgggaaagcggtaatgtgtcaaggcattataaccagattaatatgtggtaccaactggaatctgaacatctaccaggtgttgatgtaatccttgacaacatcggaggaccatatctcgagcgcaatctgaacagcctaggtgttgatggtagacttttcatcatcggcttccaaggcggcgctgtagctgaagtgaacctgcaagcggtgtttgcgtggcgtttaaccatacaagctgctggactgcgcggcagaagcgctgctagtaaaacccagatcgtcagtgaggtggagaagaacgtgtggcccgccgtcgctgctggcaaggtgaacccggtgatctacaagacattcccgttatccgaagcagctgatgctcatcggttgatcgaatctagcatgcacattggcaaaatactgctgctcccatgactccatgtccagtgtctgctgtcaaactcttggagagagtcagctaaagcgagctacaaactcctgtaacgacctctaaacatactactatcatgtactggtgtgtagcatgcctttctatattttgttagttcgatccttgatactgccgatgaaactgttctgtgaaccgtggtgcacagtaatacattatggttggttgctacagtaccttgatgtcagcttgttta

SEQ ID NO: 123799 - DNA, 1311 bp, Zea Mays
gtgaaaaatcgtgttcccagcagagccagtgcaattatcggaagcaactgcagagctgcagcgaccaagcggacgacgcgagagagatgagggcggtggtgatcacgcgcggcggcggcggcccggaggtgctggaggcgcaggaggtagaggaccccgcgccgctgggcgacggcgaggtcctcctccaggtggtcgccgcgggcgtcaaccgcgccgacacgctccagcgccacggccgccacccgccgcccgccggcgcccccccgtacccggggctcgagtgctccggcaccatcctcgcgctcggccccaacgccccaccacggtgggccgtcggcgacaaggtctgcgcgctgcttagcggcggcgggtacgccgagaaggtggtggtgccggcgggacagctgctgccggtgccggagggcgtgtcccttgcggacgcggccggcttacccgaggtggcatgcaccgtctggtccaccgtcttcatgaagtcatgaccagccacctctcccccggagaatcgttccttatacatgggggatcaagtggaattggtacgttcgctatacagattgcgaagcacctcggaattatggtttttgtcacagcaggaactgaagaaaaattagcggcctgcaaaggtttgggtgccgatgtatgcataaactacaaaaccgaagattttgttgagcgtgtcaaacaggaaacaaatgggaaaggtgttgatgtaatccttgacaacatcggaggaccatatctcgagcgcaatctgaacagcctaggtgttgatggtagacttttcatcatcggcttccaaggcggcgctgtagctgaagtgaacctgcaagcggtgtttgcgtggcgtttaaccatacaagctgctggactgcgcggcagaagcgctgctagtaaaacccagatcgtcagtgaggtggagaagaacgtgtggcccgccgtcgctgctggcaaggtgaacccggtgatctacaagacattcccgttatccgaagcagctgatgctcatcggttgatcgaatctagcatgcacattggcaaaatactgctgctcccatgactccatgtccagtgtctgctgtcaaactcttggagagagtcagctaaagcgagctacaaactcctgtaacgacctctaaacatactactatcatgtactggtgtgtagcatgcctttctatattttgttagttcgatccttgatactgccgatgaaactgttctgtgaaccgtggtgcacagtaatacattatggttggttgctacagtaccttgatgtcagcttgttta

SEQ ID NO: 123800 - DNA, 1209 bp, Zea Mays
gccatgggctccttgtactgcgacgccgccgcctcgccgaccatctccagcaccggaagcagcaccggcagcagtggcaatgtcgccggcgttggcggcgacggcgacggcgacggcgacggcagcgtcaagatatacgcgtgcttcgcgctcggcagctccaacagtctcgagtgctacgagcctggagccaacacgtggcgccgcgtgggcgcgctccccggcgtccccgacggccacatactgaaggggttcgccgtggcgacgctgggcgagtccgtgtacgtcataggcggccggctctgccggagggagcgtggagccgcggccggcggctaccgcgacgccgacgtcggcgtgagggcagacgtactgcggtacgacgcgcgccggggggagtggcaccactgcgcgccgctcctggtcccgcggttcgacttcgcgtgcgctccgtgccggggcaggatctgcgtggccggcgggcagcgctcgctgtccggcgcccggggcacggcggcggccgaggtgtacgacgcggagaaggggcagtggtcggcgctccccgacatgagcacgctgcgctacaagtgcgtcggcgtcacgtggcagggcagcttccacgtcgtggggggctttgcggagagcgcgctgacggcctgcgacacctccctcctggcgcccggcggagccaccgccgtgctgcagtcgtcggcgctggagcggagctcggccgaggtgttccactgcgcgaggggcacgtgggagatcctcccggggatgtggcagctcgacgtgcccccgaaccagatcgtggcggtggccaacaggctgttcagctccggcgactgcctcaccagctggaagggacacgtcgaggtctacgacggcgagctcaacatctggagcatcgtggaccactccgccctgcccgacctgtcgctgctcgccagtctcccgtcttcagctcagcggctctacctcaccatggccgtcgtcggcacgcagctctatttcctcgccggctaccaggtgccgtcgggcgacgacagcttccgaacagtctcgctagtgcacagcttcgacaccagcgctgcaccggggctggcgccggcgtggagcagcttccggcccgagatgagtcacgaggacgccgaggacggcggcaaggagctgttcagccagtgctgcacggtgcagctctccaactaa

SEQ ID NO: 123801 - DNA, 1484 bp, Zea Mays
attaatctccccgcgttccccttccctcgcgccgccgctcccccctcccaaagctcgccccgctcccagctagggtttcctcttcccatccacagccgccggggcgccgccgacgaggacagcgccgccacgatgttggagttgcgtctggtgcaggggagcctcctcaagaaggtcttggaggcgatccgcgagctggtcacggacgccaacttcgactgctccgggaccgggttctcgctgcaggccatggactcgagccacgtcgcgctcgtcgcgctgctccttcgcgccgagggcttcgagcactaccgctgcgaccgcaacctctccatgggcatgaacctcaacaacatggccaagatgctccgctgcgctggcaacgaggacatcatcaccatcaaggccgacgacggctccgacaccgtcactttcatgttcgagtcgcccagtgagtggccgttccttctctctatttttttcttcactatttctgggcgctctttcaccccaaccaccgtcgttgttcccgtgtggaaatgatcagagcaagataagatcgcggatttcgagatgaaactgatggacattgatagcgagcacctcggaatcccggattccgagtaccaggccatcgtccgcatgccttctgctgagtttatgaggatctgcaaagatcttagcagcatcggagacacaggtagagaagattttttttcttggtgattttactgccatggatggtgtaagtctttgttgactgagcagttggcgttatcttgtcgcagtcgtcatctcggtgactaaggagggcgtgaagttctccacatctggagaaattgggagtgcaaacattgtctgcaggcagaaccaaactattgacaagccagaagaggctaccattatagagatgcaggagccggtttccctgacctttgccctgcggtacatgaactccttcaccaaggcgtcttcactgtctgagcaagtcactatcagcctgtcgtccgagcttccagtggtggtcgagtacaagatcgctgagatgggttacattagattttacctggcccccaagatcgacgatgacgaggagatgaagccctgatggcctgtgacgacataatgctcgtgttgcctgctcttccttccagccgttgtttgcttagctactctttgcaagcgaagaagggatgtgatgtgtatctcttaggctagactgcttcagctagttttctgtgactgctacatgaatccatggattactgatttactgggcttgtgctttgtgtatgatgctgccatctggtctcccaacaaagaagggatgtggtgtgtatctcttaggcctggttttcttttttcttggcataagtgtcatcattcatcaagttctccttgtggcggtggcaaggaagttgaaaaagctgaacgtgatgtgtttgctgccgatgaaccctaaagtagggcccctcgaagtggaa

SEQ ID NO: 123802 - DNA, 1795 bp, Zea Mays
gactggagggaccgagcttgtgctgagcagcagagatggcgggaaatgctgcgtctcccgcctcagtttcggatgccccgccctttcccaaaccggccaccgccgccgcccgtgtctccccaccgacaggtgggtccaatccttaaccacggaccagggcccccacctgtcaggtggaccttccgaagcaaggatcggccaggcgggaaaacatttcgcggcaggtggcggttgcgccaaatttctccctcccttttccgttcggcgtccccaaacgcctccctattaatctccccgcgttccccttccctcgcgccgccgctcccccctcccaaagctcgccccgctcccagctagggtttcctcttcccatccacagccgccggggcgccgccgacgaggacagcgccgccacgatgttggagttgcgtctggtgcaggggagcctcctcaagaaggtcttggaggcgatccgcgagctggtcacggacgccaacttcgactgctccgggaccgggttctcgctgcaggccatggactcgagccacgtcgcgctcgtcgcgctgctccttcgcgccgagggcttcgagcactaccgctgcgaccgcaacctctccatgggcatgaacctcaacaacatggccaagatgctccgctgcgctggcaacgaggacatcatcaccatcaaggccgacgacggctccgacaccgtcactttcatgttcgagtcgcccaagcaagataagatcgcggatttcgagatgaaactgatggacattgatagcgagcacctcggaatcccggattccgagtaccaggccatcgtccgcatgccttctgctgagtttatgaggatctgcaaagatcttagcagcatcggagacacagtcgtcatctcggtgactaaggagggcgtgaagttctccacatctggagaaattgggagtgcaaacattgtctgcaggcagaaccaaactattgacaaggtaccttgttataaccctgtatgtcgcttcatgtgctgaattctgttgtgcctgttttgatgaattggctgtaccatagtagtaatgtactagtagctttaaaaaagttgcagcattagtgatgggttctcaatgctgtaccaatgcaaaaatattgcagcatacaaaagatgactgcactggctaatggatgctgttttggtgaatgcagccagaagaggctaccattatagagatgcaggagccggtttccctgacctttgccctgcggtacatgaactccttcaccaaggcgtcttcactgtctgagcaagtcactatcagcctgtcgtccgagcttccagtggtggtcgagtacaagatcgctgagatgggttacattagattttacctggcccccaagatcgacgatgacgaggagatgaagccctgatggcctgtgacgacataatgctcgtgttgcctgctcttccttccagccgttgtttgcttagctactctttgcaagcgaagaagggatgtgatgtgtatctcttaggctagactgcttcagctagttttctgtgactgctacatgaatccatggattactgatttactgggcttgtgctttgtgtatgatgctgccatctggtctcccaacaaagaagggatgtggtgtgtatctcttaggcctggttttcttttttcttggcataagtgtcatcattcatcaagttctccttgtggcggtggcaaggaagttgaaaaagctgaacgtgatgtgtttgctgccgatgaaccctaaagtagggcccctcgaagtggaa

SEQ ID NO: 123803 - DNA, 1460 bp, Zea Mays
gactggagggaccgagcttgtgctgagcagcagagatggcgggaaatgctgcgtctcccgcctcagtttcggatgccccgccctttcccaaaccggccaccgccgccgcccgtgtctccccaccgacaggtgggtccaatccttaaccacggaccagggcccccacctgtcaggtggaccttccgaagcaaggatcggccaggcgggaaaacatttcgcggcaggtggcggttgcgccaaatttctccctcccttttccgttcggcgtccccaaacgcctccctattaatctccccgcgttccccttccctcgcgccgccgctcccccctcccaaagctcgccccgctcccagctagggtttcctcttcccatccacagccgccggggcgccgccgacgaggacagcgccgccacgatgttggagttgcgtctggtgcaggggagcctcctcaagaaggtcttggaggcgatccgcgagctggtcacggacgccaacttcgactgctccgggaccgggttctcgctgcaggccatggactcgagccacgtcgcgctcgtcgcgctgctccttcgcgccgagggcttcgagcactaccgctgcgaccgcaacctctccatgggcatgaacctcaacaacatggccaagatgctccgctgcgctggcaacgaggacatcatcaccatcaaggccgacgacggctccgacaccgtcactttcatgttcgagtcgcccaagcaagataagatcgcggatttcgagatgaaactgatggacattgatagcgagcacctcggaatcccggattccgagtaccaggccatcgtccgcatgccttctgctgagtttatgaggatctgcaaagatcttagcagcatcggagacacagtcgtcatctcggtgactaaggagggcgtgaagttctccacatctggagaaattgggagtgcaaacattgtctgcaggcagaaccaaactattgacaagccagaagaggctaccattatagagatgcaggagccggtttccctgacctttgccctgcggtacatgaactccttcaccaaggcgtcttcactgtctgagcaagtcactatcagcctgtcgtccgagcttccagtggtggtcgagtacaagatcgctgagatgggttacattagattttacctggcccccaagatcgacgatgacgaggagatgaagccctgatggcctgtgacgacataatgctcgtgttgcctgctcttccttccagccgttgtttgcttagctactctttgcaagcgaagaagggatgtgatgtgtatctcttaggctagactgcttcagctagttttctgtgactgctacatgaatccatggattactgatttactgggcttgtgctttgtgtatgatgctgccatctggtctcccaacaaagaagggatgtggtgtgtatctcttaggcctggttttctt

SEQ ID NO: 123804 - DNA, 1775 bp, Zea Mays
gactggagggaccgagcttgtgctgagcagcagagatggcgggaaatgctgcgtctcccgcctcagtttcggatgccccgccctttcccaaaccggccaccgccgccgcccgtgtctccccaccgacaggtgggtccaatccttaaccacggaccagggcccccacctgtcaggtggaccttccgaagcaaggatcggccaggcgggaaaacatttcgcggcaggtggcggttgcgccaaatttctccctcccttttccgttcggcgtccccaaacgcctccctattaatctccccgcgttccccttccctcgcgccgccgctcccccctcccaaagctcgccccgctcccagctagggtttcctcttcccatccacagccgccggggcgccgccgacgaggacagcgccgccacgatgttggagttgcgtctggtgcaggggagcctcctcaagaaggtcttggaggcgatccgcgagctggtcacggacgccaacttcgactgctccgggaccgggttctcgctgcaggccatggactcgagccacgtcgcgctcgtcgcgctgctccttcgcgccgagggcttcgagcactaccgctgcgaccgcaacctctccatgggcatgaacctcaacaacatggccaagatgctccgctgcgctggcaacgaggacatcatcaccatcaaggccgacgacggctccgacaccgtcactttcatgttcgagtcgcccagtgagtggccgttccttctctctatttttttcttcactatttctgggcgctctttcaccccaaccaccgtcgttgttcccgtgtggaaatgatcagagcaagataagatcgcggatttcgagatgaaactgatggacattgatagcgagcacctcggaatcccggattccgagtaccaggccatcgtccgcatgccttctgctgagtttatgaggatctgcaaagatcttagcagcatcggagacacaggtagagaagattttttttcttggtgattttactgccatggatggtgtaagtctttgttgactgagcagttggcgttatcttgtcgcagtcgtcatctcggtgactaaggagggcgtgaagttctccacatctggagaaattgggagtgcaaacattgtctgcaggcagaaccaaactattgacaaggtaccttgttataaccctgtatgtcgcttcatgtgctgaattctgttgtgcctgttttgatgaattggctgtaccatagtagtaatgtactagtagctttaaaaaagttgcagcattagtgatgggttctcaatgctgtaccaatgcaaaaatattgcagcatacaaaagatgactgcactggctaatggatgctgttttggtgaatgcagccagaagaggctaccattatagagatgcaggagccggtttccctgacctttgccctgcggtacatgaactccttcaccaaggcgtcttcactgtctgagcaagtcactatcagcctgtcgtccgagcttccagtggtggtcgagtacaagatcgctgagatgggttacattagattttacctggcccccaagatcgacgatgacgaggagatgaagccctgatggcctgtgacgacataatgctcgtgttgcctgctcttccttccagccgttgtttgcttagctactctttgcaagcgaagaagggatgtgatgtgtatctcttaggctagactgcttcagctagttttctgtgactgctacatgaatccatggattactgatttactgggct

SEQ ID NO: 123805 - DNA, 1648 bp, Zea Mays
atggcgcgtcgcggtcttcctccttttgtccaaggttttggtgtatgcgtcgtcgtgtttcttttggcgttgtgcggcccgtctggcgaagtcgtacattgtgttgagctcaacaacaatgactctggaagggctttgtatttggggttgccgctgcctgtgttgtttagacactatgtgtcggcgccaacgcgatatgccatgatttatgaagccgggcttgcagaagagagtaagctgacgtatgtcgaggagcagcttggggacgccatcgttggggagagcgagcagctccagcgccctctcggaaatcctagactgaaagaaggtacgtcacttcgcatcagtaccgcgaaattggcaaagctcaaatcaaactgtatttcgatgatacggcaggaagtggtgtacttgcgggcctccgactcgtcgtagaacacatccggcggcgcctggaactcaggccgaggcatcttcactctcctccgagttgccgctctcctcggtttctcgcctcgcaggcacaaacgttgctggtgccgctggctaacgaatcgaagccagtatgggccgagttccgttttctcagaagacttctgagctcaattgccagttagcgagccccgcgggacatttacatgggccacataacagccggcccagtaaagcgtggcgtttataaatcttctcaaccgtctagggcatcgtttgcagcagcagcagcagccgccgacgccgacgtaaaagcccgagtcgctcgtctcttcccagatcctccgagcacaacagctctccgtcgccgtcgccatgggtaaggttcacggatcgcttgcccgcgcggggaaggtgcgtgggcagacgcccaaggtggcgaagcaggacaagaagaagaagccccgcggccgcgcgtacaagcgcatgcagtacaaccgccgcttcgtcaccgccgtcgtcggattcggcaagaaacgcggccccaactcctcggagaagtagatatagccatgtctttgtgttttggtcccccactagtttccttgtactgatggcaagttgctgaagacttatatgctattattatctgtatcgatgtgttactgcaacactatgaaatatggtatgcatcgttgagctaatcacgttgcctgtggaggcgatctttttagttgtctcgaatgttgttcgtcttgttttgaaattggtgacacaggagtctcggtctattctgtttcagtttgtcctgctgatagtggagtgcaattgtgaattgtgataagtaggctgagcaaattgtactgcttgtgtagtttgttttgtttgatttgtgtgggcacacttgaaattggcgtgagtctagtaacataagttgtgccattttgctcagaagccttacatatgagttctttctggttcataatttgcttgtttagaagcagagttctagaacgtgaactgtctgtctgaagcagagctctagaacctgaactgtccgtctgattggttgctgcttactttgtgctgcactgaaattggtagtggtgtctgtctaattcatctatggcaatcctgttttattattatatgcctcgtttggttgatcaagtgaagtttaaaatagtggttgatcaagtgaagtcttttgcacggc

SEQ ID NO: 123806 - DNA, 2747 bp, Zea Mays
atccaccatgtgaccatgtcttctccgctccatccctaaaactgccttccgctcatggtcatgggctcatggcgctcacgtcgttcccgttcgcgccatccaacacctcgctgtcctactcctcccgcgcctcaaccgccgccgcgttcgctcctcgtggggttcactttgccgcgcccggaaggagcggcggcggccaaccgctcgcgtgcgctgcgcctcggtgccgcggacgggctccgaggcggcggcgcggagggggcctgctggtctgggcagcggctgactactacgcgacgctgggcgtgccgcgcgccgcgagtaacaaggacatcaaggccgcgtaccggaagctcgcgcgccaggttctcgacgcttgcctcacatcaaaccccaccattcctcgtctcaccgcgaggcaaccgtgcatagttgggctgattggttggccggccgtgcgaagccgggtccgcgcaagcctggccagccgcatacgcaggattcgagcgtaccggtggatgcagaaaaatagcagtaagatgaattattttgcatctactcgtgcagctcacgtctggcacatacagtaccatcctgatgtcaataaggagccgggagcgaccgaaaagtttaaagagataagtgcagcatatgaggtgctgtcagatgaaaagaagaggacgttgtatgaccaatatggtgaagctggggttaagagtgcggttggaggctcgggtggagcttacacaaccaacccatttgatttgtttgagacattctttggaggcagcatgggtggtttttctggcatggaccagagcacgtttaggacaagcaggcaaaatactgttttacagggtgaagacatcagatatgatgtggttttggggttcacagaggcgatatttggaacagagaaatatattatactatctcatttggaaacatgtgatacatgtggtggttctggatcaaaagctggctccaagatgagaatatgttcgacatgtggtgggcgagggcaagtaatgcgaactgagcaaacaccatttggtctgttctcccaggtttctatttgccccacttgcgcaggagagggcgaagtcatctcagagtattgtaggaaatgttctggagaggggcgtatccgtgtcaggaaggagatcaaagtaaaaatccctccaggagtgagcaaaggcagtactcttcgtgtacgtggggaaggtgatgcaggatcaaaaggtgggcctcctggagatctctttgtttgcctcgatatagaggagccatcagatatcaagagggatggtataaacttgtattcaactgtgtcaataagctatcttgaagctattttgggcaccattaagaaggtcagaacagttgatggaaccaatgaccttcgaatacctccaggtacccaacctggtgatgtaattgccttagcgaagcaaggggttccatcattgaataagccgactatacgtggtgatcatctgttcactgttaaagttgcaatacccaagcgcataagtgggcgcgaaagggaattactggaggaacttgcatctttgagtaatggtggctttgttcgaacagatgccaagccaaaacctgcccagccaaaacgtgtacatctagagaaagaagttggtgctagccaagaagatacagacaaatctaaagcagcgggtgattggttgaagaaacttacacattttgctgggtcaattgctaatggtgctgcaaagtggctgaaagaaaacctgtaggctgtaaatatttactgcaggatagaagatttcttcagttaccatggtgctgtagtccaatctccaattcttagattcattggggtccccaagagctcttacatttttgttttgttttgttggagagtttcaagattttcaggctgtgagtaacaaccgagggagtgagaattgtctactaatactgtcggcatattggtcccttgtcattcttgcaaagcaattattttttatgtagttggagttattttcagtttggcaagtgcatgcagcagtctgaaagagtgaaagttcgccctgaaagttatgggatgctgctgctggtcccaaaccttgagacttagacaacactgtaaatatgtctctgttcctgattctgtacttgaggttttgggttaatcaaattcaagatcaacgggcgttctttttctgatttcttctggagctgcaaagcttgcatcgagcgatgccaaaaaaagatcattcagcagagttcaaacattttcatcttacaatgaagctatcattagaaacaagtttcagtaatctcgaattctaggtttcgtggagtcctcgcgtcgtatcactatcaatccaccgagctcgctttgagcaaagccaagactgcggctaccacgggcagggacaccatcagcagagctaccacaatgtttggcctcgtgatgtccgggagcaggatgcttccgtacttgataaccgcggcgccaccaagggacccaagcaccaatgtccacagatagccggagtcatcaccctattcatcaacacatcataacaaaggaaggaaacggactataaaattctttgcatccaaataaatgttgctatcgaactagtcgctcacaaggatgaaggatctacagccacaatggttgctgttgctgaatgttgacaagagaatgcagaggtaccttgaggatttgccccacgcccgcgtcggtcccggcctcgccg

SEQ ID NO: 123807 - DNA, 2525 bp, Zea Mays
atccaccatgtgaccatgtcttctccgctccatccctaaaactgccttccgctcatggtcatgggctcatggcgctcacgtcgttcccgttcgcgccatccaacacctcgctgtcctactcctcccgcgcctcaaccgccgccgcgttcgctcctcgtggggttcactttgccgcgcccggaaggagcggcggcggccaaccgctcgcgtgcgctgcgcctcggtgccgcggacgggctccgaggcggcggcgcggagggggcctgctggtctgggcagcggctgactactacgcgacgctgggcgtgccgcgcgccgcgagtaacaaggacatcaaggccgcgtaccggaagctcgcgcgccagtaccatcctgatgtcaataaggagccgggagcgaccgaaaagtttaaagagataagtgcagcatatgaggtgctgtcagatgaaaagaagaggacgttgtatgaccaatatggtgaagctggggttaagagtgcggttggaggctcgggtggagcttacacaaccaacccatttgatttgtttgagacattctttggaggcagcatgggtggtttttctggcatggaccagagcacgtttaggacaagcaggcaaaatactgttttacagggtgaagacatcagatatgatgtggttttggggttcacagaggcgatatttggaacagagaaatatattatactatctcatttggaaacatgtgatacatgtggtggttctggatcaaaagctggctccaagatgagaatatgttcgacatgtggtgggcgagggcaagtaatgcgaactgagcaaacaccatttggtctgttctcccaggtttctatttgccccacttgcgcaggagagggcgaagtcatctcagagtattgtaggaaatgttctggagaggggcgtatccgtgtcaggaaggagatcaaagtaaaaatccctccaggagtgagcaaaggcagtactcttcgtgtacgtggggaaggtgatgcaggatcaaaaggtgggcctcctggagatctctttgtttgcctcgatatagaggagccatcagatatcaagagggatggtataaacttgtattcaactgtgtcaataagctatcttgaagctattttgggcaccattaagaaggtcagaacagttgatggaaccaatgaccttcgaatacctccaggtacccaacctggtgatgtaattgccttagcgaagcaaggggttccatcattgaataagccgactatacgtggtgatcatctgttcactgttaaagttgcaatacccaagcgcataagtgggcgcgaaagggaattactggaggaacttgcatctttgagtaatggtggctttgttcgaacagatgccaagccaaaacctgcccagccaaaacgtgtacatctagagaaagaagttggtgctagccaagaagatacagacaaatctaaagcagcgggtgattggttgaagaaacttacacattttgctgggtcaattgctaatggtgctgcaaagtggctgaaagaaaacctgtaggctgtaaatatttactgcaggatagaagatttcttcagttaccatggtgctgtagtccaatctccaattcttagattcattggggtccccaagagctcttacatttttgttttgttttgttggagagtttcaagattttcaggctgtgagtaacaaccgagggagtgagaattgtctactaatactgtcggcatattggtcccttgtcattcttgcaaagcaattattttttatgtagttggagttattttcagtttggcaagtgcatgcagcagtctgaaagagtgaaagttcgccctgaaagttatgggatgctgctgctggtcccaaaccttgagacttagacaacactgtaaatatgtctctgttcctgattctgtacttgaggttttgggttaatcaaattcaagatcaacgggcgttctttttctgatttcttctggagctgcaaagcttgcatcgagcgatgccaaaaaaagatcattcagcagagttcaaacattttcatcttacaatgaagctatcattagaaacaagtttcagtaatctcgaattctaggtttcgtggagtcctcgcgtcgtatcactatcaatccaccgagctcgctttgagcaaagccaagactgcggctaccacgggcagggacaccatcagcagagctaccacaatgtttggcctcgtgatgtccgggagcaggatgcttccgtacttgataaccgcggcgccaccaagggacccaagcaccaatgtccacagatagccggagtcatcaccctattcatcaacacatcataacaaaggaaggaaacggactataaaattctttgcatccaaataaatgttgctatcgaactagtcgctcacaaggatgaaggatctacagccacaatggttgctgttgctgaatgttgacaagagaatgcagaggtaccttgaggatttgccccacgcccgcgtcggtcccggcctcgccg

SEQ ID NO: 123808 - DNA, 3702 bp, Zea Mays
gtccagttccagtgctttagatccgcggccctgttcgcaccttgctcgcctcgcctcgcctcgccttccgctgcttcccgcctctaaccaccacggcatccagatcccgcgactccacctccactcgcggcggcgtgccctcgccgagatctcatcatggacacggtcgagaagatcgtcgaggacttcgcctcggacatcgccgtgagccccttctcctccgggacgagcctccgggagatgatacgcgcgatacgcgcgtgcaagacggcggcggaggagcgcgcggtggtgcggcgggaatgtgcggcgatacgcacggccatcagcgagaatgagccggagctccggcacaggaacatggccaagctcatgttcatccacatgctgggctaccccacccatttcgcgcagatggagtgcctcaagctcatcgcggccgcgggattcccggagaagcgggtgggctacctcggcctcatgctgctccttgacgagcggcaggaggtgctcatgctcgtcaccaactccctcaaacaagatctcaaccacacgaaccagttcatcgtgggccttgcattgtgtgctcttgggaacatctgctctgctgaaatggcgcgggatctttcacctgaagtggagaggttgatgcgcagtagggaagtcaatacaaagaaaaaggctgctttgtgctctataaggattgtcaggaaagtgccagatttggcagagaacttcatgggcctggctgcatcattgttgaaggagaaacaccatggggtcctcatatctgcaattcagctctgcacagaactatgcaaagcaagcaaagattctctagagtacctgaggaagaactgcatcgaaggtttggctcgcatactgagagatgtgtccaataggtcatatgctccggagtatgatgtttctggcattgttgatccattcttgcatattcgagtccttaaacttttgcggatcttgggtcaaggagatgcagattgcagtgaatatatgaatgatattcttgctcaggttgcaacaaaaactgagtccaacaagaatgctggaaacgccattctgtatgaatgtgttcagactataatgggtattgaagctactagtggtttacgtgtgctggcaatcaatattttgggtagattcttgtctaaccgtgacaacaatataagatatgttgctcttaacatgcttatgagggccattacagttgatgcactagcagtgcagagacacagaacaacaatattagagtgtgtaaaggatgccgatgcctccattcgcaaaagggctcttgaacttgtttatttgttagtcaatgatacaaatgtaaagcctttgactaaagagctcatcgattacttaaacatagcggatccagattttataggagatctcacagtaaatatatgctctatagttgaaaagttttctcaagagaagttatggtaccttgaccagatgttcaatgttttatctctggctggaaatcatgtgaaggatgacatatgtcatgcccttattgttgtactaagtaatacatcagagcttcaaggatattcagtgaggtcattgtataaggccttacaagaatatggtaaacagggaagtttagtaagagtagctgtttggtgcattggtgaatatggtgaaatgctggtgaacaatgttggcatgctggatggggaggagccaattaaggtaacagaatcagatgctgtggatgctgtagaggtcgctcttaaccgctactcagcagatatgacaactggagcaatgtgtctggttgctcttctgaaactctcctcacgatttcctttgacatcagagaggataaaacaaatagttgcccagaataaagggaatgttgtccttgaactacagcaaagatcaattgaattcacttccattatacaaagacatcagtctatcagatcgtccttgcttgaacgcatgcctgtattagatgaagctagttatctggtgaagcgggctactgctacacaatcaactatttcagcagataaaattgctccaacagtcactcctggaagccttaagcttccgaatggtgtagcaaaacccacctcagctcctttagctgatttgcttgatttcagttctgatggtgccccagcttccaccgttgcttctactacaacacctaatgattttttgcaagatcttctgggtattggtggagttagttcatcaacgacaggtgtaacttcaaccgcaagcacagatattcttatggatcttctgtccattggatcatctccatcacagaatggcacccccgtaacagacttccgtcatcctggacaagagtctaaacctgttcctggtgtacctgaagctgttgacctcctcggtagtttgtcaccagccgagtctaaacccacaccagttgtacctaaggacatggatctgctcgacggtttgtcatcaaatacatctatttctggacatgagaatacaacccacccatcaataacagcttttcagagtgcaaccttgaagatcacgtttgatttcaaaatgaagcttggaaacccacgagagactacaattcatgccacttttaccaatttgacatctagtacttttacagattttatttttcaggctgctgttccaaagttcatccaattgagactggatccggctagtggcaacactgttccagctaatggaagtggttcagtcacacaagggctcaacatcaccaataaccaacagggacagaaaccgcttgcaatgcggatccggatgtcttataaagtgaatggcgaggacagattggaacaaggccaagtcagcaattttccttctggactataggccgtttctgtatactatgacgtgtcggggacaggcatatagaacgaagccttgttttaccctctacctcattttttaattattctggggatttgtcggggtgcttagagaaaatgttttttccggcggttagttttcctgtactaagtatattgtatattattccagcagcgatgtgatcttcaaattcatcgtgatgtattcgacaccacgctaaaggatggtctgagcaaactttcttcagctcctcaatcattgtaaaactagcttctgtttttcttgtacactagagagtagagactggtagcatattctgtagcatattctgccagtaccgttgcacttctgatttgcggccgtgcaaattatgggatgccgaacgcgcggatttctatcgtaatgcgcaaactttcaactgccttttaatttttaaaccgctggtctgtacatcgagcaggtcggtcaggtgcaggcgctggtgctcgtcaagcttggacagcgctgctgagtgctgagtaacctcttacaacaattgcaccatatgaacttataacaagtacagtacattgaaccacgacaattactctagttgaccataattgagatcgaataagcagggtcaggcattatggtttctgtctacaagtttatctttgtaccttgcatcacaaccttccagtggaaaactgcaatgcaaaggacttctgcagcgcataatttgctttgcttatcttatcctgctctcatctgcaataaagaaaatgacggtttctcaaatgatgaattgaagcttacaagatataaacatggaaaatagtaatatgcccccaaacttttcaa

SEQ ID NO: 123809 - DNA, 2855 bp, Zea Mays
ccgcggccctgttcgcaccttgctcgcctcgcctcgcctcgccttccgctgcttcccgcctctaaccaccacggcatccagatcccgcgactccacctccactcgcggcggcgtgccctcgccgagatctcatcatggacacggtcgagaagatcgtcgaggacttcgcctcggacatcgccgtgagccccttctcctccgggacgagcctccgggagatgatacgcgcgatacgcgcgtgcaagacggcggcggaggagcgcgcggtggtgcggcgggaatgtgcggcgatacgcacggccatcagcgagaatgagccggagctccggcacaggaacatggccaagctcatgttcatccacatgctgggctaccccacccatttcgcgcagatggagtgcctcaagctcatcgcggccgcgggattcccggagaagcgggtgggctacctcggcctcatgctgctccttgacgagcggcaggaggtgctcatgctcgtcaccaactccctcaaacaagatctcaaccacacgaaccagttcatcgtgggccttgcattgtgtgctcttgggaacatctgctctgctgaaatggcgcgggatctttcacctgaagtggagaggttgatgcgcagtagggaagtcaatacaaagaaaaaggctgctttgtgctctataaggattgtcaggaaagtgccagatttggcagagaacttcatgggcctggctgcatcattgttgaaggagaaacaccatggggtcctcatatctgcaattcagctctgcacagaactatgcaaagcaagcaaagattctctagagtacctgaggaagaactgcatcgaaggtttggctcgcatactgagagatgtgtccaataggtcatatgctccggagtatgatgtttctggcattgttgatccattcttgcatattcgagtccttaaacttttgcggatcttgggtcaaggagatgcagattgcagtgaatatatgaatgatattcttgctcaggttgcaacaaaaactgagtccaacaagaatgctggaaacgccattctgtatgaatgtgttcagactataatgggtattgaagctactagtggtttacgtgtgctggcaatcaatattttgggtagattcttgtctaaccgtgacaacaatataagatatgttgctcttaacatgcttatgagggccattacagttgatgcactagcagtgcagagacacagaacaacaatattagagtgtgtaaaggatgccgatgcctccattcgcaaaagggctcttgaacttgtttatttgttagtcaatgatacaaatgtaaagcctttgactaaagagctcatcgattacttaaacatagcggatccagattttataggagatctcacagtaaatatatgctctatagttgaaaagttttctcaagagaagttatggtaccttgaccagatgttcaatgttttatctctggctggaaatcatgtgaaggatgacatatgtcatgcccttattgttgtactaagtaatacatcagagcttcaaggatattcagtgaggtcattgtataaggccttacaagaatatggtaaacagggaagtttagtaagagtagctgtttggtgcattggtgaatatggtgaaatgctggtgaacaatgttggcatgctggatggggaggagccaattaaggtaacagaatcagatgctgtggatgctgtagaggtcgctcttaaccgctactcagcagatatgacaactggagcaatgtgtctggttgctcttctgaaactctcctcacgatttcctttgacatcagagaggataaaacaaatagttgcccagaataaagggaatgttgtccttgaactacagcaaagatcaattgaattcacttccattatacaaagacatcagtctatcagatcgtccttgcttgaacgcatgcctgtattagatgaagctagttatctggtgaagcgggctactgctacacaatcaactatttcagcagataaaattgctccaacagtcactcctggaagccttaagcttccgaatggtgtagcaaaacccacctcagctcctttagctgatttgcttgatttcagttctgatggtgccccagcttccaccgttgcttctactacaacacctaatgattttttgcaagatcttctgggtattggtggagttagttcatcaacgacaggtgtaacttcaaccgcaagcacagatattcttatggatcttctgtccattggatcatctccatcacagaatggcacccccgtaacagacttccgtcatcctggacaagagtctaaacctgttcctggtgtacctgaagctgttgacctcctcggtagtttgtcaccaggtacatttgcttctgccgagtctaaacccacaccagttgtacctaaggacatggatctgctcgacggtttgtcatcaaatacatctatttctggacatgagaatacaacccacccatcaataacagcttttcagagtgcaaccttgaagatcacgtttgatttcaaaatgaagcttggaaacccacgagagactacaattcatgccacttttaccaatttgacatctagtacttttacagattttatttttcaggctgctgttccaaagttcatccaattgagactggatccggctagtggcaacactgttccagctaatggaagtggttcagtcacacaagggctcaacatcaccaataaccaacagggacagaaaccgcttgcaatgcggatccggatgtcttataaagtgaatggcgaggacagattggaacaaggccaagtcagcaattttccttctggactatag

SEQ ID NO: 123810 - DNA, 1668 bp, Zea Mays
atggatcaaggtcgacaagctgctgctgaggatgggcctggacagtcgttgcatcatggcaagaagggtcgtcatcgcaccagggggagaaggccccgttctgggggcgctgctagcgtgccaccagtggatgatatttgctctgctcggctaccctcccatcagccggccgtggtgaagtctgcaggttcggcggcacgaccggtttgcgtccttgagcgtgcaagggatttaactctggtggagaacaatcttcgacggtgtgctctgtttgtcatggtcattggttcgcggccgccggtgtcagctgagcttttggcggtagaagttgcagcgaagtatgattttgatcctgcaagtttttcagttcaccgttcagcgcctgaagacttcactattatcatgcaaaatgagcaagcggcgttgcgtgtcttcaacaacggagctgttctcaactccccttctggttctttcaagttcatcaagtggtcaaagcttgcacacgctgaagcggtttccctcccttccttcgtgacagtgagtttcgagggaatcccgctgcacgcatggagtctggaaactgcaagaagtttgttgcgagcgcactgcacggctctggagcttcatcctgacactgctgctcgtttggacttctcttccttcagggttcttggttggtgccggcatccagagctcattccggcggctgttgatctcttgattccggagccggttcagagttttgaagtgggtaccactgtgaagcatcttcttgcttatcgggtgacggcctcggtgtctctgatctctccgccggcgggcgatgtttcccctcctctgtcgccgccggcgtctgatgatgatcaggacactaggtctcgtcgacgtcgcctgcaacaagcttctctggaagtgttgggtggtgaccaacaggaggatgagttgggtgatgaccaacagaaggatccctctaatttagaggagcatatcactgctttcaaggagttaaatattggggctatgcttgagttgtcagtggatattaaaaagagcaacgacaggacaaatggtcaggcctgcatggtggaggctgtgatgactcatgtctctttgggtgcagattctaaccccggcccactttccctggtggctggaccgtttttcagctcgggggtagtagcagcggcatcggggctgtccgctggtggcccatctcactcctccctgccaggaccatcttccccctcttcacccttgagggctccggcagattcttgcactttgggaggatgcgagaaggagcaggccatacagtttattgataggctgaccaaaccagcaggtgggattctgagggcgccagtcagaaggccgcgacaaggcaaagctacagccaatgaggtggtaccccgacgcagcagaagggtcgctggagcaggagtggagaggctgcctcctcctccaccggccacgcagggcaagaagcgtatcttgaaggaactgggtattgggaatgctgaagaaactgaaagtttaaggcctgaagaccttgatgagtatgccagggttttcagcaaagggctttcagaggtgcagatcacggccatggcagcgctatttgggtggtctaggcctatggagatgctgcaaggcggaccaatctgctga

SEQ ID NO: 123811 - DNA, 780 bp, Zea Mays
aatagaattgaaagttcaaccattctctttttctttctcccgattacagccgaaaaacacacgtctcaagccgtcgctccacacccacaccgatgattgatctaatctacccatccatccatggatcgatctgtcatgcatcaattaataggtcgggacaaggcaacaagggagggccactgacaggcaggcaggcaggcctgtagcccccgcagcgagaggcggtgacaggtaggccggccggccggccggtgcatacatgatgcatgcgggagtgggacccaccaatcagacccatgaggctcgtccccggcctctccagtcccctcccccctctctgcagatctgggcatctgatctcactcgccttctcgctcacgtcatggatggacggtgccactgccacggtggaccggacgtgagagagagagagaaagccagccagcctgctactagctgctggctgctgccagcgccaggaataataatggaatacggaggatttcactgcaagcaagcaaagcgcagtggctgctccagcaaggaatccagtaaaaattccctggaatctcaaggctgcagagtgcaggcatggcgacacgagggagggaacgccagcccatgcatgccttctacggcccccgaaactgcaccccacacacacacacactactttctgtttgtcttcctactagctagcacttgctactacatgtcccttttcgaggtatatatatttttattttacagcaaaatgtttgtacttccggtctgggtgac

SEQ ID NO: 123812 - DNA, 348 bp, Zea Mays
cagctttcttgaacttcttcttcttctctctcttagaagggccgtatagcttctttgaacctctctctctctctctctcaaaagtgtacacgaacactttcttcattctctgcctctcgctctctgatctccgaagaaggtcaagaaagccgtgggaagaaatggcataacaagaactctgtaatgctgcagtgagatgtgaagttaaattggccctatctactatctatctatatgtttctgcaaatgtaagttactcctctgaatccgtcgtgcttctgtgagtatcgctatctgctcgtgcatcttggtttgatttcgtcgagcaatgtagatcggttttgcttt

SEQ ID NO: 123813 - DNA, 76 bp, Zea Mays
tttttttttatttctgtttcactaataggtaggagaggaaatttggaaaagaagaatggtgaaatgagttggagag

SEQ ID NO: 123814 - DNA, 2152 bp, Zea Mays
acacgcctccttccttccttcctagcccttccgtcctgtccagactccagactccctccacaccagtagggactagggaggacgccgccactgcgacctgccggcagacgtctgccccctgcttccggcatccggactcccctgcgccgcagttacgttacgccggcgatctcctcggctcaacccggggcctttctctctgcgccccgccagcccagctgctagcaacccagcaggtgaaggagaatggcgggaggtggcacgggcatcaggaaatacatgggggctcttaaggacaccacaacagtcagcatagcaaaagtaaacagcgattacaaggagctggacattgctattgtgaaggccacaaaccatgtcgagaatccaacaaaggagaaatacgtgagagatatcttttaccatctttcacccggaaggcctcgggcagatgtcgcctactgcatccgcgcccttggtagacgtctttcaaagacacgcaattgggcggttgctatgaagacattaattgtcatacaccgtgctcttcgggaagttgatcctgctttccgtgaagagcttattagttatggaagatctagctcccatatgctctatctgtcatactttaaggacgattctagcgcagaagcttgggattactctgcttgggtgcgcaattatgctttatatttggaggagaaacttgaatcattccgtgtactgaactatgatgttgaaaaggatccgttgcaaattcgggatcttgatacaaatggattgctcgatcagttgccagctttacagcagcttcttttccgactacttggttgccagccacaaggggcgtcatcttataacgtcataattcagcatgcactttcaatggttgctctagagagtgttaggatccaaacagccatcaatgacgggatactcaatcttgttgacaagttctttgagatgcagagagatgacgcaataagggcactgggcatgtatagaagagcaatcgagcaggcagaacaactttcagaattttatgaagtgtgtaaaagtatacatattgggcggggtgagagattcctaaaaatcgaacagccgcctgcatccttcttggcgactatggaggaatatgtgagcaatgctccccttgcttcaacagttcaaagaaatcaggctgtactggccatagaggacagcaaaaaatcagaagttgaagaatcacaaccaacgctgcctcctccccactctccagctcaagaatctgggcctgagccagttcaacaagtcccacctgcagctgatccaacagatttactgggaatcaatgaaccaacccctgccacatctgaaatagatcaaaagaatgcgggggccttggccatggttccacaggataatgcgccaaaagcacctgcttctactaccagttctggaagtgtggagactagctgggagctggccttggtcactgcacccagttcaaatgggactgctgtcactccaagcaaattggccggtgggctggacttgcttacactcgacagcttgtacaacgaggcgcaccgaagagcgcagcagaacgcaagctacaacccttgggagaccaatccagcgtcaggcccagtgatgcagcagcaaatgtacgacccgttctacgcctccaatcaccccgtggccgcagcccgcaacgtccagatggctgccatggagcagcagcagcaacaacaacatgccttcgtgctccagcagcagcagcagcagcagatgattgtgatgatgatggcacagcagcagcagcagcaagcttcttccaatccgttgtatacggccgccgccgcccacacgtatggtgcaggggtgcagctccacgcgggcaacgcgtactctggagctgggatgatgtaagcgttgcacagaacctgctgtctggttctgaccggcatcttccgttctttcttgttttttctcattattttcttgcatttttttttacattgtaagaactgtgttagggctagaactagaaatctgatatagcatcaatatgagcacattcttgatgttcatgaccaataatggtcgatgcgatgatggctttgaactgaagcactaaaatagtatcgatccttgcaaatttaggacttgtttg

SEQ ID NO: 123815 - DNA, 894 bp, Zea Mays
tattttttttgtttaacttaacacgcattgtcaaatgttcagcacgaagaaaggggaaaaagaagaaggatcatttgaaggattcagctcgggatatggcattttcgtcgtcttgtttattgcctcaatgctatcttttgctatcagagggactctcgatgatgctagctgtcctcagaaacgaaagtaggtcattccaattaccaagtatcttcaacactgaacaagagagattcatgcagcactttgatcttcttctgaaagctcgagtccctgagcacatttccttctacagtttcaaggaatcatcttcccgggcaggcatgtcggatttggtgaagtacaacttcttcaaggaaattcagaagatagtgccctcactacggggcagctttgcaagtgaaccagaaaaactcgctgaggtccgtcggatagagcaggtggctgagcacaacaggatagccctaaatattatcagccaagttggagctggcgatccgtctctgagggtctcgtttgagtttacacaccaccctcacttcgcagtggcagttgtgaagagatcatgattcaagtttggcatcgccaattctttacccttctcaatcttgatagtgatagcggatgattcttgttcacgtgttgctcacgtgtttattggttctccagagcgcaagcaacaccatgtgttttaggctgtacacaaacaccattagcaattttgtaggcaagataagaaaaaaaaaacatatgctggggaaaaaagtcctttcccctggcattattttgtaagcaaatttttttagctcactttgttatgcgaaacatgattatacagatgtgtaatttgagtcgtaattcgttactggtatgacaaggacgacaattttctct

SEQ ID NO: 123816 - DNA, 1357 bp, Zea Mays
ctgatgcagactttgttggtccaagatggtaaactttatggggaatacttcttttctgatgtcatttcaagggctttatcactaccggacattataggagataaggagtttcagatgaatgagtttgtggtgcagctaggtcagttggttatcaacctgataaaaattctttgtacaaacactgcatggcaacggcgcaagcttgggaagagtttgcaggattggagtactatttccatacagttggagcttgcactgaaaagagagtttggtgaaactagaaatgtcttgcagaatgagaatatgtgcatgagagtatcaaagcaacttcttatttggactcaggaacatgcatactgggttgcttttcggtttctcacattgggttttgaacttgacctatattctccgggcgaatacagtatggtgtactggtacatgtatgtggtgctcacaaagctaatagaaaagatgcagttacgagttctggccagtagtgaaacctcacgaagaaaggggaaaaagaagaaggatcatttgaaggattcagctcgggatatggcattttcgtcgtcttgtttattgcctcaatgctatcttttgctatcagagggactctcgatgatgctagctgtcctcagaaacgaaagtaggtcattccaattaccaagtatcttcaacactgaacaagagagattcatgcagcactttgatcttcttctgaaagctcgagtccctgagcacatttccttctacagtttcaaggaatcatcttcccgggcaggcatgtcggatttggtgaagtacaacttcttcaaggaaattcagaagatagtgccctcactacggggcagctttgcaagtgaaccagaaaaactcgctgaggtccgtcggatagagcaggtggctgagcacaacaggatagccctaaatattatcagccaagttggagctggcgatccgtctctgagggtctcgtttgagtttacacaccaccctcacttcgcagtggcagttgtgaagagatcatgattcaagtttggcatcgccaattctttacccttctcaatcttgatagtgatagcggatgattcttgttcacgtgttgctcacgtgtttattggttctccagagcgcaagcaacaccatgtgttttaggctgtacacaaacaccattagcaattttgtaggcaagataagaaaaaaaaaacatatgctggggaaaaaagtcctttcccctggcattattttgtaagcaaatttttttagctcactttgttatgcgaaacatgattatacagatgtgtaatttgagtcgtaattcgttactggtatgacaaggacgacaattttctct

SEQ ID NO: 123817 - DNA, 1882 bp, Zea Mays
agtcggcactctcatctccactctcccccaaaaccctataggctatagcggcagggagaaagtgagcacccacctcaacccgcccgccgccatggcgctccgccgcatcacaccgcggaggagacccgttctccccgtcccccgtgccttctcctcgagtccgccgtttcctccacccccgcctccggcgaacgaccccgaccccgacgccgcccaacccccatcctcttctccgccccctaattccggcgcgccgcggaacccggagtcctcgttcttccaggacatcaaagatcgcctccgttcgtctcccacgtctccgtctccgcgccggatcccgacgaccctgccccgccccgaccctgcgcgcggcgctccttcttcgggaccgcccattggagacatccgccggatgctccagaacttccgcttaaccggctcaaccagcgacgcgccctccacctccgctcccggatccaacccctccttcatggacctgctcaagaaccacttggaccagggtgccaacgcccggcaggcggagctcggcttcaatgccatcggagagagcctcaagcgcccccgtccgccgaagccttttataaccccttcgtcgagaaacatcttctgccgggagctagagaggacctcgaaggctttaggtgcgcggcaggaagagaatggctctgccattgagcttaaggggagctacagctacgaagagcttgggaagagactaggggagctgcggccggcgggtgcaggtaaagacggtaaggagtggttctcgctcaaggagctgcaggggcgtatcgccaagctcgcggagcaggagagccagcttgccgggccgttttcggaaatgcggcggggcattaggaacctgcagaaacaaggaaaaccgggtcggcctgtaaacatccaagcactgctgaaccctgtcggtcagccgacgccagactacatgagtgggcctccgcaggtggaattgttagagaagtacttccatccagatcatatgtcatccgaagagaagatgaaattggagctccaaagggtgagggacgaattcaagatgtccgagaatgactgtggttctgcacgagttcaaattgcccagctgactctgaaaatcaagcatctgtcaactgttctacacaagaaggataaacattctagaaaggggcttcaggagatggtccaaaggaggaagaaatacctgaaatacttgcgaaggacggactgggactcttactgtcttgttctgtcaaagctggggcttcgcgatgtgcccgagtacaaagctcctgactacaagagcaaagcaaccaccaaggccaaatctaagaagagcaagagcaagggcaagaagaggaaggtgaaggcataaaagtagcgaacaaatatgccctgtttttggtcttgaattgcatgctcagaaaatgaatcgagaagacgctcaggcctgagatggcttgatccaatcttgcaatgctgttttttttgcatggtcagaaaataaatcgagaagacgctcaggccccaattggctcgatccaatcttgtaatgttgttttcgaagctgtttgtaataaccatttcactgattcggtccagccttcaaacaatcgccttttagttctccccctcaatttgcgagaacggatgtggagtaaccgacactagtactataccgttgcattatcaccagtttgtaactttaccagaattcttgtttgtccttgacgtaatttggacaaatttcttgtacaaaaaatacatgaaccatatgtcaggcttgctagcttagcacgaatacgatactgtgtttggccgtatcgtgaagatcggagcggcaagacgtgttagatttggaaaaaaa

SEQ ID NO: 123818 - DNA, 656 bp, Zea Mays
gtgactgtcgtcccgtgccctcgcgtccctttcccttcttcccatccacgccagccaagttcaccgccgcgctcttcggcggcaactactgttggatcgtagggcgaaggaaggaaggaaggggagccatgggaaacgcgtcgtccatgctgacccagtacgacatcgaggaggtgcaggagcactgcagctacctcttctcgcagcaggagatcgtgtcgctgtacgagcgcttctgccagttggaccgcagcgccaagggcttcatctccgaggacgagttcctctccatccccgagttctccctcaacccgctctccaagaggttgctccgtatggttgatgggttgaacttcaaggatttcgttgcgtttctttctacattcagtgcaaaagccagccttcgtcagaagatcgagtttatattcaaggtttatgacatcgatggcaagggaaaaattaccttcaaggatctgctagaggttttacgggacctaacagggtcattcatgtccgaggaacaaagagagcaagtggtaactgaagttctggaagaagcagggtacacgagggattacgcattctcgcttgaagattttatccagatcatcgaccatcctggccttaagatggaggtggaagtgccaatcgactag

SEQ ID NO: 123819 - DNA, 113 bp, Zea Mays
ttagtaccttacatgtatgaaataaaaaactatataggtaaagtgaacaacatgtcgttatgtaaatctagcacactaatgctatgaccctaaattgcgaaattcaaacaacc

SEQ ID NO: 123820 - DNA, 557 bp, Zea Mays
gcctgcttccagtcgaccggggtccggcccaggccgcactggatcaccactgaatacggcggatatagaatcgacaaggtgctcaagaggttcaggagcaacatcatcttctccaacggaatgcgagacccgtggagccgaggcggggtgctcaagaacatctcgtccagcatcgttgcccttgtcatggagaaaggggcgcatcatctggacctcagattcgcgaccgatgaggatccggactgggttacagaacagaggaggcaagaagttgagatcatagagggatggatagaccagtatcatcgagacatggcgcaagtatcctaaaggtgctgtgttgcagatttacagttacagtcaagacaagttcacgtctggtctatgaaaaagaaaacataaaaaggaaaagttcctttatagcgcacaggacaatcacagggacattaagatgataaaaggtgaaaagccagtccagttgtttcacttatcaacataagctgtaaaacttgaacactcttggacgaatcatgaatgaatttttacacgatgttcag

SEQ ID NO: 123821 - DNA, 133 bp, Zea Mays
ccatacccgtaccctaataggggaattccccacgggttatcgggtatcgggtccccattgacatttctaggtgtgacggttaatgctcagttgcaaccagaaatgtttgttttgcaaagttatcaaaaaaaaa

SEQ ID NO: 123822 - DNA, 504 bp, Zea Mays
ccggcaccgtccccggccaaggccacggccacggccaccacagggagcagtcgagcaccctatagcaaccatatgccctccgcgccgtgctctggcccttcccccgacaccgccagaatcccgagacctgccggcgccgccaacaagaaaatggcgtgcctctgctcgccgacgagccacccggggtcgttccgctgcagtcggcaccgaaccgcgccggacggcgccgaggcggtgcccggcgccaccagggcgcggtccgtgcgcgcgctgctgctccagaggatcggcggcatccggcgcgagcccggccgccaccaccgccgccgcggtgtcggggtcggcgacttccagccgcgcccctccaggctgcgcctcatgaacctgtgacgccgtcggccgccgggccctgcttcgaccgtcgatcgctgctcgtgctccgcgcgagcgctgatggtgcgccactatttcccgcgcgcgcatcggttcgacgtcgacgctaga

SEQ ID NO: 123823 - DNA, 1680 bp, Zea Mays
ggtggcaacaagtatgtctagggaattccagttcttggcagcagggtgggagtgctggagtaggattttttattcattgcctgcttggaactaataacctgttcgctttaagggtttcttcaatcgaatcttatatagtgcttatattttggtttgagtggtttatcttttttccgccgggttctaatcctccttggataatgtgcagatggagagggtttgtgagaacaacttcgtcccgttcatccggtcaggggagtggtctgatattggaggtcgcgattacatggaagatgcccatgtgtgcatctctgatctggcgaagaattttggttctaactcagtggatgatgaagtcatctccttctacggggtgttcgatggccataacggcaaagacgcagcccattatgtccgtgataacttgccacgggtcattgtagaagatgctgattttcctcttgagcttgaaaaggtagtgaagaggtcatttgtgcagactgatagtaagtttgcagagaaattctctcatcacaagggactctgttctggaacgacggcacttacagcaatgatttttggaaggtcccttctggtggccaatgccggtgactgcagagcggtgctatcgcggcgtggcaccgccattgaaatgtccaaggaccacaggccctgctgcatgaacgagagaaagcgcgtggagtcactgggtggctacgtggacgacggctacctaaacggccagctggccgtcaccagagcgctgggcgactggcacctggaggtcatgaaagggacgggccgggcaggagggggaggggcagggggagggcccctgagcgcggagccggagctgaagatggtcacgctgagcaaggacgacgagttcctgatcatcggcagcgacggcgtgtgggactccttctcgagccagaacgccgtgtgacttggcgcggcggcgcctccaggaccacaacgacccgcggctgtgctgcagggaggtcgtggacgaggcgctgcggcggggcgccagggacaacctgacggcggtgctggtcgcgttccaccgggacgcgcctcccagggcccaggggggccgagcgagcaggagtacgggcagcagggtcgcgccgagcatatcggccgaggggcttcacagcctccgagtgctcctggacgaaggccagtgaggcagtgagtgactgcgcggcgccattgccacgttgctgagtgagtgctgactgtaaagtagcggatttggacacagtgaggcccgtggggctgcgcggcgccagtgaggcccgtggaaaccaccagcagccaggtcagcagcatccagtgctcaaaagaatttggacacagtgaacctggatggacccatccatgcaagccaagcgaacggacaagatctggtcggttgatttcacgtcgtaccatccgatctgccataaggacatgtacagtggtgtttaatgtagagtctcttaaggtgtttaagagggttatttgcaaaaaaaaaattttagaaccgtctctccgtgaagagacgcttctggctcgtaaaccaagtagcaacagacgcctcacttcccactgtacgaatttgtcgtctgttctatcgatctgatgctatacaaatacatttaattctgtatttattaatagactatgtttatagac

SEQ ID NO: 123824 - DNA, 892 bp, Zea Mays
ataatacccccccgtctcccttgtgttcttttcgttcgttcccctcgccctcctccctccctccccgtcgattctttcacaacaccaccaggcaccagcggaccagcagcaagcaatcgcgcttaatcactcgcccccgttacaaatccgagatattcccaaatatcttctcttgccctcccccaccgcctccgcctcggattccatcgccgcccttttccttccttctccccttgcccgcccgcccgcccgtccaggactgtccttggcgtttcttacgcagctcgtccttcgcgcttctttgccggccgttagagagaaagagagagagtgagacaggatcactcggtagtcgggatcgcgcggcgccaccgtaccccgcccgggacatgtgcgtggaggggctagacgacgcagcagggacgctcgccttcggagaccacgagaacgacaggcgcgacggtgccgcgatggagagggtttgtgagaacaacttcgtcccgttcatccggtcaggggagtggtctgatattggaggtcgcgattacatggaagatgcccatgtgtgcatctctgatctggcgaagaattttggttctaactcagtggatgatgaagtcatctccttctacggggtgttcgatggccataacggcaaagacgcagcccattatgtccgtgataacttgccacgggtcattgtagaagatgctgattttcctcttgagcttgaaaaggtagtgaagaggtcatttgtgcagactgatagtaagtttgcagagaaattctctcatcacaagggactctgttctggaacgacggcacttacagcaatgatttttggaaggtacgtacagcttcgcattcattcatatattaaaaggttcttgaa

SEQ ID NO: 123825 - DNA, 1749 bp, Zea Mays
cgtctggtcgtgaattcctgacgcggacgcggtctcctcgcgggacgagcctaccctccctccagcaccagcagccaacaaactcctccgccggcggcgcgagatccggctaccacccaccgcggccgcaggtcaggggcttctatcgttctttgccatgccttccccctcctcctaccacccccaccaccgcgcccgcctccgctcgcgcgctgcgccgctcctcatcgtcgtcgtcctcgccgtcgtcgccgtcaccgagctcctccgcagccgcacgggcctccccgcgcccgcgcgccgggccggctctgccaccgccaccgcctccccctcctcccttgccagcaccaaccaaagcgtggcgcaacgcaagatcctgctcgacccggccttcacgccgcggctgccgcggcagagccagctgtcgctctccctctccgcgcgcaacgcgttgccgccccgcaacagggaccgcttcccgaccctccccgtgggccacctcaaggtcgtgctctacgtgcacaaccggccccgctacctccgcctcgtcgtcgatagcctctcccgcgtcgagggcatcggcgaggcgctgctcatcgtcagccacgacggctacttcccggagatggacaggatcgtgcagggcatcggcttctgccaggtgaagcaggtcttcgcgccctactcgccgcacctcttccctgacgccttccccggcgccagccccggggactgccagagcaaggacagggccaaggagaaggggtgccagggcgacccggaccagtacggcaaccaccgagctcccagaatcgtgtccctcaagcaccactggtggtggatgatgaacaccgtgtgggatgggatggaggagaccagggacttcgatggacacatcctcttcatcgaggaggaccactacatcttccccaatgcgtaccggaatgctcagctgcttgtggatttgaagccgaagaagtgcccccagtgctacgctatcaatttggccccgtccgatgtcaagtcgagaggcgaaggttgggagagcttggttgccgagaagatgggtaacattggctatgccttcaatagaacagtgtggaggaagatccatgccaaggctaagcagttttgcgcgtttgacgagtacaattgggatataaccatgtgggcgacggtgtacccgtcgttcggagctcctgtttacagtctcaggggatctaggagaagcgctgcgcatttcggcaaatgcggtctgcaccaaggccagggttcgagcaatgtctgcgtggataatggttcaggagctgtggaattggaggatgccgataaggtccctaatatcaaagctgattggccagtccgcgtcattcagaggcaggaggggtatcaagctggtttcaaaggatggggtggttggggtgaccggcgtgatcgtgagctatgtttgagttttgcatacatgtaccatgttaaagatccatcgtcatcgtaactaggcacacggttttttggcataagtagagccgctgttgtaatattgtttggcatgtgccctttgatccatacacggtttgtgctataaatagctactgtagttgcccatcgtcaaagtttttctagagtggttagtgtttttggttgatagacattggtgctagatttgggatcagccttcctaaacagtaccatttacttcagctcaatgatatgaataatgtttgtttgcaggacatatggctaaga

SEQ ID NO: 123826 - DNA, 3230 bp, Zea Mays
cctccccggtcctcgggtccgccgcgcgcgcgccggccgccaccaccgcacgacgccgaccaccacaattagctagcagcggcgtcgactaataaacgacaatggcgtccatctccctcgaggacgtccgcaacgagaccgtcgacctcgagaccgtcccggtgcaggaggtgttccagcacctgaaatgcagcaaggaggggctctccagcgccgagggagacaatcggctcaagatcttcgggcccaacaagctggaggagaagtcggagagcaagctgctcaagttcctgggcttcatgtggaacccgctctcctgggtcatggaggccgccgccatcatggccatcgtgctcgccaacggcgggggcaagccgcccgactggcaggacttcgtcggcatcgtcgtcctcctcttcatcaactccaccatcagcttcatcgaggagaacaacgccggcaacgcggcggccgcgctcatggcgggcctcgcgcccaaaaccaaggtgctcagggacggcaagtggaaggaagaggaggcgtccatcctcgtgcccggggacatcatcagcatcaagctgggtgacatcattcccgccgacgccaggctgctggagggcgacccgctcaaggttgaccaggcggcgctcacgggcgagtcgctgcccgtgaacaagcacccgggccagggggtcttctcgggctccacagtcaagcagggcgagatcgaggccgtcgtcatcgccaccggcgtgcacaccttcttcggcaaggcggcgcacctggtggacagcaccaacaacgtgggccacttccagctcgtgctcacggccatcggcaacttctgcatcatctccattgccgtcgggatggtcatcgagatcatcgtcatgtacccgattcagcaccgcgcgtaccgcgatggcatcgacaacctcctcgtcctgctcatcggcggcatccccatcgccatgcccaccgtgctctccgtcaccatggccatcggctcccaccgcctgtcccagcagggcgccatcaccaagcgcatgaccgccatcgaggagatggccggcatggacgtgctctgcagcgacaagaccggcaccctcaccctcaacaagctcaccgtcgacaagaccctcatcgaggtgtgcggcaagggcgtcgacaaggacatggtgctcctctacgccgccagggcctcccgcgtcgagaaccaggacgccatcgacacctgcatcgtcggcatgctcgccgaccccaaggaggcccgcgccggcatcaaggaggtccacttcctccccttcaacccggttgagaagcgcacggccatcacctacatcgacggcaacggcgactggcacagggtcagcaagggcgcccccgagcagatcatcgagctgtgccggatgagcaaggatgccgagaagaagatccacgccctcatcgacggctacgccgaccgcggcctccgctccctgggcgtgtcgtaccagctggtccccgagaagagcaaggagagcgccggcgagccgtggcagttcatcggtctcctcccgctgttcgacccgccgcggcacgacagcgcggagaccatccgccgcgcgctccacctgggcgtgaacgtgaagatgatcaccggcgaccagctggccatcggcaaggagacggcgcggcgcctgggcatgggcagcaacatgtacccgtccaccaccctgctgggcgacaacaagaccggcgagatgggcggcctgaacatcgacgagctgatcgagaaggccgacgggttcgcgggggtgttcccggagcacaagtacgagatcgtgaagcggctgcaggaccggaagcacatctgcggcatgaccggggacggcgtgaacgacgcgccggcgctgaagaaggcggacatcggcatcgcggtggacgacgcgacggacgcggcccggagcgcgtcggacatcgtgctgacggagcccgggctgagcgtgatcgtgagcgccgtgctcaccagccgcgccatcttccagcgcatgaagaactacaccatctacgccgtgtccatcaccatccgcatcgtgctgggcttcctgctcgtcgcgctggtctggaagttcgacttcgcgcccttcatggtgctcatcattgccatcctcaacgacggcaccatcatgaccatctccaaggaccgcgtgaagccgtcgccgacgcccgactcgtggaagctcaaggagatcttcgccacgggcatcgtgctagggacctacatggcgctcgccacggcgctcttcttctacctggcgcacgacaccgacttcttcaccaacgccttcggcgtgcggtccatcaaggagaacgacaaggagctgatggcggcgctgtacctgcaagtgagcatcatcagccaggcgctcatcttcgtgacccggtcccggagctggtccttcgtggagcggcccggcgcgctgctggtgatcgccttcctggcggcgcagctggtggcgacgtgcatcgccgtgtacgccaactgggagttctgcaagatgcagggcatcggctggggctggggcggcgccatctgggcgttcagcgtcgtcacctacttcccgctggacgtgctcaagttcgccatccgctacgcgctctccggcaaggcctggaacaacatcaacaacaagacggccttcaccaaccgcaccgactacggcaagggcgagcgagaggcgcagtgggccacggcacagaggacgctgcacggcctcaaccaggccaccgccacctccgacctcttcggcgacaaccagggctaccgcgagctgtcggagctcgccgagcaggcggccaagcgcgccgaggtggccaggctcagggagctgcacacgctcaagggacacgtcgagtccgtcgtcaagctcaagggcctcgacattgacaccattcagcagagctacaccgtgtaaactcgactcagtttttttatttgcttttttttgcagacaaatacaaaccacacacatatatatatttgtaaagattcgttcgtattttcattttcaccgggaagatttgtaactgtcctcctccctccttgtaagttgctcctgtaaactcttcctgaattcatggcgtgtcgttgtagcaatcaccacttcctccctgtgaatgcccacagcgtgtcttggtgaaagcatgtatgtatgaatattggagtatatgttactactcagctccac

SEQ ID NO: 123827 - DNA, 681 bp, Zea Mays
atggagagctccagactcacctaccccgaccgcttctacgccgtcgcggcctacgccccgcacaaggacgaggccatcgccggctcgccatctccctcccttctatgggatgagcccttcccgtcctctgtgacggcgaaggccgcggctgcgggcggcatgggtcagcttcgcctgatgtgcagcttcagaggccgaatcatcccatgcttaaccgggaagatggttttggccgtcttcggggtgtcgcatgcatttgtgattttcttgccaattcaggatctcattatcctatggatgaacaagagcctgatggacgacatccatgggtggggagttctcttcgacgacagagttggggatggaaccgtcactgggaaaactggaagccattttgaatcgaatacgattccaccacctctgtcttattgctttcagattggaatccagtcatacacttttgtgggcgattcgcgggctatatctaaaacattgtggtctttattttcagatcaagattcagtgcgtttgttggctgttgaaggttgtgctgctcttggtaaattgttggagccacaagattatgtagctcacattcttccggtcattgtcaatttctaccagcaagtaatttgctttctttgtggatatattattgggagacatgtttttagttgctag

SEQ ID NO: 123828 - DNA, 613 bp, Zea Mays
actatccgccatttcatgccttcaggcttctagggttttcgcgccgccgccgccgccgcttcgtcgtctccgccgcagcgatgccgtcgcacaagaccttccggatcaagaagaagctggcgaagaagatgcgccagaaccgccccatcccctactggatccgcatgcgcacggacaacaccatcaggtacaacgccaagcgcaggcactggcgccgcaccaagctcggcttctgagcgcgcggatcggccggctcctgcgtcggaattctagggtctctacctttcctttggttttatcgatgtctcttgtgtttctgtaagctagcaaacagttccagaaagcttttgttaagattttgatgacgctaagaggattgatgctactatgctgtactcaggattccatgctgcattgcgatgctaaattaaagaacctctgttaccttactttatgtgtagtgttgcagtgattgagtcctagatttgatcactgggtcagttccgatgcatggattgtggtgtctctctttgactacgctggaatgaaatgaatacataagccattcatataccttcatagaataaattgtcagcgcaggtgccccatgtaa

SEQ ID NO: 123829 - DNA, 105 bp, Zea Mays
ccgacagatggtcattcggatatgtgacaaccagcacagttccacttacattgaggtgattaggtggtgctgcaagagaagtgataagtcggtttgcatggtaga

SEQ ID NO: 123830 - DNA, 841 bp, Zea Mays
acgacgcgcgcgacatcttcgcgtccgactccatcgagctgctccgtcgcagcggcatcgacctccgcctcaacgccgagcgcggggtcgatgctcgccgcttcgccgagctcctcatgtcttccggcgtcgtgctcaatgactccgtatactgggttaccttccacgcaggatacgacttcggcctgcacggtggactgaacaagcttgctgagctacttgatgtggagcgtgttggggagtcccatcaagctgggtccgatagcttggtcacgtcctgtgcattctggaagctcaaggattcattcttcacgggctcaacagagaaatatgcaggtgtgctgtatgggcttaatgcagagattgatgttagtgcacattgaggggtgcaattctctttggattttagctttgtgaatgggttgatttaggacagaaagggtgacaagtgtccaggagggctcagtgaaagattaagtctgtaggttaagtctgtctcactcacttgggtgtatttgggatgtagtgttctttggtcgctcattttttaaatagttatttctcttttctctttcagtttggatgttgctctcaatttcacttttctccaagcaagatactaacactcagattaaacatagtaaaagatgacctctgagaatcaagtcatgacacttacattgccacaattgcagtagcacacgtagtccttttttttctttatcttcatagcaaagaatcgatatatgattttttttaatataagcatttgtgaatataaacttggtgatgctatacgagagaaaatgcttatgcctgaggatggttctctatgcttccc

SEQ ID NO: 123831 - DNA, 1451 bp, Zea Mays
gaggtaccaatacctaccccctccttatctgtcctgcttcgctccccttctcgagcctttcgttcaatttcccccaaatcggaccaaaccctaggagccgtagatttcgatttgaatcggaaacctggcatggcaatgccagatctcacagccaccgtgatcccaaagctaggcgaggccgacgacgagtcggtggagatccgggaggtgtgggccgacaacatggaggaggagttcgcgctgatccgcgacatcgtcgacgagtacccattcgtcgcgatggacacggagttcccgggcatcgtctgccggcccgttggcgccttccgctctcccgccgactacaactacgccaccctcaaggccaacgtggacatgctgcacctcatccagctcggccttaccttctccgggccgcgcggcgagctaccggtcctcggtgctggccgccgccgctgcgtctggcagttcaacttccgcgagttcgacgacgcgcgcgacatcttcgcgtccgactccatcgagctgctccgtcgcagcggcatcgacctccgcctcaacgccgagcgcggggtcgatgctcgccgcttcgccgagctcctcatgtcttccggcgtcgtgctcaatgactccgtatactgggttaccttccacgcaggatacgacttcgggtacctactgaagatcctcacttgcaattgcctcccagacacacaagccgggttctttaaacttatgaagatatatttcccgactgtgtatgacatcaagcatctcatgaagttctgcaacagcctgcacggtggactgaacaagcttgctgagctacttgatgtggagcgtgttggggagtcccatcaagctgggtccgatagcttggtcacgtcctgtgcattctggaagctcaaggattcattcttcacgggctcaacagagaaatatgcaggtgtgctgtatgggcttaatgcagagattgatgttagtgcacattgaggggtgcaattctctttggattttagctttgtgaatgggttgatttaggacagaaagggtgacaagtgtccaggagggctcagtgaaagattaagtctgtaggttaagtctgtctcactcacttgggtgtatttgggatgtagtgttctttggtcgctcattttttaaatagttatttctcttttctctttcagtttggatgttgctctcaatttcacttttctccaagcaagatactaacactcagattaaacatagtaaaagatgacctctgagaatcaagtcatgacacttacattgccacaattgcagtagcacacgtagtccttttttttctttatcttcatagcaaagaatcgatatatgattttttttaatataagcatttgtgaatataaacttggtgatgctatacgagagaaaatgcttatgcctgaggatggttctctatgcttccc

SEQ ID NO: 123832 - DNA, 585 bp, Zea Mays
atgccgcggcatgggcgcgagctgcgcgcagggaagttggacgccgaacagggagcgggagggagcgtgcacagcagccagaggccgagctggggcgagtgcatgaacaagccaggcgtgcgcgggagcttgctcgcggccaagaaaatgggcgccggcagggaagcaagggagcacggctgggcacgcgccggtgagggagaaaccaagctcggcgagcagagcacaggagaggaaactgcgacgcgcaggcgctggctggacgcgctggaagagcagacgcgcgcgctgggagaggcctgggaggagagaggcgcagctgcgcaagcagccatgggaagaagctgcgcgcggcggggaagaagccggatgcggcactggaaggcagggcagggcggtcagggaagcagaggagtacgacgcgccatgggagctgggcgactggacaccagagaatcgcgcagaaggaagaagatgggcagcagaagaactccggcgagatttataggaatccaggggcggcggcttgaggagataagcaccggcggccaggatttttgcaagccgaagcggtgcaggggataa

SEQ ID NO: 123833 - DNA, 693 bp, Zea Mays
atgcagggcggcggcggaggcggcgggcaggacgacttcttggaccagatgctgtccacgctgccgcccgcgtggcccgacctcggctacggcaagtcgtcgccctgggagctccccgcggggcccgacgccgccgccgccgccgccgccgcgttcgacgagaccgcgctcctcgcctcgcgcctccgccaccaccagatcggcggcgtcgatgagaagcccctcatgctccacctcagcgacctgcacggcgtcgccgccggcggcggcgacgacgcgggtttcatgccgctgccgctcttcaccgaccgcgccgccttcaagtcccccaatgccgccggagccgaccaggcgctgtacaacgggttcggagccgctgggatgcatgccgccgccgtgcaccagccgccgttcgggcagctccggagggagaggatagcggagaggatgaaggcgttgcaggagctggtccctaacgccaacaagaccgacaaggcatcgatgcttgatgagattattgactacgtgaagttcctccagctccaagtcaaggttctcagcatgagcagacttggtggagctgcagccgtcggccctctcgtcgccagcatggcatcagagaggcaccaaagacccagactgatacagctaaaacttcgtgggccaaatatgatgctgaacccatacttttga

SEQ ID NO: 123834 - DNA, 682 bp, Zea Mays
cctttctccccttccctttctccatctcctctctctcgatccctccccgtctccgcgctccaagaaggtcgcttgccagttgccacaggccccactcatgcagccgagcggccgcgaaatgcagggcggcggcggaggcggcgggcaggacgacttcttggaccagatgctgtccacgctgccgcccgcgtggcccgacctcggctacggcaagtcgtcgccctgggagctccccgcggggcccgacgccgccgccgccgccgccgccgcgttcgacgagaccgcgctcctcgcctcgcgcctccgccaccaccagatcggcggcgtcgatgagaagcccctcatgctccacctcagcgacctgcacggcgtcgccgccggcggcggcgacgacgcgggtttcatgccgctgccgctcttcaccgaccgcgccgccttcaagtcccccaatgccgccgtgagaccctcgcgctccgcgccgcgtgcctgctctcggctccaaagctcccgtctttgacgagtcccgccgcgttatgcagggagccgaccaggcgctgtacaacgggttcggagccgctgggatgcatgccgccgccgtgcaccagccgccgttcgggcaggtacgccgccggaccggcgaacgagccgtgcccgcgtccggttcatcaaaagaaaaaaaaaa

SEQ ID NO: 123835 - DNA, 1520 bp, Zea Mays
gcctctccggctgttcgaattccgcgcgcgtcaatccccagcccatgaccatgacctgccgccccctataaattcacccgccgtgccctagcacgcctccaatccattcccgaacgcgtcggatcctcgggggatactggtcgacgtcgactcgcctcagctgctgctgactcgagcgagccacactccaaccatcaccgatggcagcggatggaaccacgccgcgcgtgtcggcctcgtcgcctcccaccgtcgggacgctcctcaccagggcctccgcggcgcgcgaccgcgggtgctcctcgccgcggtcgctgctgtcgcgcatcctgcacggtggccgaggccgcagcggcgccgggttcggatgccgcatccgcctcctcccgcgctattgtgccagcgccagcgccgcggcggccaaggaggacgccatcgcagccgcgaagcatgaggaggaggacgagccggcggaagtggaggcagcccagccggcgcctcgagagccggggggccctcgtagttctcttgggaagcaggacgccctgccggcgagcctgggcctgggcgccagcctggtgctgctgctgtccaagagcgcggcggagctgagcaggatggcggagctgcgcgcccagatggagcgcctgctcgtcgacgccagggcggacgcgcggagctgcaccggccgacccagcgcctccggcggccgttccgactgcgccagcgccgtcaagggccccgtcgcccgcgctggcggcgaggatgaagatgatggcgccctgtcccggtccgatggtgacgggggccgtgacatggaccggatggaagctgagcttgaggcggagctgtcgcgcttgcagttgcagggagcctcggacgtcgaggacagtccgcctagccgacggcgtgatgatcaactcgtggtgcaggcgggaccgaagagcggtgcctcctcaaggagacactcggcgatctgctccgaagacgacagcgacgacggagagacagacaacagcggcgacgaaagccaagacgacgaggaggagtatgagcatgacgctgatgaggggaacgtgatcaatggccccgcccacggcggcgtgtcggcccgcgagctgcagctgaggctgcaccagctactgcagtcgcggcacgaggcgcggatcgcggagctggagtcggcgctggagagcgcgcgctggaagctgcgggagacggagcgcgaggcgtgccggtggcgcgacaccgccaagctcgccacccgcttcgccgacgagtcgaggctcaggtaggagtcgaagagaacccaccgtcgccggaatcccgtgcccgtgcccactgtccgatcgttctgcttccaataggttcacagatcaagggctcatttcgcgagaagtttatgctgaacagaacatatgcgcacggatcgagatgaatcttccttcatcgtttggttccaaactgtactgaacaaccgatcaattccagtcgcgctcgacggctcgaggcattcattc

SEQ ID NO: 123836 - DNA, 1609 bp, Zea Mays
gcctctccggctgttcgaattccgcgcgcgtcaatccccagcccatgaccatgacctgccgccccctataaattcacccgccgtgccctagcacgcctccaatccattcccgaacgcgtcggatcctcgggggatactggtcgacgtcgactcgcctcagctgctgctgactcgagcgagccacactccaaccatcaccgatggcagcggatggaaccacgccgcgcgtgtcggcctcgtcgcctcccaccgtcgggacgctcctcaccagggcctccgcggcgcgcgaccgcgggtgctcctcgccgcggtcgctgctgtcgcgcatcctgcacggtggccgaggccgcagcggcgccgggttcggatgccgcatccgcctcctcccgcgctattgtgccagcgccagcgccgcggcggccaaggaggacgccatcgcagccgcgaagcatgaggaggaggacgagccggcggaagtggaggcagcccagccggcgcctcgagagccggggggccctcgtagttctcttgggaagcaggacgccctgccggcgagcctgggcctgggcgccagcctggtgctgctgctgtccaagagcgcggcggagctgagcaggatggcggagctgcgcgcccagatggagcgcctgctcgtcgacgccagggcggacgcgcggagctgcaccggccgacccagcgcctccggcggccgttccgactgcgccagcgccgtcaagggccccgtcgcccgcgctggcggcgaggatgaagatgatggcgccctgtcccggtccgatggtgacgggggccgtgacatggaccggatggaagctgagcttgaggcggagctgtcgcgcttgcagttgcagggagcctcggacgtcgaggacagtccgcctagccgacggcgtgatgatcaactcgtggtcggtagcgcgtggctaaacgtttaaactgtgcttcggtcgaccattggccgtgtgctctgttttgattgagctggcgatcctcgcaggtgcaggcgggaccgaagagcggtgcctcctcaaggagacactcggcgatctgctccgaagacgacagcgacgacggagagacagacaacagcggcgacgaaagccaagacgacgaggaggagtatgagcatgacgctgatgaggggaacgtgatcaatggccccgcccacggcggcgtgtcggcccgcgagctgcagctgaggctgcaccagctactgcagtcgcggcacgaggcgcggatcgcggagctggagtcggcgctggagagcgcgcgctggaagctgcgggagacggagcgcgaggcgtgccggtggcgcgacaccgccaagctcgccacccgcttcgccgacgagtcgaggctcaggtaggagtcgaagagaacccaccgtcgccggaatcccgtgcccgtgcccactgtccgatcgttctgcttccaataggttcacagatcaagggctcatttcgcgagaagtttatgctgaacagaacatatgcgcacggatcgagatgaatcttccttcatcgtttggttccaaactgtactgaacaaccgatcaattccagtcgcgctcgacggctcgaggcattcattc

SEQ ID NO: 123837 - DNA, 2863 bp, Zea Mays
gtcgaggctggccaacaggtcgaggtaaaacgcgcgaaacgtctccatctcggcgcgtggcagcgccagcccgacctcgatgccgccgtccccgtcgcggccactctcggccagcgccagcgcgcccgtgcgttctaccgaagcgatctccaccttcgccggccggccccacgccccgccaaagtccgcggccgcgtacagccccagcttgggcgatccggccacggtcaccgcacgcgcggaggcgtactcccgcacccagcgcacccagccccgggcgcctcggaacacgctacccgcctcggccagcccctcgatcgcccgccatatggcggccgaggcggccaccgcggtgagctcgccacgcttcgcgtggtgggcgacgcggcagaggccgaggcagttgccaaagtagttggccgggaccggcgggctcgcgcgcggcttgcaccccgtcacgaacccgaacagcgcgtcgggcgccggagccccgtccgtgccagtgccggtgccgatgccgcgcgcgcgcacgatgcccgcccacgcggcgccgcacgccagcgcgtagggcgagcaccgcgccgaggtctccgcctcggcgcgcctccctagcgcgcggagccgcttctcggtgaaccggaacgtggcgaacacgacgccggggcgccgactgaggtcccagtcgcagaggcgctcgccgccgcccctgccggctgtgccgagcgctaggtggtcgcgcaggaacgcctcacgcaggcgggcgtcgtcgcgtacgacgccgcggtcgaacagcgggggcggcacgtccaccgccaccgccccgctgcgctcgggaccgaggcggtgggcggtggcccaggtgcggaggaagtgcgcgtagctggagccgtccgccacggcgtggtgcaccgtggtgccgatgcagacgccggcgcgagggaacaccgtgatctggacggcgaggacgccctgctgcgagtgcgaccgagacgaaccaccgtgctgcggcagcgcggggagcagcgcgcggagcctcgcggtgtcgcgagcgtggtcgccggcgaggtcgcggaagtcgtcgccgctgacggccacggtcagcgggacggagtcgccgtccgagaacacgacctccggcggcgcggcgccctcctcgtggaccagctcgcacgttagcttccccgccaacgggtagaagtggtgtagcgcggcggcgagggagtccctgaaccgtggcagctcgcccagcgtgaagtcggagacgtcgagcaggtcggccctgtcgtagaagaacaggcgctgtacgggcgggatggcccagaaaacgaggtcgtagaacgtgagcggcagcgctcgtggctgccctgccgccggtgccggcgatggcgtgacatcaaacttctccatggcagtcacgggataaacaagtgtaggcgccatcggtgtcgtggccgacgacaggctctaagcgctgcaatggtgctttgctctggatgactggcttcatggtctgtgactctctgtaccggtgtccgatttactctaaaaataatcacatgttagcagccagacgcagctaataataattcacaaatcgccaaatccattggaccaatgggcatgccttattagaacgcgccaccccgtgtagctgataactcgcagtcgcagcagcaaagcgcatctgcttatctgccgaacctacagcgcaggcgcctagctgcccgccggtgccccccacccccaccccgtgtgtgcgcggaaatgtcgccgacgaagtcatcgtgcctcgcggacgccggcgcggagccgttccgggtgttcgtgggctacgactcccgcgaggacgtggcgtaccgcgtgtgccggcgctccctgctgcgccgctcgtccatcccgctggagatcaccccgatcgtgcagcaggagctccgcgaggcggggctgtactggcgggagcgcggcccgacggagagcaccgagttctccttcacccgcttcctgacgccctacctggcggggtaccgcgggtgggcgctgttcgtggactgcgacttcctgttcgtggccgacgtagccgggctggtggcgctggcgcgcgccgacccgcggcgcgcggtgctgtgcgtgcaccacgactacacgcccacggaggccaccaagatggacggcgccgtgcagacggcgtacccgcgcaagaactggtcctccatggtgctcttcaactgcggccaccccaagaaccgcgccgcgctcacgccggaggccgtcagcacgcgcagcggtgcgtacctgcaccgcttcatgtggctcgacgacgacgagatcggcgaggtgccgttcgtgtggaacttcctcgtggggcacaaccgcgtcgaccccgccgacgaggctggcacggcaccgcgcgctatacactacacgtccggcgggccgtggttcgataggtacaaggactgcgaattcgccgacctctgggtccaggagcgcgacgcctacgaggtcgacaaggacgtggatgatggatccatgcccatacgagaggcacctgcaatggtgtcggtggatgcactcgattgagacggtcgaccatctccctgctacccacgcggtcgtgtgctgtttgttgtttacgttgtgtgctgtttgttgtttacgttgtgtgctgtctcctgtgcgtacgcgcgcgctaccaataccacatgtccatgtccatgcatgtactgtctgtcacgttggtgtgttatcgatggtagaataaagaggcgaccgttgcgcatgcccagccacaaccacctcatcataggtaggtatcggtatttcgaatctcgctccgataaataaatttattatatatgttccg

SEQ ID NO: 123838 - DNA, 1049 bp, Zea Mays
cagggaaccgcgagctctgccgtgacaaattctctctcctcgtgctccctagtccctccgacccccccccccccccccccccccctctccctccgcactccgcagcgcttcctccggtcttctctggccggatccctgcccccaaaatcggattgggggagggctcgttgcgttcgaccagacggcgtgcggcggttctccggcgccgagggcgggacacggggtagactggtgctggcttcgtggcggagttatttgagtttgtaacaatctcgtcgcgcggcttcgccactatattactccgcagctgcgcatcgccaatttgactatgttgtacagtgtatgggatgctaactcaaggatgtgcgacaatatggttatgaagaggagctatgtacaaagactaaggcaagaggtcaaattgggaatagtgttgaaggagcaaatggattaccttgatcactgggcagcgctgcaaacagagcattcttcttctttatccagcgcaaccgaagctattaaagcaagcacattgcgtcttccagtttctggaggggctaaggctgatgtacttactgttaagaatgctgtcagttcagcagttgacattatgcaagcgatggggtcatccatttgccatttgctatcaaagttacaggcttcacactctctggttacggaactttcagctgttgctgctaaggaaagtatcttactcaatgagtacagagaactcttggcaacagcagcagcactacaggtccaggagtccagcctaaggacacagctcatacaacagacagagtgagcaggttaaggtcctgtatgtatttctgactaggaagattagaggtaaacaccattcattagtttcagtgactgtgcggtgcatatgtgtatctttgatgccgttttttttctctctcctttttttgtacttagtaggtagcccatatttctttgcatttctactcccccatgttcttttgtgttcgaacaacttacatggaagagaagggaagcaacacgaaatcatggatttccatgac

SEQ ID NO: 123839 - DNA, 109 bp, Zea Mays
tttgatgcctcatacacgaggtcggtcatgtttgatgcctcatacacgaggtcggtcatgtttgatgcctcatacatgtttgatgcctcatacacgctcccggtcgaga

SEQ ID NO: 123840 - DNA, 222 bp, Zea Mays
ttttatgccgcattcttgccatcgcgcgctggcgataaccggtgctattgctatttccagtagttgtgcattggaaggcaccgtcacccgacaaatcgtcccttctgtaggatacggcaatatcaatattgaacaccccagtggtgcgctcgacgttcatttaagtaatgaaggtcaggatgccacgacgttacgcgcatctgttattcggacgaccagaaa

SEQ ID NO: 123841 - DNA, 1791 bp, Zea Mays
atggttctcctcacaagcatgtcaagccaatgccgcagccgccgccgcagccgccacctcccgaggtacatagaccggctacttgggccttctttttcctcgcgtcgctctggttctgttcccgcttatgacggcgagcgatcggatttaggtttagttgtggcgtacgagtatgtctacgaggtatgcgagattgagggcttctgcacttgccggctcagatgctcgtgcgagatagaaggtggcgcggtgaagtctgaacggcctcattgccaatgcaagcaggcgcacctgcagatgtatgccggttgccggagcccgcatgcagaaacacttgaactgtatcgtatcgtatcaggcttacaagttacaaatgcatgtcccttgtggacaatgtctgctaagttcttggaagttctaagactacagctgtacaagggccttagttcattctctgatttacatcttaactggttgcaggacttgccctttgatgtgcttgatggacctagcccattgggtctgcgactaagaaaaagtcgatctctggtggaccttattcaatgtaagctttttcaggataaatctgcccatgaacagtttgatgggcacaacaatgtttctgatacacccatgaagaaagaggttagatctggggctccaacagctggtgaacggatgaaagcttcaaattttcctgcaaatgttttgagaattggtagttgggagtacatttctcactacgaaggtgatttggtcgcaaagtgctactttgcaaagcataagcttgtttgggaggtcctacataatggtctcaagagtaagatagaaattcagtggtcggacattattgctttgaaggcaacctgcccagagaatgaacaagaaggggtcttagatctagtgttggctcgcccgccacttttcttcaaagaaactgatcctcagccaaggaaacatacactatggcaggctgcatcagattttactgatggacaggcaagctccaaaaggagacacatcttgcggtgcccctcgagtttgttaagcaggaattttgaaaagctcattcaatgtgatcaacgtctacgtgaattgagccagcagccagctgccatattgcaaaacccaggttttgaacctaagcgatctatttttcaaaatccaaatgaatcgaaggactgccttgatattggtggcttgaagtttgaacataaagctactttgcccaagttcactgctcccctctcaacacgtgtcttttcatcactgtccaataatgttggacgaccaataaacataggatttggtgctggacattttgggggcaatgttcctgaagaatcaaagaattgcaatcaatggaatcaattgatagtgcctggattggaggcactgcaaggtgatgaaaggagtgcaggtggtcctcctttgacaactaacgatgcaatttccaaaaaagcctgggaagatcttgttcaacaccttttcagcgacacaccgagtctgccagccttagatgataataatttgacgtcaagggttgactccctttactcgttgcttgagaaagacacagctccacccgccatgcgcgaccctgaatgcagtagtgatggtggggacatcggcgcaatccaagtggattctgatggctttaaggggaggctcgacccatcgcctccaggaatttccagaaacgattctctcgatgagctgcttctgaacctccccaaaatagcttctattccacagttcttgttcaacaggacagaagattctgatgaataa

SEQ ID NO: 123842 - DNA, 2871 bp, Zea Mays
tctacgtacccgattgcccaacgcttcgctttctcgctgactcgctcccactcccagacgaccggccgccagcgccgccgcgttgatggccgccgcaccggaggagcgcctcgacgtcctcaacgccgctggggacaagatcggcgtctccaagcccaggtcggaggtgcacagggacggcgactatcaccgggcggtgcacgtgtggatctacagcgagagcaccggggagctgctgctgcagcgccgcgctgactgcaaggactcgtggcctggacagtgggacatctccagcgccggtcacatctccgccggcgaatcctcgctcttctcggcacagagggagcttgaggaagaactaggcatcaaccttccagtcgatgctttcgagcttatatttgtatttcttcaggaatgcgttatcaacaatgggacatacacaaacaatgagtacaatgatgtttaccttgtgactactttaactccaattccacttgaggcattcactctccaagaaagtgaagtatctgcagttaggtatatgcgttgtgatgagtacaaaagctgccttgcaaaagaaagtagagaatatgttccttatgatgtgaacgggcaatatggtcaactgtttagcattattgaagaaaggtacaaagagaatacagagtcacagagtttaactttgcaaaagcaaatgaaccgttatgttcccatccatttggaaccagatttgactagtctctctgaaggagacagggaggccttgggatatatccttaaagccgcaatagttattgatgacatattctatgaacaggtatggaatagtaacaaaatgcttagagactggctgaaaggacattctgaattctcaccattcgataaattgaagtgggcatattattctattaataagagtacctggtcctgccttgatgaaaataaggcttttctatcgaccgcagattctgctgtgcaattactcacagaagccaccaaaccagtttcaggatggaaggggattgagtatcgagcagcatttcctctacataagcctcccggtgctaacttctatcctcctgacatggacaaagcggagtttgaactttggaagagtaaactgacagataaagaacaaaatgatgccactgggtttttcaccgtcataaaacgacatgactctctgtcttcatcgtcattaacacaatcagatggatcggatcagaccaagactaaagatgatctttttattgttccatactccaaggagtatagaccattcctagagaaagcagctgagcttcttgagaaagcatcagcgtgctctgattctccaagcctcaagaatttgctgagaaccaaggcgaatgctttcctttcaaatgattactatgaatccgatatagcttggatggaattggactccaacttagatctcacaattggcccatatgaaacatatgaagatagcctttttagttataaggcaacttttgaagcatttgtcggaatacgtgatgacacagcaacttctcaagttaaactctttggtgatcagctccaggatttggagaaaaaccttccaatggacaatattttcaaatcagatagtatatctgctgctcctattcgtgtgatcaatcttctctacaatgctggggatgtgaagggtccacaaaccattgctttcaatttgcccaatgatgaaaggattgtgaatgaacgaggaacttccatggttatgctcaaaaacatttcagaagccaagttcaagcatatcttaaagcctatagctgatgcctgcatcagagaggaacaaaaggaatatgttgatttcgagccatattatacacatatagtctgtcatgaatgctgccatggaattggacctcattctatcacccttccaagtggtaaaaaaacaacagttagaagggaacttcaagaattccattcagcattggaggaggcaaaagctgatatagttggtctctgggcactgaatttccttattaagaagggattgcttcctaagagcctgtcacaatctatgtatgtctctttcctggctggctgcttccggtcaatccgctttgggctggaagaagctcacggaaaaggacaagctctgcagtttaactggttgtatgagaaaggggcttttgtgttgcagtctgacggaaaattctcagttgattttacaatggttgaggatgctgtagaaagcctgagcagggagatactgacaatacaggcaaagggcgataagccttctgcccaatctcttctccagtcccgtgcaacattgacacaaccattgagaatggcattggagaggatagagcacatgcaggtacctgttgacatagccccggtattcagcacggcaaacaagctatttgcagacatttaactatttgggctcagaatcgttgtgctttagtaccgcccacaatacctggacgaaaccaggaattgctcaagaataaggcggcactaggaattgctcaagaataaggaagcgccccatgttaagcaaagctgataaaaccatggcgatatgtgagtgacctttttatcggaaggaaaattgtttgcatgcttatgtattgacctcaatttttacgtattggagtgatttgatgtgaaatttaaccaaattccacgtccagtacatggccatccaaacatggcctaaagtggtgtttgatcagtgagaattggaataaacccagctttgcctgaacagttgcgaagtactgagttacatcaatgcatattttgtaacaccaaaaaaagatgtattatcctaatggatgattgaacgaaggcattgtatatcgatccccaatggcccaatctttatgcaca

SEQ ID NO: 123843 - DNA, 547 bp, Zea Mays
tctacgtacccgattgcccaacgcttcgctttctcgctgactcgctcccactcccagacgaccggccgccagcgccgccgcgttgatggccgccgcaccggaggagcgcctcgacgtcctcaacgccgctggggacaagatcggcgtctccaagcccaggtcggaggtgcacagggacggcgactatcaccgggcggtgcacgtgtggatctacagcgagagcaccggggagctgctgctgcagcgccgcgctgactgcaaggactcgtggcctggacagtgggacatctccagcgccggtcacatctccgccggcgaatcctcgctcttctcggcacagtgagctgtcttgcctcacgatagtactgtgcgcttgaagagctaccgtctgaactctgaacaccacactgagtgcgtagagtagcgtgtgcacactaagcagctaggtatgcctagatcattttagaagcaacttacccaaaaaaaacattttagcagcaactggaaactgcaatcaaagctactttttataccttcgggagggtta

SEQ ID NO: 123844 - DNA, 248 bp, Zea Mays
tcgcccacgtcgacagctcacgccgcgccagaactcctcgccgttagccgccgtagtcgcttgccgtcgacgaccccagctgtcgcgcgtggtgcgctccttggtgacccagcgggggtgtagattgtgcacaaaggcggtgcagggtgcgcggacctacggggtgaggggaattcctcgccggtgttggtgaagccgccgcactcggacgctctccgtggccagggactctcactccgaatttgtag

SEQ ID NO: 123845 - DNA, 300 bp, Zea Mays
atgctgacaacttttgcatgtaaaatacacggtgcgatgcgactgatttatatgttgtatggacatgtaaagctactaaaaaagttgtggagagttattggttgtgccgtactgaacagcacaagaaaaacttctaaacatgttcttcattacgaacttatggtacctaagaaatgcctatgtcaagctgtcaggaaaagtaccatagatattatactttcttgccttatcagccttagcatagatattatactttgttaccttgtcaagcttgagacgatgacattatcttttgtatag

SEQ ID NO: 123846 - DNA, 1886 bp, Zea Mays
cagggctgcgcagcgaggccggccaaaaggacattcggcgccgtgggcccgccgccctccagctgagcagggaaggcatcggcgagggaggcggtggaggaggatcttctctcacgtcaaaaagagagcagggaaagcataaattaaaggcaggaggagaagagaagggggaaggcgcagggctttccagccgcacaaaggaagaggcttcagaaagaagaaagcttcggtcttctgacggagagggagagcaaggcatccagtgagcgtgcctgtgggctcgcgataaatagcggcggcttgaagccgagggagagcatcaggtgctcttgccaccacagcccgccgttgtgagagctagcgttggaggtggcgatggcggcattgcaagagcagcaggaggaggaccgcgacgagggcgagggcgggaaagacgacgacgaggagtcagaggatgatggggtagggtgggggcaactgatctgatcttctcttgacgcttgtcccgaggcgtcctgtccgcttgtggcggtgtagcagtaagatattggcgcaataggctcaatcacctttttccccctctctgtctcttcattttctttcctgcttctacgttgctgtgcttgattttttaaccacttttgttcctataaatcgatgagtctaattcatcactactcccccgtgaaaattcgttccatgtcgatgttctgttcttggtgatttgcccggtttggaattactagaacggaaggacaacggaaacctcatcgtctccgtctcccctgctctggttgagatcgcggtgcactttgctgtcgatcgccccatgatgggcgttccaggccctctgtctgactctgaccccctgtcgatcgcccatgggcagatgcaaagctccaagcgcaaggagacggggggatggagcaaacggagaaagcggccgaccgcgtgctcccagccgtttccttcttcttccatgccgcgcgctccctcggcgcggggagagatcatcggtgggccgcttgtttgctcagcttcccttgccattcccacccaaccgcctcgacccgccctagctgcgtgcggtggcgtgacggcggacgccgacgccgggctagctccacctccacgtcgtctcgggtggccctggcagccacgcccacgctggtgatcactctgggacgaacgcagaggggattttgtttttgttttgttctttcttttacgcactttgcggagtgcggagagcaggagcaatggtgacttgaatgaggggctgggccaggttcaaaccgtggcctgccatgatgggccggggctgtcgacctgcaccctggagtagcatgatttcgttggacggatcaaatcatatccagtctgattggatgtctgcgtgcctgcgtatagatagatgcatgctaatagtattaaaataacttattttataactactcatacaacatgtgactttcacatatggagcttgttcggctgccattttcatccagctgcagctgcaaacaaacactgttcctacagcagcaagcagcaggcggctgcagcagctgccactgtagaaactagcagccgaacaagccgccactgtagaaactagcagccgaacaagccgatggtgtcccaatgttatatggccgtgtcatattaaatcaatgttcctctgaaggaaacacagacaatatatgtccaaagcctaaggatatgtgaaaatctacacttatatgtcagggattataagttagaagccttgtggacaaaaaaaaaggttctgagctaggtgattaggtccaagacaccatgtctaggaagaaggatgttcatgatttgaaatctaaatttacttcgtttagcagaaaaaaacattt

SEQ ID NO: 123847 - DNA, 2673 bp, Zea Mays
agcctacacgcccccgcctcctgccctcctctgtccacatcctcgcctctccccactagttcgctcgcgtgatggtggtgcgggagcagcggaacaagggttcgtcgtcggccaccctgtgacaccccgcccccgcccccgcggcggaacctgcaaacccggaggccggagctccgacttcgtcggccatcgaccgcgtctgatcggcgctgggacctgccgtccggacgaaatcggtcagcatggcggggcccaatgagaaggcggcggcgggaggcgggggtggcgagaggcgcaagtacccgatccacatggaggactacgagctgtacgaggagatcgggcagggcgtcagcgccatcgtgtaccgcgcactctgcaagccactcgacgagatcgtcgccgtcaaggtggtcgacttcgagcgcaccaacagcgacctgaacaacatcgttcgtgaagctcagacaatgattttgatagaccatcctaacgttgtcaaggcgcattgttcatttgcaaaagaccaaacgttatgggtggttatgccgtatatggctggggggtcctgtcttcacataatgaaatcagtgcatcctactggattcgaggaacccatcatcgcgactatacttcgtgaagtcctgaaaggtttagagtatcttcaccatcatggctctatacatcgagatgtgaaggcaggaaatattctagtcgattctcggggtggaattaaacttggggactttggagtctctgcttgcctttttgattctggtgatagacagagggccaggaatacttttgtgggaacaccttgctggatggcgcccgaggttatggagcaactacatggatatgatttcagagcagacatatggtcctttggaattactgcacttgaacttgctcatggtcatgctcctttctctaagtaccctcccatgaaggtcttgctcatgacacttcagaatgctcctccaggtcttgactatgaaagagataagaaattcacgaggaacttcaagcaaatggttgctatgtgtttggtaaaagacccttcaaagaggccttcggcaaaaaagttgttgaagcaaccatttttcaagcaagctcgttccactgattttattgcacgaaagcttttagaaggattgcctggccttggtgttagatatcaagctttgaaggaaaaggatcaacatttaatggctcaaaagaaaatgtctgatggaaagaaagaagaaatctcgcaggatgaatacaaaaggggtatcagcagctggacctttgacatggatgacctgagatctcaagcttcattgggcacagaatgtgaagacagtaccttatgcaaagattcagatatatctttctatgacttggacagtttacaggatcaagcaccagaagggtcacacttgttgagagatttctcaacgaagtatgatgctgacattgaaaatgatatgacaaccaaagataagtcagccgtttcatctcctgatcagcctgctagcttagtgaggaatgcttctatgcgtgggatgcccataaacggttctttcaggaaagacaactctacagaaagcttcgatttggaatgtcaagagaaacatctggacattgttccgactagctcatcccctgaaaggaagttttcttttagttcttgctcatcaaatgggctccttttgtccaaagagagctctaaacagcaaactagcatccacaaccttgacaagtgtaatggagggcatttgcatgtatcagatgaaacatcttctgaagctgctcctaagacacataaatcagcagaggaccatgatgatagatccaaacctccacttataagaggtcgatttagagttatacctgggcatgttgactcaaaggctcaaccacctggcctacagaagtgtcacagcatgcagacaatttctcgccttccatcattaagtataccctcttccgcagaagttgcatcaaccattattggtggctccttctacatgcagctatatagtattctacagacaaatatgcttcagagggaccaaatacttaacgcgatgaagcaggtgagtggttgtgctatggcttcaccaggcgtaccttctatggcttcaccgtgtatcccttccacaagtcgctcgacatctccatcaggtgtaccatcagttgacagatccatgctggaagctgcacaagaaagggagaaagagctgctgaatgaggtcttggagctgcaatggcggttattgtgcacacaagatgaggttcaaaagcttaaagcaaaggcagcgcagatctgatgctgaagctgttaagggagcattaagggcgcgtcatgataagatgatctgttcattcggttttcaaatggctatttagcataggagagagatacaaaattaaggattggtgtatatttaaaaaggtgctagtgatgctcgagtgtccaatcctgtctaagcaggacattaatttcgtacaatctgtgtgtttgtgtttatgggtggcatggcgctgtgtttttgttggagcgcaattcccaggttgggacttgggaaagatagcttaacatgcctatgggttttaatctttccttttgttgttgcatgactttttggttattctcattctacgtagattggatgaggttgaaagaaa

SEQ ID NO: 123848 - DNA, 2332 bp, Zea Mays
agcctacacgcccccgcctcctgccctcctctgtccacatcctcgcctctccccactagttcgctcgcgtgatggtggtgcgggagcagcggaacaagggttcgtcgtcggccaccctgtgacaccccgcccccgcccccgcggcggaacctgcaaacccggaggccggagctccgacttcgtcggccatcgaccgcgtctgatcggcgctgggacctgccgtccggacgaaatcggtcagcatggcggggcccaatgagaaggcggcggcgggaggcgggggtggcgagaggcgcaagtacccgatccacatggaggactacgagctgtacgaggagatcgggcagggcgtcagcgccatcgtgtaccgcgcactctgcaagccactcgacgagatcgtcgccgtcaaggtggtcgacttcgagcgcaccaacagcgacctgaacaacatcgttcgtgaagctcagacaatgattttgatagaccatcctaacgttgtcaaggcgcattgttcatttgcaaaagaccaaacgttatgggtggttatgccgtatatggctggggggtcctgtcttcacataatgaaatcagtgcatcctactggattcgaggaacccatcatcgcgactatacttcgtgaagtcctgaaaggtttagagtatcttcaccatcatggctctatacatcgagatgtgaaggcaggaaatattctagtcgattctcggggtggaattaaacttggggactttggagtctctgcttgcctttttgattctggtgatagacagagggccaggaatacttttgtgggaacaccttgctggatggcgcccgaggttatggagcaactacatggatatgatttcagagcagacatatggtcctttggaattactgcacttgaacttgctcatggtcatgctcctttctctaagtaccctcccatgaaggtcttgctcatgacacttcagaatgctcctccaggtcttgactatgaaagagataagaaattcacgaggaacttcaagcaaatggttgctatgtgtttggtaaaagacccttcaaagaggccttcggcaaaaaagttgttgaagcaaccatttttcaagcaagctcgttccactgattttattgcacgaaagcttttagaaggattgcctggccttggtgttagatatcaagctttgaaggaaaaggatcaacatttaatggctcaaaagaaaatgtctgatggaaagaaagaagaaatctcgcaggatgaatacaaaaggggtatcagcagctggacctttgacatggatgacctgagatctcaagcttcattgggcacagaatgtgaagacagtaccttatgcaaagattcagatatatctttctatgacttggacagtttacaggatcaagcaccagaagggtcacacttgttgagagatttctcaacgaagtatgatgctgacattgaaaatgatatgacaaccaaagataagtcagccgtttcatctcctgatcagcctgctagcttagtgaggaatgcttctatgcgtgggatgcccataaacggttctttcaggaaagacaactctacagaaagcttcgatttggaatgtcaagagaaacatctggacattgttccgactagctcatcccctgaaaggaagttttcttttagttcttgctcatcaaatgggctccttttgtccaaagagagctctaaacagcaaactagcatccacaaccttgacaagtgtaatggagggcatttgcatgtatcagatgaaacatcttctgaagctgctcctaagacacataaatcagcagaggaccatgatgatagatccaaacctccacttataagaggtcgatttagagttatacctgggcatgttgactcaaaggctcaaccacctggcctacagaagtgtcacagcatgcaggaccaaatacttaacgcgatgaagcaggtgagtggttgtgctatggcttcaccaggcgtaccttctatggcttcaccgtgtatcccttccacaagtcgctcgacatctccatcaggtgtaccatcagttgacagatccatgctggaagctgcacaagaaagggagaaagagctgctgaatgaggtcttggagctgcaatggcggttattgtgcacacaagatgaggttcaaaagcttaaagcaaaggcagcgcagatctgatgctgaagctgttaagggagcattaagggcgcgtcatgataagatgatctgttcattcggttttcaaatggctatttagcataggagagagatacaaaattaaggattggtgtatatttaaaaaggtgctagtgatg

SEQ ID NO: 123849 - DNA, 3098 bp, Zea Mays
ggatagcaaccgttttcttttcattcacatctgattaaacttggaggcaaatttgattttcttttaccacgtctccagatcgacaatctgaacatggaagcttctaaaccgggaaaagactcatctcccagacgagacgactgacaacaaatcacattaacgtccacgcgcaaaaacgccaataaatgggatgagcctggatcacaaaatttttagcgcgtccggccgttcgcccagcgcccatccatctcatcccagcgcgtccgaccaccaaaataggcgccgcccgccgcccggacccgatcgcctcccaatcccgggccgccgtgcgcccgtccgccgcggccacctccctggcctcctcgtcacctgcggcggcaccctctgcgccgccaccgcgttcacgcgctcccgtcgctgtcggccccgctcccctatttatatccccgccccgtcgctgtcggcaggcgcgcatcaagctcctgccccccctttcctcttcatcctctcctccctcgcggcgcgcacgctctccgccctcccaagtcccaaggaaacctatccaccattccggcggtcgatacatccatccgtccagggagagcaaggaataatcaaccaatcggccagcgaatcagtcgaagggaggaggagagccggagtccgaccagcgcggcgcgggttggtggtcccttgcgtctccggctctgccccgcggcgccgtcttttgtggttcttgcgttgcgtcgaggaagcagaatccgcgacgaggagaaggagggagaggcgttcatcgggttgcgctgcgtctgtcgcacggcaagacggcggcgttgaagatgcgggtgctggaggaggacctcttcccctccaccccgggcaaggtgaagatcgagcgggcgggcgccatgaaccggcagctccaccgctgcttcgcgtccaccagcaccatgttcctgtgggcgctgttcctcgtcgccatgacggcgtcctacctcagcttccagtccttcgtcgacacctcctccaagtacttcgccgcctcctggggcggcctgcactgggagaggcagatccgcgcgtccgccgtgccgaggcggccccccgggtcagccgccggggccgggatgtcggtgctcgtcacgggcgccgcgggcttcgtgggcacccactgctccctcgccctccgcaggcgcggcgacggcgtggtcggcgtcgacaacttcaacgcctactacgacccgtcgctgaagaaggcgcgcagggcgctgctcgcctcccacggggtgttcgtcgtcgagggcgacatcaacgacggccgcctcctggccaagctcttcgatgtcgtgcccttcacccacgtgctccacctcgccgcgcaggccggcgtgcgctacgccatggagaacccggcgtcgtacgtgcactccaacgtcgccggcctcgtcacgctcctcgaggcctgcaaggacgccgacccgcagccggccatcgtctgggcctcctcctcctccgtctacggcctcaacgacaaggtccccttctcggagcgcgaccgcaccgaccagccggcctcactctacgcggccaccaagaaggccggcgaggagatcacgcacacgtacaaccacatctacggactctccatcaccggcctccgcttcttcaccgtgtacgggccctggggccgccccgacatggcctacttctccttcacccgcaacatccttcaggggaagcccatcacggtttaccgcggcaaggaccacgtggacctggcccgcgacttcacctacatcgacgatattgtcaagggctgcctcgcctccctggaaacggccggcaagagcaccggcaccggcggcaagaagcgcgggccggcgccctacaggatcttcaacctcggcaacacctctcccgttacggtgcccaacctggtgtccatcctggagaagcacctccgcgtcaaggccaagaagaacgtggtcgagatgcccggcaacggcgacgtgcccttcacgcacgccaacatctccctagccagggagcagctcgggtacaaacccaccaccaacctggacgtcggcctcaagaagtttgtcaagtggtacctgtcctattacggctacaccaggggaggatccaagaactcgcgacattgatccgtgctaattctttctccttttcctgctttggcccggccgtggccaccatgctaggtcggacattgacattggattttgttggttggtggaaatatgttatgttaggatgttcgtcgaagaaaaatccttcgcttggtgtggagaggtctggaggaagaaagcaatggagagcagtcttttttttttcctttttccttcctccgtcttctttctctctgtgtaaattggccgttctccattaatcaaactgcaattctaaagtcgcgctgttcattgcgccgtcagactgtcagagtaaccgccggagacgagggagaagaaatcggcggtccggtccggtccggtcgtggcagtcctcgtgcaaatagcccgcggcaacgtgggcctcgccgtcgtggataagataagcggcctgcgactgccagcgtggtggcgtgaggtacctcgaaccgcgcgaagtggtcgccagctggctcccgcctcgctcggtccctctgcactgccggtgggccatctgcagctttgttgctccgtgggacccatatgtctgttgagtctgaatggagatgggtcatgttcatgcctgtggggttcataccccacgtaatggtagctcacatgggtggggccgtcagacgcggttgcgtgggccttcgtctctgagctgccatagaggatagtacgaactgcaattcttttatatatcaaactggatgcgaatgtgcattgtgcttgatcaggattctattcctagcgtggctccagatgccgccactgcgtgcatagtacgaagtagttttacatttcgtcttttattttaaaattcacaccgtaaacagtgtgtttaactatacgagtaaactgatggatatgtctacactgttgacaatattgttttagagcgtatttgattctaggactaagattgagctc

SEQ ID NO: 123850 - DNA, 1406 bp, Zea Mays
tgtctgtgatcatcttgctaacaaccttccattatcttttcctccttcttcttcttcttttgctccctgctttctctagctctcagctcagctcagcgcgctcacaaacaaatatctgtcctcttcgatcggatccacaactactaaagcaccaccgtaccaccattaccagaccggcgcccgtatgcgattacccggcaaattagcacccgggttctgatcgatcatcgtcagcccttggattcattccatcctcgttccattgatacggtacggtggccaagctaaattaagaagcccacacccagcgtcgtcgtcgtgcttgcaattgcatcttcttccacatgtctccttcaccgccgccaagcagcggctgcagcctagcagtactagtaggcggcacgagtactgcagggtcgtccaacaagttcaggcacgccatcctcaggaacctgctcctacggctcagcaacaaggacggcgctgcgtcgccgtcgtggtccagtgccatgagcctgcgcgagaggagggacgccgtcaggcacgccgccgacgccgccctcgccgccgcacggggcgccgcgccgcgctggagccgggctttggcggcggagctctcgtcgcagtcgcagtcgcagcagcatggccggtggcactggcacgacgacgacgcgccccacctgcttgtcgccggcgccgatgcacggccttcgggccatcagacgtgcttgccgtgcgggacggcggcggcggtggcagcagccggctgcaggaagaccgtcccgaggcggcggaggctccgggtccgggccaggcccaagagcggagccactacggcctggtccgctggcgctgtcgcgcgggtcgtggcgaggcggcgggcgcgggccggggcgctgaggaggatggtgccgggagggcgagggatggcggacgagtgcacgctgcttggtgagaccctagactacgccgtgtcgctcagagctcaggtcgacgccatgcagctcctgttgaggacgctccagcctccaggccacgccaacaacaacccttaatttgctgaagcagcagtagtgaggggaattcgaactactacacatatatatacgtactgaaatgtgatcaagaccgtccatcgttcatggatataatataagacatgcatcatgacggaatggagagcttttccccggccctctcttcctttattctcctcttgcatacgtgctgctagcagctctcttcctgtttgtttcttcattctgtagcactgagagagatcatgaggcgaaggtcatgtgtgcgtgccgtatatatatgtacagtacagtactagtgtgtgctacgtacgtgctactccgacacaaatatatatatgcatgtacataagtttttggttactcttt

SEQ ID NO: 123851 - DNA, 249 bp, Zea Mays
atggcgctggccgtcgtgcgcaagaacgcgacggcggcgctacttctcctcctgctgctgtcgtccacggtgtcggaggcgcgccacaagatttggcacggccccataatctacgcgtcgccgccgccgccgcctccttcacaccacagggacctgtatttgccctacatagccgagcagaagaccctggcggcgccatcgccggaagacgctactggtgactcgcagtgggtgcctaggaagccgtag

SEQ ID NO: 123852 - DNA, 2051 bp, Zea Mays
gcccacaagtcatatgcacaaaatctcatttgagcgtgcaagctccttcgcctcgaaccctctcgcgcttggcttgctttcactctccagggccccactcccacctcgccgccgcagccatggcgatcacagcgccaactcccgacatcctcggcgagcgccagtccggccaggacgtccgcacgcagaacgtgatggcttgcggggcggtggccaacatcgtcaaatcctcgctcggccccgttggtctcgacaagatgctagtggacgatattggtgatgttacaatcactaatgatggagcaaccatacttaagatgttggaagttgagcatccagccgccaaggttcttgttgagttggctgagctccaagatcgtgaggtaggagatggaactacttccgttgtcatcatagcggcagagttactcaagagaggcaatgatcttgtgaagaataagatccatccaacctctataatcagtggctacaggcttgctatgcgtgaagcctgcaaatatgttgaggaaaagttagcagtcaaggttgacaaacttggaaaagaatcccttatcaactctgcaaaaactagcatgtcttcgaaattgattaatagtgacagtgatttctttgcaactttggttgttgaggcagttcaagccgtgaagactacaaatgccaagggagacgtgaaatatccaatcaagagcatcaatattttgaaagctcatggtaaaagcgccaaggatagttatctgttgaatggctatgcactaaacacaggccgtgcagctcaaggaatgcctacgagagtaactcctgctagaattgcttgtcttgattttaaccttcagaagacaaaaatgcaacttggtgtccaagttcttgtaactgatccaagggaacttgagaagattcgtcagagagaatctgacataacaaaggagcgaattgagaaaattctcaaggctggagctaatgttgtgttgaccaccaagggaattgacgatatgtccttgaagtactttgttgaggctggtgcgattgcagtaaggcgtgtgcgcaaggaagatttgcgacatgttgccaaagccactggtgcaactatggtgtctacttttgcggacatggaaggtgaagaaacattcgattcatcattccttggccatgctgatgaagttgtggaggaaagaattgctgacgatgatgttattctggtgaaaggcacaaagaacaccagcgcggtctctataatacttaggggcgcaaatgactacatgcttgatgagattgaacggtccttgcatgatgccctgtgcattgtgaagagaaccctggaatcaaatatggttgttgctgggggtggtgcagttgaagctgcgctgtcagtttatctggagaaccttgcaacaaccctgggttctcgggaacaattggcaattgctgaatttgctgagtctttgttaatcataccaaaggtactatctgttaatgctgcaaaagatgcaactgagcttgtagcaaagcttagggcatatcatcatactgctcaaacaaaggccgacaagcaacattattcaagtatgggccttgacctctctaagggtatcattcgcaacaaccttgagtatggcgtgatagagccatcgatgagcaaagtaaagatcattcagtttgccacggaggctgccattactatcctgaggattgacgacatgatcaagcttaccaaggaagaagagggtaacgaagagtaagcagcccaccagtagtgggctagtggactcccatgggatggttgccatagcatgtagcacttgttttttcacttatcgtttacttttgcttgctgtgagcattcgtttgtaggaaaagtgagaacggatgtgtatcaatccgtgttgggtgacgatgactcacggatgaatcaaatatttgcgtatattggggccaaaacagttctatctgaaggatttaagttggaaaatggaatggtttcgtgtagtgattatttgattaactacttgtgcggaacactggatacattcggt

SEQ ID NO: 123853 - DNA, 2507 bp, Zea Mays
caagaaaggaacaacatgaaagtgatctccatgttggaaacctaaaaacaagggagagaaaaaaaaaactcgcatcgcgtccttggttcctcgcattagccacccactggattttcttgccaacgagcttcgactacaccaacgccgcttcgtcccagtgcttgctaatcatcggctcctcttaattgcagcaaccaccacgcttcgtgttttcagatcaaagaagtgggggaacaacacagatttggagcggcacgccagcaatacggaccgggggtgacctgaggcgtggagatttttggccgctgcctgcatctccacgtcgcggtcccaatcaagatcattatttctttctccttccttgtccccgcccaaatcgcaaggcttcgttgcgaatcgcccttggcgtggccccaggattcgacgccccagcgccctcgctggaatcgtgggcgctgtggaggaggactcgaggcggccgtcgcgcttgtctcgtctctcatcaatctcactctctctctggtctctctctttttttaactgcggggattcgccctgatttagaggagcgagttgctggtctcggcgccgtctagctcgtcccggaccgacgatttggggcagggcaggtccaaaggcagcagcatcatggaagattgagaaaatttggaggcatctactacaaggttttcctgtgtgccctcaagacagggcgctgtgccgtgtgggcctcctcttgggcatccatggggttcctcagccttgtgggcaactcctttgggtgctctgcttccggtgagcgtcttgtctcagctgcccgcgacggcgacctgcaggaggcacgcgcactcctccaatacaaccctcgccttgcccggtactccacgttcggcggccggaactcaccgctgcactatgccgcggcgcaaggccaccatgagattgtctctctgttgcttgaatccggtgttgagatcaaccttaggaattacagggggcagactgctttgatgcaagcatgccaatatggccactgggaggttgttcagacactgatactcttcaatgcaaatgtgcacaggacagattatctgaacggtggaactgctctccattttgctgcactgcatggtcatgcccgatgcctccgtcttgtgcttgcagattatgttccaagcgtaccgaatttctgcaccctggtgaatcataagtcatctgaagaagattcaactgctgattttgatcatgatgctttggtcaagatggtgaatcagaaggcggatggaggcttaaccccacttcatatggcagcattaaacgggcatgtagagtgcgtgcaattgttgctggacttaggggcatctgtttctgaggtcactattgaggatggaacaactatagacttaataggggccggtagcaccccacttcactatgctgcttgtggtggaaatgctgtctgttgtcagctcctaattgctcgaggggcttgcattgctgtgcaaaatgctagcggatggacccctttaatggtggctcgttcctggcaaagaaattcagttgaagaaatcttaagtagagaaccagagggtcggatacacactcttccttcaccttatctctgtcttccactcatgagtatcatgaacattgccagggagtgtggatggaggtatctaaaccagtcacctgtttgtatcgacccttgtgctgtctgcttagaagggagctgttccgttgctgcagaaggttgcaaacatgaattctgcacaagatgtgctctatacctttgctcaactagctacacgtcagcgagcccagcgggtgcaataccatgccctctctgcagacatccgatcatctcgttcaacaccctccccggcacgagcccgataagagagttgccgaggaacagcctctcgctgtcgttctgcacggcgtgcccagccgtgagctccgactcttccgccccggtcggcgcccatccgtgccgctccgagttccagtgcgtccgcctgccgccgatgggctcgtcctccttccgctcgctgagctgccagaggataccagcgatgaagctgcacccatcgttctgcatgggttccatggacacgaacccctgcctcataaggtgctcgaggttcgggtctggccttgggcggtcggcttcccagagagagggggctaccagaagagcttggcctgtgacgttcagccccattgctgccaccggcagctgaattggcggttttgtgccccccgtttttttgaggtcgggttttgtttgccaattttttggttggtttgatctaatgttcaccgttgtgatcgatatggtatgaactcgctggttccaactccttgttgattcggagtacttatatatgtctgatcagaagcagcacgtaactgcttactaccttggtatgtaaataaccccgtggtgtttgttgtatgtttctgggaggcaatgaaatgcaaattgaaggaatcagttttttcagtgc

SEQ ID NO: 123854 - DNA, 2460 bp, Zea Mays
cgaaggaacctgctcggcctcgccgtccccggcgcgtggagcgcgtcgcgtccgccacacgcaccgaccatcccctgccctcatcagcaatccccggcccgcagcgtacaaatacacgctccccgccgctccgacctcactttccccgcctccatcaccaattcacgatctcctttcccgcaccgcgccccggatcgccggctcgcaattccggagttaaattcccctccaccgcaaccgtcatgggcggctcccacagccgcgaggacgtcgatctcacctcctccgacgaagaggaggaattcgaggacgactatgacgcccgatcacccatcgcggaggccgcagcgagcgcggggcagcgcgacgacgacctcctccgcaccgccacaccttcctcgcttgaggccatcgacgccaagctcaggtcgctggatctcaagtaccagagacctaccgccgccaagctctacctccacgtcggcggggcctcgccttccgcgcgctgggtgcccgccgagcgccgcgcgacctacgcattcgtcgaccagtcgagcgacgacgcctcctcccccaggtggttcctagaggttgggccggggccgcgggtctccgcgcccgtggactcggcgctccagctgaagacgatccccgcgcagcgccgggcggacttcgccgcgagcgggtccgtatgggctctgcgactacccaccgacgccgaattgcgccggttcagggtggagtacgagcgctgtcttttcgagaacacgtacggagtggaggccacggacgaagggcggaaggaggtgttcggcgccgacttcgccgcgtgggcgcggcctgccgaggccgacgacactgtttgggccgacgcggaggaaagcctcacccctcccgccgcagcaccagggaaggacctgcttaaggagttcgaggaggaggccggcgacggcgacagcatccagagcctcgcgcttggggcgcttgacaacagcttcttagtcggcggcgccgggatacaggtggtcaagaacttccgccacggcttgcacgggaagggcgcgtcggtgaagatctcgggaggccgtggcggcagtgggagcgcttattcgacgccgaagaaggcactgctgatgcgcggcgagactaacatgctactgatgagcccaggagaggctctgcattccaatggtgttcaccatgttgacgttgagactgggaaggttgtcgcagaatggcggtttgagaaggatggagctgatatcacaatgcgagacattgccaatgacagcaagggagcgcagttggaaccctccgggtcgacattcttgggcctggatgacaacaggttgtgtagatgggatatgcgcgacgccagaggccgggtgcagacaatcggtagctcatcagactcaccagtgctgaactggtcacagggtcatcagttctcgcggggcaccaatttccagtgctttgcaagtactggggatggttcaatcgttgttggttctgtggatggcaagatcagactctattctaagagctcgatgcgtatggcgaagacagcattcccaggccttgggtccccgattacacatgtagatgttacttatgatgggaaatggattctgggaacaactgacacatacttgatcttgatatgcactatcttcaaggacaaagatgggaaagaaaagactgggtttagtggccgaatggggaataggattgctgcaccaaggcttctgaagctcactccacttgattcagttttagccgggaccgacaacaaattccacggcgggcaattctcatgggtaacggagaacggaaagcaggaaaagcaccttgtcgctacagtcggcaaattcagcgtcatttggaattttcagcaagtcaaggacagcaaccatgagtgctaccgtgatcagcagggcctcaagagctgctactgctacaaagttgtcctcaaggatgaatcaatcgtcgacagccgcttcatgcacgagaagtttgcgacgagtgactctcctgaagctccgctcgttgtcgctacgccaatgaaagtcagctccttcagtatagcaaatcgacgctgactccgaagctcttttccccagttgtgcagaaataatctgagaagttgcaggtttttgttcagtttgttcctttttcctcttttagacggtttggttagttctgttggtacagaactgatcgaggttcctcccgagaagaactggtttttgtgtcgtgtgcatgtctggtcatttgtagcgggctagcggctcggtaaaatggtgtgtatgtctgttggataaaatgtaccatgtgacaaaaaaaaagtaattttgatttgagactctagttcaagtcttacttttaggccctgtttgtaaactccggagctaatagctagctgccaaaataggtatagaggttacaaacaccattagctaa

SEQ ID NO: 123855 - DNA, 1078 bp, Zea Mays
gctttacctggcgaccatccgttctcggcttctggcacacagcaagacgattcagacgaacagagcgagggagatgattggttccgcagaccaccgcaccaacgcggagatgatttggttctcgtttccaagattcggtccgtcttttcctcactccaccctttttctgggtttaaaaaaaatgggacgagggagatttcatccgtccgtcattccgtccaggattgcagaatccaagaagccagcatcaaggctgccgtgccgtgccgatgcttgtcaatcatcgcctccaccaccaggagagcttgattgaggggagctgggtcaccaccagccacccagctactccctccatttccagcccaccgagtgactagctgtgagagatggcagtagtatgtattacaaaatcatgaaacgcgatggttttcttcttcttctttttcttcttaacaaccccatattatatgattatcatctggaagagaacatgaacattgaaaggagaacaagtgctaagacgataacttataattcctggcgacaacaatggatgatgcggtgatgattgctgtggcggaggcctgaatttcccaaaatggctaggaaggaagaacgtccctaggtcccacatctcacggccatccaaccaatcaggcaaccaagcatccaaaggtgaggagagagatgaatccagccgccgccgccccagttggcaggggcacggcgagggagaccaggtcgcgctgcggcagcggcagcgtgagatccgggcgccggcgcgacccgccccggcgtgcccggctgctgcagcgcccgcgagttcggcggcccgcccggcctcatcgcgcccccttgcctaggtgccgttcgcgtggcgcgcgcgacggagagagagagacgccaaacgggaggacggggtcggggggggagaagcgcccgggcgtgacggctgcgcgtggtctggtggattcgggtggctcgctcccgtcacgttcgcgtggcgttgcgtcgcgtcgcgtttgggcttgcggggatgggagctgggaggaaagcgggaggagcaggcagaggcgga

SEQ ID NO: 123856 - DNA, 2886 bp, Zea Mays
cttccctccccgagaccttcgaggggatgaatcgctagcgtcaggatcgtagaaatatagcctagaacatatactacacataggaggtcaaaatccaccaatccatatagtgctctgcgtgcattagaagcggcagaagcacaatgggcaggtacagcgacgggaaggacagcggcgagaccggcggcggcagctacccgctggtggcggtgtgcatcgacaaggacaagaacagccagaacgccctcaagtacgccaccgagacgctcgcccacaggggccagaccatcgtcctcgtgcacgtcaacaccaaaggcacctcgggtggggtggcggacgccgccgggtacaagcagccgacggacccgcagatgaaggacctcttcctcccattccgctgcttctgcacgcgcaaagacatccactgcaaggacgtggtgctggacgaccacgacgtggccaagtccgtcgtcgagttcgccgcgcacggcgccgtagagaagctcgtcgtcggcgctagcgctaggggcggcttcgtcaggttcaaggcggaaatctgcaacaccatctccaagtccgcgcccgacttctgcaccgtgtacgtcgtctccaagggcggcaaggtgacgtcggtgcggcaggccgtccggcaggcgccggcagtgtcgccgctccggaccatgatccatgggcccaagccggaaccagagccggtgcacgcgcagaaatggacgcctccgcctccgcctccagcggttcaagacaaccacatcatgtaagctactgcttactatcttgtggccacgcgtacggatgcaatgcaacccgatcgaacattgtgatggattggagtgagagtgacacccctgtcgctgtggcgtgcacggccggcggatgcacaggtcgccgttcgcgaggacgacggggcacagcgccgggtcggcgcggaaggcgttcccggacttctcgctgccggagtcgtcggacatatcgttcatcgggtccgccccccgcaggagcacggagcggtacccgccgcggctgtccagcgggtcggacggcgtggaccagcagcagcagcacagcttcgaggcgtcgcgcacgcccagccggtggggcgactcgttcggcaacgacagcacgtcgcactcccagaccagcacctcctcctggtgctcgcagcctccggacgagatggaggcggagatgaagcggctgcggctggagctgaagcagaccatggacatgtacagcacggcgtgcaaggaggcgctgagcgcgaagcagaaggcgctggagctgcagcgctggaagatggacgaggagcagcggtcgcaggagacgcggctgacggaggagtcggccatggcgctcatcgagcaggagaaggccaaggcgagggcggccatcgaggcggccgaggcgtcgcagcggctggcggacctggaggcgcagaagcggatcagcgcggagatgaaggcgctcaaggaggccgaggagcggctccggtccatggccgccggggcgcgcgagtcggcggtccggtaccgcaggtacaccatcgaggagatcgagatcggcaccgaccgcttcaacgaggcccgcaaggtgggcgagggcgggtacggccccgtgtacaagggccacctggaccacacgccggtggccatcaaggtgctccgccccgacgcggcgcaggggcggtcgcagttccagcaggaggtggaggtgctgagctgcatccgccaccccaacatggtgctcctcctgggcgcctgccccgagtacggctgcctcgtgtacgagtacatggccaacggcagcctggacgactgcctgttccaccgcggcggcggcgggccggtgctcccgtggcagcaccggttccgcatcgcggcggagatcgcgacgggcctcctgttcctgcaccaggccaagccggagccgctggtgcaccgcgacctcaagccgggcaacatcctcctggaccgcaactacgtgagcaagatcagcgacgtcgggctggcgcgcctggtgccggcgtcggtggcggacaacgtgacgcagtgccacatgacgtcggcggcgggcaccttctgctacatcgacccggagtaccagcagacgggcatgctgggggtgaagtcggacgtgtactcgctgggcgtgatgctgctgcagctggtcacggcgcgttcccccatggggctgacgcaccacgtcgggcgcgccctggagcgcggcaccttcgccgacctcctcgacccggccgtccacgactggccaatggacgaggcgcaccgcttcgccgaggtctccctccgctgctgcgagctccggcgcaaggaccgccccgacctcgccaccgtcgtgctccccgagctcaaccgcctgcgcgcgctcggcgaggacagcatggactcctgcacgaccatgagcggccgcggcggcatgcacagctcctcctccgccttccacggcaacccctattcgcagccacgacacgacgcggcgagcgacccgacgcggccgcaccacgtctcgaacgcgagccagtcagccatggctccatggaggtccaactacaactgagagatcgcgagcgcatctgagacaccagcccgtcgccgccatggagcagtgcatgcagcaacggtctcttggtctgctgaatggactgcgagtgctgttaaccaatgcagagctggcagaagcagagcgtgccatggcaatgccaatggtgcagtgcatagtttgttgtggcagtaaagttgtgaccgtgcagtgtgtagtttcttcaaaccaaaacaagaaagaaagaaaaaaaaagaacatgtgaatttgtgtaaacgcagactgaagaatgtcaaagaccaaagatcggta

SEQ ID NO: 123857 - DNA, 1472 bp, Zea Mays
gcaggctctccgatccatccatcgcccactactactgctagaccacctgcctgcctgtgcctagctaccacgacgacacacctcatcgccccatatccgcctgcctgccttcccatcacatatatctcccactcgtccttcttgctccggccgacgagatctccatatatacctgctagcgagcgagcgacgacgcgaggcgcgctagctagctagctgttggcttgagatcgatccgtcgactaagctatagctagcagccatggggagggcgccgtgctgcgacaaggcgagcgtgaagaaggggccgtggtcgccggacgaggacgccaagctcaaggcctacatcgaggagcacggcaccggcggcaactggatcgcgctaccgcacaagattgggctgaagagatgcgggaaaagctgcaggctgagatggctcaattatctgaggcccaatattaagcatggtgacttcacagaagaagaggagcatatcatttgcagcctctacattagcattggaagcaggtggtccatcattgcagcgcagctgccggggcgaacggacaacgacatcaagaactactggaacaccaagctgaagaagaagctcctcggaaagcgcgcgccgtccaggcgcgcgaggacgaaccaggatccctgctacctcgccgcgggagccgccagcagcagcagcagcagcagcgccgcgacggccacgcaagccctaagcgcgtcggctctcgagcggatccagctccacatgcggctccaaggcatctacggcgcgttagcttgcagcggcggcaacgacgacagcaacgctgccttcgggtcggcggcggcggcgccgccgcagtggccgaagcttgaggcgctgtcgcaggccaacaggctgctcccggggtcgctgccggcggacgccatggccacaaccgtgagcgtgcagccgcacccacagcatctggtcgaggtcgaccaccaccagagcctcgccgccgccgcactcgagggcgagcaacagctcagctctgccggtgaaggaggctttttcgagcggcccaaggtagatttttactctccatcagccgaggtcgccgccgccgccgccgccagcgtagagatgaactcggtcgccccgatggttgttggcggctacgcgggcgccgccggattcgggcctcagcaccatcacgacgagctctacgacttcctgtacagcaagtacggatcagtgggcgggctggcgcacgacggcgggcatgttccaacgttgccagagctgcagtgcccggacggcgctgccgccgtcgtcggagccgacgagaagttctcggcgtggaccgcggccgcctgcgattacggtgccgcggccggcggccatcagatacagggaaactccattgttggtagcagtctgcacgactacgtgctaggcggctacggtcaatgagagtagggttttggtgcca

SEQ ID NO: 123858 - DNA, 4018 bp, Zea Mays
atggcgccctctgccgctgccccaggcatctctgaggctgagggggcaccacgcatggccaagttcctctgcagctttggaggtagtatccttccccgaccacttgatggctgtcttcgatatgttggtggcgagacaaggattgtcatattgccgcgtgacatatcatatgccgacctagctgcacggatgagagatctctacaaggatgctgataccatcaaataccagcaacctgatgaggatctggatgcgctggtctcggtcgtgaatcacgatgatgtggtgaacatgatggaggagtatgacaaagtcactgccacaggggaggcgttcactcggctcaggatcttcttattttctcagcaattggatgacaatgctgcatcagtggctgtgcattacaatgtagacgagcgggaaacagagagaaggtatgtagatgcgctcaacagccttggtgatgttaggtcaccttcctcccctgtatctgtggagcagctttttggcatcggaggcaatgattcaggaattcctgattttgctggcttgagacatttgaatgtccctcgtccatcacatggtcagaggtatggagagatggattctccttggagccctgcttatgtctcaccaagccagtacagagtgcatgacccgagggattttccaatttcaccgtcatctgcaaggttccaagtaggagcggaggattttgatgacaggattcctgacgactttgtaaggcagtcaccaaaatatcattattatgaggctcaatcaccatcacatatggataatttagtctggcttccacctggtgctgtaattcagcaaaatgcaggtttccctggtgatttgagcaagcacaataaatttttggatgggaacagtggatgtgatcactgtggttcactattccacaagggtcagggttcggtgactgatcctatctatatgaatcctcgttggactcggccagtccaacaacattttgaccaaccaagcatgattaatgattatcccggtcaccatgctaattcttgtccagattactgccgccctggtgagcattatgcgggaggtcaagatgttagattggaaaatggtgtttatgttaaagagcaaaatggtggtcatactcccatgctttataatgagtcacgtcctcacgatagagtctggtatgcgcataccaaccaaagtcatcagcggtatgaggatccaaggctgcattatcctactaatgatagagtgatcgagccatacattgtcgatgctagctctgtaaattccgcatttgcaccaaacaaagtatatgaaatgcattcagcatctcttggtcattctagttctagccatgaaagtcctcactattttcatggtagcagtgagctcataaatgacgcatatcacaaccaacaagttggaggcagtgggtcatatgtgcagccagcagggtctgaagaatcccctggtcagcattacaaccacttttcggcctatggtgcagattccttttatcaaatgcaacaaaatttgccacccattcaatctttgaggaggagagcgaacagtcctgttcacactgcctcaccatatgattccccacacctgccaataccaaatgggagcattaacatgaattctgttagaaatacaggtgatgcgagtcccaggatagcaggtcttattggatatgatcgaatgccaaacccatttactccgcccaatggcagcatactatatagagttggtgggcatgatgttcctgcagctatggagaacactagtgcttttggtcctaggtctaatccaactgctgctcagtatgttcagccttttattgctcctgaatcaatccagcatcaacctggagttcccttgagggaggtttatcctgaaagagcataccctgaacccatgccgtcatcatatgctgatggcaaagtagctgtttctgcattgcccctcaccgaccaattattcaggttggatataaacacaatgaagaaacttgaaggacaagatgatgggaactctactcgaaatgtgaatgaaacaactcttttgcatgctgtggatgaaccaagtaccttaccccaccatgttggatctgtacatgaagtcgatcctaagcaggagaagctaaccgaaaaagaaagcaggcaaaagcaacatgaagctggggctacagcactgcaggaatgtgaggatatttcagaggatatgttgaatttccttcctgaattaattgcctctgttaaaaaggtaacactggaagatgctgctgagacacaaatagcccaatcagatgctaatgctgctgtttcacctgttcctgatgatgacgataatggaaagaagctggatgaggcaacagctggtgtaagcaatgcttcaagttcgagcatggtaactactaaactaccaaatggtctccactctaatccttttgttttgcagaatacaaatgcaaatcaggaccttgatttgcaaggaagccttgatcggcagaagagtttcaagattgagtctacaactgctgaagctgaagctttgtcgaaaggactacagactataaaaaatgatgatttagaggaaattagagagctgggttcaggtacttatggggcggtctatcatggtaaatggaggggatgcgatgttgctattaaaagaataaaagcaagttgctttgctggaagaccatctgaaagagagcgtttgatcacggatttctggaaagaagctctgatcctaagctcacttcatcatccaaatgtggttgcattttatggtgtagttcgtgatggtccagatggaagcttagcaactgttactgagtttatggttaatgggtctctcaaacagttcctgaggaaaaaagacaggacaatagatcgccggaagagagtaatattagccatggatgctgcatttggcatggaatatttgcacgggaagaatatagtccattttgacctgaagtgtgagaatctactggtgaacatgagggatccacagcgaccaatctgcaagatcggtgatctcgggctatcaaaggttaaacagcatactttggtatctggtggtgttagaggaaccttaccgtggatggcaccagagcttctgagtgggaaaaacaatatggtgtcagagaagattgacgtctattcgtttggaattgtcatgtgggagctgcttactggggaagagccatactctgatatgcgtgctgctgaaattattggggccattgtaaacgattccttacgccctcaaatcccttcatggtgtgatcctgagtggaagggattgatggaaagctgttggtccagtgatccagcggagagaccgtccttcactgatatatctcaaaggttgaggaaaatggccgctgcaatgaatgtgaagtgaaggttcggaagccatatttgtcttgtaagtgttcccacatccagtataagtgattacaagaggaaggtagagttcaaacaggattgatttgagtaaatatgcccaaaatgtcttggcagcatctcagtttaccctactccaagtgataattttattatgtcatggagattccaaagcatgtttgatgcgagccagctgttgggtttatttactccttgtatgaccattagtaaaagggaaaactgacgtttctgcttacctgtttcaggattttccttagtcctggagtaacccggctgtcatttgccttgtgtcgaaaataagtatgctataaagcgttctgtcttgatgggaactgttgggctgtaattgtaaataagttttgacttgcttcatcttgctgtgcaaagtagtaattaataggcacgatcaaagctgggcacagttatcttttccccccatacaaaagtgtgtcctaggactaggaggagagatggatcgaacacgactagagctgtacatagtatactgtttgctctgtatataatcatcacttcctatttgaatgctcataagtttgcacagtcccttgtggtct

SEQ ID NO: 123859 - DNA, 3767 bp, Zea Mays
atggcgccctctgccgctgccccaggcatctctgaggctgagggggcaccacgcatggccaagttcctctgcagctttggaggtagtatccttccccgaccacttgatggctgtcttcgatatgttggtggcgagacaaggattgtcatattgccgcgtgacatatcatatgccgacctagctgcacggatgagagatctctacaaggatgctgataccatcaaataccagcaacctgatgaggatctggatgcgctggtctcggtcgtgaatcacgatgatgtggtgaacatgatggaggagtatgacaaagtcactgccacaggggaggcgttcactcggctcaggatcttcttattttctcagcaattggatgacaatgctgcatcagtggctgtgcattacaatgtagacgagcgggaaacagagagaaggtatgtagatgcgctcaacagccttggtgatgttaggtcaccttcctcccctgtatctgtggagcagctttttggcatcggaggcaatgattcaggaattcctgattttgctggcttgagacatttgaatgtccctcgtccatcacatggtcagaggtatggagagatggattctccttggagccctgcttatgtctcaccaagccagtacagagtgcatgacccgagggattttccaatttcaccgtcatctgcaaggttccaagtaggagcggaggattttgatgacaggattcctgacgactttgtaaggcagtcaccaaaatatcattattatgaggctcaatcaccatcacatatggataatttagtctggcttccacctggtgctgtaattcagcaaaatgcaggtttccctggtgatttgagcaagcacaataaatttttggatgggaacagtggatgtgatcactgtggttcactattccacaagggtcagggttcggtgactgatcctatctatatgaatcctcgttggactcggccagtccaacaacattttgaccaaccaagcatgattaatgattatcccggtcaccatgctaattcttgtccagattactgccgccctggtgagcattatgcgggaggtcaagatgttagattggaaaatggtgtttatgttaaagagcaaaatggtggtcatactcccatgctttataatgagtcacgtcctcacgatagagtctggtatgcgcataccaaccaaagtcatcagcggtatgaggatccaaggctgcattatcctactaatgatagagtgatcgagccatacattgtcgatgctagctctgtaaattccgcatttgcaccaaacaaagtatatgaaatgcattcagcatctcttggtcattctagttctagccatgaaagtcctcactattttcatggtagcagtgagctcataaatgacgcatatcacaaccaacaagttggaggcagtgggtcatatgtgcagccagcagggtctgaagaatcccctggtcagcattacaaccacttttcggcctatggtgcagattccttttatcaaatgcaacaaaatttgccacccattcaatctttgaggaggagagcgaacagtcctgttcacactgcctcaccatatgattccccacacctgccaataccaaatgggagcattaacatgaattctgttagaaatacaggtgatgcgagtcccaggatagcaggtcttattggatatgatcgaatgccaaacccatttactccgcccaatggcagcatactatatagagttggtgggcatgatgttcctgcagctatggagaacactagtgcttttggtcctaggtctaatccaactgctgctcagtatgttcagccttttattgctcctgaatcaatccagcatcaacctggagttcccttgagggaggtttatcctgaaagagcataccctgaacccatgccgtcatcatatgctgatggcaaagtagctgtttctgcattgcccctcaccgaccaattattcaggttggatataaacacaatgaagaaacttgaaggacaagatgatgggaactctactcgaaatgtgaatgaaacaactcttttgcatgctgtggatgaaccaagtaccttaccccaccatgttggatctgtacatgaagtcgatcctaagcaggagaagctaaccgaaaaagaaagcaggcaaaagcaacatgaagctggggctacagcactgcaggaatgtgaggatatttcagaggatatgttgaatttccttcctgaattaattgcctctgttaaaaaggtaacactggaagatgctgctgagacacaaatagcccaatcagatgctaatgctgctgtttcacctgttcctgatgatgacgataatggaaagaagctggatgaggcaacagctggtgtaagcaatgcttcaagttcgagcatggtaactactaaactaccaaatggtctccactctaatccttttgttttgcagaatacaaatgcaaatcaggaccttgatttgcaaggaagccttgatcggcagaagagtttcaagattgagtctacaactgctgaagctgaagctttgtcgaaaggactacagactataaaaaatgatgatttagaggaaattagagagctgggttcaggtacttatggggcggtctatcatggtaaatggaggggatgcgatgttgctattaaaagaataaaagcaagttgctttgctggaagaccatctgaaagagagcgtttgatcacggatttctggaaagaagctctgatcctaagctcacttcatcatccaaatgtggttgcattttatggtgtagttcgtgatggtccagatggaagcttagcaactgttactgagtttatggttaatgggtctctcaaacagttcctgaggaaaaaagacaggacaatagatcgccggaagagagtaatattagccatggatgctgcatttggcatggaatatttgcacgggaagaatatagtccattttgacctgaagtgtgagaatctactggtgaacatgagggatccacagcgaccaatctgcaagatcggtgatctcgggctatcaaaggttaaacagcatactttggtatctggtggtgttagaggaaccttaccgtggatggcaccagagcttctgagtgggaaaaacaatatggtgtcagagaagattgacgtctattcgtttggaattgtcatgtgggagctgcttactggggaagagccatactctgatatgcgtgctgctgaaattattggggccattgtaaacgattccttacgccctcaaatcccttcatggtgtgatcctgagtggaagggattgatggaaagctgttggtccagtgatccagcggagagaccgtccttcactgatatatctcaaaggttgaggaaaatggccgctgcaatgaatgtgaagtgaaggttcggaagccatatttgtcttgattttccttagtcctggagtaacccggctgtcatttgccttgtgtcgaaaataagtatgctataaagcgttctgtcttgatgggaactgttgggctgtaattgtaaataagttttgacttgcttcatcttgctgtgcaaagtagtaattaataggcacgatcaaagctgggcacagttatcttttccccccatacaaaagtgtgtcctaggactaggaggagagatggatcgaacacgactagagctgtacatagtatactgtttgctctgtatataatcatcacttcctatttgaatgctcataagtttgcacagtccctt

SEQ ID NO: 123860 - DNA, 3896 bp, Zea Mays
ctgacccccatttcgttccttccagatctccccgcccccgcatctcgcccgccagctaccggcgagtgggcgcgcgcccgccgccgccgcgatgtacctggcgtacgggtggccgcagtcgatccctctggacccggacgactcggaccgcgtggtcctcctccgcgtgctcggccgcctcctcctcgccgtctgtccggcttcgcttcacctctggtccgccgcccaacaccgggtccgcctagcccgctccgatcgctccccggagtccctcgccacccatggccacaacgcgcacgccgcgtggagccccgacgccaggaccgtcgccgtcctgacctcttccttctacctctacgtttacaaggttcagcactcgggaaagcaactgatcgtcggtggcaagcaggtcccggggctttgcctggctagtatatccctaatcatcaccgagaaggttcctctcgccaatggcgttgctataacgagcaatttcgtgtgtgacagcaaaagcatgctcctcggactatccaatgggcatgtgcaggtcgtgtcctggaacgctgagttctcagacagcttcaagcttggttgctatgtgtgttcatctgagaaacctactgctgccgtagatgcgttggtgtttgatcctcccagtttgcgagaaagctctaacgcaaggcctgctccttgctgcacaggcaattcttctattgtccatgttgagctgtcggtgaagctgagattgctggttgctttgtactcaggctgtcgcattgccctctgtactattggtaagaagggattaaggcagcctggcagcaccagagtggagagatggttggacactgatgatgcgatgtgtacttctgtggcttctgagcaacagattcttgctgtcgggtgcagtagaggtgttgttgaattgtatgatctagcagaaaacacacgccatatacgaaccatttcgttgtatgattgggggtattcagtggaagataccggtcctgttgcctgtatatcttggacgcctgacaattgtgctcttgcagttgggtggaaatttaggggacttactgtatggtctgtgtctggatgtcgattgatgtgtactattcgtcaaactggttcaaattctgcctcatctcctatggtgaaacctagcgctctaaaatttgagcctcttatgggaggaacatcacacattcaatgggatgataatggatataagttatttgctgtcgaagaaagcttgtcagaaagggttcttgctttctcatttgccaaatgttgcccaaacagagggctttcaggcacaacatattcccaccaggttctttatggggaagatcgaatccttttggtgcaaccggatgatgccgatgaactgaagatattgcatcttaatgttccaatttcatacatttcccagaactggccagttctacatgtggtggcaagcaatgatgggatgtacttggcagttgctggctctcacggactagtgctatatgatttgcgaaataaaaggtggcgtttttttggtgatgttacacaagagcaaaagatccaatgcaaaggcctattgtggatgagaaaaattgttattgtgtgcaactatgttgaatcgtcaaacacgtatgagctcctctttttcccaagatatcatcttgattatagttctttactctaccggaaacaactgcttggaaggccaattgtcatggatgttttccaggattatatattagttacttacagtccattcgatgtacatatctaccatgtggtggtctcgggagaattatctcctgctagcaatccagttttaaagctttcaacattgcgagaactttcaatcatgagtccaaaaagcccacctgtttcaatgcgcttcattcctgaacaaaatgacaaaggagcgctgacagaagatactcatggattttctgatcttttgtcccagcaaccatcaagatgtttgatcttgcggaccaatggggagctttctgtgcttgacatggacgatggacatgaacacactctcacaaattcaattgaactcttttgggtcacctgttcgcagtttgaagagaagggtagtcttatcaaggaggtttcatggcttgattacggtcatcggggtatgcaggtgtggtacccatcacatggagcagatcgttttaagcaagaggattttttgcagttggacccggagcttgagtttgatcgtgaggtgtatcctcttggtcttcttccaaatgttggtgtggttgttggtgtttctcagagaatgtccttctcaactgcggagtttccatgctttgagccttcacctcaagcccaaacaatattgcattgtttattacgacatctccttcagagggacaagattgaagaggctttgctcttggcaaatttgtccgcagaaaaacctcatttctctcactgtttagagtggcttctgtttacagtatttgatgcagatatatcaaggccaagtgcttcaaaaaatcaggcttcacaaaaagttgattctcccaagaaatctcttcttgagaaaacttgtgacctactacggaattttcctgaatatatggatgttgtagtcagcgttgctaggaaaactgatggacgacactgggctgatctgttctctgcagctggacgatccacagagatgtttgaggaatgcttccaacagaggtggtacaggactgctgcttgctacatactggtcattgctaagctggagggccctgcagtcagtcagtattgtgcactccgtttgctacaagctacacttgatgagtctttgtatgagcttgcaggggagttggttcgcttcttactaagatctggaagagattttgagaatgccacttcagactctgagaagctatctccaagatttctaggctattttctgttccgttcaccttataagcggcaatcttctgatttgaaaagtaactcaacgaaagaacttagtccacatattgcttctgttatgaacattctagagcgccatgctagctatttgatgtctggcaaggagctttctaaactcgtcgcttttgtcaaggggactcaatttgatcttgtggaatatctacaacgagaaaggcaagggtctgctcgtctggagaattttgcttctgcactcgaactgattggacaaaagctccaaatggatacactgcaaagccgacttgatgcagagttccttctagctcatatgtgttcagtcaagtttaaggaatggatcgtggtgctagctactttgttgcggcgtacagaggttttggtggatctctttcagcatgatttgcgattgtggaaagcatatagcattactctacagtcacatgatgtattcagggaatatcttgaccttcttaatatcttggaggaacagctttcgtctgtctctgatcttacattgcagaatggaccattgtcatgaatgctggacggtgacactgattgaaaaaaacaactgaatacggcgttttagccttgagttaattaacacatacggcgggaccaggaatctgatgtaaatagattattcagggtgtttttctctttgagcaacaccccgaggtgctatggcagttttttgtacagtgatcagctaagcacctattgttgtatcattagtttgttgcagcggagttgagtctgcattcttcgccttactgtaaatatgtgctgcgcccttaacattgtaagccatataccattctgagcagcaagttcttttctctgttccatagaatcgtgtttaaagctagaagcctagaacatgtagatagtcttcacctgatgtttgtagactccgagatattattaaaactgacactatgatttcttaattgcattttttccatggc

SEQ ID NO: 123861 - DNA, 3134 bp, Zea Mays
cccttctctacgcgtctcggtgcctcgccggctcgccgctcgcaatcgccggttcgccgtcgccatttgtccccttcccccccctcgcgaccgcccgcttcgagtgtcccccaaacaaaaaatccctcccgcctgcacggccctcgctggacgcggagcatggcggaggagcagatcgaagaggcgtccatggccgcggcggcggccacgccgttccagctccagttcgacaagcccatcccgttccagataaaaatggcagaatggaatccagagaaggatctgcttgctatggttactgatgactccaaggttctcctccatcgcttcaattggcaaaggctttggacaatctctccagggaagtgcatcacatcaatttgttggagccctgatggtaaaataatagcacttggcacagaagatggtttgattcttttgcatgatgtggagaatgggaagatgctaagaactacaaaatcccacgatgttgccattgtatctttgaattgggcagaagacgatccactgtcaaaggtatgctattgcctttgcgatataagtatcatataataacacatgtgtagttacaaaaaatttcagttgatttacaaattcagcactaatcaaaattagtttaggtctctactaaaacttctcattactgattcttctgctaatttattcagtctgacaaggatgagtttttatcctatgaagaccgcaccacacgtttctttcctcctcctcctgtgatgcctaggataggtggactacgttctggagatactggtcttgcggatgagaacgaagaagctattccagaattttctagtgcttcctgtcagcgttttaacattctgtgcagtggtggcaaagatggttgtgtttgcttcagcgtttttggaatatttcctgttggaaagataaacataactaaaatcccaatcaatgttggatcctctagaaagagttaccaactccaggatgcttcagtcagcaaggtctctttatcaagaaacctccagaaatttgttattctgtgctttggaaagttggttgataccgacaacctctctgacagctgcgaaaattctggattacattgtctctacctagatacttctatcttcttcaaccgaaaaaatgagctgcatcaggtgtcccaacaagcatcaagtattcaagatatggttgaagttgtccgtgcttctgtatctttaatatccaaacaatggtcaaacgccatgagtttattccatgagaaatttagtgccttgcccaatctgatatctacacatggagtggaatctagttctgaggatgagtttcttagccttttgtttgggacacgaacaagtccagcccttcaccattttttagctagttcacttggtgaagcgggtctcaagaggatagccaaggctgttgacagtgctggaagagatattcgtggcattatcactgagcatcttcagcctgcagtggagattatttcattcagactcgcagaattaagaggcctttcaagatggcgttcacgatttcaaactatcgggttagatggaaaccttattgatggtgtaactgagagtatagggatgctagttgttcaagtggagcgcttttcaagggtggcagccactgttgtttatctgtttcaaaatttctttgcctgggttttaaagtctgttagaatattattaaatgaacctaccgaccaagttccagcagcaaacagtgaacttgtggtgatttttcttaagtttcttcttgataaggatccaatcaaacaactacttgaagcagatgagagaattgagtgtgatatggatactgcaagacatgtagaacagctagtagtttttggaggatttacagacacccaatttttggaaaagagtttggtaaatcaattcaatgaattggaagatagcttgaaggaggctttcttgatgccatttactgctatctcttcgcagatacaatgtcaaggattgcttcctttatatcctgttacatcatcagctaccttgtcatcatcctgctcgccaacatcaatatcattttataaggatgaagattcatcgcatgaggaatcctcctatagcttgactgactatgtatgcttgaagatacctgatggatcattaaataaagtaaattgcatcggtgtgataaagggctctggtaactgttgtactaccctcagcatgatgtcactttcaggttttctgttgcatatacctgacggatatgagtgtgttgacctgtcactttataaggacaaccaggtagttttactactgagtgaaacgtcttgttctgatagccctggaaaatcttggatggtgatgctgcaaatagagaacttttcctttatgccactctcaggaacattccctgcaaatatttacagtttgcaaaaactggtggcactcgatctgcaattggacacagattatgggaaagttcgtagcatacctcacaccgtatctactccatttgcagttagtgcatcgagaggagtagcctgtgtcttttcatcccggaggcatgccttggtttatatccttgatgaggatgaggaagcggagggggatgaaacttccgatatggagtgattattatccgattccttcaccttcggctcagccatttcagcttcaggcttcagcattgtcttatgtcttgttgcaatggaggcagaggcccggagatatcaatatgtacggaaacgtcgtctcattttcacggcaatgcatgcccgggttcagaagctacgtcgcgtggtaacagcctaacaggtcaccacgcacgcgcagccgcttttagagctcatgaaattgtcagtcgtcaccctgatgtgtgtaggccctgcaggttggacttcatcgtggttatttggaaagcgagcaaaattgtacacccatttctgatcgtgttgtgttatacgagtgcttgctagttgtgtaaaaaatctagaggtaacgtcaacgtgcaaaaaaaaagggtctgtcgcaaatcttgacggtcactagagctatcgcatttctaatcgtgtttgtgttatgtggattcattattttattgttcgagctgctaatgtacttggtaaaatacattgttgactg

SEQ ID NO: 123862 - DNA, 334 bp, Zea Mays
gtcttatgtcttgttgcaatggaggcagaggcccggagatatcaatatgtacggaaacgtcgtctcattttcacggcaatgcatgcccgggttcagaagctacgtcgcgtggttggacttcatcgtggttatttggaaagcgagcaaaattgtacacccatttctgatcgtgttgtgttatacgagtgcttgctagttgtgtaaaaaatctagaggtaacgtcaacgtgcaaaaaaaaagggtctgtcgcaaatcttgacggtcactagagctatcgcatttctaatcgtgtttgtgttatgtggattcattattttattgttcgagctgctaa

SEQ ID NO: 123863 - DNA, 957 bp, Zea Mays
atggatcctaacgacgccgaggatagcctttatgaagcttgggagcaccgaaatttgttgttgcggcgcgagctcatcttcgatttgaggaatgaagaccatgttggcacggaggaggaaggagacgcctgcagccttgacgtgggtgacggcttggggcgtggcgttggacgcggcggcggtgtatcacgggggcgcataactaccggcgttgggcgtgcatcaaccagcttggggcgtggtgttgggcgcggaagtactggtagcctggcgcgaggcaccgcgggagccaccggcgttggatgcagctccgtctccctcgagtccagcactggcgcacctacaggtgttcctgcagatggactaccaccattagggatagggcgtggctgtggaaagcgagcatcacagggttcacagggatctattcgttcagttcgtggacgtgggcgtggccatgcttcgagctcacaatcgtacaaccctccacgctctacttcgctcgatgtggatctgaaccttaactccgagcccaccgctgatgatgatgtcgaagaaatgattcataacaccacgaatacatttgcatcacctgctgctagttcctatgctccaaaaggaagcttcccccgaaatcgagcaactgccagaactgctacaagtccattgaagcccaagaatcaaatggtcaaagtgatgcagaatattcatgccactctaaaagaaaattgtaaaattgcaaacaaagtcatgctaggtgagcatctagatgaagtaattagggaagttcagtctatggcggttcgatgtggggcaaaggaaggatcagctgaacacttcatggcaactgaactttttcggaaagctgagaatcggtcctcctttaaggcatttgagacagatgaaggaaggcttctttggttgaagcgacactgtgcacgtgcaggactcatgtag

SEQ ID NO: 123864 - DNA, 107 bp, Zea Mays
caatttttttataaatacatacttcttaggaggtgacgcgaggctgtctttattgagctcaactgaaatctgttcatcaacttgtaaacaaatggataagaagtgtc

SEQ ID NO: 123865 - DNA, 106 bp, Zea Mays
caaaaaagtgaggagtgagaagataatggactatatcattcctcaaaccaaacactccattaatgaaccttcaaatccaaggagaacgtataatgtatgataattg

SEQ ID NO: 123866 - DNA, 935 bp, Zea Mays
gcatcttacataaacacctatgtctcaagtttttggagatgtacaatggctcacttgatgctttgtttttaggtgcccctacatttaaggggcgaaagcaaatcgagaaccgcagagtagttgagttgggtggaaagtccgttaagaagcaccgcacaccattaagtgttgcgaagccagctctgaagaatcagaagaaacgagaacagaagaaaatggaagaggaaaaactacttgggatctttaggaagagggacaaggacaccaaacctcacaagacaaggccagaggaccgagtgcttagggccacagaagggcgctttaggaacggtatactgaacgtcaagcatcttctggcgccaccgaaaccatcaggcaaggacatgtcggaaccgaagatgaggaaggacaagcacaaggggaagggtaagcagaaggggggcagaaggaagagacgttgaagaaagcacacttctgtaacctggtttgctattaagaatttaagatagatggttgatgaaacgtttaaatgacaacacctttttgtgtccgtcctgaaattaagacgtttccttgctctgctggaatctttgaagtgatccttgaaacgatgtaattctccaccttgaaacgaaacgatgtaattctccaggatgcggttcaggaagaggcttatttggttcaattttatatgcccttcgatccctgggcatatttgtttttgtattgtcatcttgtatatgatcaaagctaggggtatttgtcgatggctgaaatgctgccgtccctaaaatgttagattgattccattctgcaaaaggaatacatttccattgtccagctgcaagaattttacatcgcaatcgattgttgcatgtccagtgattgtcagtacaacaagattacaatggactcttagttttacacgataaaag

SEQ ID NO: 123867 - DNA, 2177 bp, Zea Mays
gggtagctgtcactgtgttggaagcggtcggaatcgtttgctgccgatcgtgcggttgaagagaaaatggtagacgtggatagcccaactagcctatccacgtccacgttcgatcctccatctacggcttcgatcgctccagcgcagcaagtctctgatatttctgacggacgtttcgtctttcctctgttgccttcgttttgggaggacttttcttccttcgcctctacaggtttggaatcggcgctgtccgtcttcgctcttctcggttcgttcctccctcctccctcccgtctgtctttgttcctctctcctcccacccatttgtcttcgttcctattcctcttgttgcctctgttgttcgcgtcggtaaatccgcctcgttcgtcttcctcccgttgcctccgtcgttcgcttagtcggagattaatcgtgacctaaatcgttcgatcagtttaggaacgatcagcctggctggctggattgaaatttaggcccagtggcccacttcacttgcccagcggccctgcccagcttcctttttcccaattcccaccacttgggtacacacgacacgaaccaggcaaccagctgcggagggaggaaccctagcggaacactgtgcaggtgacggcggcgcgctaccggtcacgggggatacggcggcatcgtcccctcctccatccccggcgcggcggcgccagcagccggcctgcagggacggtctccagtctccagaatccagattcagagcttgtccctgttttgtggtgtgctctgttgtactgtagcctgtagccagggcaaattaaagctacaatgcaggctgcctactatgcaaaggatcttttggtttgaagtccagttgaccgaagttggaaaatacttctgatacttacagatttcacagaggtcttgtttattttctactattttccttcaagcacgtggaatagtacgtttgacaaacaatttgctgacgagcacaggttttcgaacacggctgaacacgcgcgcaaggcgtgcacagtacacgcgcgcagggggaggaggagaacaagaggatggtgaaggcaaggcccaagccaacgccggtcaaggcggccccagaagtgatcttcgacccaatggcctctggtgcccggaagccccgccgcccaggggcgccgtcagccagcaaagaatggcacagcttcatgggatcgagtctgtcggatatgtatcggaagccagttttggagaaatctgctgacacatctgatgaggagcctgacattgatatcatgaagctgctgaaagatgttgagatcattggtgcccctacatttaaggggcgaaagcaaatcgagaaccgcagagtagttgagttgggtggaaagtccgttaagaagcaccgcacaccattaagtgttgcgaagccagctctgaagaatcagaagaaacgagaacagaagaaaatggaagaggaaaaactacttgggatctttaggaagagggacaaggacaccaaacctcacaagacaaggccagaggaccgagtgcttagggccacagaagggcgctttaggaacggtatactgaacgtcaagcatcttctggcgccaccgaaaccatcaggcaaggacatgtcggaaccgaagatgaggaaggacaagcacaaggggaagggtaagcagaaggggggcagaaggaagagacgttgaagaaagcacacttctgtaacctggtttgctattaagaatttaagatagatggttgatgaaacgtttaaatgacaacacctttttgtgtccgtcctgaaattaagacgtttccttgctctgctggaatctttgaagtgatccttgaaacgatgtaattctccaccttgaaacgaaacgatgtaattctccaggatgcggttcaggaagaggcttatttggttcaattttatatgcccttcgatccctgggcatatttgtttttgtattgtcatcttgtatatgatcaaagctaggggtatttgtcgatggctgaaatgctgccgtccctaaaatgttagattgattccattctgcaaaaggaatacatttccattgtccagctgcaagaattttacatcgcaatcgattgttgcatgtccagtgattgtcagtacaacaagattacaatggactcttagttttacacgataaaag

SEQ ID NO: 123868 - DNA, 2172 bp, Zea Mays
gggtagctgtcactgtgttggaagcggtcggaatcgtttgctgccgatcgtgcggttgaagagaaaatggtagacgtggatagcccaactagcctatccacgtccacgttcgatcctccatctacggcttcgatcgctccagcgcagcaagtctctgatatttctgacggacgtttcgtctttcctctgttgccttcgttttgggaggacttttcttccttcgcctctacaggtttggaatcggcgctgtccgtcttcgctcttctcggttcgttcctccctcctccctcccgtctgtctttgttcctctctcctcccacccatttgtcttcgttcctattcctcttgttgcctctgttgttcgcgtcggtaaatccgcctcgttcgtcttcctcccgttgcctccgtcgttcgcttagtcggagattaatcgtgacctaaatcgttcgatcagtttaggaacgatcagcctggctggctggattgaaatttaggcccagtggcccacttcacttgcccagcggccctgcccagcttcctttttcccaattcccaccacttgggtacacacgacacgaaccaggcaaccagctgcggagggaggaaccctagcggaacactgtgcaggtgacggcggcgcgctaccggtcacgggggatacggcggcatcgtcccctcctccatccccggcgcggcggcgccagcagccggcctgcagggacggtctccagtctccagaatccagattcagagcttgtccctgttttgtggtgtgctctgttgtactgtagcctgtagccagggcaaattaaagctacaatgcaggctgcctactatgcaaaggatcttttggtttgaagtccagttgaccgaagttggaaaatacttctgatacttacagatttcacagaggtcttgtttattttctactattttccttcaagcacgtggaatagtacgtttgacaaacaatttgctgacgaggttttcgaacacggctgaacacgcgcgcaaggcgtgcacagtacacgcgcgcagggggaggaggagaacaagaggatggtgaaggcaaggcccaagccaacgccggtcaaggcggccccagaagtgatcttcgacccaatggcctctggtgcccggaagccccgccgcccaggggcgccgtcagccagcaaagaatggcacagcttcatgggatcgagtctgtcggatatgtatcggaagccagttttggagaaatctgctgacacatctgatgaggagcctgacattgatatcatgaagctgctgaaagatgttgagatcattggtgcccctacatttaaggggcgaaagcaaatcgagaaccgcagagtagttgagttgggtggaaagtccgttaagaagcaccgcacaccattaagtgttgcgaagccagctctgaagaatcagaagaaacgagaacagaagaaaatggaagaggaaaaactacttgggatctttaggaagagggacaaggacaccaaacctcacaagacaaggccagaggaccgagtgcttagggccacagaagggcgctttaggaacggtatactgaacgtcaagcatcttctggcgccaccgaaaccatcaggcaaggacatgtcggaaccgaagatgaggaaggacaagcacaaggggaagggtaagcagaaggggggcagaaggaagagacgttgaagaaagcacacttctgtaacctggtttgctattaagaatttaagatagatggttgatgaaacgtttaaatgacaacacctttttgtgtccgtcctgaaattaagacgtttccttgctctgctggaatctttgaagtgatccttgaaacgatgtaattctccaccttgaaacgaaacgatgtaattctccaggatgcggttcaggaagaggcttatttggttcaattttatatgcccttcgatccctgggcatatttgtttttgtattgtcatcttgtatatgatcaaagctaggggtatttgtcgatggctgaaatgctgccgtccctaaaatgttagattgattccattctgcaaaaggaatacatttccattgtccagctgcaagaattttacatcgcaatcgattgttgcatgtccagtgattgtcagtacaacaagattacaatggactcttagttttacacgataaaag

SEQ ID NO: 123869 - DNA, 1738 bp, Zea Mays
gggtagctgtcactgtgttggaagcggtcggaatcgtttgctgccgatcgtgcggttgaagagaaaatggtagacgtggatagcccaactagcctatccacgtccacgttcgatcctccatctacggcttcgatcgctccagcgcagcaagtctctgatatttctgacggacgtttcgtctttcctctgttgccttcgttttgggaggacttttcttccttcgcctctacaggtttggaatcggcgctgtccgtcttcgctcttctcgccagggcaaattaaagctacaatgcaggctgcctactatgcaaaggatcttttggtttgaagtccagttgaccgaagttggaaaatacttctgatacttacagatttcacagaggcagcgattcgcacataatttaattggttcttcattgtgattacaattatgttctgtccactgagtttacgtattgcatttcttgctttaggtcttgtttattttctactattttccttcaagcacgtggaatagtacgtttgacaaacaatttgctgacgagcacaggttttcgaacacggctgaacacgcgcgcaaggcgtgcacagtacacgcgcgcagggggaggaggagaacaagaggatggtgaaggcaaggcccaagccaacgccggtcaaggcggccccagaagtgatcttcgacccaatggcctctggtgcccggaagccccgccgcccaggggcgccgtcagccagcaaagaatggcacagcttcatgggatcgagtctgtcggatatgtatcggaagccagttttggagaaatctgctgacacatctgatgaggagcctgacattgatatcatgaagctgctgaaagatgttgagatcattggtgcccctacatttaaggggcgaaagcaaatcgagaaccgcagagtagttgagttgggtggaaagtccgttaagaagcaccgcacaccattaagtgttgcgaagccagctctgaagaatcagaagaaacgagaacagaagaaaatggaagaggaaaaactacttgggatctttaggaagagggacaaggacaccaaacctcacaagacaaggccagaggaccgagtgcttagggccacagaagggcgctttaggaacggtatactgaacgtcaagcatcttctggcgccaccgaaaccatcaggcaaggacatgtcggaaccgaagatgaggaaggacaagcacaaggggaagggtaagcagaaggggggcagaaggaagagacgttgaagaaagcacacttctgtaacctggtttgctattaagaatttaagatagatggttgatgaaacgtttaaatgacaacacctttttgtgtccgtcctgaaattaagacgtttccttgctctgctggaatctttgaagtgatccttgaaacgatgtaattctccaccttgaaacgaaacgatgtaattctccaggatgcggttcaggaagaggcttatttggttcaattttatatgcccttcgatccctgggcatatttgtttttgtattgtcatcttgtatatgatcaaagctaggggtatttgtcgatggctgaaatgctgccgtccctaaaatgttagattgattccattctgcaaaaggaatacatttccattgtccagctgcaagaattttacatcgcaatcgattgttgcatgtccagtgattgtcagtacaacaagattacaatggactcttagttttacacgataaaag

SEQ ID NO: 123870 - DNA, 1733 bp, Zea Mays
gggtagctgtcactgtgttggaagcggtcggaatcgtttgctgccgatcgtgcggttgaagagaaaatggtagacgtggatagcccaactagcctatccacgtccacgttcgatcctccatctacggcttcgatcgctccagcgcagcaagtctctgatatttctgacggacgtttcgtctttcctctgttgccttcgttttgggaggacttttcttccttcgcctctacaggtttggaatcggcgctgtccgtcttcgctcttctcgccagggcaaattaaagctacaatgcaggctgcctactatgcaaaggatcttttggtttgaagtccagttgaccgaagttggaaaatacttctgatacttacagatttcacagaggcagcgattcgcacataatttaattggttcttcattgtgattacaattatgttctgtccactgagtttacgtattgcatttcttgctttaggtcttgtttattttctactattttccttcaagcacgtggaatagtacgtttgacaaacaatttgctgacgaggttttcgaacacggctgaacacgcgcgcaaggcgtgcacagtacacgcgcgcagggggaggaggagaacaagaggatggtgaaggcaaggcccaagccaacgccggtcaaggcggccccagaagtgatcttcgacccaatggcctctggtgcccggaagccccgccgcccaggggcgccgtcagccagcaaagaatggcacagcttcatgggatcgagtctgtcggatatgtatcggaagccagttttggagaaatctgctgacacatctgatgaggagcctgacattgatatcatgaagctgctgaaagatgttgagatcattggtgcccctacatttaaggggcgaaagcaaatcgagaaccgcagagtagttgagttgggtggaaagtccgttaagaagcaccgcacaccattaagtgttgcgaagccagctctgaagaatcagaagaaacgagaacagaagaaaatggaagaggaaaaactacttgggatctttaggaagagggacaaggacaccaaacctcacaagacaaggccagaggaccgagtgcttagggccacagaagggcgctttaggaacggtatactgaacgtcaagcatcttctggcgccaccgaaaccatcaggcaaggacatgtcggaaccgaagatgaggaaggacaagcacaaggggaagggtaagcagaaggggggcagaaggaagagacgttgaagaaagcacacttctgtaacctggtttgctattaagaatttaagatagatggttgatgaaacgtttaaatgacaacacctttttgtgtccgtcctgaaattaagacgtttccttgctctgctggaatctttgaagtgatccttgaaacgatgtaattctccaccttgaaacgaaacgatgtaattctccaggatgcggttcaggaagaggcttatttggttcaattttatatgcccttcgatccctgggcatatttgtttttgtattgtcatcttgtatatgatcaaagctaggggtatttgtcgatggctgaaatgctgccgtccctaaaatgttagattgattccattctgcaaaaggaatacatttccattgtccagctgcaagaattttacatcgcaatcgattgttgcatgtccagtgattgtcagtacaacaagattacaatggactcttagttttacacgataaaag

SEQ ID NO: 123871 - DNA, 1647 bp, Zea Mays
gggtagctgtcactgtgttggaagcggtcggaatcgtttgctgccgatcgtgcggttgaagagaaaatggtagacgtggatagcccaactagcctatccacgtccacgttcgatcctccatctacggcttcgatcgctccagcgcagcaagtctctgatatttctgacggacgtttcgtctttcctctgttgccttcgttttgggaggacttttcttccttcgcctctacaggtttggaatcggcgctgtccgtcttcgctcttctcgccagggcaaattaaagctacaatgcaggctgcctactatgcaaaggatcttttggtttgaagtccagttgaccgaagttggaaaatacttctgatacttacagatttcacagaggtcttgtttattttctactattttccttcaagcacgtggaatagtacgtttgacaaacaatttgctgacgagcacaggttttcgaacacggctgaacacgcgcgcaaggcgtgcacagtacacgcgcgcagggggaggaggagaacaagaggatggtgaaggcaaggcccaagccaacgccggtcaaggcggccccagaagtgatcttcgacccaatggcctctggtgcccggaagccccgccgcccaggggcgccgtcagccagcaaagaatggcacagcttcatgggatcgagtctgtcggatatgtatcggaagccagttttggagaaatctgctgacacatctgatgaggagcctgacattgatatcatgaagctgctgaaagatgttgagatcattggtgcccctacatttaaggggcgaaagcaaatcgagaaccgcagagtagttgagttgggtggaaagtccgttaagaagcaccgcacaccattaagtgttgcgaagccagctctgaagaatcagaagaaacgagaacagaagaaaatggaagaggaaaaactacttgggatctttaggaagagggacaaggacaccaaacctcacaagacaaggccagaggaccgagtgcttagggccacagaagggcgctttaggaacggtatactgaacgtcaagcatcttctggcgccaccgaaaccatcaggcaaggacatgtcggaaccgaagatgaggaaggacaagcacaaggggaagggtaagcagaaggggggcagaaggaagagacgttgaagaaagcacacttctgtaacctggtttgctattaagaatttaagatagatggttgatgaaacgtttaaatgacaacacctttttgtgtccgtcctgaaattaagacgtttccttgctctgctggaatctttgaagtgatccttgaaacgatgtaattctccaccttgaaacgaaacgatgtaattctccaggatgcggttcaggaagaggcttatttggttcaattttatatgcccttcgatccctgggcatatttgtttttgtattgtcatcttgtatatgatcaaagctaggggtatttgtcgatggctgaaatgctgccgtccctaaaatgttagattgattccattctgcaaaaggaatacatttccattgtccagctgcaagaattttacatcgcaatcgattgttgcatgtccagtgattgtcagtacaacaagattacaatggactcttagttttacacgataaaag

SEQ ID NO: 123872 - DNA, 1642 bp, Zea Mays
gggtagctgtcactgtgttggaagcggtcggaatcgtttgctgccgatcgtgcggttgaagagaaaatggtagacgtggatagcccaactagcctatccacgtccacgttcgatcctccatctacggcttcgatcgctccagcgcagcaagtctctgatatttctgacggacgtttcgtctttcctctgttgccttcgttttgggaggacttttcttccttcgcctctacaggtttggaatcggcgctgtccgtcttcgctcttctcgccagggcaaattaaagctacaatgcaggctgcctactatgcaaaggatcttttggtttgaagtccagttgaccgaagttggaaaatacttctgatacttacagatttcacagaggtcttgtttattttctactattttccttcaagcacgtggaatagtacgtttgacaaacaatttgctgacgaggttttcgaacacggctgaacacgcgcgcaaggcgtgcacagtacacgcgcgcagggggaggaggagaacaagaggatggtgaaggcaaggcccaagccaacgccggtcaaggcggccccagaagtgatcttcgacccaatggcctctggtgcccggaagccccgccgcccaggggcgccgtcagccagcaaagaatggcacagcttcatgggatcgagtctgtcggatatgtatcggaagccagttttggagaaatctgctgacacatctgatgaggagcctgacattgatatcatgaagctgctgaaagatgttgagatcattggtgcccctacatttaaggggcgaaagcaaatcgagaaccgcagagtagttgagttgggtggaaagtccgttaagaagcaccgcacaccattaagtgttgcgaagccagctctgaagaatcagaagaaacgagaacagaagaaaatggaagaggaaaaactacttgggatctttaggaagagggacaaggacaccaaacctcacaagacaaggccagaggaccgagtgcttagggccacagaagggcgctttaggaacggtatactgaacgtcaagcatcttctggcgccaccgaaaccatcaggcaaggacatgtcggaaccgaagatgaggaaggacaagcacaaggggaagggtaagcagaaggggggcagaaggaagagacgttgaagaaagcacacttctgtaacctggtttgctattaagaatttaagatagatggttgatgaaacgtttaaatgacaacacctttttgtgtccgtcctgaaattaagacgtttccttgctctgctggaatctttgaagtgatccttgaaacgatgtaattctccaccttgaaacgaaacgatgtaattctccaggatgcggttcaggaagaggcttatttggttcaattttatatgcccttcgatccctgggcatatttgtttttgtattgtcatcttgtatatgatcaaagctaggggtatttgtcgatggctgaaatgctgccgtccctaaaatgttagattgattccattctgcaaaaggaatacatttccattgtccagctgcaagaattttacatcgcaatcgattgttgcatgtccagtgattgtcagtacaacaagattacaatggactcttagttttacacgataaaag

SEQ ID NO: 123873 - DNA, 1570 bp, Zea Mays
gggtagctgtcactgtgttggaagcggtcggaatcgtttgctgccgatcgtgcggttgaagagaaaatggtagacgtggatagcccaactagcctatccacgtccacgttcgatcctccatctacggcttcgatcgctccagcgcagcaagtctctgatatttctgacggacgtttcgtctttcctctgttgccttcgttttgggaggacttttcttccttcgcctctacaggtttggaatcggcgctgtccgtcttcgctcttctcgccagggcaaattaaagctacaatgcaggctgcctactatgcaaaggatcttttggtttgaagtccagttgaccgaagttggaaaatacttctgatacttacagatttcacagaggttttcgaacacggctgaacacgcgcgcaaggcgtgcacagtacacgcgcgcagggggaggaggagaacaagaggatggtgaaggcaaggcccaagccaacgccggtcaaggcggccccagaagtgatcttcgacccaatggcctctggtgcccggaagccccgccgcccaggggcgccgtcagccagcaaagaatggcacagcttcatgggatcgagtctgtcggatatgtatcggaagccagttttggagaaatctgctgacacatctgatgaggagcctgacattgatatcatgaagctgctgaaagatgttgagatcattggtgcccctacatttaaggggcgaaagcaaatcgagaaccgcagagtagttgagttgggtggaaagtccgttaagaagcaccgcacaccattaagtgttgcgaagccagctctgaagaatcagaagaaacgagaacagaagaaaatggaagaggaaaaactacttgggatctttaggaagagggacaaggacaccaaacctcacaagacaaggccagaggaccgagtgcttagggccacagaagggcgctttaggaacggtatactgaacgtcaagcatcttctggcgccaccgaaaccatcaggcaaggacatgtcggaaccgaagatgaggaaggacaagcacaaggggaagggtaagcagaaggggggcagaaggaagagacgttgaagaaagcacacttctgtaacctggtttgctattaagaatttaagatagatggttgatgaaacgtttaaatgacaacacctttttgtgtccgtcctgaaattaagacgtttccttgctctgctggaatctttgaagtgatccttgaaacgatgtaattctccaccttgaaacgaaacgatgtaattctccaggatgcggttcaggaagaggcttatttggttcaattttatatgcccttcgatccctgggcatatttgtttttgtattgtcatcttgtatatgatcaaagctaggggtatttgtcgatggctgaaatgctgccgtccctaaaatgttagattgattccattctgcaaaaggaatacatttccattgtccagctgcaagaattttacatcgcaatcgattgttgcatgtccagtgattgtcagtacaacaagattacaatggactcttagttttacacgataaaag

SEQ ID NO: 123874 - DNA, 2222 bp, Zea Mays
gggtagctgtcactgtgttggaagcggtcggaatcgtttgctgccgatcgtgcggttgaagagaaaatggtagacgtggatagcccaactagcctatccacgtccacgttcgatcctccatctacggcttcgatcgctccagcgcagcaagtctctgatatttctgacggacgtttcgtctttcctctgttgccttcgttttgggaggacttttcttccttcgcctctacaggtttggaatcggcgctgtccgtcttcgctcttctcggttcgttcctccctcctccctcccgtctgtctttgttcctctctcctcccacccatttgtcttcgttcctattcctcttgttgcctctgttgttcgcgtcggtaaatccgcctcgttcgtcttcctcccgttgcctccgtcgttcgcttagtcggagattaatcgtgacctaaatcgttcgatcagtttaggaacgatcagcctggctggctggattgaaatttaggcccagtggcccacttcacttgcccagcggccctgcccagcttcctttttcccaattcccaccacttgggtacacacgacacgaaccaggcaaccagctgcggagggaggaaccctagcggaacactgtgcaggtgacggcggcgcgctaccggtcacgggggatacggcggcatcgtcccctcctccatccccggcgcggcggcgccagcagccggcctgcagggacggtctccagtctccagaatccagattcagagcttgtccctgttttgtggtgtgctctgttgtactgtagcctgtaggtatgggcgtatggctgttggcctgttgcttcccatgtccatgtttgctggttttcagttttacttagatgctgaaagcatgaaaccttccagtgattatttgcttcatgttgtagtatggctgttggcctgttgctgcccatgtccatgggcgtatcatctatggctgtttgccttgttgaaagcctgaacctgaatctgtctaacttagttttcattccctgttcttctcttcttttgcagccagggcaaattaaagctacaatgcaggctgcctactatgcaaaggatcttttggtttgaagtccagttgaccgaagttggaaaatacttctgatacttacagatttcacagaggcagcgattcgcacataatttaattggttcttcattgtgattacaattatgttctgtccactgagtttacgtattgcatttcttgctttaggtcttgtttattttctactattttccttcaagcacgtggaatagtacgtttgacaaacaatttgctgacgaggttttcgaacacggctgaacacgcgcgcaaggcgtgcacagtacacgcgcgcagggggaggaggagaacaagaggatggtgaaggcaaggcccaagccaacgccggtcaaggcggccccagaagtgatcttcgacccaatggcctctggtgcccggaagccccgccgcccaggggcgccgtcagccagcaaagaatggcacagcttcatgggatcgagtctgtcggatatgtatcggaagccagttttggagaaatctgctgacacatctgatgaggagcctgacattgatatcatgaagctgctgaaagatgttgagatcattggtgcccctacatttaaggggcgaaagcaaatcgagaaccgcagagtagttgagttgggtggaaagtccgttaagaagcaccgcacaccattaagtgttgcgaagccagctctgaagaatcagaagaaacgagaacagaagaaaatggaagaggaaaaactacttgggatctttaggaagagggacaaggacaccaaacctcacaagacaaggccagaggaccgagtgcttagggccacagaagggcgctttaggaacggtatactgaacgtcaagcatcttctggcgccaccgaaaccatcaggcaaggacatgtcggaaccgaagatgaggaaggacaagcacaaggggaagggtaagcagaaggggggcagaaggaagagacgttgaagaaagcacacttctgtaacctggtttgctattaagaatttaagatagatggttgatgaaacgtttaaatgacaacacctttttgtgtccgtcctgaaattaagacgtttccttgctctgctggaatctttgaagtgatccttgaaacgatgtaattctccaccttgaaacgaaacgatgtaattctcca

SEQ ID NO: 123875 - DNA, 1051 bp, Zea Mays
gggtagctgtcactgtgttggaagcggtcggaatcgtttgctgccgatcgtgcggttgaagagaaaatggtagacgtggatagcccaactagcctatccacgtccacgttcgatcctccatctacggcttcgatcgctccagcgcagcaagtctctgatatttctgacggacgtttcgtctttcctctgttgccttcgttttgggaggacttttcttccttcgcctctacaggtttggaatcggcgctgtccgtcttcgctcttctcgccagggcaaattaaagctacaatgcaggctgcctactatgcaaaggatcttttggtttgaagtccagttgaccgaagttggaaaatacttctgatacttacagatttcacagaggcagcgattcgcacataatttaattggttcttcattgtgattacaattatgttctgtccactgagtttacgtattgcatttcttgctttaggtcttgtttattttctactattttccttcaagcacgtggaatagtacgtttgacaaacaatttgctgacgaggtaattgctacttgctttcatctgttatccattcccgctattggtatactacatgatgtgcactggttacaatttcatttcgtgcactgagttcaagtattgtgtgctctccagtctgtgcttatttttaaaagtatatcatctacatttgcccttttgaattgcttttaccgataagaaaatgtttgctgtttcatttcaattctagaatttcttttacattgtgtgtatgtgttccatgtgcttcatgatgtgttttaacaactaggtgtatactgaaagatcaatatataatggatcgaggtaaacacctatataggacaatgtctttagtatacatgaaactaagctatacatattacgttttccatacttgcgacggacatgtttcctgtatataaatatcactgtaaaactaattacagtaaatcctgtttatacatttcagactcttattttcctaactgacaatagttatgtgtaggacactaccctatatccgacgt

SEQ ID NO: 123876 - DNA, 1709 bp, Zea Mays
ttcacttgcgtacctgacgggtacttaagcactgctaccgccgccgtctaggtttcttcgatcgtggttgcgccatccctcactctcctccgaagccatcgtccacgtcccagcctccccggactctaggggcagaagctgcagcgtcgagatggtgaaggggcgcacggggcagcgcgtgaggctctacgtccggggcaccgtccttggatacaagcggtgagcttattatcctcctcccccctccaaggccgccgcgtagtgactctgcgtgctggtggtgtgcgtggctgactggctgatgcaggtccaagtcgaaccagtacgagactacgtcgctggtgcagatcgagggggtgaacaccaaggaggacgtcgcgtggtactgcgggaagcggatggcctacatctacaaggccaagaccaagagcagcggcacccactaccgctgcatctggggcaaggtcgcccgcccgcatggcaactccggcgtcgtccgcgccaagttcaggtccaacctgccgccggaatccatggtgagctggaccgatctcccagtttccgttcgtggctacgtcttgctctgaattctgtgctctgtgctgattttgttgctgccccctttggtgcagggccgtaaggtcagggtgttcatgtaccccagcagcatctaaaggttagtgtcaattgcagtctactcaactactctttctaatcggacgccctgattatttgctgaatacttcatatctgtacctcatcctatacggctatagccattagagttgatgtgacctgtacgcaaatgtgtctatttggcagttggtcttgatttatgttatgaaacttgcctaattaaggattagcggctggctatttcgctgtactctctgttgtgtgcaccaccaaataatcatgcatgtcaacattgatattctacatgaacctttcattgtgtcttgatagtatcattttgttgccacgttaggggaaaaaagagacatcacagctatttctccacgcatgaataggactagcagaaattatccacatgacactgtgaaagtcatttgcaacattggtgtcctaagaaaatggatagaacaatagctgtcttaattggttgattgtatgcattttcatttttatatttctggaattatagtcacttgtttattcgatctctaccaggctcccacacttcccagcgaagtgcatcttacatttcatttcctgttttatgtgggattctgttgcttagcatagcagagtgccgaaattatcgtgccttaaatcccatgaatttaggaatagttgcttttgcaactatctgttcttggtatcatcaaatgggttttctgagatgagatgcttgctgtaattctcctcacagttttgttatgtgcttctaatactgtctcatccattgcagataatctgaatgtgtggaggacccttttcttctagattttatcttcagctgtccttgtaagggttgtgttcaggttgagagttagcaggttgagctgtctatctgagaaccatttaaagttctctgagttttggtgttatggatcactggaagtattatatgaagtttaagttagaactaatttgtttgccatacttttgtatgatgactctttaatcgcataatatgctcttattgcatcttgatcaacggttctgtgatttcatgagcccatctc

SEQ ID NO: 123877 - DNA, 1525 bp, Zea Mays
ttcacttgcgtacctgacgggtacttaagcactgctaccgccgccgtctaggtttcttcgatcgtggttgcgccatccctcactctcctccgaagccatcgtccacgtcccagcctccccggactctaggggcagaagctgcagcgtcgagatggtgaaggggcgcacggggcagcgcgtgaggctctacgtccggggcaccgtccttggatacaagcggtccaagtcgaaccagtacgagactacgtcgctggtgcagatcgagggggtgaacaccaaggaggacgtcgcgtggtactgcgggaagcggatggcctacatctacaaggccaagaccaagagcagcggcacccactaccgctgcatctggggcaaggtcgcccgcccgcatggcaactccggcgtcgtccgcgccaagttcaggtccaacctgccgccggaatccatgggccgtaaggtcagggtgttcatgtaccccagcagcatctaaaggttagtgtcaattgcagtctactcaactactctttctaatcggacgccctgattatttgctgaatacttcatatctgtacctcatcctatacggctatagccattagagttgatgtgacctgtacgcaaatgtgtctatttggcagttggtcttgatttatgttatgaaacttgcctaattaaggattagcggctggctatttcgctgtactctctgttgtgtgcaccaccaaataatcatgcatgtcaacattgatattctacatgaacctttcattgtgtcttgatagtatcattttgttgccacgttaggggaaaaaagagacatcacagctatttctccacgcatgaataggactagcagaaattatccacatgacactgtgaaagtcatttgcaacattggtgtcctaagaaaatggatagaacaatagctgtcttaattggttgattgtatgcattttcatttttatatttctggaattatagtcacttgtttattcgatctctaccaggctcccacacttcccagcgaagtgcatcttacatttcatttcctgttttatgtgggattctgttgcttagcatagcagagtgccgaaattatcgtgccttaaatcccatgaatttaggaatagttgcttttgcaactatctgttcttggtatcatcaaatgggttttctgagatgagatgcttgctgtaattctcctcacagttttgttatgtgcttctaatactgtctcatccattgcagataatctgaatgtgtggaggacccttttcttctagattttatcttcagctgtccttgtaagggttgtgttcaggttgagagttagcaggttgagctgtctatctgagaaccatttaaagttctctgagttttggtgttatggatcactggaagtattatatgaagtttaagttagaactaatttgtttgccatacttttgtatgatgactctttaatcgcataatatgctcttattgcatcttgatcaacggttctgtgatttcatgagcccatctc

SEQ ID NO: 123878 - DNA, 763 bp, Zea Mays
ttcacttgcgtacctgacgggtacttaagcactgctaccgccgccgtctaggtttcttcgatcgtggttgcgccatccctcactctcctccgaagccatcgtccacgtcccagcctccccggactctaggggcagaagctgcagcgtcgagatggtgaaggggcgcacggggcagcgcgtgaggctctacgtccggggcaccgtccttggatacaagcggtccaagtcgaaccagtacgagactacgtcgctggtgcagatcgagggggtgaacaccaaggaggacgtcgcgtggtactgcgggaagcggatggcctacatctacaaggccaagaccaagagcagcggcacccactaccgctgcatctggggcaaggtcgcccgcccgcatggcaactccggcgtcgtccgcgccaagttcaggtccaacctgccgccggaatccatgggccgtaaggtcagggtgttcatgtaccccagcagcatctaaagataatctgaatgtgtggaggacccttttcttctagattttatcttcagctgtccttgtaagggttgtgttcaggttgagagttagcaggttgagctgtctatctgagaaccatttaaagttctctgagttttggtgttatggatcactggaagtattatatgaagtttaagttagaactaatttgtttgccatacttttgtatgatgactctttaatcgcataatatgctcttattgcatcttgatcaacggttctgtgatttcatgagcc

SEQ ID NO: 123879 - DNA, 842 bp, Zea Mays
ttcacttgcgtacctgacgggtacttaagcactgctaccgccgccgtctaggtttcttcgatcgtggttgcgccatccctcactctcctccgaagccatcgtccacgtcccagcctccccggactctaggggcagaagctgcagcgtcgagatggtgaaggggcgcacggggcagcgcgtgaggctctacgtccggggcaccgtccttggatacaagcggtccaagtcgaaccagtacgagactacgtcgctggtgcagatcgagggggtgaacaccaaggaggacgtcgcgtggtactgcgggaagcggatggcctacatctacaaggccaagaccaagagcagcggcacccactaccgctgcatctggggcaaggtcgcccgcccgcatggcaactccggcgtcgtccgcgccaagttcaggtccaacctgccgccggaatccatggtgagctggaccgatctcccagtttccgttcgtggctacgtcttgctctgaattctgtgctctgtgctgattttgttgctgccccctttggtgcagggccgtaaggtcagggtgttcatgtaccccagcagcatctaaagataatctgaatgtgtggaggacccttttcttctagattttatcttcagctgtccttgtaagggttgtgttcaggttgagagttagcaggttgagctgtctatctgagaaccatttaaagttctctgagttttggtgttatggatcactggaagtattatatgaagtttaagttagaactaatttgtttgccatacttttgtatgatgactctttaatcgcataatatgctcttattgcatcttgatcaacggtt

SEQ ID NO: 123880 - DNA, 702 bp, Zea Mays
ttcacttgcgtacctgacgggtacttaagcactgctaccgccgccgtctaggtttcttcgatcgtggttgcgccatccctcactctcctccgaagccatcgtccacgtcccagcctccccggactctaggggcagaagctgcagcgtcgagatggtgaaggggcgcacggggcagcgcgtgaggctctacgtccggggcaccgtccttggatacaagcggtccaagtcgaaccagtacgagactacgtcgctggtgcagatcgagggggtgaacaccaaggaggacgtcgcgtggtactgcgggaagcggatggcctacatctacaaggccaagaccaagagcagcggcacccactaccgctgcatctggggcaaggtcgcccgcccgcatggcaactccggcgtcgtccgcgccaagttcaggtccaacctgccgccggaatccatgataatctgaatgtgtggaggacccttttcttctagattttatcttcagctgtccttgtaagggttgtgttcaggttgagagttagcaggttgagctgtctatctgagaaccatttaaagttctctgagttttggtgttatggatcactggaagtattatatgaagtttaagttagaactaatttgtttgccatacttttgtatgatgactctttaatcgcataatatgctcttattgcatcttgatcaacggtt

SEQ ID NO: 123881 - DNA, 1583 bp, Zea Mays
ttcacttgcgtacctgacgggtacttaagcactgctaccgccgccgtctaggtttcttcgatcgtggttgcgccatccctcactctcctccgaagccatcgtccacgtcccagcctccccggactctaggggcagaagctgcagcgtcgagatggtgaaggggcgcacggggcagcgcgtgaggctctacgtccggggcaccgtccttggatacaagcggtgagcttattatcctcctcccccctccaaggccgccgcgtagtgactctgcgtgctggtggtgtgcgtggctgactggctgatgcaggtccaagtcgaaccagtacgagactacgtcgctggtgcagatcgagggggtgaacaccaaggaggacgtcgcgtggtactgcgggaagcggatggcctacatctacaaggccaagaccaagagcagcggcacccactaccgctgcatctggggcaaggtcgcccgcccgcatggcaactccggcgtcgtccgcgccaagttcaggtccaacctgccgccggaatccatgggccgtaaggtcagggtgttcatgtaccccagcagcatctaaaggttagtgtcaattgcagtctactcaactactctttctaatcggacgccctgattatttgctgaatacttcatatctgtacctcatcctatacggctatagccattagagttgatgtgacctgtacgcaaatgtgtctatttggcagttggtcttgatttatgttatgaaacttgcctaattaaggattagcggctggctatttcgctgtactctctgttgtgtgcaccaccaaataatcatgcatgtcaacattgatattctacatgaacctttcattgtgtcttgatagtatcattttgttgccacgttaggggaaaaaagagacatcacagctatttctccacgcatgaataggactagcagaaattatccacatgacactgtgaaagtcatttgcaacattggtgtcctaagaaaatggatagaacaatagctgtcttaattggttgattgtatgcattttcatttttatatttctggaattatagtcacttgtttattcgatctctaccaggctcccacacttcccagcgaagtgcatcttacatttcatttcctgttttatgtgggattctgttgcttagcatagcagagtgccgaaattatcgtgccttaaatcccatgaatttaggaatagttgcttttgcaactatctgttcttggtatcatcaaatgggttttctgagatgagatgcttgctgtaattctcctcacagttttgttatgtgcttctaatactgtctcatccattgcagataatctgaatgtgtggaggacccttttcttctagattttatcttcagctgtccttgtaagggttgtgttcaggttgagagttagcaggttgagctgtctatctgagaaccatttaaagttctctgagttttggtgttatggatcactggaagtattatatgaagtttaagttagaactaatttgtttgccatacttttgtatgatgactctttaatcgcataatatgctcttattgcatcttgatc

SEQ ID NO: 123882 - DNA, 924 bp, Zea Mays
ggcatccacacaaatgcatctatttgtaatagagatgaagcacacacttctaaacagatggttctccaggtataattcaaagaaaaatagccactaactggatctttgtatgagaggtgctttacatatttaatgtgtgaatttcatgtctatgcaggacctgtccctgatcaacttcaaaaggtttctttttcttcccttaattaagaggaacggtcaaataatttttttattgaatattctgatgttaaactttttgattgttcatattccagcgcttaggaagacgttttcagctgaaaagaagaaaagtaaaatccggaaggcatgggatggaactaaagtcatttataatgttgcttcatggggcaccactgctgttggggtctacaataatcgagcattacttacgatcgcaactacaacgtttcagacttcctgccgtgtgatatccaagttcctttgaatattgtgtcaactactagggcatgttagaattgcttgcgtgtgtgcttttccattgttcaggtagcataaagtttgagaccatttgtttattctatgctgatgagttcgactgctaattagcaggaccttccagtcaaaagcagcatgtgtattgtataactgtaaatattgccttgatttgaacaaatttgttttttgtgctagaactttatttcacgaacttcatatgatagaccctactttagagtatttctttctcttctcatttcacattattgttatcacttctctttcaatgagaattttctttcttattttattttattttattttatgtagaagtgtagaaccatatagtctctttggctaatttaatatggttttgttatctggaaatcttgactaatatatttatcacatctttaaaagtggtattttgaattattagatcgacat

SEQ ID NO: 123883 - DNA, 1155 bp, Zea Mays
atttcttgtatgtgctgcagcacaatttgtgccacagattcagctcaaaagtcgatacgataacaaaattggtgtttttatatgttcttcaacatttcttttctgtacgttgaatttagataattgcagtggttgattctccctccttttttatctttgttatttcttgggccgtggtggaggaggttacagcggcagcggtggacaatttggctggttggatcttatttgtgcgctcgtattgtatgttttatgcagagtcggaaggacgtggagggtcgctcttagtcatcaagaggttgtgaacttgtgatgacaaaaataacatcctgctgataacctcaaatggcctgtctacgagatggaaaatggcctgatgataacctcaaaattttctccattatgggcaacaactattgagcagccaagatatcaacaacgaagaataaccaatttcgaattcacatcaatcaacaataggacctgtccctgatcaacttcaaaagcgcttaggaagacgttttcagctgaaaagaagaaaagtaaaatccggaaggcatgggatggaactaaagtcatttataatgttgcttcatggggcaccactgctgttggggtctacaataatcgagcattacttacgatcgcaactacaacgtttcagacttcctgccgtgtgatatccaagttcctttgaatattgtgtcaactactagggcatgttagaattgcttgcgtgtgtgcttttccattgttcaggtagcataaagtttgagaccatttgtttattctatgctgatgagttcgactgctaattagcaggaccttccagtcaaaagcagcatgtgtattgtataactgtaaatattgccttgatttgaacaaatttgttttttgtgctagaactttatttcacgaacttcatatgatagaccctactttagagtatttctttctcttctcatttcacattattgttatcacttctctttcaatgagaattttctttcttattttattttattttattttatgtagaagtgtagaaccatatagtctctttggctaatttaatatggttttgttatctggaaatcttgactaatatatttatcacatctttaaaagtggtattttgaattattagatcgacat

SEQ ID NO: 123884 - DNA, 659 bp, Zea Mays
cataggtgaatgaagaactaaatttcttgtatgtgctgcagcacaatttgtgccacagattcagctcaaaagtcgatacgataacaaaattggtgtttttatatgttcttcaacatttcttttctgtacgttgaatttagataattgcagtggttgattctccctccttttttatctttgttatttcttgggccgtggtggaggaggttacagcggcagcggtggacaatttggctggttggatcttatttgtgcgctcgtattgtatgttttatgcagagtcggaaggacgtggagggtcgctcttagtcatcaagaggtccgtctctttctgacgtgtttgcatacaaacagaaaatcttatagtttgccaatgtcgtttgttctagcaattttctatctactaaatcataaacatattagttgtttggcatagtagatcaaatgcataatctaattactggactagaaaaaatatgatccgttgtgctttgaatggtttctctctgtttcctagatgcagagcatggctcttattctttgcatgtttaaatcgattgtagtgatttgtttagttctgctctgcaaccctttgagagatacatacctgggtttgtatatttgtccatttcagaggtcaatgtattaccttgtcaggc

SEQ ID NO: 123885 - DNA, 893 bp, Zea Mays
tcatatgctgattgtttgtgatatcattacaattacctcaacatgtataagaccttttcagcacaggtatcagatacaggcatcatgagtcgccaaaaacaatcagcagtccatgccttgatggttggcactttcttggcatgacacttgcttggcaccgctccatggttggcatgacctgtaattttgttcatcttcatcatgcctggacgtgtcctgtacgcctgtgttcgcgagacagagggcagcggcagcagcaggcatgtgccatgtgggccggtgcatggaagcatgtagtcagccattgtttgactccagcttttgtccctccaatacgatagtcagacagactgcaggaagcttatgtgtcatactacttctacttgttccgattagttaacgatgttgtactgggcagtccgggtgctgcaagccaccgacggtgtgcgggtacgcgtacgcgagcccgacggcgtggacgagcccggcggcggacgcggactgcgtggcgtggagcaacgaccccgacctgctctgctacgcctgcgcctcatgcaaggccggcgtgctgggcggcttgcacgagcagtggcgcagggccaccatcgcgctcatcttcgtctacgtcgtcggctgcagcgcgttccgtaacgcgcagaccgaggacctcttccgccgctacaaatggggaaattattaacgatctctcccactgatctactgcgtacgtacgtacacgccgacttgaaacgggtgagttgcgctttctgtttctggccgtcttttttattattattttgcgaaatcgatctgtttctggtgctcttggcacagtggttagtgttgtagaatgtggacaacagctagaatgctagatgttaattctataggag

SEQ ID NO: 123886 - DNA, 991 bp, Zea Mays
cgtcgtccccttccaaccctcctccctcgcctgccggtgtccctttcttcccccgtgtggcggctcgcacccgcacgagatctagactaccttcccaccctcctcccctgcccgctcgcctgtcggcgtccctttcttctccccgtgcggcggcccgcgcccgcacgagatctagactagacgccgagggcacgacgctttgcctgcctcgcctccgtcccctcgtcgcctccacgactccacctctacctcctcggtgagagagagagagagcgggggagagagggcactagaccaccagcaagcatgaggcagaggaggagcgtggcggcgccgctacactctaatccgctggctaccccatcaggagagagagagaggggggagagaaggcaccagacaccgccagtaagcatgaggcagagaaggcaccagacatcgcgctatcctccgcatccgccgcccgtcggcttcgtccgctgcgagaattctcgtgtcgcccatcggcgacaactgtccgggtgctgcaagccaccgacggtgtgcgggtacgcgtacgcgagcccgacggcgtggacgagcccggcggcggacgcggactgcgtggcgtggagcaacgaccccgacctgctctgctacgcctgcgcctcatgcaaggccggcgtgctgggcggcttgcacgagcagtggcgcagggccaccatcgcgctcatcttcgtctacgtcgtcggctgcagcgcgttccgtaacgcgcagaccgaggacctcttccgccgctacaaatggggaaattattaacgatctctcccactgatctactgcgtacgtacgtacacgccgacttgaaacgggtgagttgcgctttctgtttctggccgtcttttttattattattttgcgaaatcgatctgtttctggtgctcttggcacagtggttagtgttgtagaatgtggacaacagctagaatgctagatgttaattctataggag

SEQ ID NO: 123887 - DNA, 1299 bp, Zea Mays
gaaccgactctgcttccccttcagctgccttccatgtcagtatagcagcctaccgtcatatcaggcgacgacgactgtgtgtgcgcttttttatctgcctcattgcctgcaattcgatatgccaccgccgccgccgaagaagaagaatttgctcaagtcgttcatgggcaacggcaaagacgcgctccagcaggtcggcacgaagcagaggcacggcggcggtggaggcggcctccccaggctgtcagcctccagcaaggcgctggtcctcctgccgctcctgctcctggccttcatcttcctcttcgtgtatcccaaggagttcgagctgcaggcgatgctgagcgcgtgcggcccggcagccgcggagccggcggcggtccggaagcccgagttccggctgctcatcggcgtgctgacccgcgcggacctgtacgagcggcggcacctgctgcgcatggtgtacgggctgcagctcgcgtcgccgggtgggctcgcggcgcacgtggacgtccgcttcgtcttctgccggctgtacaaggacgaccagcgcgtgctggtgccgctcgagatcctcgcccacggcgacgtcatcgtgctcgacggctgcgaggagaacctcaacggcgggaagacgtacacgttcctgtcggcggtggcggcgctctacgccgacgagccgtacgactacgtgatgaaggccgacgacgacatcttcctccgcctgccgcagctggtggggtcgctgggcgggatgccccgggaggacatgtactacggcgccaccatcccctgcgatagcatggacccgttccgggagtacatggccggcatggcctacgcgctgtcgtgggacctcgtgcagtggatcgccacctccgacgtggcgcgcaaccacagcgtgggcacggaggacatgctcaccggcctctggctcaggatcgggggcaaggggaagaaccgcttcaacgccaagccggccatccacgactacctcaacccggtgcccgtggaccagtgcgagcacgagttcatgcccaccaccatcggcgtgcacaggctcaagagcaacccgaggtgggcagaggcgctcaagtacttcaacttcacggcagggctccagccgtccaagttctacaagatcgactagcaacctacctctcctatctactaccgtagtagtagggatcgatccatcggatgcatgcatgtatgcgttgcttaattttgagggagaatttatgatgtatacacaaaaacaaatatgtttttaaatttgatctgtgttcttctcacaaa

SEQ ID NO: 123888 - DNA, 1101 bp, Zea Mays
gcatacctttttgcttcagtgaggcattgctttgcattgcaagtctgatttccgttcaccattttgctgcatatgtgcaggttttagtgagattatggtaaccctttccaaaactgggttctttgatgctgcaaatcatccactgctgcaagatactagtcgtccaacatataagggtttccttgatgaactactgaataatatctccacaattaacacggacttagatattgaagcctctggtggatacgatgatgacctgattgccagactgttgaagctcgggtgttgcaaaaataaggaaatagctgttaagacagtcaaaaccatcaagttcttgggactacatgaagagactcaaatacctaagggttgttcgagcccatttgatgtgatttgccagcgaatggaacagaggatggcctatggccacaatgagcaagacatggtactgctccaccacgaagtcgaggtggaatacccggacgggcaacccgccgaaaagcaccaagcgacgctactggagttcgggaaggttgaaaatggcaggtccaccactgccatggcgctgaccgtcggcattccagcagcaataggggccctgctattgctaaagaataaggtccagacgaaaggagtgatcaggcctctgcaaccggaaatctacgttccagcattggagatcttggagtcgtcgggcatcaagctggttgagaaagtggagacttgaaagttccctgatacacagataaagatagtatgatatagcagggcacatgtatcttttgtattaactccgttctggaatatatatttgtgaactaaaatgtgacaaataaaaagaacgggtggagtatattgtaagagacggcaaagaaacctctgtatatatgacctgtcgatatcaaataatgccgatcagttagttggcttggctcttttgagggtttagtttatactagtaaatgagagcaaccagcgaagcataaacaagatgagacgtcagagcagcaacaacaacctgcgttgcctttggtttatattgcatcggttctccgaatgaactttgcatcctgtgcacatcagacatgtcccagaggg

SEQ ID NO: 123889 - DNA, 3571 bp, Zea Mays
gtaaactcacttcattttcaggaggttgtggatttcatgtccgtgatctaggcgccttacttggactcaggtatgggttctgctgctactgagggcaatgacaccttgctgggcaatggagttgttgggattcttgctgagacttgtaatatgtgggaaagaagggcgccgttaactccttcccattgtgcccgccttctgctaggaggaggcaagaacggacctcgagtaaaccggattattgtgcagccaagcacaaggaggatccatcatgacgctcagtatgaggatgcaggatgcgagatttcagaagacctgtcagaatgcggccttatcataggcatcaaacaacccaagctgcagatgattctttcagatagagcgtacgctttcttttcacacacacacaaagcccaaaaagagaatatgccactgttagacaagatccttgaagaaagggtgtccttgtttgattatgagctaattgttggagatgatgggaaaagatcactagcatttgggaaatttgctggtagagctggactgatagatttcttacatggtctcggacagcgatatttgagccttggatactcgactccatttctctctctgggacaatctcatatgtatccttcgctcgctgcagccaaggctgcagtcattgtcgttgcagaagagatagcaacatttggacttccatccggaatttgtccgatagtgtttgtgttcactggagttggaaacgtctctcagggtgcgcaggagatattcaagttattgccccatacctttgttgatgctgagaagcttcccgaaatttttcaggccaggaatctgtctaagcaatctcagtcgaccaagagagtatttcaactttatggttgtgttgtgacctctagagacatggtttctcacaaggatcccaccagacaatttgacaaaggtgactattatgctcatccagaacactacacccctgtttttcatgaaagaattgctccatatgcatctgtcatcgtaaactgtatgtattgggagaagaggtttccaccattactaaatatggatcagttacagcaattgatggagactggttgtcctttagtcggcgtttgtgacataacttgtgatattggaggttccattgaatttatcaacaagagtacatcaatagagaggcctttctttcggtatgatccttctaagaattcataccatgatgatatggaaggtgccggagtggtctgcttggctgttgacattctccctacagaattctctaaagaggcctcccaacattttggaaacatactatctagacttgttgctagtttggcctcagtgaagcaaccggcagaacttccttcctacttgagaagagcttgcattgcacatgctggcagattaactcctttgtatgaatatatccctaggatgagaaatactatgatgtatctctcagtgggcacctatttgataagttccttataaatgaagctttggacatcattgagacagctggaggttcatttcacttggttagatgtgaagttggacaaagcacggatgatatgtcatactcagagcttgaagtaggagcagatgatactgccacattggataaaattattgattccttgacttctttagctaatgaacatggtggagatcacgatgccgggcaagaaattgaattagctctgaagataggaaaagtcaatgagtatgaaactgacgtcacaattgataaaggagggccaaagattttaattcttggagctggaagagtctgtcggccagctgctgagtttctggcatcttacccagacatatgtacctatggtgttgatgaccatgatgcagatcaaattcatgttatcgtggcatctttgtatcaaaaagatgcagaagagacagttgatggtattgaaaatacaactgctacccagcttgatgttgctgatattggaagcctttcagatcttgtttctcaggttgaggttgtaattagcttgctgcctgctagttttcatgctgccattgcaggagtatgcatagagttgaagaagcacatggtaacggcaagctatgttgatgaatccatgtcaaacttgagccaagctgccaaagatgcaggtgtaactatactttgtgaaatgggcctagatcctggcatagatcacttgatgtcaatgaagatgattgatgaagctcatgcacgaaagggaaaaataaaggcatttacatcttactgtggtggattgccatctccagctgcagcaaacaatccgcttgcctataaattcagttggaacccagctggtgcactccggtcagggaaaaatcctgcagtctacaaatttcttggtgagacgatccatgtagatggtcataacttgtatgaatcagcaaagaggctcagactacgagagcttccagcttttgctctggaacacttgccaaatcggaattccttgatatatggtgacctttatggtatctccaaagaagcatccaccatatatagggctactcttcgttacgaaggttttagtgagattatggtaaccctttccaaaactgggttctttgatgctgcaaatcatccactgctgcaagatactagtcgtccaacatataagggtttccttgatgaactactgaataatatctccacaattaacacggacttagatattgaagcctctggtggatacgatgatgacctgattgccagactgttgaagctcgggtgttgcaaaaataaggaaatagctgttaagacagtcaaaaccatcaagttcttgggactacatgaagagactcaaatacctaagggttgttcgagcccatttgatgtgatttgccagcgaatggaacagaggatggcctatggccacaatgagcaagacatggtactgctccaccacgaagtcgaggtggaatacccggacgggcaacccgccgaaaagcaccaagcgacgctactggagttcgggaaggttgaaaatggcaggtccaccactgccatggcgctgaccgtcggcattccagcagcaataggggccctgctattgctaaagaataaggtccagacgaaaggagtgatcaggcctctgcaaccggaaatctacgttccagcattggagatcttggagtcgtcgggcatcaagctggttgagaaagtggagacttgaaagttccctgatacacagataaagatagtatgatatagcagggcacatgtatcttttgtattaactccgttctggaatatatatttgtgaactaaaatgtgacaaataaaaagaacgggtggagtatattgtaagagacggcaaagaaacctctgtatatatgacctgtcgatatcaaataatgccgatcagttagttggcttggctcttttgagggtttagtttatactagtaaatgagagcaaccagcgaagcataaacaagatgagacgtcagagcagcaacaacaacctgcgttgcctttggtttatattgcatcggttctccgaatgaactttgcatcctgtgcacatcagacatgtcccagaggg

SEQ ID NO: 123890 - DNA, 3731 bp, Zea Mays
agcgcagaggcctcgtccgtctccgtttccgtctccctccccgcgccacctcactcgttcgccgcctccgccggcgcccgtgcgccatctccactccagcgcgctctacgccgatcgagctgccaggaggttgtggatttcatgtccgtgatctaggcgccttacttggactcaggtatgggttctgctgctactgagggcaatgacaccttgctgggcaatggagttgttgggattcttgctgagacttgtaatatgtgggaaagaagggcgccgttaactccttcccattgtgcccgccttctgctaggaggaggcaagaacggacctcgagtaaaccggattattgtgcagccaagcacaaggaggatccatcatgacgctcagtatgaggatgcaggatgcgagatttcagaagacctgtcagaatgcggccttatcataggcatcaaacaacccaagctgcagatgattctttcagatagagcgtacgctttcttttcacacacacacaaagcccaaaaagagaatatgccactgttagacaagatccttgaagaaagggtgtccttgtttgattatgagctaattgttggagatgatgggaaaagatcactagcatttgggaaatttgctggtagagctggactgatagatttcttacatggtctcggacagcgatatttgagccttggatactcgactccatttctctctctgggacaatctcatatgtatccttcgctcgctgcagccaaggctgcagtcattgtcgttgcagaagagatagcaacatttggacttccatccggaatttgtccgatagtgtttgtgttcactggagttggaaacgtctctcagggtgcgcaggagatattcaagttattgccccatacctttgttgatgctgagaagcttcccgaaatttttcaggccaggaatctgtctaagcaatctcagtcgaccaagagagtatttcaactttatggttgtgttgtgacctctagagacatggtttctcacaaggatcccaccagacaatttgacaaaggtgactattatgctcatccagaacactacacccctgtttttcatgaaagaattgctccatatgcatctgtcatcgtaaactgtatgtattgggagaagaggtttccaccattactaaatatggatcagttacagcaattgatggagactggttgtcctttagtcggcgtttgtgacataacttgtgatattggaggttccattgaatttatcaacaagagtacatcaatagagaggcctttctttcggtatgatccttctaagaattcataccatgatgatatggaaggtgccggagtggtctgcttggctgttgacattctccctacagaattctctaaagaggcctcccaacattttggaaacatactatctagacttgttgctagtttggcctcagtgaagcaaccggcagaacttccttcctacttgagaagagcttgcattgcacatgctggcagattaactcctttgtatgaatatatccctaggatgagaaatactatgatagatttggcacccgcaaaaacaaatccattgcctgacaagaagtatagcaccctggtatctctcagtgggcacctatttgataagttccttataaatgaagctttggacatcattgagacagctggaggttcatttcacttggttagatgtgaagttggacaaagcacggatgatatgtcatactcagagcttgaagtaggagcagatgatactgccacattggataaaattattgattccttgacttctttagctaatgaacatggtggagatcacgatgccgggcaagaaattgaattagctctgaagataggaaaagtcaatgagtatgaaactgacgtcacaattgataaaggagggccaaagattttaattcttggagctggaagagtctgtcggccagctgctgagtttctggcatcttacccagacatatgtacctatggtgttgatgaccatgatgcagatcaaattcatgttatcgtggcatctttgtatcaaaaagatgcagaagagacagttgatggtattgaaaatacaactgctacccagcttgatgttgctgatattggaagcctttcagatcttgtttctcaggttgaggttgtaattagcttgctgcctgctagttttcatgctgccattgcaggagtatgcatagagttgaagaagcacatggtaacggcaagctatgttgatgaatccatgtcaaacttgagccaagctgccaaagatgcaggtgtaactatactttgtgaaatgggcctagatcctggcatagatcacttgatgtcaatgaagatgattgatgaagctcatgcacgaaagggaaaaataaaggcatttacatcttactgtggtggattgccatctccagctgcagcaaacaatccgcttgcctataaattcagttggaacccagctggtgcactccggtcagggaaaaatcctgcagtctacaaatttcttggtgagacgatccatgtagatggtcataacttgtatgaatcagcaaagaggctcagactacgagagcttccagcttttgctctggaacacttgccaaatcggaattccttgatatatggtgacctttatggtatctccaaagaagcatccaccatatatagggctactcttcgttacgaaggttttagtgagattatggtaaccctttccaaaactgggttctttgatgctgcaaatcatccactgctgcaagatactagtcgtccaacatataagggtttccttgatgaactactgaataatatctccacaattaacacggacttagatattgaagcctctggtggatacgatgatgacctgattgccagactgttgaagctcgggtgttgcaaaaataaggaaatagctgttaagacagtcaaaaccatcaagttcttgggactacatgaagagactcaaatacctaagggttgttcgagcccatttgatgtgatttgccagcgaatggaacagaggatggcctatggccacaatgagcaagacatggtactgctccaccacgaagtcgaggtggaatacccggacgggcaacccgccgaaaagcaccaagcgacgctactggagttcgggaaggttgaaaatggcaggtccaccactgccatggcgctgaccgtcggcattccagcagcaataggggccctgctattgctaaagaataaggtccagacgaaaggagtgatcaggcctctgcaaccggaaatctacgttccagcattggagatcttggagtcgtcgggcatcaagctggttgagaaagtggagacttgaaagttccctgatacacagataaagatagtatgatatagcagggcacatgtatcttttgtattaactccgttctggaatatatatttgtgaactaaaatgtgacaaataaaaagaacgggtggagtatattgtaagagacggcaaagaaacctctgtatatatgacctgtcgatatcaaataatgccgatcagttagttggcttggctcttttgagggtttagtttatactagtaaatgagagcaaccagcgaagcataaacaagatgagacgtcagagcagcaacaacaacctgcgttgcctttggtttatattgcatcggttctccgaatgaactttgcatcctgtgcacatcagacatgtcccagaggg

SEQ ID NO: 123891 - DNA, 3708 bp, Zea Mays
agcgcagaggcctcgtccgtctccgtttccgtctccctccccgcgccacctcactcgttcgccgcctccgccggcgcccgtgcgccatctccactccagcgcgctctacgccgatcgagctgccaggaggttgtggatttcatgtccgtgatctaggcgccttacttggactcagggcaatgacaccttgctgggcaatggagttgttgggattcttgctgagacttgtaatatgtgggaaagaagggcgccgttaactccttcccattgtgcccgccttctgctaggaggaggcaagaacggacctcgagtaaaccggattattgtgcagccaagcacaaggaggatccatcatgacgctcagtatgaggatgcaggatgcgagatttcagaagacctgtcagaatgcggccttatcataggcatcaaacaacccaagctgcagatgattctttcagatagagcgtacgctttcttttcacacacacacaaagcccaaaaagagaatatgccactgttagacaagatccttgaagaaagggtgtccttgtttgattatgagctaattgttggagatgatgggaaaagatcactagcatttgggaaatttgctggtagagctggactgatagatttcttacatggtctcggacagcgatatttgagccttggatactcgactccatttctctctctgggacaatctcatatgtatccttcgctcgctgcagccaaggctgcagtcattgtcgttgcagaagagatagcaacatttggacttccatccggaatttgtccgatagtgtttgtgttcactggagttggaaacgtctctcagggtgcgcaggagatattcaagttattgccccatacctttgttgatgctgagaagcttcccgaaatttttcaggccaggaatctgtctaagcaatctcagtcgaccaagagagtatttcaactttatggttgtgttgtgacctctagagacatggtttctcacaaggatcccaccagacaatttgacaaaggtgactattatgctcatccagaacactacacccctgtttttcatgaaagaattgctccatatgcatctgtcatcgtaaactgtatgtattgggagaagaggtttccaccattactaaatatggatcagttacagcaattgatggagactggttgtcctttagtcggcgtttgtgacataacttgtgatattggaggttccattgaatttatcaacaagagtacatcaatagagaggcctttctttcggtatgatccttctaagaattcataccatgatgatatggaaggtgccggagtggtctgcttggctgttgacattctccctacagaattctctaaagaggcctcccaacattttggaaacatactatctagacttgttgctagtttggcctcagtgaagcaaccggcagaacttccttcctacttgagaagagcttgcattgcacatgctggcagattaactcctttgtatgaatatatccctaggatgagaaatactatgatagatttggcacccgcaaaaacaaatccattgcctgacaagaagtatagcaccctggtatctctcagtgggcacctatttgataagttccttataaatgaagctttggacatcattgagacagctggaggttcatttcacttggttagatgtgaagttggacaaagcacggatgatatgtcatactcagagcttgaagtaggagcagatgatactgccacattggataaaattattgattccttgacttctttagctaatgaacatggtggagatcacgatgccgggcaagaaattgaattagctctgaagataggaaaagtcaatgagtatgaaactgacgtcacaattgataaaggagggccaaagattttaattcttggagctggaagagtctgtcggccagctgctgagtttctggcatcttacccagacatatgtacctatggtgttgatgaccatgatgcagatcaaattcatgttatcgtggcatctttgtatcaaaaagatgcagaagagacagttgatggtattgaaaatacaactgctacccagcttgatgttgctgatattggaagcctttcagatcttgtttctcaggttgaggttgtaattagcttgctgcctgctagttttcatgctgccattgcaggagtatgcatagagttgaagaagcacatggtaacggcaagctatgttgatgaatccatgtcaaacttgagccaagctgccaaagatgcaggtgtaactatactttgtgaaatgggcctagatcctggcatagatcacttgatgtcaatgaagatgattgatgaagctcatgcacgaaagggaaaaataaaggcatttacatcttactgtggtggattgccatctccagctgcagcaaacaatccgcttgcctataaattcagttggaacccagctggtgcactccggtcagggaaaaatcctgcagtctacaaatttcttggtgagacgatccatgtagatggtcataacttgtatgaatcagcaaagaggctcagactacgagagcttccagcttttgctctggaacacttgccaaatcggaattccttgatatatggtgacctttatggtatctccaaagaagcatccaccatatatagggctactcttcgttacgaaggttttagtgagattatggtaaccctttccaaaactgggttctttgatgctgcaaatcatccactgctgcaagatactagtcgtccaacatataagggtttccttgatgaactactgaataatatctccacaattaacacggacttagatattgaagcctctggtggatacgatgatgacctgattgccagactgttgaagctcgggtgttgcaaaaataaggaaatagctgttaagacagtcaaaaccatcaagttcttgggactacatgaagagactcaaatacctaagggttgttcgagcccatttgatgtgatttgccagcgaatggaacagaggatggcctatggccacaatgagcaagacatggtactgctccaccacgaagtcgaggtggaatacccggacgggcaacccgccgaaaagcaccaagcgacgctactggagttcgggaaggttgaaaatggcaggtccaccactgccatggcgctgaccgtcggcattccagcagcaataggggccctgctattgctaaagaataaggtccagacgaaaggagtgatcaggcctctgcaaccggaaatctacgttccagcattggagatcttggagtcgtcgggcatcaagctggttgagaaagtggagacttgaaagttccctgatacacagataaagatagtatgatatagcagggcacatgtatcttttgtattaactccgttctggaatatatatttgtgaactaaaatgtgacaaataaaaagaacgggtggagtatattgtaagagacggcaaagaaacctctgtatatatgacctgtcgatatcaaataatgccgatcagttagttggcttggctcttttgagggtttagtttatactagtaaatgagagcaaccagcgaagcataaacaagatgagacgtcagagcagcaacaacaacctgcgttgcctttggtttatattgcatcggttctccgaatgaactttgcatcctgtgcacatcagacatgtcccagaggg

SEQ ID NO: 123892 - DNA, 3722 bp, Zea Mays
agcgcagaggcctcgtccgtctccgtttccgtctccctccccgcgccacctcactcgttcgccgcctccgccggcgcccgtgcgccatctccactccagcgcgctctacgccgatcgagctgccaggaggttgtggatttcatgtccgtgatctaggcgccttacttggactcaggtatgggttctgctgctactgagggcaatgacaccttgctgggcaatggagttgttgggattcttgctgagacttgtaatatgtgggaaagaagggcgccgttaactccttcccattgtgcccgccttctgctaggaggaggcaagaacggacctcgagtaaaccggattattgtgcagccaagcacaaggaggatccatcatgacgctcagtatgaggatgcaggatgcgagatttcagaagacctgtcagaatgcggccttatcataggcatcaaacaacccaagctgcagatgattctttcagatagagcgtacgctttcttttcacacacacacaaagcccaaaaagagaatatgccactgttagacaagatccttgaagaaagggtgtccttgtttgattatgagctaattgttggagatgatgggaaaagatcactagcatttgggaaatttgctggtagagctggactgatagatttcttacatggtctcggacagcgatatttgagccttggatactcgactccatttctctctctgggacaatctcatatgtatccttcgctcgctgcagccaaggctgcagtcattgtcgttgcagaagagatagcaacatttggacttccatccggaatttgtccgatagtgtttgtgttcactggagttggaaacgtctctcagggtgcgcaggagatattcaagttattgccccatacctttgttgatgctgagaagcttcccgaaatttttcaggccaggaatctgtctaagcaatctcagtcgaccaagagagtatttcaactttatggttgtgttgtgacctctagagacatggtttctcacaaggatcccaccagacaatttgacaaaggtgactattatgctcatccagaacactacacccctgtttttcatgaaagaattgctccatatgcatctgtcatcgtaaactgtatgtattgggagaagaggtttccaccattactaaatatggatcagttacagcaattgatggagactggttgtcctttagtcggcgtttgtgacataacttgtgatattggaggttccattgaatttatcaacaagagtacatcaatagagaggcctttctttcggtatgatccttctaagaattcataccatgatgatatggaaggtgccggagtggtctgcttggctgttgacattctccctacagaattctctaaagaggcctcccaacattttggaaacatactatctagacttgttgctagtttggcctcagtgaagcaaccggcagaacttccttcctacttgagaagagcttgcattgcacatgctggcagattaactcctttgtatgaatatatccctaggatgagaaatactatgatagatttggcacccgcaaaaacaaatccattgcctgacaagaagtatagcaccctggtatctctcagtgggcacctatttgataagttccttataaatgaagctttggacatcattgagacagctggaggttcatttcacttggttagatgtgaagttggacaaagcacggatgatatgtcatactcagagcttgaagtaggagcagatgatactgccacattggataaaattattgattccttgacttctttagctaatgaacatggtggagatcacgatgccgggcaagaaattgaattagctctgaagataggaaaagtcaatgagtatgaaactgacgtcacaattgataaaggagggccaaagattttaattcttggagctggaagagtctgtcggccagctgctgagtttctggcatcttacccagacatatgtacctatggtgttgatgaccatgatgcagatcaaattcatgttatcgtggcatctttgtatcaaaaagatgcagaagagacagttgatggtattgaaaatacaactgctacccagcttgatgttgctgatattggaagcctttcagatcttgtttctcaggtaagtttcatcctgatacttaaatctgggtgggctccattgttttttaaactaacttcattcacacttaggcaatagcttctatgcggttcaggacattggtttgtgctttctttctggcaaaatatttaacttgtacccctgaatttgttgattacagtactaactagtcagaagattaatgatgcgagctcctcttgcaggttgaggttgtaattagcttgctgcctgctagttttcatgctgccattgcaggagtatgcatagagttgaagaagcacatggtaacggcaagctatgttgatgaatccatgtcaaacttgagccaagctgccaaagatgcaggtgtaactatactttgtgaaatgggcctagatcctggcatagatcacttgatgtcaatgaagatgattgatgaagctcatgcacgaaagggaaaaataaaggcatttacatcttactgtggtggattgccatctccagctgcagcaaacaatccgcttgcctataaattcagttggaacccagctggtgcactccggtcagggaaaaatcctgcagtctacaaatttcttggtgagacgatccatgtagatggtcataacttgtatgaatcagcaaagaggctcagactacgagagcttccagcttttgctctggaacacttgccaaatcggaattccttgatatatggtgacctttatggtatctccaaagaagcatccaccatatatagggctactcttcgttacgaaggttttagtgagattatggtaaccctttccaaaactgggttctttgatgctgcaaatcatccactgctgcaagatactagtcgtccaacatataagggtttccttgatgaactactgaataatatctccacaattaacacggacttagatattgaagcctctggtggatacgatgatgacctgattgccagactgttgaagctcgggtgttgcaaaaataaggaaatagctgttaagacagtcaaaaccatcaagttcttgggactacatgaagagactcaaatacctaagggttgttcgagcccatttgatgtgatttgccagcgaatggaacagaggatggcctatggccacaatgagcaagacatggtactgctccaccacgaagtcgaggtggaatacccggacgggcaacccgccgaaaagcaccaagcgacgctactggagttcgggaaggttgaaaatggcaggtccaccactgccatggcgctgaccgtcggcattccagcagcaataggggccctgctattgctaaagaataaggtccagacgaaaggagtgatcaggcctctgcaaccggaaatctacgttccaggtgtgctacgtagtttttcatgcttgtccttgtggaattaccatgacgtgtaacggtgctgacccgtgtgtttgcgtgtctgaagcattggagatcttggagtcgtcgggcatcaagctggttgagaaagtggagacttgaaagttccctgatacacagataaagatagtatgatatagcagggcacatgtatcttttgtattaactccgttctg

SEQ ID NO: 123893 - DNA, 4126 bp, Zea Mays
aagtcaggcgtcgggtcctcagtcgtagcggcggcgatggcgcgcggcggcggggggcggtcgaagaaggaggatgaggaggagctgcggggggcgaagcgcggttacaaggaggcgtcggcggagggtaatcgggaggaggaggcgcgctgggctaacgtcatcggcgacatctacaagcgccgctgcgagtacgtcgaggccctccggtggcttcgggcggactacgaggtctccgtaaagcacctcccgcagcggcacctcctcccctcctgtcagtcgctcggcgaggtctacctccgcctcggccgcttctcggaggcgctcacctaccagaagaagcatctacagctcgcaaaggagtctgatgaccttgttgagcagcagcgagctaccacacagcttgggagaacataccatgaaatccttctaagatctgaaaatgaccatagtgccataaggaatgcaaaaaagtactttaaatcttcgatgaagctggcaaggattctaaaggagagatccccttcccaaaagtcggactttctaaaagaacttattgatgcgtacaataatatgggcatgcttgagctggaacttgataattttgaagaagctgagaaactacttatccagggcctgaagatatgcgacgacgaagaggtagattcgtatgatgatgctcgcactaggctccatcataatctcggaaatgtttatactgaactacagaattggaaaaaagccagggggcacattgagaaggacatagagatatgtagaaaaatacgccatcttcaaggtgaggcaaaaggattcataaatctgggggagttacattatcgagttcagaagtatgacaatgcaaaactttgttacaataaagctcttgaagtagcaagatccttggaagatgaggatgctctaattgaacaaattcaccagaatattgaaactgttacgaaagcagttgaagtatttgagcagttgaaggaggatgaactgaagctaaaaaaacttatccgggacacttctaatgctcgtggaacatctaaagagagaaaactcctacttgatcagcatgcatggctggatagtcttattgagaaggccaggatgatatgtgcatggcaaaaaggacaagcattagcgaaagtgaacattggcaatgttcttgattcttgtggcgactgggctggtgcattgcaagcttacgaagaaggctaccggattgctgtggaagcagacctacctaatgtgcaactttctgccctcgagaacatgcattacagtcatatggtcagatttgataatatcgaagaagccaagaaaatgcaggaaaaaatagacaatctgaagcaaacactgaatcaatgtgaagcaagggatactgttagtgactactgctcagaaactgacactgaaggtggttgcacatctgataacacgcttgatgctcagaatgaccatggacaggctgcaaataactacgaggaacctgatgatgatgttacgcttgcttcactcgttcagaggagtgggagctcatccaagattaaggtacccaagatacggaattcttctaagaagtttgatgaactatgtgatgtgactgaagacatacataattcttctaagaaggttgatgaactaggtgatatggctgaaggcactagggcagttttaagtagatcacgttctgatcactctgttggcagaaaacgtgtccgtgtgatcttatcagatgatgaatccgacgagaatcatgaaaacgttcagtttaaaaagacatcaactagtcctgcagatagtatgtcagtctcagaccatggagcaagcagcagcagaaaccaggatactttacaagttaatcaaacaagggatgcaccctatccagctgaggagagcatttgttcattcaaatcaagtagtcctattgatcatgcttttgaaggcataggattaggtgcttccagtgcaggaaagggaccaacctccaaatcagcagcaagtttttccaagctcagtacacctggctcaaacagtctgaatgaaagccaaaatgctgttggttctcaatccaaagatgctgataatcacttctgggccttcagaatcggcggccatctggtttacttggatggacgtgcttgtgtacatgaaggtgcttttagcattgactctctcaaagttgaagtagcatgtgtatattatcttcagatttctgatgaaaaaagggccaaaggtctattgcctatcattggggagctaaagtttcgtgggaaggtattggaagatgcggtatccatatattatgatgatcagctcgcttctgaacagaagtgtgttgatgttgttattgatgattgggtgccaaagcagctgatgaagttgtatgttgatttctgcatgaagtcattagaagcacccaataagaagctgctgacgaaactatataatcttgaggtctccgaagatgaaatcattgtttctgattgcggactgcaggatatgtcaattgtcccctttcttgatgccctaagatctcacaaaacaatagcagttttggatctttctcataatttactaggaaatcaaacagttgaaagacttcagcatatatttgcttcatcaagtcacacatatggtggcttgactctggatttacattgtaatcgattgggtccaactgctttatttcagatatgtgagtgcgctgttttgactgatcgattggaagtacttaatctatctgggaatcgcctcactgatgcatgcagttcttacctattcacaatcctgaaaaagtgcaaagcttgaatgtcgagcagtgttctatcacgtcaagaactgttcagaagatgacagatgcactccatgaagagtctgtcctttcacatctctcattaggaaagaacaacccaatttctagcaatacaatgcttaaccttctatccaaacttgcatctctcacaaggttttcagaactaagcctgactggtataaaactgaataagttaatggttgataagttgtgcctccttgcacaatcctcgtgcctatcaggacttctgctaggtggaacttccattggaccggtggagacaactaggcttactgaggcattgtcttgtacatctcaagatttcctaaggttggagttgtctaattgtgggctcacaacacctgatttcacacaaatctgtacaaatctctcccggatcaatattcttgagttaaaccttggaggaaatccaattaacctggagggatgtgatgctgtacagcgaatgcttgtaaatccccaatgcagtattagatctctcagccttgacaaatgcaatcttggacttgctggaattgtccgtgtcattcaatcattaccagaaaacagccaattagaggagctgcgcgtgtctaagaacaccaacttggcgttggagacaacaacaaagtatgacgaagacatgcaggaagtatcaacagcttctgagcaaaagcaatgtaatgaccctgaaacaacgaatgatatagctccagggaacatagattttgcgaacatgcaggttccagacagtgaagatgaagcagataatgatgcccaccgtgccagatctggttcacgcaggagctgtgcaagttcatcgcagaaaaactcttactcttcttgtcagatgattgaagaactggcgaaggcccttatttcagcaaagcagttgatggtgcttgatcttagctgcaatggtttgtcggaggaggcagtccagtcactgtattctgcttgggcgtctgttccgagaggcgatggaatggctcggaaacatgtaaataaggaggtggtccacttttcagtggatggtatgaggtgctgcggcctaaaaccctgctgcagaagagacctgcaaatgtgaaccctggacgaccttccgatgctaaattatggttgcactctgtaaataaatcatgagtgaatcaactaggcgttgaagcattgtcaatgcaacttcacactagtcacgatagtttggtgagtaattatgctgattcgcgggaatgtatacactacaatactagatgcttgagatttgggtatgcagttgtttcctgaggtgcagttactccttcgaaa

SEQ ID NO: 123894 - DNA, 539 bp, Zea Mays
tgggtggcactctcctccatcatcgtcgtccacagcgccaacgacgaggggagacggatgctcgcgctccgtgcctccgacatctttctcgacctccagcccccgcaggtcggcgcctcctacctagtcctgcccgatcgcatcgtcaagcaccccagttctctgcacacatgatgtaggtggtgggagctcgatttgggggtctgatagcgaaggaacggatggatcagacagggagcaggctatcagtgaccaagctaccaactctggtgaccaagctgccgactctcctgaccaagctgcagactctcctgaccaagctgatgctgaaccataaatagtctgaaagtgtggaggattatgcaacattggtgatggtttcagacatctgtcctcttggaaaccttagacccgtgttaggaacagagcctgtggccaattccgtgcggcgctacgactgtatgagaaaacattatatttcgtgttgcatattgctagctaggtaataattgaaaatggaattcaattttcgttctata

SEQ ID NO: 123895 - DNA, 1850 bp, Zea Mays
caaactatccttatgttttacagaaacactcaagccttcccctccctgcctgctcactcgcctataattctcccgtccccttcctcctcccattccctgcctgctcattcccgtcgacctcgaatcaaccagcagcagctcgaaacgaaacgaaacgaaccaatccaaccaactcgccagttgccaccctccaaagccgcagcccccatcccaccaccggccaggcaggcagagcgtgccacgcgccatgtcaggcacgtcttcgttcacaaccggggagtcgtctcgagccggcgagcaaccggagcgcgacgaggtggttgagttcaaggcccgcacgtgggtggcactctcctccatcatcgtcgtccacagcgccaacgacgaggggagacggatgctcgcgctccgtgcctccgacatctttctcgacctccagcccccgcaggtcggcgcctcctacctagtcctgcccgatcgcatcgtcaagcaccccaggtatgcagaccaccccgtcgtcttgtccgcctgctccgaccacttcctcttccgggctaccccggccgagggcccctcgaacctcatctgcttcttcgttggcgacgtcaacgcccgcaccgtcgtccgcctccccgaggtccccttccacatggccgtcaacaccatcccgcatccgcaatacagcattggcctcatcgccgacccgcgatcgcgacacggtggtcattacatggtggcccagctccacccgacctttacgacccaccacacgaccctgctatgctactccagcgtcaccgaccagtggaccgccaggccgctggcctccaccgagagcgaggagcaccatcgctggggcgcccacggcgtccttgcccatggcggcctcctctggtggatcgacctcttctacggcatgctcgtctgcgaccctttcgccgcagacgacaacctgcacctgcgcttcgtcccgctcccggtcggctccatccgcacgggcaggcgcgtccccggcccagagaacataggccgggaacgcttcatcaggccgagccagggcaagctgcgatacgtggagatccaaggagcccccagcggtatgcgtactagcaactaccagcccccgtcgaacccccaggtccgcatgttcacgctcgtcagccaagagggccagcatcactgggtacacgagtacacggcgaccttcctcgacatttggagccaccgcagctacgccgaggccggtctgccccagggcgtggtgccttggctcgccctcatcgaccccaacaacgccaacactctctacttcttccggggcacgacgctcttcgcagtggacggacaaaccagacaggtcttgttccgcgtgcgatgcttggtactagaatccgcacgcgggggccacaggttccagaactcccgcttcattggtgcgtgggagctgccaccagcgctagagccagacgttctctgcacacatgatgtaggtggtgggagctcgatttgggggtctgatagcgaaggaacggatggatcagacagggagcaggctatcagtgaccaagctaccaactctggtgaccaagctgccgactctcctgaccaagctgcagactctcctgaccaagctgatgctgaaccataaatagtctgaaagtgtggaggattatgcaacattggtgatggtttcagacatctgtcctcttggaaaccttagacccgtgttaggaacagagcctgtggccaattccgtgcggcgctacgactgtatgagaaaacattatatttcgtgttgcatattgctagctaggtaataattgaaaatggaattcaattttcgttctata

SEQ ID NO: 123896 - DNA, 339 bp, Zea Mays
atgagagtggagaggcagggccattgctactgcaagtcgcccctaagcctggtactaagagttgtaggaggcaagaattcacagttatctttgtctacatgctattctttgaacacaatatttacgagcttgataggcctgttttggaatacaaattatgtgtccgataggtttatgaggttgtcaagttttcatttcaatgcaaatccagctggacaacaccatgtcacaaagcagaggaagcgcactagagtcgttggcaagaagaagaggatcgccaagaagaagtctgaggctgccgagtaccaaaagcttcttgctcagaggctgaaggaatag

SEQ ID NO: 123897 - DNA, 649 bp, Zea Mays
ggagaagtatcgaaccgggctgaacccgtaggagaaggtgaagccagagaaggagcccatggggcagttcgtggatgacgacatcagggacctgccaagatctccatggaggagatcgacgccgccaagctcaccaaggacaacgtcgacgtccgcctcaagtggcttggcctcttccaccgctacaagcaccagtgtacacccactgattctacaccccctgcaatggttgttgttgctgttggtaggagcgaccccgcgagcgtgacacggacaaagcagccttcggtgtcaggttcgatttggtttctgcaaagtttatcactcctacattttcgcaattagtttctacaaattatatcactccatttcactcctatggaattactgtgacttaatttcaatcgaggtcattcttcttgctccttcgctttgcttagcagtaaagacaataacttcctttaccttgctcagtagtttgccttttaatttgaacaaaaatctaatcacctgacattgcatgggaggtaagctcctgtttttcataaactttatcggtggacagttcacagtcctgacagacccattagtccgatagaacaattagcattaggtaattattttggcattggcaattttcatcaactcc

SEQ ID NO: 123898 - DNA, 807 bp, Zea Mays
ctccgctgggtacactctgttcttcgtatttgtgcatgtttcattgctgtttactgcttatgcgagtagttatacacacatgcacatacatgtcatcacatatatcgcactgtttttctggattaaattaaaactaaaaatgcctaactttctaacatttggttctccatctccccattccctccctccccaccccctggcccagcggcgacatggagcccggtcgcatcccatggagggccaatctccaatggatccatggcttgaaggtgtcatcacctctcgaggatccaagatatgaggcactaaatcagcggagagagggttcgatatttggtgtcgagtgtgagaagtgtgggatgctcattagggtggctgggaacagcatcatgttgtcacccccgctcatcatgactcccaatgaagtggaagaaatgctctgaaggccacggaggaatggatcggagaactgaagtctaggaagaattggccaaagctgctggttgtaacgacggtgaggatggtgatgaaagtgtccaatatacagtgcattttcaaactttatttcaataaagtgctaggctgcgaaagggcctctgtcatgtgttatctgtactccaatttttgtgcacgcctaatgctctgtaaaccaccagtctctggttctgccttggaggcgtatgaagctataatgactaggcactaattgctcgttccttttttaaaacagcctgcttttgaactggttaatgtaattgtggtttctcgctcgctcggcatatgaaatacatttcagattgtgcagac

SEQ ID NO: 123899 - DNA, 1794 bp, Zea Mays
atgcgaattatctcacgcgaattgcaaacaatacattcccgtcccatcttctgcgagcacagagagagtgggagagcaggcctccgaaatcaccgaccgcagagagatacacttgcacgggtgtgcgggcgatcagatttttggggagcgtcttcgcgactgctcgcgtgacctgtttgttcttcttcccggcgaccgttcgagagactgcacagcgtacatcttcctgcaccgacttcgtatggttacatcgaacaaacacacgagatgtctcgtgtgaatggagccactgatgccttgagcatcagtccctccgctgggtacactctgttcttcgtatttgtgcatgtttcattgctgtttactgcttatgcgagtagttatacacacatgcacatacatgtcatcacatatatcacactgtttttctggattaaattataactaaaaatgcctaactttctaacaatccaaaaatctgatattaggcatttttccgctggtggttttgctgctgcgttaaaaccaagtgaaccttttgatgggacgttttacaagagatggcgtagtaagatgatactgtggttgaccgcaatgaactgctatcacgccgcacaggggaaacccgaacagttcactcctgaagaggagagaatgttcgacgttgtcgataacctgtttcgaggcgccgtgattggcgctcttgccaacaagtatgttgattcttatctaacgtgcacatctgcaaaagagttatgggatgcattagatgagaagtttggtgtttctgatgctggtagcgagctgtacatcatggagcagctatttgactataagatggtggaaaaccgtcctgtagttgaacaggctcatgaaatacaggcactggctaaagaactcgaacaattcccatgtgtcttgcctgacaagttcgtggccggcggtattatcgctaaactgccaccttcttggacggactttgctaccactctaaaacataagagacaagagtttagcgtggctgagcttattggttctcttgatgttgaggagagggcgagagcaaaagacactcgtggaaaaggagttgagacttctagtgccaatatggtacaaaagaagaactccaatgcatcacataataataaaaaaagaacaagcaacagaatgccacgaagcccaagcaggcagcctcgttcaaaaagaagaacaaaggagctggttgctttgtttgcgggagtactgatcattgggcaagcgcttgtccagaccgcaaatttaagcaagagaaaaaaccagctcaagagaagaaaacagtaaacatggttgttagcgagactgcagaaggaacatcggggtatggtaatcttttacctactgttctttcagtgtgtcaatcccctgagtggtgggctgatatcggtgctaatattcatgtgtgtgctgatatttctttattttcttcttatcagtgcaaagggactggagccttgctgatggggaacggatcacatgcgcgtgttcttggtgttggtacagtcattctgaagtttacttcgggaaagacggtgctattgaagaacgtgcagcatgtcccctccatcaaaaagaatctagttagtggctctcaattgtgtcgagatggctacaaaattgtctttgagtctaataaatgtatactgtctaagtatggaacgtttgttggaaaaggctatgacagcggaggcttgttccgcttatctttgcatgatgcgtgtaatgagtctgtgaacaatgttgtttcgaatgagtcgt

SEQ ID NO: 123900 - DNA, 110 bp, Zea Mays
aaactatatatatatatatattcactgtatagatctatacttgtggagatcaacaaaattaatttcttacgatttttctacaatttactatgactttttaaaagattcag

SEQ ID NO: 123901 - DNA, 2607 bp, Zea Mays
ttccaccacgccacggatcccctcccacaacacatccatctctcccactgcacgtgcacgtgcacgtgaaacccagacgccaccgatggcaaggctcgctatatgcgccctgctggccgccgccgtcgttgtctccgcggcggtggcgaccatggagtccgaagcggaggagcctgtgtccacgtacattgtgcatgtcgcgccggcgcacgcgccgcgggcgacccgcccccgcgcgctctccggtgcgtaccgctccttcctgcgcgagcacctccccgcgcgcgtggcgcgcccggcgccgaggctgctctactcgtacgcgcacgccgcgacggggttcgcggcgcggctgacgggggcccaggccgcgcacctcgcctcgcggcgctccgccgtgctcgcggtcgtgcccgacgcgacgcagcagctgcacaccacgctgacgccgtcgttcctgcgcctctcggactcgtcggggctgctccaggcgtccggcggcgccacggacgtcgtggtcggcgtcatcgacaccggcgtgtaccccaaggaccgcgcgtccttcgccgcggacccgtcgctgccgccgccgcccagcacattccgcggccgctgcgtctcgacgccggcgttcaacgcctccgcgtactgcaacaacaagctcgtcggcgccaagttctttggcctggggtacgaggccgcgcacggcgggggcgcggtggacgagacggactccaggtccccgctcgataccaacggccacggcacgcacacctcgtccacggcagcgggctccgccgtgccgaacgccgccttcttcgactacgccaaaggcacagccatcggcatggctccgcgcgcccgcatcgctgcctacaaggcgtgctgggcgagggggtgcacgtcctcggacatcctcatggcgttcgacgaggccatcaaggacggggtcaacgtcctctccgtctcgctcggcgccgtcggccaggcgcccccgttctacagcgacagcacggccgtgggagcgttcagcgccgtccgcaggggcatcgtcgtctctgcctccgcgggcaactccggccccggcgagttcaccgccgtcaacgtcgcgccatggatcctgacggtgggcgcgtcaaccgtcaaccgccggttctcagcgaacgtcgttctcggcagtggcgacaccttcgccggcacttccctctatgccggcacgccgctcggtccaagcaagatcccgctagtctacggaggtgacgtgggctcaagcgtctgtgaagctggcaaactgatcgccagcaaggtcgccggcaagatcgtggtgtgcgaccctggcgttaacggtcgagctgctaaaggtgaagccgtaaagcttgccggaggagctggagcgatcctcgtcagcgcaaaggcgttcggcgagcagcccatcaccaccccacacatccacccagcgacggccgtgacgttcgccgttgccgagaagatcaagaggtacatcagaaccagcgcgtcccccgttgcgaccatcgtgtttctcggcaccgtcgtcggcgggacgccgtcttccccgagaatggcatccttttccagccgcggcccaaacctcctcgcaccggagatcctgaagccggacgtgaccgcccccggggtggacatcctggccgcgtggaccggcgagaactcgccctcggagctcgacagcgacacgaggcgagtgaagttcaacatcatatccggcacgtccatgtcgtgccctcacgtgagcggcatcgccgcgatgctccggcaggcgcgcccgggctggagccccgccgcgatcaagtccgcgctgatgaccaccgcgttcaacgtcgacagcgccggggacgtcatcagggacatgtccaccggcggggcgtccacgccgttcgtgcgcggggccggccacgtggaccccaaccgcgccctcaacccaggcctggtgtacgacgccggcactgacgactacgtctccttcctctgcgcgctcggctacacggccaggcagatcgccgtcctgacgcgtgacggctcggtgaccgactgttcgacgcgcccgggctctgtgggcgacctcaactacccggccttctcggtggtgttcggctccggcgacgacgaggtcacgcagcgccgcgtcgtacgaaacgtcgggagcaacgccagggccacgtacacggccagcgtcgccagcccggccggcgtgcgcgtcacggtggagcctccgacgctggagttcagcgcggcgcagcagacgcaggagtacgcggtcaccttcgcgccggagcagggaagcgtggccgagaagtacacgttcgggtccatcgtgtggagcgacggtgagcacaaggtcacgagccccattgccatcgcctggtcggcgagccaagcagcggcgatgtgatccgatccggtccacgtcgagctaccatgtgtgcgctctgtgtgcttcctgttgcagaataagttgcgttgtttcgacactgatccatcctaccaacaagttgtagcataatttactgtaaacaaaaactaccgtattttattacgtggactttcgtttctcaacggatttcgatcgtt

SEQ ID NO: 123902 - DNA, 1074 bp, Zea Mays
atggagagcgggcgcgggctgggcggcggcggccaccgcggccattggttcggcctcgtcgccgactgcggctgcgcggcctcgctggcggaatcgccctgccgcagcggctcgtctacggtggagcgggacagcgacatccccgcagaggcgacgcagcgggagtgggacggcgatgaggtcgagagcgacgacggcgaggtgcagagcccgtacaagggctcctccttcgacaccatggacgtgctccaggaggccctgcccttcagacctgatcatgggtcatccgatccgaccaacccaacccgtccgaaaaaccagaccaaatccgacccgatcaatacgacgggcgggtacgggccattttttgacccgcaacaatctatgggtcggatgaggagagaagtcgttgggaaacagctgaggcaaagggcctatgttctctggctgcctctccagctgctccctagggtgatttccagcaagtgtgatctggacaacatggattaccccaaggacaggatcaaacagacagcaccactaaaaatatgtagttacttgtctttgttttggagttggcaatttgtttgtttatccattgtgaagcagcctggggaatctcttaggaaaggggtacccaagttttacaatggggagtctggatctactgcaaagcttcaagaccttccggaaccagaaacaccatcccctaggaagcgcaaaggccttcttccattcagtttcaaatgggacaaagaggtataccccgatggtgacgcaatcaaaagccccacaaactgcaggaggatgactacatcgcctgctgccacaagcagctcaacaagcaacagtggcagcgatgatgaacataaccgctctcagaagctgtcttcccgtcgcccgctcagaatgcccatcaatgccctgggtgtttttgcttctccgcctggacctcgtccaccccagccgttctcagctcacatgagatctcaatcaatgcttgatgtgcaggatgtgacagagacagactcagccgccatggtcactcccagggacaagcgcatgaagaagtag

SEQ ID NO: 123903 - DNA, 1240 bp, Zea Mays
atggtgggaacatcccctgctggacagtcatactcggaagaaatccgtccaggttgtgcgtgtgttgctgtgccaagagtactcttgcgagaagatgtaacagaaccgaaaactggcatcaagttccccactctacttaaagacaattccaatctgactacagaggtccttgttggaatgggtttcagaagcatgcgaataatgagggttaaagatctgaatctttatgcctttggattatatatacaacctgattctgtttgcaaaaagctgggtccaaagtatgcttgtattccagatgctgagttgaaggatcacccagatttctatgaagatcttttgagggaaaatattgatatgactgttaggctagtagtaagctacaatggcctcagcattggcacagttcgagatgcatttgagaagtctcttgccttccggctgaaaaagatgaatcctaatactgattatgattgcttgaagacatttggttcttgttttaatgaatacattcgtatacctgctgtaagtttctatggtatgtctgtgctacgtaactctgcatttggtgtgagaagttaaaagttaatgcaaccgcagggtacaaagatagacttccggcaaacatccgatggtcagctaataactgaaattgatggcaaacaaattggcactgtccacagcaaatatctctgcagaaccttcttcgatatgtatattggtgacccccctgtttcagttgagaccaaacacggcattgcgcaaaatgtggctggactcatgagaagatgctaggaaaacagggaaaccaaaccgaagaactcggaactatttcctccatctatacaaggagagatgtacatagaaaggaagccaggagaggattgattgtatttttagtggtagacagcgactttgtatgctgtaattaacaggcagaaggtttcgacagacaggcctggcatccttagcaaatgcctcctatgcttctcatatggtatggcattttgccatttcctggttcgctgggggcactgtatcatgagcatatccaagagcttctcagaagtctcccctaaattatgttttttttttgaaaaatggcggttccttttaccaatcattctcactaattttttaaatgtcccttagaactgattttcaggagttattttgtacaacaggaggatgtttctctatcccaagtcaaaaaaatggcggggttcagctttgtccctac

SEQ ID NO: 123904 - DNA, 614 bp, Zea Mays
tttttaggaagttttttttttcgtttttgctttgttaacaactttttatccgtggacaagatctccgaagatgctggctgagtcaatggcactaagaaaagatggtgggaacatcccctgctggacagtcatactcggaagaaatccgtccaggttgtgcgtgtgttgctgtgccaagagtactcttgcgagaagatgtaacagaaccgaaaactggcatcaagttccccactctacttaaagacaattccaatctgactacagaggtccttgttggaatgggtttcagaagcatgcgaataatgagggttaaagatctgaatctttatgcctttggattatatatacaacctgattctgtttgcaaaaagctgggtccaaagtatgcttgtattccagatgctgagttgaaggatcacccagatttctatgaagatcttttgaggtgtgcaatgcctattgatcatttatgccttcacgaattctgttattaaagaccatcccaaatttggccattacctagtcagtcagccctttacacgtaaacgatcatgcaagcttaggcacacatttttaaaaagcgctatggaatgttggtatatttaaaaaagaaa

SEQ ID NO: 123905 - DNA, 1485 bp, Zea Mays
gttcgctttcctttcaggtcttcattgacatttacccatgtcccgcctccccctctcctccgccctcccagtccatctctccagtgatccagtcctaacactcccctccgcgccgacgcctctggtgtctggtcaggcggtcaccacttcaccaacaggcgccaccacaccaccgacccatttgccgcgttggtgttgccggatcttcaagcaggcagcacaccccacccggacccgagaacccgcgcgcgcgcgtattaataacggcaacctcgctcgcggctcgccgagggaatcgcacgcacccagcgatcagcgcagattccttccacgccccccctcctttccaggtcccctcgcccgcgctctcagatctcgcgcgcctcccacaagggaaaccttgagccatgggcacagttgtggatgccgctccagcagttgtggctgaggtcactgagaacatgttgggtggcaagaaagttacagttgtatttgtcctaggtggtcctggaagtggaaaaggcacacagtgtgccaacatcgtggagcactttggattcacccatcttagtgctggagatcttctgcgtgcagagattaaatctggctctgagaacggaaccatgattgagaacatgataaaggagggaaagattgttccatcggaggtgactataaagcttttgcaggaggcaatgataaaaagtgaaaatgacaaattcctgatcgatggatttccaaggaatgaggagaatcgtgcagcctttgagaatgttaccaaaatttctcctgcatttgtgctattctttgactgttctgaagaagatatggagaaacgactcctggggcgcaatcagggaagggttgatgataacattgaaactatcaaaaaaaggttcaaaacctttgttgactcaactctgcctgtcattgagcattacaactcaaaggacaaggttaaaaagattgatgctgcaaaaccaatccccgaggtgtttgaagacgtcaaagccatttttgccccatattctctaaaggctgaatagagcaatctaagggacatgataaaggtgatacatggtgtctaggcaccacataaacatatctgtgattatgatggaccctttaatatagaacaaaagttttggctcatttgagctaccagcgtaccagtaggcaattcgatttgttaccagcaacaagtgatctgattcccagtggtcctgctagagtaacattttttaccactgtctgttgtctatgtatcctttgatattgtgttgtaccaatgtgcaatttactctatggactgatggaacattgtgccatcccatccaccagatttattgtggcgttatggaaagcatagaaccgctgccatattctttaatttgtacgctgaaatatactcgttggcaccgaacttttggttgatgacttcgtgatataataaccctaccggcagtaaatatctacgctcaacaa

SEQ ID NO: 123906 - DNA, 1300 bp, Zea Mays
gttggttggttggttgatccctcgagtcttgtggggtgcgatccgcgatgctggcgcgggggcaaggggggtctcggtttgaattagttgatttcgcagttcagggtgcgcatctgaagggtgcgccaggtgctcttgctgtgtgatctttgtcgccttgtgacgctggggaccgggttattggcgggagtttgtcagaataatacataaagaactggtgccacgagatcgggggacttcagatcagggaaaccttgagccatgggcacagttgtggatgccgctccagcagttgtggctgaggtcactgagaacatgttgggtggcaagaaagttacagttgtatttgtcctaggtggtcctggaagtggaaaaggcacacagtgtgccaacatcgtggagcactttggattcacccatcttagtgctggagatcttctgcgtgcagagattaaatctggctctgagaacggaaccatgattgagaacatgataaaggagggaaagattgttccatcggaggtgactataaagcttttgcaggaggcaatgataaaaagtgaaaatgacaaattcctgatcgatggatttccaaggaatgaggagaatcgtgcagcctttgagaatgttaccaaaatttctcctgcatttgtgctattctttgactgttctgaagaagatatggagaaacgactcctggggcgcaatcagggaagggttgatgataacattgaaactatcaaaaaaaggttcaaaacctttgttgactcaactctgcctgtcattgagcattacaactcaaaggacaaggttaaaaagattgatgctgcaaaaccaatccccgaggtgtttgaagacgtcaaagccatttttgccccatattctctaaaggctgaatagagcaatctaagggacatgataaaggtgatacatggtgtctaggcaccacataaacatatctgtgattatgatggaccctttaatatagaacaaaagttttggctcatttgagctaccagcgtaccagtaggcaattcgatttgttaccagcaacaagtgatctgattcccagtggtcctgctagagtaacattttttaccactgtctgttgtctatgtatcctttgatattgtgttgtaccaatgtgcaatttactctatggactgatggaacattgtgccatcccatccaccagatttattgtggcgttatggaaagcatagaaccgctgccatattctttaatttgtacgctgaaatatactcgttggcaccgaacttttggttgatgacttcgtgat

SEQ ID NO: 123907 - DNA, 1297 bp, Zea Mays
gttggttggttggttgatccctcgagtcttgtggggtgcgatccgcgatgctggcgcgggggcaaggggggtctcggtttgaattagttgatttcgcagttcagggtgcgcatctgggtgcgccaggtgctcttgctgtgtgatctttgtcgccttgtgacgctggggaccgggttattggcgggagtttgtcagaataatacataaagaactggtgccacgagatcgggggacttcagatcagggaaaccttgagccatgggcacagttgtggatgccgctccagcagttgtggctgaggtcactgagaacatgttgggtggcaagaaagttacagttgtatttgtcctaggtggtcctggaagtggaaaaggcacacagtgtgccaacatcgtggagcactttggattcacccatcttagtgctggagatcttctgcgtgcagagattaaatctggctctgagaacggaaccatgattgagaacatgataaaggagggaaagattgttccatcggaggtgactataaagcttttgcaggaggcaatgataaaaagtgaaaatgacaaattcctgatcgatggatttccaaggaatgaggagaatcgtgcagcctttgagaatgttaccaaaatttctcctgcatttgtgctattctttgactgttctgaagaagatatggagaaacgactcctggggcgcaatcagggaagggttgatgataacattgaaactatcaaaaaaaggttcaaaacctttgttgactcaactctgcctgtcattgagcattacaactcaaaggacaaggttaaaaagattgatgctgcaaaaccaatccccgaggtgtttgaagacgtcaaagccatttttgccccatattctctaaaggctgaatagagcaatctaagggacatgataaaggtgatacatggtgtctaggcaccacataaacatatctgtgattatgatggaccctttaatatagaacaaaagttttggctcatttgagctaccagcgtaccagtaggcaattcgatttgttaccagcaacaagtgatctgattcccagtggtcctgctagagtaacattttttaccactgtctgttgtctatgtatcctttgatattgtgttgtaccaatgtgcaatttactctatggactgatggaacattgtgccatcccatccaccagatttattgtggcgttatggaaagcatagaaccgctgccatattctttaatttgtacgctgaaatatactcgttggcaccgaacttttggttgatgacttcgtgat

SEQ ID NO: 123908 - DNA, 5131 bp, Zea Mays
caaggcaaagcaaaaatttcgcgatgagtccaccacgactccaagcagctgcggccgcgccgctctaaccggagctccgttaagactccgccgccccaaatctcagcgcctgagtccgccgctctcctcccgtgctcgccgccactggtttccgcgccgggacttgggttcggtggggcgacgtggagcttagggtttcggcaggatgagctaccggaaggggttgaaggtttgggtggaggagaagggggaagggtgggtggaggcggaggtggtggaagcgaaggagcgcgccgtcgtcgtgttctcgagccagcggaaaaagattacagtttcaccagaaaaattgttgcccagggatacagatgaagatctgggtgggggtcatgtggatgacatgaccaaattgacatatctaaatgaaccaggtgttctttacaatctgaagaaaagatatgcattgaatgagatatatacgtacaccggaagcatcttgattgccgttaatccttttacaaggctgcctcacctgtacaatgaatacatgatggaacaatacaagggcatccgattaggggagctgagtccgcatgtttttgcggtggcggatgcatcatacagtagggctatggtgaatgattctcgaagccaatccatcctggttagtggtgaaagtggtgctggcaaaaccgaaacaacgaagcttattatgcagtatctcacctttgttggcggtagagccgctcttgatgaccggacggttgaacaacaggttctagaatctaaccctcttttggaggcatttggcaatgcaaaaacagtacgcaatgacaattcaagtcgatttggaaaattcgtagagatacagtttgattcaagtggtagaatatctggagctgctattaggacctatcttttggaaaggtcccgtgttgtgcaaattactgatcctgaaaggaattttcattgcttctaccaattgtgtgcctctggaaaggacgcagagctgtacaaacttgggcatataagcagttttcattacttgaatcaaagcaatacacatgatttggaagggacaaacaatgaagatgagtactggaagacaaaaagggcaatggatattgttgggattagcagagaagatcaggacgctatatttcggacattggcagccattcttcatcttggcaatattgagtttgtcccaggaaaagatgctgattcttcaaaaattaaggattcaacctcaaattttcatctccaaacagcagctaaattatttatgtgtgattcagatctattggtctcaacgctatgtagccgatctatacatactcgtgaaggaataattgttaaagcattggattgtgctgctgccgcagctaatcgtgatgctttagcgaagactgtatatgcaagattatttgactggcttgttgagaatattaataagtctattggtcaagatgtggattccaagctacaaattggtgtgctggatatctacggctttgaaagcttcaaaaacaacagctttgagcagttctgcattaactttgcaaatgaaaaacttcagcaacactttaatgagcatgtattcaagatggaacaggaggagtacaaaagtgaggaaattaattggagctacattgagttcattgacaatcaggatgtgctggatttgattgaaaagaaaccaattggaattattgcactgctggatgaagcctgtatgtttcccaaatctacgcatgagacctttgcgacaaagatgttcagaaacttctcttcccatcttaggctcgagaggacaaaattctcagaaacagattttaccatctcacactatgctgggaaggtcacgtatcaaacagattcttttctggaaaagaatcgagattatattgttgcagaacactgcaatcttctatcatcttcaaggtgcccatttgtttctggacttttcacttcattgcctgaagaatctataagatcttcatacaagttctcatcagttgcttccagattcaagctacaattgcaagccctgatggaaaccctaaactcgactgaacctcactatgtacgctgtgtgaagcccaactctgctaatcgacctcagctttttgaaaatcaaagtgtattgcatcaacttcgttgtgggggtgtcttagaggctgtccgtattagtcttgctggctatcctaccagaaggacttatgctgaatttgttgaccggtttgctgttcttgtgccagaattgatgattggaagttacgatgaaaaaatgatgacaaagggtattctcgaaaagatgaagcttgaaaattttcaacttggtaaaacaaaggtgttccttagggctggtcaaattgcgattttagatatgcgccgtgctgagattttggacaacgctgcacggcacattcaaggccgtttcagaacatttatcacacgcaaagaatttgtgaaaacaagggaggcttcaatttctatacaagcatactgcagaggctgtttggcaaggaagatgttcgcaaacagacgagaaacagcagcagctgtaattgttcagaagtatgtccgaagatggctgctacgtagagctcacctgcaagcatgtttggcagctctccttattcagtcttacattcgagggttcatcgctcgccgctatttctctgtcattagggaacataaagctgctacagtgatacagtccacatggagaagacggaagtttgtcatacttttccagaattaccggcaagccactgtggcaattcagtgttcttggagacagaagcttgcaagaaaggagctaaggaaactcaaaatggctgcaaatgaagctggtgcactgcgtgaggcaaagaataagcttgagaaaaagatggatgatcttgctttaagacttacccttgaaaggagactgcgggcttccagtgaagagtcaaaatcagtagaaatattgaagcgtgacaaaataattgaatcattaagtgcagaatgtgctgccgctaagtcagctgctcaaaatgaacatgccaaaaaattgctgctccaaaagcagttggatgattctttgagagagattactatgttgcagagtaaaaagattatgtcagcagaagcagcagaagaaaactccaacctaaagaacttagttgaatcattatctacgaagaactcaatactggagaatgaacttattgtgactcgcaaaagtagtgatgatacaatggaaaaattgaaggaagtcgaggggaaatgcaaccatctacagcaaaacttggacaaattgcaggagaaacttacaaacttggaaaatgaaaatcatgtcttaagacagaaggcatttaatatgccgacaatgaacaatctgtctgtagctccaaagacattatctgagaaattttctgcatcaattgggcttcccaacagtgagccaaagcatatatatgaaagcccaacacctacaaaatatctggcttctcttccacagactttgagtacatcaaggagatcgaggttgcctgttgaaaggcatgagcaaaatcatgaaattttattgagatgcatcaaagaaaatttaggatataaggatggcaaaccagttgcagcatgtatcatttacaaatgtcttttgcactggcgtgcttttgaatcagagcgaactgctatttttgatcacgtgattgaggccataaatgatgtcctaaaggggaacgaagctgatggtagattaccttattggttgtccaatacctctgcattgctatgccttctccaaagaaatctgcggtcaaatggattattcactaccccgtctcgtcgttctggtggagctctagggaagatagcacaaacattgaggtctccttcaaagtttataggccgcagtgatactctaccacatgttgatgcacggtatccagccatactattcaaacagcagcttactgcatgtgtcgaaaagatatttgggcagctcagagataatctaaaaaaggaaatatcacctcttcttaatgtttgcattcaggctccaaagtcaacacgtgggcaatctggaaaagcatccaagtcatctggagttggtgcccacccagcatcgaactccaactgggacaatatcgtcaatttccttgacttacttatggatacattgcgcgaaaattatgtgccatccttctttatacgtaaacttatcacacaattattctccttcatcaatatacagttgtttaacagtcttcttctccgacgtgaatgttgtacattctccaatggggaatacgtgaaagctgggctatcgttgttggagaaatggattactgatgtcacagatgagtttgcgggtacatcttggcacgagctcaattatatcagacaagctgttggatttttggttatacaccaaaaaagaaaaaagacgcttgaggagatcaagcaagatctttgcccgtccttgagtgttcgccaaatctatagaatatgctcgatgtattgggatgacaaatacggtacccaaggcatttcaaccgaggtggttgctgcaatgcgggagatggtcaacaaagatacccagaatcttgtgtcaaattccttcttgttggatgatgacttaagtataccattctctaccgaggatctatcaatggcaatcccgtcaatagattatgctgacgtcgatcttccagaatctcttcagcactatacatcagtacagtttctactaaggcagcaggatccacagcctgcccaatagaatgaatgtggtcagcctgccctgaagatctgtctgtcccctggttgtttctaccaaggcagcaggatccacagcctgcggcctgcccaatagaatggatgtggtcagcctgccctgaagatctgtctgtcccctggttttattggggtaacatccatctgcgatgttgtattgatgtttagagagtacctagtttggtggagtggacacaatttaaaagcaaccattgttgctagatgccaattcattggtgttcactccccaagtatttttcattgtacaggaaatgttgtaagtctgttgactagcgcaaaattagttatatcagtggtaaattgggcaatgcgcatcagtgcatca

SEQ ID NO: 123909 - DNA, 5010 bp, Zea Mays
caaggcaaagcaaaaatttcgcgatgagtccaccacgactccaagcagctgcggccgcgccgctctaaccggagctccgttaagactccgccgccccaaatctcagcgcctgagtccgccgctctcctcccgtgctcgccgccactggtttccgcgccgggacttgggttcggtggggcgacgtggagcttagggtttcggcaggatgagctaccggaaggggttgaaggtttgggtggaggagaagggggaagggtgggtggaggcggaggtggtggaagcgaaggagcgcgccgtcgtcgtgttctcgagccagcggaaaaagattacagtttcaccagaaaaattgttgcccagggatacagatgaagatctgggtgggggtcatgtggatgacatgaccaaattgacatatctaaatgaaccaggtgttctttacaatctgaagaaaagatatgcattgaatgagatatatacgtacaccggaagcatcttgattgccgttaatccttttacaaggctgcctcacctgtacaatgaatacatgatggaacaatacaagggcatccgattaggggagctgagtccgcatgtttttgcggtggcggatgcatcatacagtagggctatggtgaatgattctcgaagccaatccatcctggttagtggtgaaagtggtgctggcaaaaccgaaacaacgaagcttattatgcagtatctcacctttgttggcggtagagccgctcttgatgaccggacggttgaacaacaggttctagaatctaaccctcttttggaggcatttggcaatgcaaaaacagtacgcaatgacaattcaagtcgatttggaaaattcgtagagatacagtttgattcaagtggtagaatatctggagctgctattaggacctatcttttggaaaggtcccgtgttgtgcaaattactgatcctgaaaggaattttcattgcttctaccaattgtgtgcctctggaaaggacgcagagctgtacaaacttgggcatataagcagttttcattacttgaatcaaagcaatacacatgatttggaagggacaaacaatgaagatgagtactggaagacaaaaagggcaatggatattgttgggattagcagagaagatcaggacgctatatttcggacattggcagccattcttcatcttggcaatattgagtttgtcccaggaaaagatgctgattcttcaaaaattaaggattcaacctcaaattttcatctccaaacagcagctaaattatttatgtgtgattcagatctattggtctcaacgctatgtagccgatctatacatactcgtgaaggaataattgttaaagcattggattgtgctgctgccgcagctaatcgtgatgctttagcgaagactgtatatgcaagattatttgactggcttgttgagaatattaataagtctattggtcaagatgtggattccaagctacaaattggtgtgctggatatctacggctttgaaagcttcaaaaacaacagctttgagcagttctgcattaactttgcaaatgaaaaacttcagcaacactttaatgagcatgtattcaagatggaacaggaggagtacaaaagtgaggaaattaattggagctacattgagttcattgacaatcaggatgtgctggatttgattgaaaagaaaccaattggaattattgcactgctggatgaagcctgtatgtttcccaaatctacgcatgagacctttgcgacaaagatgttcagaaacttctcttcccatcttaggctcgagaggacaaaattctcagaaacagattttaccatctcacactatgctgggaaggtcacgtatcaaacagattcttttctggaaaagaatcgagattatattgttgcagaacactgcaatcttctatcatcttcaaggtgcccatttgtttctggacttttcacttcattgcctgaagaatctataagatcttcatacaagttctcatcagttgcttccagattcaagctacaattgcaagccctgatggaaaccctaaactcgactgaacctcactatgtacgctgtgtgaagcccaactctgctaatcgacctcagctttttgaaaatcaaagtgtattgcatcaacttcgttgtgggggtgtcttagaggctgtccgtattagtcttgctggctatcctaccagaaggacttatgctgaatttgttgaccggtttgctgttcttgtgccagaattgatgattggaagttacgatgaaaaaatgatgacaaagggtattctcgaaaagatgaagcttgaaaattttcaacttggtaaaacaaaggtgttccttagggctggtcaaattgcgattttagatatgcgccgtgctgagattttggacaacgctgcacggcacattcaaggccgtttcagaacatttatcacacgcaaagaatttgtgaaaacaagggaggcttcaatttctatacaagcatactgcagaggctgtttggcaaggaagatgttcgcaaacagacgagaaacagcagcagctgtaattgttcagaagtatgtccgaagatggctgctacgtagagctcacctgcaagcatgtttggcagctctccttattcagtcttacattcgagggttcatcgctcgccgctatttctctgtcattagggaacataaagctgctacagtgatacagtccacatggagaagacggaagtttgtcatacttttccagaattaccggcaagccactgtggcaattcagtgttcttggagacagaagcttgcaagaaaggagctaaggaaactcaaaatggctgcaaatgaagctggtgcactgcgtgaggcaaagaataagcttgagaaaaagatggatgatcttgctttaagacttacccttgaaaggagactgcgggcttccagtgaagagtcaaaatcagtagaaatattgaagcgtgacaaaataattgaatcattaagtgcagaatgtgctgccgctaagtcagctgctcaaaatgaacatgccaaaaaattgctgctccaaaagcagttggatgattctttgagagagattactatgttgcagagtaaaaagattatgtcagcagaagcagcagaagaaaactccaacctaaagaacttagttgaatcattatctacgaagaactcaatactggagaatgaacttattgtgactcgcaaaagtagtgatgatacaatggaaaaattgaaggaagtcgaggggaaatgcaaccatctacagcaaaacttggacaaattgcaggagaaacttacaaacttggaaaatgaaaatcatgtcttaagacagaaggcatttaatatgccgacaatgaacaatctgtctgtagctccaaagacattatctgagaaattttctgcatcaattgggcttcccaacagtgagccaaagcatatatatgaaagcccaacacctacaaaatatctggcttctcttccacagactttgagtacatcaaggagatcgaggttgcctgttgaaaggcatgagcaaaatcatgaaattttattgagatgcatcaaagaaaatttaggatataaggatggcaaaccagttgcagcatgtatcatttacaaatgtcttttgcactggcgtgcttttgaatcagagcgaactgctatttttgatcacgtgattgaggccataaatgatgtcctaaaggggaacgaagctgatggtagattaccttattggttgtccaatacctctgcattgctatgccttctccaaagaaatctgcggtcaaatggattattcactaccccgtctcgtcgttctggtggagctctagggaagatagcacaaacattgaggtctccttcaaagtttataggccgcagtgatactctaccacatgttgatgcacggtatccagccatactattcaaacagcagcttactgcatgtgtcgaaaagatatttgggcagctcagagataatctaaaaaaggaaatatcacctcttcttaatgtttgcattcaggctccaaagtcaacacgtgggcaatctggaaaagcatccaagtcatctggagttggtgcccacccagcatcgaactccaactgggacaatatcgtcaatttccttgacttacttatggatacattgcgcgaaaattatgtgccatccttctttatacgtaaacttatcacacaattattctccttcatcaatatacagttgtttaacagtcttcttctccgacgtgaatgttgtacattctccaatggggaatacgtgaaagctgggctatcgttgttggagaaatggattactgatgtcacagatgagtttgcgggtacatcttggcacgagctcaattatatcagacaagctgttggatttttggttatacaccaaaaaagaaaaaagacgcttgaggagatcaagcaagatctttgcccgtccttgagtgttcgccaaatctatagaatatgctcgatgtattgggatgacaaatacggtacccaaggcatttcaaccgaggtggttgctgcaatgcgggagatggtcaacaaagatacccagaatcttgtgtcaaattccttcttgttggatgatgacttaagtataccattctctaccgaggatctatcaatggcaatcccgtcaatagattatgctgacgtcgatcttccagaatctcttcagcactatacatcagtacagtttctactaaggcagcaggatccacagcctgcccaatagaatgaatgtggtcagcctgccctgaagatctgtctgtcccctggttttattggggtaacatccatctgcgatgttgtattgatgtttagagagtacctagtttggtggagtggacacaatttaaaagcaaccattgttgctagatgccaattcattggtgttcactccccaagtatttttcattgtacaggaaatgttgtaagtctgttgactagcgcaaaattagttatatcagtggt

SEQ ID NO: 123910 - DNA, 4768 bp, Zea Mays
caaggcaaagcaaaaatttcgcgatgagtccaccacgactccaagcagctgcggccgcgccgctctaaccggagctccgttaagactccgccgccccaaatctcagcgcctgagtccgccgctctcctcccgtgctcgccgccactggtttccgcgccgggacttgggttcggtggggcgacgtggagcttagggtttcggcaggatgagctaccggaaggggttgaaggtttgggtggaggagaagggggaagggtgggtggaggcggaggtggtggaagcgaaggagcgcgccgtcgtcgtgttctcgagccagcggaaaaagattacagtttcaccagaaaaattgttgcccagggatacagatgaagatctgggtgggggtcatgtggatgacatgaccaaattgacatatctaaatgaaccaggtgttctttacaatctgaagaaaagatatgcattgaatgagatatatacgtacaccggaagcatcttgattgccgttaatccttttacaaggctgcctcacctgtacaatgaatacatgatggaacaatacaagggcatccgattaggggagctgagtccgcatgtttttgcggtggcggatgcatcatacagggctatggtgaatgattctcgaagccaatccatcctggttagtggtgaaagtggtgctggcaaaaccgaaacaacgaagcttattatgcagtatctcacctttgttggcggtagagccgctcttgatgaccggacggttgaacaacaggttctagaatctaaccctcttttggaggcatttggcaatgcaaaaacagtacgcaatgacaattcaagtcgatttggaaaattcgtagagatacagtttgattcaagtggtagaatatctggagctgctattaggacctatcttttggaaaggtcccgtgttgtgcaaattactgatcctgaaaggaattttcattgcttctaccaattgtgtgcctctggaaaggacgcagagctgtacaaacttgggcatataagcagttttcattacttgaatcaaagcaatacacatgatttggaagggacaaacaatgaagatgagtactggaagacaaaaagggcaatggatattgttgggattagcagagaagatcaggacgctatatttcggacattggcagccattcttcatcttggcaatattgagtttgtcccaggaaaagatgctgattcttcaaaaattaaggattcaacctcaaattttcatctccaaacagcagctaaattatttatgtgtgattcagatctattggtctcaacgctatgtagccgatctatacatactcgtgaaggaataattgttaaagcattggattgtgctgctgccgcagctaatcgtgatgctttagcgaagactgtatatgcaagattatttgactggcttgttgagaatattaataagtctattggtcaagatgtggattccaagctacaaattggtgtgctggatatctacggctttgaaagcttcaaaaacaacagctttgagcagttctgcattaactttgcaaatgaaaaacttcagcaacactttaatgagcatgtattcaagatggaacaggaggagtacaaaagtgaggaaattaattggagctacattgagttcattgacaatcaggatgtgctggatttgattgaaaagaaaccaattggaattattgcactgctggatgaagcctgtatgtttcccaaatctacgcatgagacctttgcgacaaagatgttcagaaacttctcttcccatcttaggctcgagaggacaaaattctcagaaacagattttaccatctcacactatgctgggaaggtcacgtatcaaacagattcttttctggaaaagaatcgagattatattgttgcagaacactgcaatcttctatcatcttcaaggtgcccatttgtttctggacttttcacttcattgcctgaagaatctataagatcttcatacaagttctcatcagttgcttccagattcaagctacaattgcaagccctgatggaaaccctaaactcgactgaacctcactatgtacgctgtgtgaagcccaactctgctaatcgacctcagctttttgaaaatcaaagtgtattgcatcaacttcgttgtgggggtgtcttagaggctgtccgtattagtcttgctggctatcctaccagaaggacttatgctgaatttgttgaccggtttgctgttcttgtgccagaattgatgattggaagttacgatgaaaaaatgatgacaaagggtattctcgaaaagatgaagcttgaaaattttcaacttggtaaaacaaaggtgttccttagggctggtcaaattgcgattttagatatgcgccgtgctgagattttggacaacgctgcacggcacattcaaggccgtttcagaacatttatcacacgcaaagaatttgtgaaaacaagggaggcttcaatttctatacaagcatactgcagaggctgtttggcaaggaagatgttcgcaaacagacgagaaacagcagcagctgtaattgttcagaagtatgtccgaagatggctgctacgtagagctcacctgcaagcatgtttggcagctctccttattcagtcttacattcgagggttcatcgctcgccgctatttctctgtcattagggaacataaagctgctacagtgatacagtccacatggagaagacggaagtttgtcatacttttccagaattaccggcaagccactgtggcaattcagtgttcttggagacagaagcttgcaagaaaggagctaaggaaactcaaaatggctgcaaatgaagctggtgcactgcgtgaggcaaagaataagcttgagaaaaagatggatgatcttgctttaagacttacccttgaaaggagactgcgggcttccagtgaagagtcaaaatcagtagaaatattgaagcgtgacaaaataattgaatcattaagtgcagaatgtgctgccgctaagtcagctgctcaaaatgaacatgccaaaaaattgctgctccaaaagcagttggatgattctttgagagagattactatgttgcagagtaaaaagattatgtcagcagaagcagcagaagaaaactccaacctaaagaacttagttgaatcattatctacgaagaactcaatactggagaatgaacttattgtgactcgcaaaagtagtgatgatacaatggaaaaattgaaggaagtcgaggggaaatgcaaccatctacagcaaaacttggacaaattgcaggagaaacttacaaacttggaaaatgaaaatcatgtcttaagacagaaggcatttaatatgccgacaatgaacaatctgtctgtagctccaaagacattatctgagaaattttctgcatcaattgggcttcccaacagtgagccaaagcatatatatgaaagcccaacacctacaaaatatctggcttctcttccacagactttgagtacatcaaggagatcgaggttgcctgttgaaaggcatgagcaaaatcatgaaattttattgagatgcatcaaagaaaatttaggatataaggatggcaaaccagttgcagcatgtatcatttacaaatgtcttttgcactggcgtgcttttgaatcagagcgaactgctatttttgatcacgtgattgaggccataaatgatgtcctaaaggggaacgaagctgatggtagattaccttattggttgtccaatacctctgcattgctatgccttctccaaagaaatctgcggtcaaatggattattcactaccccgtctcgtcgttctggtggagctctagggaagatagcacaaacattgaggtctccttcaaagtttataggccgcagtgatactctaccacatgttgatgcacggtatccagccatactattcaaacagcagcttactgcatgtgtcgaaaagatatttgggcagctcagagataatctaaaaaaggaaatatcacctcttcttaatgtttgcattcaggctccaaagtcaacacgtgggcaatctggaaaagcatccaagtcatctggagttggtgcccacccagcatcgaactccaactgggacaatatcgtcaatttccttgacttacttatggatacattgcgcgaaaattatgtgccatccttctttatacgtaaacttatcacacaattattctccttcatcaatatacagttgtttaacagtcttcttctccgacgtgaatgttgtacattctccaatggggaatacgtgaaagctgggctatcgttgttggagaaatggattactgatgtcacagatgagtttgcgggtacatcttggcacgagctcaattatatcagacaagctgttggatttttggttatacaccaaaaaagaaaaaagacgcttgaggagatcaagcaagatctttgcccgtccttgagtgttcgccaaatctatagaatatgctcgatgtattgggatgacaaatacggtacccaaggcatttcaaccgaggtggttgctgcaatgcgggagatggtcaacaaagatacccagaatcttgtgtcaaattccttcttgttggatgatgacttaagtataccattctctaccgaggatctatcaatggcaatcccgtcaatagattatgctgacgtcgatcttccagaatctcttcagcactatacatcagtacagtttctactaaggcagcaggatccacagcctgcccaatag

SEQ ID NO: 123911 - DNA, 652 bp, Zea Mays
tctggatgtttgcatctgtaacttgctgggctaatcaaagccgctgtcctcgattgcaatctgctgcctccagatcatgtccaaagccgcagagaacacggtccaccaagacatcaccgacacatgcaaggaccctggcgaggtcaagaaggtgttccagttggcactcctttgcagcaacaagaggcagccgtcggatcgaccaaccatgcatgaggtagctgtctgcccagcaggcccgccccgtagcaggcacatcctatccacaggcgttggagaagtcatccacggctccgagctacatcagtgacagtgatcaaccatgcgaggcctacgactacgaggcggctgcgcgctctcctgcgccaactcgtccagtgcgtccgacgccgagctcttcacgaagtttggcgaggtgagatcgcggaacacggagtagatgtagattgatcgtctgtctgatggtctcagagagttattaggcctgcagtttggttccaagcttataagatgtgtgtattccggcgccgtgagagtctctgtaaatatgatgccttctcctccatgggacagactccgctagcagttttaatttctccatgcggtttgggaccgcgcaaagtgtggtatagagtcttgttgggaaaatcca

SEQ ID NO: 123912 - DNA, 372 bp, Zea Mays
atgtcacacaaatctgaacgtcatctcggcgtcccgctgccctgtatggcagtttcactgggccgccggtggcggcgacagcagcgatggcttgcatgtgtaggagcaccagcacgcgtcgcgaaggcacacgccattgcccttgagcttgatgaagcagttgtcgtggcacgccttgtggttgcggacgcagccgctgtcggcgaggatcttcacacacgtgttctctgtcgtcgtcgggaactcctccaagctcggcgccggcgccggcaccgtgcagatccctgcagacagcaccgccatcaccatggcaaggacgaggagcactgctttgttgtaggttctcatggtcatgacagaccggtgtggtga

SEQ ID NO: 123913 - DNA, 1665 bp, Zea Mays
ccatcttggacttttaagacagcgctgcggctgcgctcgatcgaaccaaaaaaaaaaagaaaggaaaatccacatgcaatgcaaaagatctcgacatatatcttacgatccgatgggcctacacgctgacacgccgacgcttttgggtcttgagtcttgaccccatgggccccgcccgcccgcccgccaagtgcgcgtctgcttcggatcttcgtcaccggataagccacctgcttccgatcgcacagccctatcaactctcctcgcctgccgtcgccgcctcgcgctctccgatcccgcgcatattctccaccagtagtcctctgctccgccacacccaccactgctagggcgccgcgccgcaggcccgcagccccctaatctccgagtgctgatcacgcggaaaccgatggcgctcctcgcgccgagcccgcgcgcgctccgcgtgcgggagaccgcggcggcggcgctcccgcactcatcggcgaccgctgcatgctcgaccgtcggcggcggggcggccaggcgggcgctgtggctgtgggacaacggcggcgggaccgggacggggaggaggaaggagcaccgggagagagtccggccggaggcgtactgctgggacgtgtccaggccggtggagatggaggagatcgacagcatcgagaagctcgatgatgcgctcaggtggtccgtcgagaacaaccagcccgtcgtcatcgactggtacgagagtgctagcttgttggttgttgcacatgttgccagacctgcaatgatctcactctactccattgacctgtctggttttcggatgttgattgtcattagagtagaatcgagatgatttttcgcctttattttatccgcatgcttaaatctaatatcatatctcatcggaagttgaggcgctgtctattgcttccaggatggcaggttggtgtcggaaatgcatctacctgatgcccagaatggagaagatggcaggagaatatcctgagttagtgtgacttcacctcagcagaatgtttttttcggcacagtttagagttctgtcctattgataccttagcaagtaaactgaacccgagttctaaatacatacacatctgagattatgaaatgtgttgatctgtttaaatcacgtttctgttgcagagtgaggttttacttcatcgatgtcaataaagttccacagggggtggtgaaaagaggaaatgtaactgtaagtcggcaaattcagagattgttgacaagatagtagttcattcaaaaggactaaaataatctgactgccttgcctttctgtgtgcaatactgcaaatctaccttcagagaatgcccactattcaggtgccactgcattttcttctgccaattcattcctttcttccaagaaaccgtgaatgccttgtaacttgaaaaacattgatcctaaaccgtgcattcatgttcagctatggaaggatggagagtggaaagcggaagtaataggaggccacaaagcttgtcttgtgatggatgaggttagagaaatgatcgagaataacaagtgactaaacacccaagttatgcaatagatgttgtactgtgtttgatgtaagtatagacatcagacgatctcttcatatactaagctgaaatcaaatcacgttttagttttgtact

SEQ ID NO: 123914 - DNA, 570 bp, Zea Mays
atggcgctcctcgcgccgagcccgcgcgcgctccgcgtgcgggagaccgcggcggcggcgctcccgcactcatcggcgaccgctgcatgctcgaccgtcggcggcggggcggccaggcgggcgctgtggctgtgggacaacggcggcgggaccgggacggggaggaggaaggagcaccgggagagagtccggccggaggcgtactgctgggacgtgtccaggccggtggagatggaggagatcgacagcatcgagaagctcgatgatgcgctcaggtggtccgtcgagaacaaccagcccgtcgtcatcgactggatggcaggttggtgtcggaaatgcatctacctgatgcccagaatggagaagatggcaggagaatatcctgaagtgaggttttacttcatcgatgtcaataaagttccacagggggtggtgaaaagaggaaatgtaactagaatgcccactattcagctatggaaggatggagagtggaaagcggaagtaataggaggccacaaagcttgtcttgtgatggatgaggttagagaaatgatcgagaataacaagtga

SEQ ID NO: 123915 - DNA, 1251 bp, Zea Mays
ccagcggccagcagcagcacgcaccgcgccatcaatccatcgacaagccatctcagctgcccacggctgcactgccactgccacgccatggccctggacgacgcctgcgcctacgactgttgcgcgttacctccaccgctccattgcttggactgggactgggactcggagctgcttcacactcatcgtcacactaccagtgccggaggtgccgccgtccaagcagagccgcccaccttcttcgtcccggcgacgccaggtgtgcagccgtcggcggcgtccagtggcggctacctgcacgacgccatcactcactggagcgacgaccgtcgcagcaagcggcagcggatggcggcggcggtggcaacgacgacgacgcctcccgctcggcgtccggcgaccaccgtcagcgaggaccttcagtgccttcttgcgggcttctgggattcaacaagcgaggccgagggaggagcagacttccgccatgatctgaacaccacgaccccggagccggagccggagacgacgacggagatacgctgcagttttgcctcaggcgaggacgaggcagttgcgtcgggcagggaggaccagcagaggggggccagcgcgcaggtgctgctgccagcgccagcggcagtggcgcagcgcggagaggaggaggaggaggaggcaaaggcgaccgcggtagtcccccctcctcggttccccgccaccgcgccagccgctgctcccgtgcagcggcagctgcagctgcaaaaggcggccgagggtgcagccgccacgacgacggcgcccgcctctgcctgctcctctttgctgtcactgtcaggggaggacagggagaagagaggcgtcggggtgctgtaccccttcgcggtggtcaagccgctggggctagacgacggccgcatgacgacgctcagcgacgtgaaccacagaatcctcaagagaccggcaaggccggtccggcaccccgtcggcccgttcgcgtgcggccccgccgtgtcggcccacggcctcggcctgtccgggaaggtggtcgtcagcctcaccaagatcaggacgggagggaacggcaccataaccatcatcagaacaagaggctgatggatcatggatgtcatcaaccgtttccgatcccgcttcttttttttttgttcttgtttttaggtcgccatgcctgttgtccagggtaatcatggtacattggctgctacggttgtaaatacaccctccgggttggttttc

SEQ ID NO: 123916 - DNA, 1441 bp, Zea Mays
agcaggcatggatgcaatgcaaagcactaatgcctcccgacagaaacaaaagtgcaatgtgcaagtgaactggactgtttcatgcatgatgcggcgcgcacacaaccgcacatggaccatgtttcccaaagcagatcgagttgcactcttgcacccatacattgcacttgcactcatacagatcgaaacaccgagttgcacacccatacagatcgaaagaacgtggacgacgccgacgccgacgcggcgatgcgatcaagcaagcaaggtcctgatcgaagtggcgaatggaagaggtcgcactggatagatagatgtcgtcgcatgcatgcacatgagggtggcagtggccggccggctccacagtccacacagcctacatgggtgcatgagggctttgtctggcaatggcaacattggcaagcaagcgagggcattaatcgattggactgatgtgtcaagctggcattgcccactatagtagtgtgtgaaacagtgaacccaagccctgggcgctgggcgctggccctgcagataataaaaataagtgggggccttggatcatttccttcctttttttttctgtgtgtttttttctattcgtaattcccacggccgccatcgcaggcccacccgtaccattaaccatactcccacgaaacggatggcacgcagcacgcacaggcagcagcacttgctgtcacggtttgcagttggttctgctcatcacatacctgctgcggccatctgaaggcccctgtcgttgccgttgttgcgcacctaggccgccgcagcggctgcgctgctccaccgcgtcgtcctgctcctgcaactgcaaagcagtaatccaggaacatgcggccggttagctagatctgccgtccagcccacacggcccgtgggtgcaatgcaacggaagggagcttttatttcccaggtacgagacgggacgggacggggcgacggacgagggacgaccatgtccttaacgaatcccctctcgcgtctgggaatgcgtacatacgcggatcggaatcacaatgaggagatggagatggagcgcgcgtacctgcggcagcaatgctgggcgccggagcgcggaggagcggctgcggccgtcctcgagatccgcgggtgcgggggaatcatttgttgccgggtgcaagtgcaactccccctccccttgcttgccccccgggggcggaggaggacgctcctgacgatctatcgacgacgcacgcggcggcgactgcggcgcggcggatggatctgagggcagcaggtaggcgagaggctggcccggaggccgcctcctgatcctcatgggcgggtctagcggagcggagagagggcggagtgaggagagatttggggagcgagggtgcaaatcgaaggagggggtggtggtggggtggggtggggtggcttgtgttgtgttgtg

SEQ ID NO: 123917 - DNA, 771 bp, Zea Mays
ataaatctagtttttccattaactcactctgcttcctctgatgaatacatgctccaggtgcgaaatgtccccatcttgcagattaatcaacaaaaatgaagaaaaatactcaggggaacagaacccgtggggttctatctcggatccgaaggtagcgcaggcagagagagtataccttagcggtgaaggtaatgttcttgagctggcaattctagttatcctcgcacttgagtggaccgtcggtacacctcgccggtcttcaactccaccgtcaccacgtgacccgctgtctcacggaggaacttcaccaggatcctcaggctcctgactcatcttcctctttccgtctctctctctctcgctggttctcttcccctctgtgcgccgctaaaacccagctcgtagaaacagccaaacatgaggcggcacaagacaaagcgagggaccaatggcaaagggagatggaaagggaaaacccgcccaacaatggcgccaaattgcggggtcgagatccatctctcacctccccatggccatctcgagctgctccagcttttgagcgacgtccgccatatccgacgaacgcaccttgtacccgagcgcggccagcagctcgtccacctcctcctgttcccctgtccccgccgccgcctccatcagtcttgtccttggaggagcccatgtagccgtcgctcccaccggcgtcttggtactcacgcagtcgcgcttcagcttgggatttggatacagggttgagaattgggagttggg

SEQ ID NO: 123918 - DNA, 3136 bp, Zea Mays
tcctgagctgtagcgtgctgctccgtcaggaccagcgagattactgccgcgtacctcccgctaccaccaccaccactgctctgtttgctgcgtagcagcggccggggctatatagcgcctcggaggaggagctaggtatagacctcgtggcactagcacagccgcccgctatataccgctagtgcactactagctgcttgccaggtcccagccagccagccagccctctcgtcccggattgcgctcgaagcaagcggccgcccgaggcgaggcgaggcgtgcgcgcgccgcgagacgatggacttcggcgacgacgtcatggacggcggctccgacgcccagcgccgcaagaagagataccaccgccacacaccgcgccagattcagcagctcgaggcgatgttcaaggagtgcccgcacccggacgagaaccagcggatgcagctgagcagggagctggggctggagccccggcagatcaagttctggttccagaaccgccggacgcagatgaaggcgcagcacgagcgccaggacaactgcttcctgcgcgcggagaacgacaagatccggtgcgagaacatcgccatgcgggaggcgctccggagcgtcatctgccccacctgcggcggcccgcccgtcgccgacgactacttcgacgagcagaagctgcgcatggagaacgcgcgactcaaagaagagcttgaccgggtgtccagcctgacgtccaagtacctggggcggcccatcacgcagctgccgccggcgcaggcggcgctgtccatgtcgtcgctggacctgtccgtcggcgggctcggcagcccgtcgctggacctcgacctcctcagcggcggctcctcggggtatcccccgttccacctcccgatgccggtgtcggagatggagcggcccatgatggccgagatggcgacgcgcgccatggacgagctcatcaggatggcgcaggccggcgagcacctgtgggtcaaggcgggcggccgcgaggtgctcaacgtcgacacgtacgacagcgtcttcgccaagcccggggccgcctcgttccgcggccccgacgtgcacgtcgaggggtcccgcgactcgggcctagtcttcatgagcgccgtcggcctcgtcgacatgttcatggactcgagcaagtggacggagtttttccctgccatcgtgtccaaggcgcgcacggtcgacgtcctcgtgaacggcatggccgggcggagcgagtctttggttctgatgtacgaggagctgcacgtgatgtcgccggtcgtcccgacgcgcgagttctgcttcctgcgctactgccggcagatcgagcgcgggctgtgggcgatcgcggacatctcggtggacctgcagcagcacgacgcgaggttcggcgcgccgccgtcgcgctcgtgccgcctcccgtcgggatgcctcatcgccgatatggccgacggctcctccaaggtgacatgggtggagcacatggagatcgaggacagggttcccatccacctgctctaccgcgacctcatcctcagcggcgccgcgttcggggcgcaccggtggctcgccgccctgcagagggcgtgcgagcggtgcgcgtgcctcgtcccggccggtatgccgcaccgcgacattgcagttgcaggagtgacgccggaagggaaacggagcatgatgaagctgtcgcagcggatggtgagcagcttctgcgcgagcctgagcgcgtcgcagctccaccggtggacgacgctgtcggggcccagcgacgtgggcgtccgcgtcacggtgcaccgcagcacggacccggggcagcccagcggcgtggtgctcagcgcggccacgtccatctggctgccggtcccgtgcgaccgggtgttcgccttcgtccgcgacgagcacacgcgctcccagtgggacgtgctgtcgcacgggaacccggtgcaggaggtgtcgcgcatccccaacggctcccacccagggaactgcatctccttgctcagaggcctgaacgcgagccagaacagcatgctgatcctgcaggagagctgcaccgacgggacggggtcgctggtggtgtacgcgccgatcgacatcccggcggccaacgtggtgatgagcggcgaggacccgtccgcgatcccgctcctgccgtcgggcttcaccatcctgccggacgggcggcccggcgcgccgtcgtcgtcgagcgccggcggcccgctggtgggctcccccgcggcggcggggtcgctggtgacggtggcgttccagatcctggtgagcagcctgccgtcgtcgaggctgaacgccgagtcggtggccacggtcaacagcctcatcagcaccactgtggagcaaatcaaggcggccttgaattgtgccagccattgatggatccccggctgatggatccatggaatttggtgcgggcgtgcgtgcgtgcatgcatgcgcgcgcgttggtctcggtctcctctcctctcgtcccccagccggccgcctgccgcctgcctggtggctgctgcgaggagtgaattcccttcaaggcgttggttcgcgacggagctcttggttggtcgggggggcttcaatgctggctggccattcaaggaggcgggggctgctgccatggtgtcgcccgcttggggttcacctgccgctgttactgcgccgtccgatcaccggcccatgatcattcagctctgtctctctctctctacctctacccctttctctgcatgcatgataacttttcctgttacaggatttgaagcttgcttgccggcgaggctttgcacgaaacgggggagtcaagaacgcaccatgctcgtctcattcctcttgctgccgtcacgctcatcagttgttaattccattcctctttgtgtctcccctcccctagtttctgccgccgatttgcagtctcgctcccattctgtagtttgcagcagaggatgatgcatggttcgggtattgacttctatctaatggtgtgaagccttcaatgatcattaattctctccttctttttagtaagggaaatgtcactgtcactgctttgattgttccttttcattctttcctctctctcactgtttaatccttcaatatgatcaatgggcgggttattttta

SEQ ID NO: 123919 - DNA, 237 bp, Zea Mays
atgggggtggatcagacggttggtggcagcgaaatcaaggccggggcggcgttggcggtgggcgaaattggggacagggctgtaggagatccacctgtgcccacgacgatggagcccaacacggaccctcgttgccactgctccattgcgacgcgacgagggcgaggttcacagccccctgcctttggccttccttggctcttggtgctagaggcgcagagcgtggaggtgaggtga

SEQ ID NO: 123920 - DNA, 1553 bp, Zea Mays
ctggtaatctcgcatcctggcgctcggcctataaactgggccgcacccgccgcctcaatctccacacaaagcttggcctgcctgttaagcaacccggcgagcgaggtggtgagagaacgagcgagagggagatggcagccacggtgtccttcccggtggtgaacatggagaagctggagaccgaggagagggacacggccatggcggtcatccgcgacgcctgcgagaactggggcttcttcgagctgctgaaccatggcatctcgcacgagctgatggacgaggtggagcggctgaccaaggcgcactacgccaccttccgggaggccaagttccaggagttcgcggcgcggacgctggccgcggccggcgacgagggcgccgacgtcagcgacgtggactgggagagcaccttcttcgtccgccacctcccggcctccaacctcgccgacctccccgacgtcgacgaccactaccgtgggggtagtagcgtgcagtgtgtttccattccatccacagcatcagaattcttgcctgacgtcgacgacgcgcatagttatccgatcattccgttgcccctgtcaagtgtacatcagattgaatgctgtgttaggccagcaactatcacaatcacaagtcatagcaggcaagtgatgaagcagttcgcatcggaggtgcagaagctgtcggagaaggtgctggacctgctgtgcgagaacctgggcctggagcccgggtacctgaaggcggccttcgcggggtcggacggcggcccgacgttcggcaccaaggtgagcgcgtacccgccgtgcccgcgcccggacctggtggccggcctgcgcgcgcacaccgacgccggcggcctcatcctgctgctccaggacgaccaggtgagcgggctgcagctgctcaggggcggcgacggcggggagtgggtggacgtgccgccgctgcgccacgccatcgtcgccaacgtcggcgaccagctggaggtggtcaccaacgggcggtacaagagcgcggtgcaccgcgtgctcgcccgccccgacggcaaccgcatgtccgtcgcgtccttctacaacccgggcgccgacgccgtcatcttcccggcccccgcgctcgtcggcgaggaggagcgagccgagaagaaggccaccacgtacccgaggttcgtgttcgaggactacatgaacctgtacgcgcgccacaagttcgaggccaaggagccccggttcgaggccatgaagtcgtcggccatcgccaccgcgtgagcacataatactgccgtgttctcccttcgtggggtgcatatgcttgagcttgaagagccatgtgcctgtatgtagtggcacgtacggtggttatgcgtgtatcgtggaatggcgcggcgtgatgtattttggttgtctcagatctaagtgtgtgcgtatatattgtgtactgtaaagtttgcagcgtctgattaatgtacgagcagtgtgtgtacctaaccagaacctggaatgtggctggctgtgtgctgatattactaccacatcaggtgagtggccacc

SEQ ID NO: 123921 - DNA, 1385 bp, Zea Mays
ctggtaatctcgcatcctggcgctcggcctataaactgggccgcacccgccgcctcaatctccacacaaagcttggcctgcctgttaagcaacccggcgagcgaggtggtgagagaacgagcgagagggagatggcagccacggtgtccttcccggtggtgaacatggagaagctggagaccgaggagagggacacggccatggcggtcatccgcgacgcctgcgagaactggggcttcttcgagctgctgaaccatggcatctcgcacgagctgatggacgaggtggagcggctgaccaaggcgcactacgccaccttccgggaggccaagttccaggagttcgcggcgcggacgctggccgcggccggcgacgagggcgccgacgtcagcgacgtggactgggagagcaccttcttcgtccgccacctcccggcctccaacctcgccgacctccccgacgtcgacgaccactaccggcaagtgatgaagcagttcgcatcggaggtgcagaagctgtcggagaaggtgctggacctgctgtgcgagaacctgggcctggagcccgggtacctgaaggcggccttcgcggggtcggacggcggcccgacgttcggcaccaaggtgagcgcgtacccgccgtgcccgcgcccggacctggtggccggcctgcgcgcgcacaccgacgccggcggcctcatcctgctgctccaggacgaccaggtgagcgggctgcagctgctcaggggcggcgacggcggggagtgggtggacgtgccgccgctgcgccacgccatcgtcgccaacgtcggcgaccagctggaggtggtcaccaacgggcggtacaagagcgcggtgcaccgcgtgctcgcccgccccgacggcaaccgcatgtccgtcgcgtccttctacaacccgggcgccgacgccgtcatcttcccggcccccgcgctcgtcggcgaggaggagcgagccgagaagaaggccaccacgtacccgaggttcgtgttcgaggactacatgaacctgtacgcgcgccacaagttcgaggccaaggagccccggttcgaggccatgaagtcgtcggccatcgccaccgcgtgagcacataatactgccgtgttctcccttcgtggggtgcatatgcttgagcttgaagagccatgtgcctgtatgtagtggcacgtacggtggttatgcgtgtatcgtggaatggcgcggcgtgatgtattttggttgtctcagatctaagtgtgtgcgtatatattgtgtactgtaaagtttgcagcgtctgattaatgtacgagcagtgtgtgtacctaaccagaacctggaatgtggctggctgtgtgctgatattactaccacatcaggtgagtggccacc

SEQ ID NO: 123922 - DNA, 686 bp, Zea Mays
ctggtaatctcgcatcctggcgctcggcctataaactgggccgcacccgccgcctcaatctccacacaaagcttggcctgcctgttaagcaacccggcgagcgaggtggtgagagaacgagcgagagggagatggcagccacggtgtccttcccggtggtgaacatggagaagctggagaccgaggagagggacacggccatggcggtcatccgcgacgcctgcgagaactggggcttcttcgaggtgtgtgcatatatctcatagagactcacatcaagcacgcacggaacaactaaggccctgtttggaattgtagtatttttgcagctttgaaacaatactatggtatttaatgatactatagtattagagctcaaaaggtgtttggtttgtacagtcaaaacacagttttaaataccatggtttacccaaaactgtggtatttttggagtttttgaaactccactcaggacctcagttttcttctcttctctctacatatactttgtttttccaatagaaccaaacagacctcggttttgaacaataccaacgcaacgcaccacacaccggccgtatgtatctcccattaagtaatgtaaccacacgcacaacagtcgttttctgcatcaactagtatctcgttggctcaaagcctcgatcagcagagcatgtaattctggt

SEQ ID NO: 123923 - DNA, 2085 bp, Zea Mays
caagtgaatgcaggccgtgccagttcagaatctgaaaccagttgaacacgaagcaaccacagcactcacgcaacacagcacactcatggttccagcattattctctgccgagttgcttcggaaacagcagggggaaacggcttgcttgatgcggcatggtggcaggatcgggaccgctcgggaaccactcgccccgctctggtcagtggtcagtactgcgaggccgccgtcaggtgcatcaggctcgacgcgtcgaacagctccatgaacctctggtcggtggtcctcgccttcgccgccgcgaagtgcaggtactcgtcgaacacggaggacaggcaccacttctgcagcttcctcaggcatccgacgacgcagccagtccggtgctgaaagaaaaacactcgtcaggggaagtgctatcgtggaaggaaaatgctggactggaccatctggaacgcgagaggctttaccttgcctctcttgcagtggatgaggaccggctggtttctcacgtctgaaacgatttgaaacaggagaagggttagagatgtcagatgctcaatgttgcaattctgtgggagaaccgtagaagtgtcagcgaatgcaggtaccaaggacaactttgagcgcctcccggatcgtttcttcggggatgtggacgaatggttcctgcgccgacatggtatccagcactgtcggaccactctgtggataataaggttcagtaagctccacacattgttcatgaaatcataataagggaaataaaaagctttctaggggggagggaacccactcaggaaacaaagaatacattatttgggtggtcggcgatttaaaagaggattcatttcatggcaaccgtgaaccgtctgaagttgtctactgagctgacaaaattatcagtgggagatacccctggttctcacacgatatgcctagtgccatcgtactcgtagagttgtagtagaaaagtagcaacattacaagagataagtttttcttcacactgggtcttgcaatgtcaaaccgccttaacgtgtggccactgaacgatgactttctacaaatgccaaagtccgttaaccagaaagcattgttaattacaggactgaaacaactgtcggttaattacaggactttctacaaatgccaaagtccgttaagctgtatatctttttttttataagccaagcaagtttgatctggtacagctaggtatagtcgtatagatgagaatacctaacctacccggtctatcttcgtgcttactgggatccccgtcaccgccaacaaaatttactatgcagaaacagcaaatggccagacactgacaggcaaaagtgagcctcagagacaccctttgccagtacgcagactccagatgttctctctctctcactctctctctccgtctcttgcaaacccttgtacaggaacaggacgacgacacagaagctcttgttgtgcgccactgttacgctagcacgtaccaaatgtttgtgttgccgagactgaaaagagacggtgtcaaatgtggttctcgtaccttgctcccttcgacggcgaactggtgaagccggatcccgttcgtgcgcaggaaccgcgcgttctcctccgcgtacggctccgggcacaggtacctggccgccgaccacgcacgcgagcagcgtgtcaacaaggtcgacagagcggcgggctagctagcgctaacgtggggggcggggtcgagctgttcttccttacacgatggagcgcaggttgagggagagcaggaagcggaagttggcggcgtccgggaggcccgagcggaagatgccgtcgtcgaccatggcgaagttgagcggcggcaccagggcgtcgtcggtgctggcgtcgcggaggaggagagggagctccgggtggctccacgcctcagtgccgaggacggccgcggccactgtcttgccgctctgctctgcgtcctggctgctctgctgcctcgccgggacatccagcttcatggcacgcactgagcggcaggcggttgctgttgctgtgcctgtgcgtagatggcgtgtgctgtgcgtgttcgctagcagcggc

SEQ ID NO: 123924 - DNA, 127 bp, Zea Mays
aaagttttagttttagaggtttagaacagggctttgaagaaggtctcctaaattttagtccattagtcactagggagatgacttaagatgacttaaggtgactacacctccgagaattggaccaccc

SEQ ID NO: 123925 - DNA, 399 bp, Zea Mays
atgacgtcgcgcgccgggtccatggccaccccgcgccgcaggctggtgccgtacttgccgccggggaggtcctcggcgccctcgaagcacacgttggcggcgccgtccgcggcgcgcatgacgccgcaccggcgcagcacgtcgcggagccgcgcgccgcgccacacggacgtggagacggcgccggggccccagttgaagcccacggtctggcgcaccatgttctgctccttgcgccggttgcccgcgcacaccagcgtcacggggagctccacggcctcgaactccgtcaccagccgctccatggtcagcttggcggggcgcgtcacgagccccgtcacctccacggtccacgtggaccagtccgccctggggaccgccccgtggttgcgcacgtag

SEQ ID NO: 123926 - DNA, 441 bp, Zea Mays
atgcagagcaatgcgagccgcgcacgaaggcgaggtcacggcgacggtgacttcgctgctgttcatgacatagagcttcactcgggcattacatcgaacacccgcgaagcgccaatgttgcggggctgtgggggaaaatctcggctgcgaggagctgcgctgtatagggttgggcatgctttagccgaagtggagggagggggtggtgctgtccactggactgtgcaaaacagggagccgccagagcgcgaagttgccgcggttgctgctcaagggggaggtgccgagggaggagccactgccccatggatgggagaggctcgaccgcggatctccagccctggcgagcagagcatgtcgagcagggagcaaaggcgagcgccatggctgccagcggccgatagcagaggaaaaatggagcagggaggggcgctgaggtag

SEQ ID NO: 123927 - DNA, 1347 bp, Zea Mays
accgcagtgtttctcacggaccacggctgcactgcacggcaccgcctaccttggtatctctgagaaaatggcgagaagtgcgagagctaggaggcatgtggctcatcggatcaagtccacccatcccattccttcataccgatggaaggcaaaggcaatgaaaaaatccaaccgaaagcaagtgttgccagccttgcaaaagatggactgggaagatgccaattgctctgtgtgcatggaatacccacataatgctgtgctcatcctctgttcatcccacgataagggctgccgtccttacatgtgtggaactagctaccgccactcgaattgcttggatcagttcaagaaagcatacaccaagggggcattgcttgaggaagttcctgcaaatagcgttggcactgatctggattcagcgccattggatgcagaaaaaatcgagtccattgaccttgcatgtccattgtgtcgtggcaaggtgaaagggtggacagtggtagaaccagctcgaagctacctcaatggaaaaaagagaacatgcatgcaagacggttgctcattcgtggggacctacaaggagctccgcaagcatgtcaagttggaacaccctcttgcaaagccaagggaagttgatcctgtccttgagcaaaaatggagattgctcgagattgaaagagagcgacaagatgcactcagtacgatcactgcaacaatgggcagagctgttgttcttggtgattatgtgctagacttggaggatggagtggatttggaggatgttgacagcgatgttgatgttgatgatgaccgtgggacagataacactcgaaggatgctactttttattatgcggcaagttgctcaacatcatcaacaccaaaggcttcataatgtgaccggtgcatctgagaatgtcgaggacaactatgtggtgaacaatggtgccaatggaaccactccatactcctatcccttggaaggggaggacgagaatgatatggttttggccggaggtagaagcaccgatgtgctcagaccagagaggaggcgccgtcgacgccgcaggaaccgtggaaggttgtttttaggtgctaattgagaggacaggtggtctggtggggtttaaccacctgaggagtacatacacaaatgcttccctggtgcctgacattcatcaatttcggcctcaatttacttgttcatgatcacgtaccaagtagttatgttaacatcagctcattgcttgccatcaatgtatgttctctcacatttctttgctgaaaaggaaaatgccgcatccatatcttgcggtttgtgtagagcttctatttctgtcaattgctc

SEQ ID NO: 123928 - DNA, 708 bp, Zea Mays
gttttagaattttcatattttgttatcatctggtattctcttgatacaaggctatactttcatgatgaatgatatcatatttctcctgttttgtagacgcaggctttgctcaaaattggtaggggaataccaccagaaattcctaatacattatcagaagatgcgcgtgatttcataaagaagtgtgtccaagcaaatccaaatgaccggccatgtgctgctcagttattcgagcacccatttgtgcagcggccactgcaacaatatggcgtgtgatgttctccttggctgctaacacatttgattgtacataagctgatttaacttacatgcctaagctgttgatattatgagaatgatcccttggcccgagttccgagagtgaaccctcaatctgaaggcatccgttgctcaatgttccattttcatgctttgtagtttaggtttaggggtaggtcatcccttgctcactgtaccattttcatgatttgtagtttatggggtctaaaattgctttcaatctggtaagcacacccagacacttagaagcaacaatgtttgctttgatgtgggatgacttgtataagtggttcttttcgagcttgtccactttttacaccatgctctaacgactgtctcagcatgatatgcataatgataaacaagggaaatggtttaaaatgatgtttattggcgccttttgaaata

SEQ ID NO: 123929 - DNA, 2194 bp, Zea Mays
cgcgcgcgcacggcgcctccaggtcgcggctccgctccgctcttgcacacccagaaggcaaacgcaaaccatatcctccctcctcgtcaaaccccactcgcaaagcgcggacgcgttccgcctcgcgcctgtgcccctccctccttctgctctgctctgccctgctccccacgcaagggccaccgcgcgccggagcccatcccatcccatggaggcgccgcagcggcccaggccgcgccagcggccgcagctcgcgcgcatcaacgcgatgaagcactcctcgtaccccgccgaggacgaaggcgacgacgacctcgcgccggtcgacctcggctccgagttcgcgtcgcagaccagcttccgcatccgccgcgggggcgcggaggtcgccgacctcttccggaagctcggcctcaagggccccgaggacttcaccatccccccggccatctacgccgccggcatggcgcacatccccaacccttcccgcagccgccgccagtcgctgcaggcaccgctgctgccggctgcgggcgctgacgggatggcaccagcaccacagggacctccagatgtttctgcacgggacgctgcactcgcagcgaggctggatgcagccgtccaaggtgaagagcaagctgtgttggccgccaaagtagtccaaccggaaccggaggtcgctcaagtttctgcacgatcatacaaggggtctggaaccgaatcgagcaacagagcagtccaattggagacaggggaatcttctagacgagtgattgctgccgcggtgaaggaggggactgcacacggagtgaagggaaagggcgatgtggtcaaggtggatcagctacgagtggaaagaacaaaagcggtggttgtcgaggcgccaagagagactaccgctgccgtggttcaagctgtagcggagtccccttctcagagcaccgagtatttgatctcgccgtcgccaaataggcggtttaagagaactatcacgtcttggaccaagggacaccatctcggcagtggatcttttggttctgtgtacgaggcgatcagcgatgatggatttttctttgctgtcaaggaagtatcattagtggatcaaggactcaatggaaaacaacgcattctgcagcttgaacatgagatatctctcttgagtcgtttggagcatgaaaatatagttcaatattttggaacacataaggaaggtgggaaactatatatttttcttgaacttgttagtcaaggatctttggcagctttatatcaaaaatatcatttgcaagattcacaagtctcagcatatacacgacagattctgaacggtttgcactatctacatcgccggaatgttctgcacagagatataaaatgtgccaatatcctagttgatgcaagcggactggtcaaattggcagattttggacttgcaaaggagatgtcaattttgagccaggcaaaatctagcaagggaactgtctactggatggcccctgaggttgctaaggctaagccacatggacctccagcggacatatggagtcttggctgcacagttttggagatgctgacaggcgaagtgccgtatcctgatatggaatggacgcaggctttgctcaaaattggtaggggaataccaccagaaattcctaatacattatcagaagatgcgcgtgatttcataaagaagtgtgtccaagcaaatccaaatgaccggccatgtgctgctcagttattcgagcacccatttgtgcagcggccactgcaacaatatggcgtgtgatgttctccttggctgctaacacatttgattgtacataagctgatttaacttacatgcctaagctgttgatattatgagaatgatcccttggcccgagttccgagagtgaaccctcaatctgaaggcatccgttgctcaatgttccattttcatgctttgtagtttaggtttaggggtaggtcatcccttgctcactgtaccattttcatgatttgtagtttatggggtctaaaattgctttcaatctggtaagcacacccagacacttagaagcaacaatgtttgctttgatgtgggatgacttgtataagtggttcttttcgagcttgtccactttttacaccatgctctaacgactgtctcagcatgatatgcataatgataaacaagggaaatggtttaaaatga

SEQ ID NO: 123930 - DNA, 1448 bp, Zea Mays
aaaattccgaaggcggtcttccgagagcaacagctgctcaggcaggcaggcaggcaggcaccaacagccaacccgacgcaaggaaccaattaaccaccgtcccgctgatgtcgtcggcgacgccagcgcccgcgcgccaccggacgtgccgcacgtactggtgctaccagtgcggccgcgcgctccgcatcatctcctgcccgtccaccgacgtcttctgcccgcgctgcttcggccgcttcctccacgaggtcgacccgccgacggcgcgccacgggttcccgccggcgcacttccttccgcacccgttccacccgcagcaccagtacgccggccgcccgcgccgctgggtcatatacggcgaggagccgacgacggtaccaggccgtgcgttccgccagcctgcgccggcacagggacctgccacgcctcctgctcctgcaccggcgctggttcgacgacggcgcgtgccttccccgccgccggcgccggtgccgcggcggccgtccacgcccccggccatcgaccccggggactacttcatggggccgaacctgaacagcctcatcgaggagctcacgcagaacgacaggccggggccggcgccggcgccaccgtcggcaatcgactcgctcccgacggtgcgggtcgccggggcgcacctgtcggacggctcgcagtgccccgtgtgcaaggaggacttcgagctcggggaggccgcgcggcagctgccgtgcaagcacgtctaccactccgattgcatcgtgccgtggctccgcctgcacaactcctgcccggtctgccgataccagctacctagagccgggtccaacggcagcagtcaggccgcacctcgcggcggaagcaacggcagcaacaacaggaacagggagatggagagagagcccctgacgatggtgcaatgggggccattctcctggccgtttccaccgcgcgggatggacgaccccggcgacgcgtgggagcacgggcagcgcggcaggcacgacgcggcggacgccggcgcattctacgcttggtggcgctctctgtttttcatatagatgttctcgtggagtctttatcgcatccaaagatgtatgcctcctacccttaagtgatccgcatccaaagatgtacgcctcctccagattcagaatgccgacgtgctagcaacctaacagcgaactacaggtaactatggcgccgttctctcagttcaatgtcaaagatggaagattggtggaagcctgatgccaaaatcagcgtagatgtaaaaatgaaatacgcccactgtaaaggcgagtgaattacacatcgttaaagggcacgtaaaacgactgtttgggtgatataccatgttaacagtaatttctggaacgcgccgaagacatttctatgtgatgtatctgatacactgaaactctgatgttggtagagcgagtagc

SEQ ID NO: 123931 - DNA, 1410 bp, Zea Mays
aaaattccgaaggcggtcttccgagagcaacagctgctcaggcaggcaggcaggcaggcaccaacagccaacccgacgcaaggaaccaattaaccaccgtcccgctgatgtcgtcggcgacgccagcgcccgcgcgccaccggacgtgccgcacgtactggtgctaccagtgcggccgcgcgctccgcatcatctcctgcccgtccaccgacgtcttctgcccgcgctgcttcggccgcttcctccacgaggtcgacccgccgacggcgcgccacgggttcccgccggcgcacttccttccgcacccgttccacccgcagcaccagtacgccggccgcccgcgccgctgggtcatatacggcgaggagccgacgacggtaccaggccgtgcgttccgccagcctgcgccggcacagggacctgccacgcctcctgctcctgcaccggcgctggttcgacgacggcgcgtgccttccccgccgccggcgccggtgccgcggcggccgtccacgcccccggccatcgaccccggggactacttcatggggccgaacctgaacagcctcatcgaggagctcacgcagaacgacaggccggggccggcgccggcgccaccgtcggcaatcgactcgctcccgacggtgcgggtcgccggggcgcacctgtcggacggctcgcagtgccccgtgtgcaaggaggacttcgagctcggggaggccgcgcggcagctgccgtgcaagcacgtctaccactccgattgcatcgtgccgtggctccgcctgcacaactcctgcccggtctgccgataccagctacctagagccgggtccaacggcagcagtcaggccgcacctcgcggcggaagcaacggcagcaacaacaggaacagggagatggagagagagcccctgacgatggtgcaatgggggccattctcctggccgtttccaccgcgcgggatggacgaccccggcgacgcgtgggagcacgggcagcgcggcaggcacgacgcggcggacgccggcgatgttctcgtggagtctttatcgcatccaaagatgtatgcctcctacccttaagtgatccgcatccaaagatgtacgcctcctccagattcagaatgccgacgtgctagcaacctaacagcgaactacaggtaactatggcgccgttctctcagttcaatgtcaaagatggaagattggtggaagcctgatgccaaaatcagcgtagatgtaaaaatgaaatacgcccactgtaaaggcgagtgaattacacatcgttaaagggcacgtaaaacgactgtttgggtgatataccatgttaacagtaatttctggaacgcgccgaagacatttctatgtgatgtatctgatacactgaaactctgatgttggtagagcgagtagc

SEQ ID NO: 123932 - DNA, 718 bp, Zea Mays
aaaacattgacaaaaacataggtaacctgtagtggacaccacacaagttgcatacagaaaagcacagactgcatggcgacaccagttgtggaagttggccaatccattcagagaattttgaaatcatttaaccagcttaaaaatgctaccacacgtagccccagttgtaggaaaatacaatcaatcacatccacatccgtcctggacttaatcatttatcaatttctctacaactttacttcacatacaaggtattgcttgagtcaaatatatgggcatgatagactgatagtttgaacgcagaactctctggacatcagtagctgccaaccagacaataatattgtatcatgccaacaagtcacatgaccacaagtttagagatctttcattttcttcaataataattgttgaggtttcaaaccgtgcattgccaatcaagtcaacaaaggaggaaaattgatatgcatgatcatagggctatagtatattcatgatgtgatgctgttagggttgactgtaatatacttcatgacaagggaatctacacattatagaattccttttgtagaaaacaacttcctacacatcaacaaagttcgctgctagtactaaattgaaagagtctagtctatagcttgtaaccagagcaaaagtatcttcttcaaaatgggaagcaattacctcattcttttgcttctccagcatttcgacctgc

SEQ ID NO: 123933 - DNA, 872 bp, Zea Mays
ctcgaatctctcgcttctccaaaaaccccagtcgcaagggggtggagccgtggagggaagggaagggtgtacagcagtgccgtggccatggacaaggcgtggcagcgcaatcttcatcttatcggcggcggcggcggcggcggggagaagaaggcgtgtcctgccgcggcgcccgcgctggggctgcagaagcataagtcgtggtcaccggacatcgagcgcgacgaggtgtgggagcgccggcgccgggacatgcgccgcggaggcacggcgctgcggcgcgcgcggagcgtcacggacgacgacctcgccgagctccgcgggtgcatcgacctggggttcggcttcgagcccgcggagtcggtgtgcgcggcgtgcggctgcgccgtgaggaaccgcctcctggacacgctgcccgcgctcgacctctactacgccgtccacggcgggggcggggcatgcgaagcggaagggccgaagtgctcgtgcggcgccgcgtcggaggcgtcctctgacgagtcgccgctcggcagccccatgtccatactatctccaggcgacccgccggagacggtgaagatgcggctgaagcagtgggcgcaggtggttgcgatgtccttgctgagccgccgatgagctctcgaggacgtacggccgagccatggccgccgccgccaccaccttgcatttgtggcgtggggtgcggggagagaatcaatcattcgagatgcagaacagcagaaggaaggaatccccggtcgcttcgagaaggaaaaaaaaaaggagaggatttctgttagggtttggtgtccgccgcctgccaccttgcattgcggaccgctagctaatcaaagacgaaacaccatgcctaa

SEQ ID NO: 123934 - DNA, 489 bp, Zea Mays
atgtccgcggcctcgacgatcttgccgtcgctgtccttggtgaggcagcccatgaagccgatgtccgccacctgcacctggccgcagctgttggggcatccggtccagtgcatgcggaccggccgcggcacggccacgcgcttctccacctcccgcgccacctgcagcgcccgcgccttggtctcgatgatggcctgcccgcagaactggttgcccgtgcacgccaccagccccctgagcagcatcgacggccgcggcgagagccgctgctcctgcagcagcggctccgccagcagcgcgtcgagcctctcgttgctgacgttggggagcacgatgttctgctccaccgtgagccggagctcgccggtgccgtactcgtcggcgagccgcgccagctcgaacatgtccgcggcctgcagccggcccaccggcacgtggaggcccacgtacgacaggccttcctgcttctgcgggtgcacgccgaggtag

SEQ ID NO: 123935 - DNA, 707 bp, Zea Mays
cttgtctcgtgtggatactggattggctgtatcatatatcaccatactgtaccaggttgacgagcgaggactaataacagacaacaatggcgttcatgcggtactaccgtgcgctgccgcagggggagacgacggtggaggagttcagggcgtggctgagccagttcgacgcggacggcgacggcaggatcagccgggaggagctggagcgggcgctgcgcagcctcaacctgtggttcgtgtggtggaaggcgcgggaggcggtgcgcgcggccgacgccaaccgcaacggcgcggtggacggcgacgagatgggccggctgtacgccttcgcgcacaagcacctccacctcaagatgagccagctgggcctgggtctgggcctggaggagtagcgctgggccgctggcctgctagagttctaaggcgttgccgggaacgctgggtttttcgctgtaaattggactgttattagactcaagtggtcgtgctagctcttggtcgtggattttgttgtttcataagctcggcaagtagaggtggtgatattaatttgtaaatgaaagtagtatgtataaactcttttttttcgattacataggctacaccagcaacatatacttttatgaatctggacactgtaaagttttgacaaatggacgtgtggacatattatgctgctcatcatgggaaaacaatttggttac

SEQ ID NO: 123936 - DNA, 1458 bp, Zea Mays
ctcccagtttccgtttttttaatgctttgtttactcgcggggatcatggggtaatcgcgtgggccgtgcctggctgggtttatttatgccgacctgccaattggagcaaatcccctttcctgcccctccccctccgcctttcctctctctcgctctcctcctctcctctcctctccttccgcatcacacaccacgactcccaaccgccggttggctttgctgctccgagctcttccacacccgccctctctcttgtgggtcggcggccgagtgtctgcgtcgtccacggagatcagggatcggcggcggggtatggcgagggagcgtcgggagataaagaggatagagagcgcggcggcgcggcaggtcacgttctccaagcgccgccgcggcctcttcaagaaggctgaggagctctccgtgctgtgcgatgccgacgtcgcgctcatcgtcttctcctccacgggaaagctctcccagttcgccagctccagtatgaatgagatcattgacaagtacagcacacattctaaaaacctggggaaagcagaacagccttcacttgacttgaacttagaacatagcaaatatgcaaatttgaatgagcaacttgtggaagcaagccttcgactcaggcagatgagaggtgaagaacttgagggattgagtgttgaagaactccagcaattggagaagaatctggaatctggtctgcatagggtccttcaaacaaaggatcaacaattcttggaacagatcagcgacctcgaacaaaagagtacacaactggcagaggagaacaggcaactgaggaatcaagtatcccacatacccccagttggcaagcaatcagttgctgatgctgaaaatgttatcgctgaagatgggcaatcctctgaatcagtcatgactgcgttgcattctgggagttcacaggataatgatgatggttcggatgtctctctaaaattagggctgccttgtgttgcatggaagtgaaaaaacaagatggtctgtgttgatctgggtggagctgcggcttcagcagataggcacttgtgttattgtcttatggacgacccccgactactgcaataatcttgcatcggaagcgagatcagttaacctgatttgtcatccttgtggcttcatgatgcgatgttgcgcttgtaccgtttgctaggatgttaactggactagaatcgtgtctacttttgtactgctcgtgaatcctatctactttgtgctatccaaagttatgacctaccacttgcatcggcatggcgcgccggccgtaagctgtgctcaagcatgcatgcttcgtgttatacgtgtgtacttattgggaagttgagtctgcatacaacctgagcgtagttgttgtcttacagagaccgtttagttttcagaaccgctttccccatgtctcgtttggatccttagaattgaatttcatta

SEQ ID NO: 123937 - DNA, 1433 bp, Zea Mays
ctcccagtttccgtttttttaatgctttgtttactcgcggggatcatggggtaatcgcgtgggccgtgcctggctgggtttatttatgccgacctgccaattggagcaaatcccctttcctgcccctccccctccgcctttcctctctctcgctctcctcctctcctctcctctccttccgcatcacacaccacgactcccaaccgccggttggctttgctgctccgagctcttccacacccgccctctctcttgtgggtcggcggccgagtgtctgcgtcgtccacggagatcagggatcggcggcggggtatggcgagggagcgtcgggagataaagaggatagagagcgcggcggcgcggcaggtcacgttctccaagcgccgccgcggcctcttcaagaaggctgaggagctctccgtgctgtgcgatgccgacgtcgcgctcatcgtcttctcctccacgggaaagctctcccagttcgccagctccagtatgaatgagatcattgacaagtacagcacacattctaaaaacctggggaaagcagaacagccttcacttgacttgaacttagaacatagcaaatatgcaaatttgaatgagcaacttgtggaagcaagccttcgactcaggcagatgagaggtgaagaacttgagggattgagtgttgaagaactccagcaattggagaagaatctggaatctggtctgcatagggtccttcaaacaaaggatcaacaattcttggaacagatcagcgacctcgaacaaaagagtacacaactggcagaggagaacaggcaactgaggaatcaagtatcccacatacccccagttggcaagcaatcagttgctgatgctgaaaatgttatcgctgaagatgggcaatcctctgaatcagtcatgactgcgttgcattctgggagttcacaggataatgatgatggctgccttgtgttgcatggaagtgaaaaaacaagatggtctgtgttgatctgggtggagctgcggcttcagcagataggcacttgtgttattgtcttatggacgacccccgactactgcaataatcttgcatcggaagcgagatcagttaacctgatttgtcatccttgtggcttcatgatgcgatgttgcgcttgtaccgtttgctaggatgttaactggactagaatcgtgtctacttttgtactgctcgtgaatcctatctactttgtgctatccaaagttatgacctaccacttgcatcggcatggcgcgccggccgtaagctgtgctcaagcatgcatgcttcgtgttatacgtgtgtacttattgggaagttgagtctgcatacaacctgagcgtagttgttgtcttacagagaccgtttagttttcagaaccgctttccccatgtctcgtttggatccttagaattgaatttcatta

SEQ ID NO: 123938 - DNA, 761 bp, Zea Mays
aatgacttactatatggaatgaagggagcacaaagcttactattgatattatgtggtttaaatgcgacaatcaatatattctgtttctcctactgtttataatactattgcaagacactaatttttcccatgctttactgcagagtacacaactggcagaggagaacaggcaactgaggaatcaagtatcccacatacccccagttggcaagcaatcagttgctgatgctgaaaatgttatcgctgaagatgggcaatcctctgaatcagtcatgactgcgttgcattctgggagttcacaggataatgatgatggttcggatgtctctctaaaattagggtgattagctagtaacctttcatcttatcttttgcctattctcacgtgctacctatgttccacagagggtataattctaatataatgttcatccaaactttcttaaatttgatcaaaattgtataaaaaagatatactaaaatttaaggttagatatatatcattacatttgtcatggaatatattttagttgcagtttagaatttcatcgaattttaaatgttagtactatttttaaaaaaaaaaactagttaaaattttaatagcttgatttagactagacctagaactgcagcctttctcagcttaaagagtactttattcaatggtggtctcttgattagcattggcttgcaaatagcatggtcacattctcataaatatggggtttaccttgtttaagtttggaaatatatctgta

SEQ ID NO: 123939 - DNA, 1590 bp, Zea Mays
caaaaacccaacccaaaactgaatgagacgaacgaccaaacatgaaatccggcccctttgctagaatccaccatccaccccacgaaatcgttccgaaaccgttcggtccagcggtccagaccaaacataaacttccggcgcagcgcacagccgctcgccgccgtcctccatcccaattcccacacggaagcggaacctcccaattccgcaccaccatcccaccggcggccaccgccgatggagatctaacagcagagccactcctatctcaacccaactgcgcagatccaccaccatggagaccgagcggatccgggagctcatcctcctcactctccgggcgccgcccgcccgcctcgccctcgtgggtggcaaccacaccgccgctcgcttctgcacccgctaagctcgcctcctcaccatcttccgcgccggccttctcttcaccgccgactcaaacggcaaaagacagcgctctcgctcagctcagcccggcgtccgcgatgccggctgacatcgtcgtgatccgtctccccggcccgcgcgccctccgcgtgctcgcgcgctccgtgctctttgccgtcgcgctgctcttcctgccatggctccgccccgccgaggcgcccgcccgaggccgcgccgtcgacacgtgcggcgcagccgcggcccaggcggagctcctgctgcgcgaccttcaccaggagggcctgcccgtccacggagcccgcgccgtcgtcctcgtcgccaatggcgtctgcgattcgaccgcaccgaagcaggacctgcggcggatgctgatgataggggagtcgtcagtggactttctgctggatttcgggtacttcaacgaagacgctgacaggttcgccttcgccgatcgggtgctcaagcatggaggcattcttgccgccccaattgactcgttgagcgcgttcagcttgccgcagaactaccgcaccatatacatccaccgcttcgctgaagcttttattggggtcaagaaggttgcccccgccgaggacaacagccatgccggcaccagcaccagaacggagctgctatcacctcctgcctttgaccttaaggaaggggtgttttacagtcggccagatgagactaccaattgtgaattcaagaacatggcgaggaagctcttactttcagacatcactgggactccaacggcatactcctacaaacgcaaattgttggtgcagatgctccgtaaggatcaggagagttgattctgcttcttttatggaatgtgaaaaggctgcagcctgcagcggcgcttttatggagtgaagctgttctagcttcccgggagagcagcaacatcacatcagttataaaccgactgcatacacaatgaatacatggtaatggactggagtcagggaatattcttatcagttgcagtctagtaggctgtgatttgtacctcttgatctggtttgttcttgctgggttttcttctcttttcagttgttgttgtttgcgtgacttgtagcttggtgataagtttctcatatgatgtatcatctgtgttgatctatgacgttcacagttgtcttcttgacaccatccatt

SEQ ID NO: 123940 - DNA, 1005 bp, Zea Mays
gctcacagagatacctcaaaacccaaccaggccggcgtccaggtgtccacagaaagaggagagcagagagagcgggagatcatggagctctgcgtctctaccactgcctccgtccgcgccaccgccgcgcccatatccttcgccccgccccggcgaggcgcgtctgcttccaccgccctcccgctccaccgccgaatcccaactcgaggctggtgttgcgccagcgcggccgtgcctgacccggcgccctccgaagagctcgcatccgcctcctacaccgtcgtcgtcgcggacaagcccgattcgcctgccgatgacaaggtcgacgaggttagcgccgcgcctagtggctccgcggaggcgcccgtagcagaaccggtgtcatcagaggcgtccccgtccccgtccacggatgacggcggtctggatgagatactaagcaagttgaacattgaagtgactccgattttaatcctcactggatctggtgcctttgttgctttatggatcctatcttctgttgtttctgcagttgattcagtccccctgctcccaaaattgctggaattagtaggaactggttactcaatttggttcaccgcacggcatctccttttcaaggaaagcagagatggcatgtttgcaaagttcaaggatatcaaagagaggatcatttgatctaccatcgatatctggtcacgtgtttaggctttacagcctgcttattattaggttttctcccctttcaaatattactgaaggggtaaagaaggtcgtatatctaatttttcttctcacggggtctgtcattaggcttctcaagtttggctagtgtgcttcttcaggtcactctcgatgttttttactcaatcctatgtgtatgctgccgaataaagctttaaaaagatgaatgcaattagtatgttctcgctcctatgcaagttttgaaatccagtgtccagtaaacatttcagataccatatgttaagctcgagccttctgtga

SEQ ID NO: 123941 - DNA, 739 bp, Zea Mays
tggcatattttattttggtaatgcattgaataagtcatgatcctgtagcagctttcatatgtgaagatagttttttttcagatacaaactttatcttggatgagttatccattgccatattgatgcttacttatataacgtgcctatatcttccagttgaacattgaagtgactccgattttaatcctcactggatctggtgcctttgttgctttatggatcctatcttctgttgtttctgcagttgattcagtccccctggtaggaaatatagtacctcttcatggaatctgcacttaattttggtaccaaatgttccactaacctggttgactgactcgtaacagctcccaaaattgctggaattagtaggaactggttactcaatttggttcaccgcacggcatctccttttcaaggaaagcagagatggcatgtttgcaaagttcaaggatatcaaagagaggatcatttgatctaccatcgatatctggtcacgtgtttaggctttacagcctgcttattattaggttttctcccctttcaaatattactgaaggggtaaagaaggtcgtatatctaatttttcttctcacggggtctgtcattaggcttctcaagtttggctagtgtgcttcttcaggtcactctcgatgttttttactcaatcctatgtgtatgctgccgaataaagctttaaaaagatgaatgcaattagtatgttctcgctcctatgcaa

SEQ ID NO: 123942 - DNA, 3479 bp, Zea Mays
ttctttcgatcgctgcgctgcgtcccaggcagtcctccgagcagtgctagtccaccttgctagctcgcccgctcgtcgcgctccctcgatcagatctaatcattatttaatcctttttttttccagtctcacatgagcactccccactcgtcctccacctcctccgtcccaccacaccgcgcctcccctccccagatcccccaatccctaaccctagcacccacggcgtcctccgcctcgccctcctcctcctccgcgtccggtatgcgggacgcggcggaggacgactccgactcgccgccgtcgcagatgtcggaggacgaccccggcggagggggcggggaccggtgggagccggatctgcggggcggcaacggcggcggcggcggcggcgggaggtgggctccgccggaccaggtgctggagaacgtgctcgagaccgtgctcgagttcctcaccgccgcgcgggaccgcaacgccgcctcgctcgtctgccgctcctggtaccgcgccgaggcgcagacgcgccgcgagctcttcatcggcaactgctacgccgtctcgccgcgccgcgccgtcgagcgcttcggcggcctgcgcgccgtcgtgctcaagggcaagccccgcttcgcggacttcagcctcgtgccctacggctggggcgcctacgtctccccctgggtggccgcgctcggccccgcctacccgcggctccagcgcatctgcctcaagcggatggccgtatccgacgacgacctcgcgctcgtcgccagctccttccccttcctcagggacctctcgctcgtgtgctgcgatggcttcagcacgctcggtctcgccgtcatcgccgagcgctgccggcatcttcgtgtgctggatctgatcgaagattacgtagaggacgacgatgaggagctggtggattggatctccaagttcccagagtccaacacctctctggagtcgcttgtcttcgattgtgtcagctgcccgttcaactttgaggccctggaggcacttgttgcacgctcaccggctttgcgacggctgcgtgtgaaccaccatgtttcagtagagcagctgcgtcgtctcatggcaagagcaccccagcttacgcactttggaactggtgcattccgatctgagggtgcccctggtggggggttggctgtgactgagctcgctacatcttttgctgcatccaggtctctggtttgtctatcaggtttccgggaggttgacccagaatacctcccggcgatctaccctgtctgtgccaacctcacgtcactaaacttcagctttgcaagcctaaccgctgcggaactgaagccagctattcgcaactgcacgaatcttcgcactttctgggtccttgatactgtgggtgatgaaggccttcgtgctgtggctgatgcatgctctgatctccgtgagctgagagtttttcctttggatgcctctgaagattccgagggttcggtctcagacgttggtcttcaggcaatctcagaaggctgccggaagctggaatcaatcctctacttttgccagaggatgacaaatgcagcagtaattgatatgtcgaagaactgtcctgagctcgtagtgttccgcctctgcattatgggccgccaccgacccgatcgggacactggggagcccatggacgaaggtttcggtgcaatcgtgatgaactgcaagaaactcaccaggctttcggtctccggcctgctcaccgataaggcctttgcgtacatcggaaaacacgggaagctaataaagaccctctccgtcgccttcgctgggaacagtgacatggccctccagtatgtattcgaggggtgcaccaagctgcagaagcttgaggtcagagatagccctttcagtgacaggggtttgctctcaggactggactacttgtacaacatgaggttcttgtggatgaactcgtgcaggctgacgatgaggggctgtagaggtgtagctcagcagatgcagaatctggtggtcgaagtaatcaaggaccactccgaagatgaaggggaggctgagaccgttgacaagctgtacttgtatcggtcactggcagggccaaggaatgatgctccgccgttcgtcaccctcttgtagtgctgctgccgccaccggaagaacacagccctgctgtacccacgaacatgtttgttgtattgttaacttaccaagttttcagagcaagcgaggggagcgtcctgcggatgattttcaaggtgctgcaggcgaggggagcgtcccatcgtaaaatcaatcaagtcagaacctgccgattattcttttccacacttgatctggcgtgggcggcatccagagttggggcagttgaggagcacatccagatccagagcgagagacatctgatggcctcctcattcatggcgccagcgcttacagtaatagcagtgatggatgggtagtgtctgattgcacaggaactgactgcacactgatggctccagtcagcaggcttgggggacggttctgtggcgctctcaagtctccagctacttgtgctttgtgccatctcccgttccatttttcagatcagaccaatgaattgggtggggcattgctgcctacgtccaaagcttcagtgctccaccaccggccattacttgtgttttagattactccaaaactcgaccactccgctatttttttccctcccttttcccccattgtttttttagcattcctgagctatatttttttttgtagacctgtagaccatcatgctatttttgaatgaagaatctattggaggaaatttgatcggctttgccccctcaccatcaccacagctctggccgccgcttgtcaacactactgttccatcgcttgccatcatcgtactcctagtcctactagatattacgaactcgactgcgacagctctatcgctgtcataaacggccgtagcctgctcgttgaaagtgtcatcatagcgataggccctaccaatgatttgctctggtagtggtcgtccttgttccatgtagtagagcctcacgagtcatgacatcaaactgtccctgatggccgtctgcttttttatatatataattctgctgcttttgcaggatcctggagggggtcgtcatggcagcccaacaccagccggcaccaactgggctgatatgctgagaaaggatcctgttgagctgagagcgccaccttcttccatccgcgtgctagccactcgcgtcgcgcgccggaaccaaaccctagtagctagccagccgtcccgaatagttaaacacggatgcggttgtctctttgtcatggacgaacgcattcttttataccactagtcctctgctgtggctgtggctgagaggctggcaagcatgtggtctgtttcctgggggtcactgactcactgagccccgcatttgttatctccaggatccagttcgatctgcccggtttatagtttcttt

SEQ ID NO: 123943 - DNA, 2805 bp, Zea Mays
cccaggcagtcctccgagcagtgctagtccaccttgctagctcgcccgctcgtcgcgctccctcgatcagatctaatcattatttaatcctttttttttccagtctcacatgagcactccccactcgtcctccacctcctccgtcccaccacaccgcgcctcccctccccagatcccccaatccctaaccctagcacccacggcgtcctccgcctcgccctcctcctcctccgcgtccggtatgcgggacgcggcggaggacgactccgactcgccgccgtcgcagatgtcggaggacgaccccggcggagggggcggggaccggtgggagccggatctgcggggcggcaacggcggcggcggcggcggcgggaggtgggctccgccggaccaggtgctggagaacgtgctcgagaccgtgctcgagttcctcaccgccgcgcgggaccgcaacgccgcctcgctcgtctgccgctcctggtaccgcgccgaggcgcagacgcgccgcgagctcttcatcggcaactgctacgccgtctcgccgcgccgcgccgtcgagcgcttcggcggcctgcgcgccgtcgtgctcaagggcaagccccgcttcgcggacttcagcctcgtgccctacggctggggcgcctacgtctccccctgggtggccgcgctcggccccgcctacccgcggctccagcgcatctgcctcaagcggatggccgtatccgacgacgacctcgcgctcgtcgccagctccttccccttcctcagggacctctcgctcgtgtgctgcgatggcttcagcacgctcggtctcgccgtcatcgccgagcgctgccggcatcttcgtgtgctggatctgatcgaagattacgtagaggacgacgatgaggagctggtggattggatctccaagttcccagagtccaacacctctctggagtcgcttgtcttcgattgtgtcagctgcccgttcaactttgaggccctggaggcacttgttgcacgctcaccggctttgcgacggctgcgtgtgaaccaccatgtttcagtagagcagctgcgtcgtctcatggcaagagcaccccagcttacgcactttggaactggtgcattccgatctgagggtgcccctggtggggggttggctgtgactgagctcgctacatcttttgctgcatccaggtctctggtttgtctatcaggtttccgggaggttgacccagaatacctcccggcgatctaccctgtctgtgccaacctcacgtcactaaacttcagctttgcaagcctaaccgctgcggaactgaagccagctattcgcaactgcacgaatcttcgcactttctgggtccttgatactgtgggtgatgaaggccttcgtgctgtggctgatgcatgctctgatctccgtgagctgagagtttttcctttggatgcctctgaagattccgagggttcggtctcagacgttggtcttcaggcaatctcagaaggctgccggaagctggaatcaatcctctacttttgccagaggatgacaaatgcagcagtaattgatatgtcgaagaactgtcctgagctcgtagtgttccgcctctgcattatgggccgccaccgacccgatcgggacactggggagcccatggacgaaggtttcggtgcaatcgtgatgaactgcaagaaactcaccaggctttcggtctccggcctgctcaccgataaggcctttgcgtacatcggaaaacacgggaagctaataaagaccctctccgtcgccttcgctgggaacagtgacatggccctccagtatgtattcgaggggtgcaccaagctgcagaagcttgaggtcagagatagccctttcagtgacaggggtttgctctcaggactggactacttgtacaacatgaggttcttgtggatgaactcgtgcaggctgacgatgaggggctgtagaggtgtagctcagcagatgcagaatctggtggtcgaagtaatcaaggaccactccgaagatgaaggggaggctgagaccgttgacaagctgtacttgtatcggtcactggcagggccaaggaatgatgctccgccgttcgtcaccctcttgtagtgctgctgccgccaccggaagaacacagccctgctgtacccacgaacatgtttgttgtattgttaacttaccaagttttcagagcaagcgaggggagcgtcctgcggatgattttcaaggtgctgcaggcgaggggagcgtcccatcgtaaaatcaatcaagtcagaacctgccgattattcttttccacacttgatctggcgtgggcggcatccagagttggggcagttgaggagcacatccagatccagagcgagagacatctgatggcctcctcattcatggcgccagcgcttacagtaatagcagtgatggatgggtagtgtctgattgcacaggaactgactgcacactgatggctccagtcagcaggcttgggggacggttctgtggcgctctcaagtctccagctacttgtgctttgtgccatctcccgttccatttttcagatcagaccaatgaattgggtggggcattgctgcctacgtccaaagcttcagtgctccaccaccggccattacttgtgttttagattactccaaaactcgaccactccgctatttttttccctcccttttcccccattgtttttttagcattcctgagctatatttttttttgtagacctgtagaccatcatgctatttttgaatgaagaatctattggaggaaatttgatcggctttgccccctca

SEQ ID NO: 123944 - DNA, 1757 bp, Zea Mays
gatacccgccgagcgccgcgggatcctgacctttttggatcaaatgcaacccccctctatatagcacactgcatgctgcgcagtcaggccagtcaacccgccctcgcctctgccgtctgccgtctgcaccgccgcctgccgcgccgcgcacaaaaaggatgcacatgcctcgccacggccacacgctgctcgccgcgctgctcgcgtccgcgctcgcagcagccagcgcgcagccgagctacgatgacaacggccaggtgcacgtcagcacggccatgatcgcgctcctggccgccgtcatcgccgtgttcgtcttcatcgccttcttcaccgtctacctccgccactgcaccggcagctacgcggccaggccggacgactacgaccaccgcgccatgcccaacttcgacgccttcatctcgcggtcgcggaggcagcggcggccgcgcggcctcgacgccgacgtggtcgaggccttccccaccatgaagtacgccgaggccaaggcgctgcgggtcggcaagggctgcagcgcgctcgagtgcgcggtgtgcctcagcgagttcgaggacgaggagcgcctcaggctcttgcccaggtgcagccacgcattccacccggactgcatcggcgagtggctcgccagccacgtgacctgccccgtctgccgccgcaacctcgacccttacaaggataccagcagcgacgaagaccccgctagcttcgtcccgccgattccagtggccagcagcatctccagcgagactactgcggtgttagggcagggacgaccgctaccggtcgccgtggtgatcgatgtcatcacccagcaggaggaagaggcgcggaggcaggaggcactggagctgcagcagatagggacccagcggcgagccatgcggcggtcgcggtcggggcgcaagccggttccgacgcagctcgcccggtcgcactctacgggccactccctcgccgtccggctggaccgcgacctggagcgcttcacgctgcggctgccggagcacgtgcgtagggagatggtcgccgccgcgggcgagcacagccacagcatgcagttgcgtcgcgggcgaagagccggggaaggaagcagccgcggcggacgaagcgccccgctcggccggacgcccagatggcagttgcttctcgcgaggacgctctccgggaagctgtccttcttttcggcgtccagggtaacggtaagctccgaactgggagaagtgtcgtcctggtcctcgatcacgagggcgagagggaaccgcgtggccgccgttgaagccgacgacgttcctgctaaggggatcggcggcgggtctggcgctgcgtcccgcgaggtggcggcagcggcggacgaggagaagaagaaggcagctacgcagcaggttcgcacgtagaatgggaacagcagatttcaacgtagaaacttgaaagtgatcttctttcacacgcgaaagaaatgggcttttggggtctgtgggcaacagatttcgtgcttggatcaacgtgccactcttgtccaaatttgattgaagttgagaacacgagatgtacaaatgctatttataattttgcgcgggagcagaaacgtagtatgcaggtagagattcgtttgactttaatccgtatcggattctactgtttctacagcgttttatatctattagattctattgtttctacagtgtttactttgtagccctgatcctttctgttggtatgcattttataccaaatttgtc

SEQ ID NO: 123945 - DNA, 447 bp, Zea Mays
gaggaagacgaggctgagaaccagcgtctttgtctgttcattaattcttcgataccttcttacaatactagagagagcttataaactaccgaccagtccgaccaaatacacgacccattcgggcccaaatactcatgtgttgcctcgcctctaccgcttcgttggtgtgacaccgtcagtattgttggtcagcttttccatcttcagtgctccatcttcagtgctggtgagcttctgacgtctttcttgtattgttgctaacagtgcttctccgacggcacgtcggccgtgaacttggcgccctcgggcaggcaggccctccatgacgggcgggagtctggctacgttcctctgcatggagaggaaggtgacggcgcggccacctcgccgccaggcgcttggcaaactccatgagggcttgttcggttaggggtggattgaggggat

SEQ ID NO: 123946 - DNA, 887 bp, Zea Mays
gctgctgggtttttacacgagaagtggcggtagcgtttctggtcccgtcgtcggcgagctagttgcggttcggtttccgcatggtgatgtgcaaggcggagggcgcgcggtgccggcggcaccggcagcagggggcgggcgtctgcgcgtgctgcctgcgggagcgcctgtcccacctgtcgctgccgccgtccgtcgtgcgcggctgcggcgaggaggagggatacaggcacagcagataccacgaggaggaggcatcgtcctcatgctccgaggtgtccacggcctactcctcggagggctccagcgtggcgtcggcgtcggagtgcgccagcccggcgcccggtgagccgaggttccacgacgaggtgaggcgcgcggcgcgggtgtcgttgctgatgcggcacgagcgggtcgtcggggacgccgacgccgtggcggcgttcctcctggcgaggaggaggaggaggacggcggccacgagcttctgggccaagctgctgcacgcggcgcgggcaggaggagggaagaaggatcgagggtgctcgctggccgcgcccggcaccaagacgctcgaggagagggccgccgcggccaagtgggtcctcttctgatcgggacatcctagttgccgcatctgccatgcatgcagatgcaggcaggccgccgctcctcgctgcgttgttctggttccgtcgatcggtcgatggcttcatttctagtcttctgcgaacatttttttctttgggttcttttggtgcattttgttggtggctttcgcctaggtgtcaaagtggcatgcagctaggctatcgaaaaatccatatgttttgtgcagatctaaagctaagaacttgtgcttcttgatccgttgatcgatattcttt

SEQ ID NO: 123947 - DNA, 937 bp, Zea Mays
attgcccaccataccaaccccgcgttgcggttatatagggccgtatttcccccgcgtctccgcgtcagtggaagcgatcgacaccattcaagctaaagctgctttcttgggaaacgcttgatcgcaacagctcgatcaatggcttcttcctggggttctcggttgccgctcgcagtagtgctgctgctcgtggcctgcttctcctccacggcagccgccacaagctacaccgtcggcgacgggtccggctggacaaccggcgtcgactacacatcttgggccgcctccaaaaacttcaaagtcggggacaatctcgtgttcaactacgcgaaagggctgcacacggtggtggaggtgagcgcggccgagtacatggcgtgcacggccgccaacccgctgggctccgacagcagcggcgcgaccaccgtggccctcaggacgccaggcacccactacttcgtgtgcagcatcacggggcactgcggcgccgggatgaagctggcggtgaccgtcggcggctccaactcccctgctgccacgccgcggacgtcgtccccgacccctaccacgccgtacacgacgccggccaccaccacgccgtacacgacgccgacgtgctctggcggcggcggcaccacggcgaccccgggcatgactccgttcacgtcataccccagcgcggccggccttgggtcggcggcgttggctggatttagtctggtttggtgtgtgggcgtccggctagcgctgctctaggcaaagggcggccatggaccgtggtcgaccagggtatgtaacagtgtaacgtatgtgtttgttctttggtccggatcgagctagctggggtatagtatacttgccaagctggtgactggtgtctcgactccactctaaatcgccgtgcaaccaaaccgtgcaaatcactttccttgaacca

SEQ ID NO: 123948 - DNA, 2033 bp, Zea Mays
gtggctccagagcggatatgtgtcgtttgcctccactgaccgccccggcgccccgccctcgcgttccagggtccatgccccccgtggcagaccgggtcgttgtctccattgctcatccatgttattccacaacccctttttaaagggccacttcgtcactcctcttcctcctcctcctcctcctcctcctccatgtccacggccatcgtggcgagggcaaccaagctgagcgctactcgcagtcgcagttgttgcctgcccagcatgcagctctaactcaccccgtgcagcagacgccgagtcgtggcaggtagctaggaaggagggcaggagggaagggcaggccatggcgctggaagcggtggtgttcccgaaggagcacctagcgggcactgccaaggcgcgctcggcgtcgtcactggcctgcggcttccgcaccgaggaggtcgaggacaacggcggtgtggttctgcaaggagaggccagcgatgcgcccggtgccggcgcggccaccacgtgggagtgctgggacgcggcgctctgcccgtgctccactccacctgctggtgccgtggaggagtgctgggacgacgtgcggcaccggctctccgcgtcccctccgctgccgccggcgccctccgccgccgtcgcagcgccatcgtccgggcacggcaaggcagctgccgcggcgcggcggagacggcggcaacgcccgaaggcggtgaagaacacggaggaggtggagagccagcggcgcaaccacattgccgtggagcgcaaccggcggcggcagatgaacgagtacctctccgtgctccgctccgccttgccgccctcctacccgcagcgggtacgtacgcacgcacacgatctcctccatggctgccgctccccggcagtatcctagccgcaagagctttgcaggtcatgtcaccaatgccatgcatgtgcacgaacggcttggcattccaccgtgctgctgattgccgctgccggccccgcccagcttttactgtaacggatgtcaaatcttgctgcccccctccctctggcccctggccatccgctggagctgcctcgccgcgctttggtggcacatgtcacggaatctctagggatcgtgtgtactgcactgcaggcatcatcatcgttcatcaaaagccgcgcaccttcttgagcgccgagcccttggtcgcgaccgaccgaatggcatgttccctttgcaacggtgaccaggcgtcgatcgtggccggtgccatcaacttcgtcaaggagctggagcacctgctgcagtcgctggaggcgcagaagcggcggcgccaggggtgcaccgagccaccggcgccggcgccgttcgccggcttgttcacgttccctcagtactccaccgccgcgacgggtgtcgtcgctggctctggtgacggtgctggctccggcggcggcgcctgcgcggcgggggcgcggcggggcgtggccgacatcgaggtggccgtggcggagagccacgcgagcgtgaaggtggtcacgccgcggcggcccaggcagctgctgaggatggtggtggcgctgcagtgcctcggcctcaccgtgctccacctcaacgtgaccaccaccgccgaccagctggtcttgtactctctcagcctcaagatggaggaccagtgccggctgtcgtcggtcgacgacatcgccgccgcggtgaacgacatactcggcaagatctccgacgagcgcgccagccgtcacctactagccgcgtagcgtagcggcaagtctgttttagcaggtgtcatgtattgttgttgcaacaccaccaattcgatcctaatattggaaaacgcactggcaagtcgcaattggcgccactgtcacgcggtgctaccacgcgctccatacgtcgtttgcgtgcaattaaacatgtatcggttggaccagctcagtctcttgcaattaaacatgttttagtagtactgtattattcgtgtgtatctacccagaattcagattcattcgcatctattcccgcgtcagcg

SEQ ID NO: 123949 - DNA, 2015 bp, Zea Mays
gtggctccagagcggatatgtgtcgtttgcctccactgaccgccccggcgccccgccctcgcgttccagggtccatgccccccgtggcagaccgggtcgttgtctccattgctcatccatgttattccacaacccctttttaaagggccacttcgtcactcctcttcctcctcctcctcctcctcctcctccatgtccacggccatcgtggcgagggcaaccaagctgagcgctactcgcagtcgcagttgttgcctgcccagcatgcagctctaactcaccccgtgcagcagacgccgagtcgtggcaggtagctaggaaggagggcaggagggaagggcaggccatggcgctggaagcggtggtgttcccgaaggagcacctagcgggcactgccaaggcgcgctcggcgtcgtcactggcctgcggcttccgcaccgaggaggtcgaggacaacggcggtgtggttctgcaaggagaggccagcgatgcgcccggtgccggcgcggccaccacgtgggagtgctgggacgcggcgctctgcccgtgctccactccacctgctggtgccgtggaggagtgctgggacgacgtgcggcaccggctctccgcgtcccctccgctgccgccggcgccctccgccgccgtcgcagcgccatcgtccgggcacggcaaggcagctgccgcggcgcggcggagacggcggcaacgcccgaaggcggtgaagaacacggaggaggtggagagccagcggcgcaaccacattgccgtggagcgcaaccggcggcggcagatgaacgagtacctctccgtgctccgctccgccttgccgccctcctacccgcagcgggtacgtacgcacgcacacgatctcctccatggctgccgctccccggcagtatcctagccgcaagagctttgcaggtcatgtcaccaatgccatgcatgtgcacgaacggcttggcattccaccgtgctgctgattgccgctgccggccccgcccagcttttactgtaacggatgtcaaatcttgctgcccccctccctctggcccctggccatccgctggagctgcctcgccgcgctttggtggcacatgtcacggaatctctagggatcgtgtgtactgcactgcaggcatcatcatcgttcatcaaaagccgcgcaccttcttgagcgccgagcccttggtcgcgaccgaccgaatgggtgaccaggcgtcgatcgtggccggtgccatcaacttcgtcaaggagctggagcacctgctgcagtcgctggaggcgcagaagcggcggcgccaggggtgcaccgagccaccggcgccggcgccgttcgccggcttgttcacgttccctcagtactccaccgccgcgacgggtgtcgtcgctggctctggtgacggtgctggctccggcggcggcgcctgcgcggcgggggcgcggcggggcgtggccgacatcgaggtggccgtggcggagagccacgcgagcgtgaaggtggtcacgccgcggcggcccaggcagctgctgaggatggtggtggcgctgcagtgcctcggcctcaccgtgctccacctcaacgtgaccaccaccgccgaccagctggtcttgtactctctcagcctcaagatggaggaccagtgccggctgtcgtcggtcgacgacatcgccgccgcggtgaacgacatactcggcaagatctccgacgagcgcgccagccgtcacctactagccgcgtagcgtagcggcaagtctgttttagcaggtgtcatgtattgttgttgcaacaccaccaattcgatcctaatattggaaaacgcactggcaagtcgcaattggcgccactgtcacgcggtgctaccacgcgctccatacgtcgtttgcgtgcaattaaacatgtatcggttggaccagctcagtctcttgcaattaaacatgttttagtagtactgtattattcgtgtgtatctacccagaattcagattcattcgcatctattcccgcgtcagcg

SEQ ID NO: 123950 - DNA, 1656 bp, Zea Mays
gtggctccagagcggatatgtgtcgtttgcctccactgaccgccccggcgccccgccctcgcgttccagggtccatgccccccgtggcagaccgggtcgttgtctccattgctcatccatgttattccacaacccctttttaaagggccacttcgtcactcctcttcctcctcctcctcctcctcctcctccatgtccacggccatcgtggcgagggcaaccaagctgagcgctactcgcagtcgcagttgttgcctgcccagcatgcagctctaactcaccccgtgcagcagacgccgagtcgtggcaggtagctaggaaggagggcaggagggaagggcaggccatggcgctggaagcggtggtgttcccgaaggagcacctagcgggcactgccaaggcgcgctcggcgtcgtcactggcctgcggcttccgcaccgaggaggtcgaggacaacggcggtgtggttctgcaaggagaggccagcgatgcgcccggtgccggcgcggccaccacgtgggagtgctgggacgcggcgctctgcccgtgctccactccacctgctggtgccgtggaggagtgctgggacgacgtgcggcaccggctctccgcgtcccctccgctgccgccggcgccctccgccgccgtcgcagcgccatcgtccgggcacggcaaggcagctgccgcggcgcggcggagacggcggcaacgcccgaaggcggtgaagaacacggaggaggtggagagccagcggcgcaaccacattgccgtggagcgcaaccggcggcggcagatgaacgagtacctctccgtgctccgctccgccttgccgccctcctacccgcagcggggtgaccaggcgtcgatcgtggccggtgccatcaacttcgtcaaggagctggagcacctgctgcagtcgctggaggcgcagaagcggcggcgccaggggtgcaccgagccaccggcgccggcgccgttcgccggcttgttcacgttccctcagtactccaccgccgcgacgggtgtcgtcgctggctctggtgacggtgctggctccggcggcggcgcctgcgcggcgggggcgcggcggggcgtggccgacatcgaggtggccgtggcggagagccacgcgagcgtgaaggtggtcacgccgcggcggcccaggcagctgctgaggatggtggtggcgctgcagtgcctcggcctcaccgtgctccacctcaacgtgaccaccaccgccgaccagctggtcttgtactctctcagcctcaagatggaggaccagtgccggctgtcgtcggtcgacgacatcgccgccgcggtgaacgacatactcggcaagatctccgacgagcgcgccagccgtcacctactagccgcgtagcgtagcggcaagtctgttttagcaggtgtcatgtattgttgttgcaacaccaccaattcgatcctaatattggaaaacgcactggcaagtcgcaattggcgccactgtcacgcggtgctaccacgcgctccatacgtcgtttgcgtgcaattaaacatgtatcggttggaccagctcagtctcttgcaattaaacatgttttagtagtactgtattattcgtgtgtatctacccagaattcagattcattcgcatctattcccgcgtcagcg

SEQ ID NO: 123951 - DNA, 1721 bp, Zea Mays
gattacatcctcttcatactgaaccgatatttggggaggctgttttatgtagtcctgtgtcgactaggtacacgaaacatgtcaacgtactctgaaaactgaattggatcagcacagcagttaaactaaggggcctttgagaagaggtttatttggaccaattatgtttttggaataaaatatttgatggatactccctccatcctagaatataaggacttcaaatttttggacaaattaagcagcaatgaagaagtctatgtgcccccttcttaaatagccaggccaactcctgttggtttaatttctggccatcttgggttaatccatggcacaaaatggctgattttaagaagattgcacagatgagttctcagaagtccttatgttctaggacggaggagtatgttttagtctagggatagtttagtgggtgagatgagtgatggactgatatctttcctttggtcatttgcagctgaaatttaccttatttttgttacttggtatctactggtttctatttccatttggctactgtgttgcaggttggaaacacagtggagatgaaagtaggggcagcttcttccagaaatgatgggagagctggccagttgaaatatgcaaacagcagggagactatcgccagcaaatacacttctattagggaacagaaccggcagtcagggaaggcagtgaaaaaggaaatttcatcaaactctgtatctttgcttgaagaaagaagttctgagcagtggtccaatactggtataccaccaactggtgtgtctgcaacatgggcctcgatgaagataggttttcaaaatttcaaagccaatttgggttcgaagaagtttcttcctttgcgccaggatccaggatttgttctaaatttgagtgtctcttcacctgaatctcttgatgacatattccaaaggttgaaacgacggcctgcaaatgtgcttgtggattaccttgatgacgatgacaacaacaacacacgagatatggatgtgcatttccaggatcaatgaaataggttgtgatattcttttaggttcagaatatgcatgcacagaaaaactaaaaggattggtatagcattagacgctcaaagaagatatagaggatgtatagatctgatgatggtttggtgtgattcctggaatctcaagacgcctgccatctgaaaaaacttcaaaatggaagtaagatatgatgacaagctgactgcctttgcagaaaggcttgagatttccccaccaagaaggtttgggacttctacttcactatatggggaaaatatcctatgcaatcacttatcctggtgcaaacatgcaatcaagcgatctgatgcatctgatctagatctaattatgactgttattttatatttaaccccttccacctaaaacatagtacctattttacttttaactccttccatgaaaccgttggatctagattggatgctctcgatagtttgattgcacgcttgtaccaaaatgagtgattgcacaggatatgtcctccactatatgcaggtaacattgttgacttgttgattatcttaccttttttgaatctgtattggagatgctgatctgtgatcgaagccaaaggatgtaaatgtgtacctaggattccatgtgaaggttaacgtgcctgagttgtaacctgtaaaaacgtactatcaaatatatacctaatcgggacaaaaa

SEQ ID NO: 123952 - DNA, 2656 bp, Zea Mays
atcgtcaccttcctcttccttcttcggttcttcgccagccgtgcgcgcttctccactgccctggagacaaaggagcaccccgcgatctcccggcgggacccggccccacctccccgcccgcgtgcctctgaaacggagaagctgccggttcccagccggccaggctactccgactcttcctttccctccagccggcgaggcgtccaagcggattagcggagagcgtcggggcggcgacatgtgggtgttctacctgatatcgctgcctctgacgctgggcatggtcgtcgtcacgctccgctacttcgccggccctgccgtgccgcgctacgttgtcgccaccgtaggatacgcatggttctgctccctctccatcatcatcctcgtccccgccgacatctggcagacattaactgccagtgcgaaggggggcattggattcttttggagctggtcctattggagcacatttatcctaacatgggctgtagttcctactatccagggctatgaagacgcaggagatttcactgttaaagaaaggctgaaaactagcattcatatgaacctgcttttttattcaattgtgggagccattggccttattggtgtcatattactcttaatcatgcatagagcttgggatggtggtattgtgggatttgcaatggcatgctcaaatacctttggattggtgactggtgcttttcttcttggttttgggttaagcgaaattccaagaaacatttggaaaaatgcatactggtctcaccgccaaaaagtactttctcatagagttgccaaaatggctgtaaagcttgataatgcccatcaagaatattcaaatgcaattgttgttgctcaagctacatcaaatcaaatgtcaaaacgtgacattttgaggccttacatggatattattgataacatgctgtctcaaatgctgcgggaggatccatccttcaaaccttctggtggtagattcggtgaaaatgatatggactatgatacagatgataaatcgatggccacacttcgacgccaactcaggagggcccatgaggagtactataggggcaaaagtgagtatatgacttgtgtcatggaagccctcaaactagaagacaccataaaaaattatgaacgccgtgatgctagcggatggaaatatgtatcaagttttagagacagacgttcgggcacacttggaccaattttggatactattgagttcatttggcaatgtatactgagaaagcagcttcaaaaagcatttgctgttatccttggttgcatgtcagctgctatcttgttggctgaagctactttacttccaagtgttgatctatctctcttttctattcttataaaagttgtaggaaaacaagaggttttagttcaggttgctgcttttgtacccttgatgtatatgttcatttgcacatattattcattattcaagattggtatgttgatgttctattccctgactccaagacaaaccagctctgtcagcttgcttatgatctgttcaatggttgcaagatatgcacctcctatctcttataactttctgaatctcatccgccttggtggcaatgctaaaactacatttgagaagagaatggggaacattgatgatgcagttcctttctttggcagaggcttcaacaagatctacccactgattatggttgtttatacgctattggttgctagtaatttctttggccgtgtgattgactttttgggaagctggaaaaggttcaagttacaacaggaagaagagaatatagatggtttagatccctctggaatgattattgtacaaaaagagagatcttggatcgaacaagggtgcaaagtgggtgagcatgttattccattggcaaggaatttcaatggcgtgaacacagatattgaatcacaaaatgtgccattggttggaaacacagtggagatgaaagtaggggcagcttcttccagaaatgatgggagagctggccagttgaaatatgcaaacagcagggagactatcgccagcaaatacacttctattagggaacagaaccggcagtcagggaaggcagtgaaaaaggaaatttcatcaaactctgtatctttgcttgaagaaagaagttctgagcagtggtccaatactggtataccaccaactggtgtgtctgcaacatgggcctcgatgaagataggttttcaaaatttcaaagccaatttgggttcgaagaagtttcttcctttgcgccaggatccaggatttgttctaaatttgagtgtctcttcacctgaatctcttgatgacatattccaaaggttgaaacgacggcctgcaaatgtgcttgtggattaccttgatgacgatgacaacaacaacacacgagatatggatgtgcatttccaggatcaatgaaataggttgtgatattcttttaggttcagaatatgcatgcacagaaaaactaaaaggattggtatagcattagacgctcaaagaagatatagaggatgtatagatctgatgatggtttggtgtgattcctggaatctcaagacgcctgccatctgaaaaaacttcaaaatggaagtaagatatgatgacaagctgactgcctttgcagaaaggcttgagatttcccca

SEQ ID NO: 123953 - DNA, 2237 bp, Zea Mays
atcgtcaccttcctcttccttcttcggttcttcgccagccgtgcgcgcttctccactgccctggagacaaaggagcaccccgcgatctcccggcgggacccggccccacctccccgcccgcgtgcctctgaaacggagaagctgccggttcccagccggccaggctactccgactcttcctttccctccagccggcgaggcgtccaagcggattagcggagagcgtcggggcggcgacatgtgggtgttctacctgatatcgctgcctctgacgctgggcatggtcgtcgtcacgctccgctacttcgccggccctgccgtgccgcgctacgttgtcgccaccgtaggatacgcatggttctgctccctctccatcatcatcctcgtccccgccgacatctggcagacattaactgccagtgcgaaggggggcattggattcttttggagctggtcctattggagcacatttatcctaacatgggctgtagttcctactatccagggctatgaagacgcaggagatttcactgttaaagaaaggctgaaaactagcattcatatgaacctgcttttttattcaattgtgggagccattggccttattggtgtcatattactcttaatcatgcatagagcttgggatggtggtattgtgggatttgcaatggcatgctcaaatacctttggattggtgactggtgcttttcttcttggttttgggttaagcgaaattccaagaaacatttggaaaaatgcatactggtctcaccgccaaaaagtactttctcatagagttgccaaaatggctgtaaagcttgataatgcccatcaagaatattcaaatgcaattgttgttgctcaagctacatcaaatcaaatgtcaaaacgtgacattttgaggccttacatggatattattgataacatgctgtctcaaatgctgcgggaggatccatccttcaaaccttctggtggtagattcggtgaaaatgatatggactatgatacagatgataaatcgatggccacacttcgacgccaactcaggagggcccatgaggagtactataggggcaaaagtgagtatatgacttgtgtcatggaagccctcaaactagaagacaccataaaaaattatgaacgccgtgatgctagcggatggtgagtttattgattttatatttgcaatgtaatctcgttgctttaaaaatcttgtgtgcgagtagcatttcagtcttataggaatgttattttgtcccattcaattatattagtattgtttttttaaacaggaaatatgtatcaagttttagagacagacgttcgggcacacttggaccaattttggatactattgagttcatttggcaatgtatactgagaaagcagcttcaaaaagcatttgctgttatccttggttgcatgtcagctgctatcttgttggctgaagctactttacttccaagtgttgatctatctctcttttctattcttataaaagttgtaggaaaacaagaggttttagttcaggttgctgcttttgtacccttgatgtatatgttcatttgcacatattattcattattcaagattggtatgttgatgttctattccctgactccaagacaaaccagctctgtcagcttgcttatgatctgttcaatggttgcaagatatgcacctcctatctcttataactttctgaatctcatccgccttggtggcaatgctaaaactacatttgagaagagaatggggaacattgatgatgcagttcctttctttggcagaggcttcaacaagatctacccactgattatggttgtttatacgctattggttgctagtaatttctttggccgtgtgattgactttttgggaagctggaaaaggttcaagttacaacaggaagaagagaatatagatggtttagatccctctggaatgattattgtacaaaaagagagatcttggatcgaacaagggtgcaaagtgggtgagcatgttattccattggcaaggaatttcaatggcgtgaacacagatattgaatcacaaaatgtgccattgagaatttctgaaaattgcatgcatgatcttttttacccactggttatggaaggtccaaatgataacccttgcccttgccccaaaatcctgtcctgtgtcgactaggtgcgcgaaccatgtcaacatactctgaaaactgaattggatcagcacatcagttaaac

SEQ ID NO: 123954 - DNA, 545 bp, Zea Mays
atcgtcaccttcctcttccttcttcggttcttcgccagccgtgcgcgcttctccactgccctggagacaaaggagcaccccgcgatctcccggcgggacccggccccacctccccgcccgcgtgcctctgaaacggagaagctgccggttcccagccggccaggctactccgactcttcctttccctccagccggcgaggcgtccaagcggattagcggagagcgtcggggcggcgacatgtgggtgttctacctgatatcgctgcctctgacgctgggcatggtcgtcgtcacgctccgctacttcgccggccctgccgtgccgcgctacgttgtcgccaccgtaggatacgcatggttctgctccctctccatcatcatcctcgtccccgccgacatctggcagacattaactgccagtgcgaaggggggcattggattcttttggagctggtcctattggagcacatttatcctaacatggtatgctatgaacatgtattgcataagttccgcccgatggttgaatttccctgttcttagtg

SEQ ID NO: 123955 - DNA, 1139 bp, Zea Mays
cgcaggatcttcgtgaaccttctgaattcttccccaagccgtgccccgccgcgccgctgtataaagctcgggccacttcctacggtattctcaccgcaaggatccaccacaacagcgaaggagaaagcagaccaacctagccacccagggagaaagaggccaaaagggaggggagagtgtcgtcatggcttccattgtcgcttccaggagggccgttcctctagttcgcgctctggagaagctcatcgcagcgtcctccgctcccgggactggctccgccctcaggccggtggcagtcgccggcggcctccgcggctacaacaccggcgctccgctccgacgctacgagggggccgagtcggaagacgatagcgtccgcgagtacgatgggcggcacggcggccgggactacgctgtgcccagcctgttctcaggtaatattttccgtgatccgcttagtgcgccgcacagcattggccgcctgctgaaccttgtggacgacttggcggtggcggcgccaggtcgtgcggtgcgccgtggctggaacgcgaaggaggacgaggaggcgctgcacctgagggtggacatgccaggcctggggaaggagcacgtcaaggtgtgggcggagcagaacagcctggtgatcaagggcgagggcgagaaggaggatagcgaggacgaggccgccccgcctccgagatacagcggtcgcatcgagctcgcgccagaggtttacaggatggacaagatcaaggcggagatgaagaacggcgtgctcaaggtggtcgtgccgaaggtgaaggagcagcagcgcaaggacgtgttccaagtcaacgtcgagtagatgtttccaaatagaagcaagtgccggtacgggatggaggattggaggggcactgccaaactaggattcctctctctcaatctgatctggattctggaatcagatttctcttctttcatttttctcgtctatcttctatcagtatgaaataagcaacgtcgcttcagttttcgtgtcaaggccggtggagtcgcctatgtttattttattttctttgtatttcctacctggacacacgttctctatgccgtgtttggtttccgcagatttttaaaatatgcatgttcaaacccaa

SEQ ID NO: 123956 - DNA, 1136 bp, Zea Mays
cgcaggatcttcgtgaaccttctgaattcttccccaagccgtgccccgccgcgccgctgtataaagctcgggccacttcctacggtattctcaccgcaaggatccaccacaacagcgaaggagaaagcagaccaacctagccacccagggagaaagaggccaaaagggaggggagagtgtcgtcatggcttccattgtcgcttccaggagggccgttcctctagttcgcgctctggagaagctcatcgcagcgtcctccgctcccgggactggctccgccctcaggccggtggcagtcgccggcggcctccgcggctacaacaccggcgctccgctccgacgctacgagggggccgagtcggaagacgatagcgtccgcgagtacgatgggcggcacggcggccgggactacgctgtgcccagcctgttctcagatattttccgtgatccgcttagtgcgccgcacagcattggccgcctgctgaaccttgtggacgacttggcggtggcggcgccaggtcgtgcggtgcgccgtggctggaacgcgaaggaggacgaggaggcgctgcacctgagggtggacatgccaggcctggggaaggagcacgtcaaggtgtgggcggagcagaacagcctggtgatcaagggcgagggcgagaaggaggatagcgaggacgaggccgccccgcctccgagatacagcggtcgcatcgagctcgcgccagaggtttacaggatggacaagatcaaggcggagatgaagaacggcgtgctcaaggtggtcgtgccgaaggtgaaggagcagcagcgcaaggacgtgttccaagtcaacgtcgagtagatgtttccaaatagaagcaagtgccggtacgggatggaggattggaggggcactgccaaactaggattcctctctctcaatctgatctggattctggaatcagatttctcttctttcatttttctcgtctatcttctatcagtatgaaataagcaacgtcgcttcagttttcgtgtcaaggccggtggagtcgcctatgtttattttattttctttgtatttcctacctggacacacgttctctatgccgtgtttggtttccgcagatttttaaaatatgcatgttcaaacccaa

SEQ ID NO: 123957 - DNA, 1186 bp, Zea Mays
agctcgggccacttcctacggtattctcaccgcaaggatccaccacaacagcgaaggagaaagcagaccaacctagccacccagggagaaagaggccaaaagggaggggagagtgtcgtcatggcttccattgtcgcttccaggagggccgttcctctagttcgcgctctggagaagctcatcgcagcgtcctccgctcccgggactggctccgccctcaggccggtggcagtcgccggcggcctccgcggctacaacaccggcgctccgctccgacgctacgagggggccgagtcggaagacgatagcgtccgcgagtacgatgggcggcacggcggccgggactacgctgtgcccagcctgttctcaggtagtcgtcatcttcgcttcatgccagacccatttgctttgctctctcaactctcaaatgagatggtggtgagactacatcgcttcgaaatggctgtgctgagtgctgacttcgtcttgttggtccctgtccagatattttccgtgatccgcttagtgcgccgcacagcattggccgcctgctgaaccttgtggacgacttggcggtggcggcgccaggtcgtgcggtgcgccgtggctggaacgcgaaggaggacgaggaggcgctgcacctgagggtggacatgccaggcctggggaaggagcacgtcaaggtgtgggcggagcagaacagcctggtgatcaagggcgagggcgagaaggaggatagcgaggacgaggccgccccgcctccgagatacagcggtcgcatcgagctcgcgccagaggtttacaggatggacaagatcaaggcggagatgaagaacggcgtgctcaaggtggtcgtgccgaaggtgaaggagcagcagcgcaaggacgtgttccaagtcaacgtcgagtagatgtttccaaatagaagcaagtgccggtacgggatggaggattggaggggcactgccaaactaggattcctctctctcaatctgatctggattctggaatcagatttctcttctttcatttttctcgtctatcttctatcagtatgaaataagcaacgtcgcttcagttttcgtgtcaaggccggtggagtcgcctatgtttattttattttctttgtatttcctacctggacacacgttctctatgccgtgtttggtttccgcagatttttaaa

SEQ ID NO: 123958 - DNA, 261 bp, Zea Mays
atgccgagctgctgcagttgctcgccgtgctgctgtcgcacaacgacgtcgctggagctcgtcgttgtgttgaacctcaccgctatcgcctgttctactggagttcgcgccacgacgccgatgtatccccggcgcctattgctaaacgttcgtcgacaacagagttctctagcttctctgttccacgacaccgcgcagcaactaccattattcatcgtcgaacctgctgcgccaaagccctctctactcaatccaaagtag

SEQ ID NO: 123959 - DNA, 1392 bp, Zea Mays
cgtcgccagcgcgccaccatgaacattgacttctagcacctgcttgacgaaatgtccaagcgcttcggcggctaggatgcgaagttgacacaacgcctctccgactatgacgtcaagcagcagcagcgccttctagatcgtgatctggaactcgagcgtcgtatggcggatctcgatgcatggatggatggcaagttggcttcgctctccacggcctccacggccaatgagacgtgcttgtcgcagctcgagtcggctgtcatctccttcgatgattggcgtcctagcatggagggtttcgtcgatgacatccgtcttcacgtctccaagttgtccaagctctacgaacggtcggcagtggagcacccgaccatcatgactggtgtgctcgctctggctccctctccggtcgcgcgcccatctgctgctgcctccacggccgcccgacccgacgggcactacctgaatccatcaatccgggatgatggttgcggagttgtcacaactctcgatcatcacccgacaaagggtgtgtcatccccatctcacccccatgtgtttgcctctcctactttccatcgttcgagatccgagtttagggaacctgtgggtgggagtttggctggtttatctgatcatttacctaaaatgccgtttcctacgttcgatggggatcaacccaagttatggatccgtagatgtgaggattactttgatctgtatagtgttgatccaacgcggtgggtgagggtctcatctatgcatttcactactgctacatctcgctgggtgcaaactgttcagagccatcttagatcctgttcgtggtcagagttatgtggttgggttttggttcgatttggccgtgatcatcacgaattgttgatccgtcagttgttccacattcggcaaacttcatcggtgtctaagtacatcgatagtttctcctcccttgttgatcaattgacagcttaaggatctcacacagacccctttatttgaccatgcactttattgatggtttgcgagatgatattaataagtctgctgttttggttcaacatccatttcttgggaatctgcctgcgtgttggctcaattgcaggaggaggtgttagagtacgggaagaggccaccgacccggcgacctgatcccttctagatgacttggttagcaccaccagctcctcttccacttccaccacccccgtggaaaggagagaaacagacaactaagggcgaggaccgtcggggcactaactcaaagaatttggaggacaagtggtccaccctttgggcttatcggcgtgcaagggggctttgtattaagtgtgtagataaatggttcaactcaacgatgtgctgtttcggttcaactcaacgttgtgcagg

SEQ ID NO: 123960 - DNA, 2596 bp, Zea Mays
cccgcccgcttgtttccccattcccttcctccttccgcagcaagctccagcctcccaaagcccccactcccccaatagaccatgccggccgctgcgctctagccgaccgccgcccctcccttccccctcctcgccgccatgtccatcgccgccgtgtccgcggatgggctcctcgcgttggccgacgaggctgagcgccggtatgacttttccgccgcggccgcttgcctcgagtccgcgctgcgtccgccctacgccgcagctctcctcccactcaccgaagcccgcgcgcggctccgcctcgcttcgctcctcctcgcgccccgcgggtcctcccgcgtcccgcgcgccggcgctcccgccgccgccaagacgcacctcgagcgcgcgctgctcatcctctcccctctcccctccgcgccaccgcggctcaagctgttggcccactcccacctcgcgggcgcctatgctgtcctgggggcgatcgcgtcgcagaagcacgtgctccaccgcggcctcggcctcctggattcggcttccgcctcggggctcctccagcgcgagccagcgcttctatggacttgcaacttccaggcgcagctcgggtccgttttcaccaatgacggggacgccgcgtcagcgctgtccgcactgtccgtgggagcatccgccgccgccgagctcgggagcccccagctcgagctcttcttcgccgcctccgagctccacgtccacctcctctgctgggaggacagcgctgccgttgagaacgctgtcactcgtgcctcgctgctctgggacgcactcacagccgagcagatggagcactgggttggactcttcttctacacgcagctgctgcagactttctacctgctcaggatctgcgactacaaggctgcctcacagcacgtagagaggttggatacagctgtgaagagtgagatgcagagaggacgccaaattacggcgcttgctaatgatctcagcacactggagaggacactagggcagtctgggctgaaggagcgggagatgctggcattatcgcacaagcaaaggcagctcaagggtcagctgcgagcattgtgtggctatgactcattgaatgatgtgttggattatggggataagctgcttttggcaccaccgctgatgcatggggagtggctcccacggacggcggtgtttgtgctcgtagatctcatggttgttatggtaggtcgcccgaaagggatatttaaggagtgcgggaagagaataaattcaggactccggctcatccatgatgaacttgtgaagcttggcattgtggatggtgtgatggaggcagatttggaacactcaacaatatggacagcagggctgtacttgatccttttacttcagtttctggaaaacaaagttgctgtggaacttacaaggtcagaatttgttgaagcccaagaggctttagctcagatgaaaaactggtttactcgcttccccacaattcttcaaggttgcgaaagtatcattgaaaatttaaggggacaatatgcacattctgttggctgcttcgatgaagcagctttccactttcttgaagcaaaaaagctgacagagagtaaatcaatgcaatcgatgtgtgaaacctatgcagctgtgtcatatatttgtaagggtgatgcagagtcgtcttcacaggcactagaactggttggtcctgcctatagaacaatggactcatttgttggtgtgcgagagaaaacctgtatcatttttgtttatggactattacttatgagacagcataatccgcaggaagcacggaaccgccttgcaagtggtttgaaaatagcgcaccaacagttgggtaacatccagttagtttctcagtatttgacaatactgggcacattggcgcttcagctacatgacgcagcacaggctaaagagatcctgaagtcttcgttgaccttagctaagacgctatttgatattccaacccaaatctggatcttgtcagtatttacagagttatatcgtgaactggaagagaaggaaaatgaaatggagaactctgagtacgaaggaaagaaggaagacgatctgcagagaagactttctgaagcttattctcattcttttcaccatgagctggtggaaaaatcaagaatccagccgctgcacatgtcaagtaagcagccagagatggctgttccatcagctaatggtgatcttgacatcccagaatcagtggggctttccgctccccagccattcctcaaaagacttgttgaggccgagccgatgaggcgcagtaccaggaggcggcggtagtaatgaaactagtactgtaattaatagcgtagtgaatttgttggttaagtgttgttatgacttgtaacttttagcagtttaggtttttattttcttttgtttgttgtgttgattatgtgtatcttggtttagaatttatagatttggagaactgttggattgacaacattctgagtggtaaaataccaattattccactgtgttgggacggcgtgttacacctgcatctccaccatcagcacctgagggtcttcgttcggctcgcgtgcaaggg

SEQ ID NO: 123961 - DNA, 417 bp, Zea Mays
atggtagggattatacccgcgtggtggacgctgcttcatcccagggacattagtcctcttcggcgcaaccttaatctgtcgaccatgcaattccgattcattcaagttcagagcttcctggacagcttcttgttccagaaattcaacataagcaaaaccttttggctgcccaaacttgtcagtcaagattgtcaccctgttgacagttccacaagcttggaaatgctgctgcacttcttctggggtgcaagcataatcaacatgtcatacttatgcaccactcaggtgatatcagtggaccagcagctaccaaccacatcagatgtctccatgccagttcctgtcaaaaagtgccatccggaatgtacacagcagctctgtgttgacttcttttgcttcgccagggaggtcatctaa

SEQ ID NO: 123962 - DNA, 1604 bp, Zea Mays
gccgtgcaatatctgcggattgcagctgcatccactgcgcgccgcgcgtttttttttctctcctcctcgacaacgagaagtcgagaacacacacgcacatacggaacggaagctactagcccgcagccttcttcagtctcccgtcttcttctggtgcccaacacatcctcattctcagggtcgccctctcgattctccctcaagtccagtccagccggatcagtccccttcccctcctccacaaggtgccgcctcccgcagatccgaattggaatctgggccttcgtctccgcaccaccaatccggaaagggaagggaagggaagggaagtgatgggggagtgcgaggacggcaaggagtacaggtgctgggaggagctgctgccggacgcgctggggctcatcttccgcaacctgccgctccaggaggtgctcaccgtcctgccgcgggtgtgcaagtcctgggggcgggtggtcgccggcccctactgctggcaggagatcgacatcgaggagtggagccagcagcaaagcaagccggagcagatcggccgcatggtggagctgctcgtcggccgcagcggcggctcgtgccgccggatcagcgtctccgggctgccctgcgatccgctcttctcgttcatcgcagacaatgcgcgagctcttgggaccttggagatccccaggagtgagatcagcgactccgtagtggaagccgtggcgccgcggctatcgaacgtgacgttcctagacatcagcagctgcacgaagatcggggcccgcgcgctggaggcgttcggcaggcactgcaggtccctggtggggctccggcgggtgatgcacccgatcgacctggcggacaaggtgtgccagcacgacgaggcgcacgccatcgcgcgcagcatgccgaggctgcggcacctggagatggggtacatgctggtggcgacggaggcggtgctggagatcctggagcagtgcagcgagctcaagttcctggacctgcgcggctgctgggccgtggacgaccggttcctgcgggagcgccacccggggctgcgcgtcctgggcccgcgcgtcgtcgacgactgctacgagaacagctactgggaggagtgctccgactactactcggacgaggacgaggactacgacgacgacgtcgtctcgtgggggttgttcgtggacgacgacgacgactactactacgccgtcggcagcgacgacgacgaggctatctgggacgacgcgcagggcctggagaacctcgaggtgaggttctacggcggtggcggcttcggcgagagcttcgccggcttcgactggccgccgtcgccgtgacgcgtggcccgcgagagccgccgctgcgcttgcgttgcgcggaccgttttcggctcttgcttatataccgcgtgcgtgcctgagtcgttgtttgttgttcgtccccaagctttgcttgcagatgtaagctttcaatctttaagctctagcttgcagatatgtgaagtggactgctagtagtacactctagctgtaaactccggtgtttacctgaagcaaaccagcatgcaccggtgagatttcaccggcgccatccccatccta

SEQ ID NO: 123963 - DNA, 1683 bp, Zea Mays
gccgtgcaatatctgcggattgcagctgcatccactgcgcgccgcgcgtttttttttctctcctcctcgacaacgagaagtcgagaacacacacgcacatacggaacggaagctactagcccgcagccttcttcagtctcccgtcttcttctggtgcccaacacatcctcattctcagggtcgccctctcgattctccctcaagtccagtccagccggatcagtccccttcccctcctccacaaggtgccgcctcccgcagatccgaattggaatctgggccttcgtctccgcaccaccaatccgggcacacaaagccatttttactgctggaagactgccgcttttagtatctctgggctctggctcttgagtgatctccaaggaaagggaagggaagggaagggaagtgatgggggagtgcgaggacggcaaggagtacaggtgctgggaggagctgctgccggacgcgctggggctcatcttccgcaacctgccgctccaggaggtgctcaccgtcctgccgcgggtgtgcaagtcctgggggcgggtggtcgccggcccctactgctggcaggagatcgacatcgaggagtggagccagcagcaaagcaagccggagcagatcggccgcatggtggagctgctcgtcggccgcagcggcggctcgtgccgccggatcagcgtctccgggctgccctgcgatccgctcttctcgttcatcgcagacaatgcgcgagctcttgggaccttggagatccccaggagtgagatcagcgactccgtagtggaagccgtggcgccgcggctatcgaacgtgacgttcctagacatcagcagctgcacgaagatcggggcccgcgcgctggaggcgttcggcaggcactgcaggtccctggtggggctccggcgggtgatgcacccgatcgacctggcggacaaggtgtgccagcacgacgaggcgcacgccatcgcgcgcagcatgccgaggctgcggcacctggagatggggtacatgctggtggcgacggaggcggtgctggagatcctggagcagtgcagcgagctcaagttcctggacctgcgcggctgctgggccgtggacgaccggttcctgcgggagcgccacccggggctgcgcgtcctgggcccgcgcgtcgtcgacgactgctacgagaacagctactgggaggagtgctccgactactactcggacgaggacgaggactacgacgacgacgtcgtctcgtgggggttgttcgtggacgacgacgacgactactactacgccgtcggcagcgacgacgacgaggctatctgggacgacgcgcagggcctggagaacctcgaggtgaggttctacggcggtggcggcttcggcgagagcttcgccggcttcgactggccgccgtcgccgtgacgcgtggcccgcgagagccgccgctgcgcttgcgttgcgcggaccgttttcggctcttgcttatataccgcgtgcgtgcctgagtcgttgtttgttgttcgtccccaagctttgcttgcagatgtaagctttcaatctttaagctctagcttgcagatatgtgaagtggactgctagtagtacactctagctgtaaactccggtgtttacctgaagcaaaccagcatgcaccggtgagatttcaccggcgccatccccatccta

SEQ ID NO: 123964 - DNA, 2164 bp, Zea Mays
gccgtgcaatatctgcggattgcagctgcatccactgcgcgccgcgcgtttttttttctctcctcctcgacaacgagaagtcgagaacacacacgcacatacggaacggaagctactagcccgcagccttcttcagtctcccgtcttcttctggtgcccaacacatcctcattctcagggtcgccctctcgattctccctcaagtccagtccagccggatcagtccccttcccctcctccacaaggtgccgcctcccgcagatccgaattggaatctgggccttcgtctccgcaccaccaatccggtaaatatacgcgggcaataaaaatccctccctcccccccgaaccgtaatgatagatagctgcttgcctgctccggagtttcttccgctgttctctctcgcgcaaatttttatgctgggcaaagacggtgttcttcagcttcgacccccaaaaagggcgaagctttcgcgtccttccccacacacacaaattacctgggagccgtagcttctgtttggtgcggccacggggtggaagaaatggtatgcgggatgctcgccaattggcatgctgcgctttccgtccctgcagccgcaagaggccttctcttttagatctgtgccgcgccttcctcttcctggtaccctgtgattggagccagtattgttagcgtttaatgaagctgcttttttctagccggcttttggatggtgcttactactacatcgtatcagttgccaccactctcgcgtgcttttgccttctttaggtttgctcgcagggcacacaaagccatttttactgctggaagactgccgcttttagtatctctgggctctggctcttgagtgatctccaaggaaagggaagggaagggaagggaagtgatgggggagtgcgaggacggcaaggagtacaggtgctgggaggagctgctgccggacgcgctggggctcatcttccgcaacctgccgctccaggaggtgctcaccgtcctgccgcgggtgtgcaagtcctgggggcgggtggtcgccggcccctactgctggcaggagatcgacatcgaggagtggagccagcagcaaagcaagccggagcagatcggccgcatggtggagctgctcgtcggccgcagcggcggctcgtgccgccggatcagcgtctccgggctgccctgcgatccgctcttctcgttcatcgcagacaatgcgcgagctcttgggaccttggagatccccaggagtgagatcagcgactccgtagtggaagccgtggcgccgcggctatcgaacgtgacgttcctagacatcagcagctgcacgaagatcggggcccgcgcgctggaggcgttcggcaggcactgcaggtccctggtggggctccggcgggtgatgcacccgatcgacctggcggacaaggtgtgccagcacgacgaggcgcacgccatcgcgcgcagcatgccgaggctgcggcacctggagatggggtacatgctggtggcgacggaggcggtgctggagatcctggagcagtgcagcgagctcaagttcctggacctgcgcggctgctgggccgtggacgaccggttcctgcgggagcgccacccggggctgcgcgtcctgggcccgcgcgtcgtcgacgactgctacgagaacagctactgggaggagtgctccgactactactcggacgaggacgaggactacgacgacgacgtcgtctcgtgggggttgttcgtggacgacgacgacgactactactacgccgtcggcagcgacgacgacgaggctatctgggacgacgcgcagggcctggagaacctcgaggtgaggttctacggcggtggcggcttcggcgagagcttcgccggcttcgactggccgccgtcgccgtgacgcgtggcccgcgagagccgccgctgcgcttgcgttgcgcggaccgttttcggctcttgcttatataccgcgtgcgtgcctgagtcgttgtttgttgttcgtccccaagctttgcttgcagatgtaagctttcaatctttaagctctagcttgcagatatgtgaagtggactgctagtagtacactctagctgtaaactccggtgtttacctgaagcaaaccagcatgcaccggtgagatttcaccggcgccatccccatccta

SEQ ID NO: 123965 - DNA, 891 bp, Zea Mays
acacgcacatacggaacggaagctactagcccgcagccttcttcagtctcccgtcttcttctggtgcccaacacatcctcattctcagggtcgccctctcgattctccctcaagtccagtccagccggatcagtccccttcccctcctccacaaggtgtgccagcacgacgaggcgcacgccatcgcgcgcagcatgccgaggctgcggcacctggagatggggtacatgctggtggcgacggaggcggtgctggagatcctggagcagtgcagcgagctcaagttcctggacctgcgcggctgctgggccgtggacgaccggttcctgcgggagcgccacccggggctgcgcgtcctgggcccgcgcgtcgtcgacgactgctacgagaacagctactgggaggagtgctccgactactactcggacgaggacgaggactacgacgacgacgtcgtctcgtgggggttgttcgtggacgacgacgacgactactactacgccgtcggcagcgacgacgacgaggctatctgggacgacgcgcagggcctggagaacctcgaggtgaggttctacggcggtggcggcttcggcgagagcttcgccggcttcgactggccgccgtcgccgtgacgcgtggcccgcgagagccgccgctgcgcttgcgttgcgcggaccgttttcggctcttgcttatataccgcgtgcgtgcctgagtcgttgtttgttgttcgtccccaagctttgcttgcagatgtaagctttcaatctttaagctctagcttgcagatatgtgaagtggactgctagtagtacactctagctgtaaactccggtgtttacctgaagcaaaccagcatgcaccggtgagatttcaccggcgccatcccca

SEQ ID NO: 123966 - DNA, 1983 bp, Zea Mays
gccgtgcaatatctgcggattgcagctgcatccactgcgcgccgcgcgtttttttttctctcctcctcgacaacgagaagtcgagaacacacacgcacatacggaacggaagctactagcccgcagccttcttcagtctcccgtcttcttctggtgcccaacacatcctcattctcagggtcgccctctcgattctccctcaagtccagtccagccggatcagtccccttcccctcctccacaaggtgccgcctcccgcagatccgaattggaatctgggccttcgtctccgcaccaccaatccggtaaatatacgcgggcaataaaaatccctccctcccccccgaaccgtaatgatagatagctgcttgcctgctccggagtttcttccgctgttctctctcgcgcaaatttttatgctgggcaaagacggtgttcttcagcttcgacccccaaaaagggcgaagctttcgcgtccttccccacacacacaaattacctgggagccgtagcttctgtttggtgcggccacggggtggaagaaatggtatgcgggatgctcgccaattggcatgctgcgctttccgtccctgcagccgcaagaggccttctcttttagatctgtgccgcgccttcctcttcctggtaccctgtgattggagccagtattgttagcgtttaatgaagctgcttttttctagccggcttttggatggtgcttactactacatcgtatcagttgccaccactctcgcgtgcttttgccttctttaggtttgctcgcagggcacacaaagccatttttactgctggaagactgccgcttttagtatctctgggctctggctcttgagtgatctccaaggaaagggaagggaagggaagggaagtgatgggggagtgcgaggacggcaaggagtacaggtgctgggaggagctgctgccggacgcgctggggctcatcttccgcaacctgccgctccaggaggtgctcaccgtcctgccgcgggtgtgcaagtcctgggggcgggtggtcgccggcccctactgctggcaggagatcgacatcgaggagtggagccagcagcaaagcaagccggagcagatcggccgcatggtggagctgctcgtcggccgcagcggcggctcgtgccgccggatcagcgtctccgggctgccctgcgatccgctcttctcgttcatcgcagacaatgcgcgagctcttgggaccttggagatccccaggagtgagatcagcgactccgtagtggaagccgtggcgccgcggctatcgaacgtgacgttcctagacatcagcagctgcacgaagatcggggcccgcgcgctggaggcgttcggcaggcactgcaggtccctggtggggctccggcgggtgatgcacccgatcgacctggcggacaaggtgtgccagcacgacgaggcgcacgccatcgcgcgcagcatgccgaggctgcggcacctggagatggggtacatgctggtggcgacggaggcggtgctggagatcctggagcagtgcagcgagctcaagttcctggacctgcgcggctgctgggccgtggacgaccggttcctgcgggagcgccacccggggctgcgcgtcctgggcccgcgcgtcgtcgacgactgctacgagaacagctactgggaggagtgctccgactactactcggacgaggacgaggactacgacgacgacgtcgtctcgtgggggttgttcgtggacgacgacgacgactactactacgccgtcggcagcgacgacgacgaggctatctgggacgacgcgcagggcctggagaacctcgaggtgaggttctacggcggtggcggcttcggcgagagcttcgccggcttcgactggccgccgtcgccgtgacgcgtggcccgcgagagccgccgctgcgcttgcgttgcgcggaccgttttcggctcttgcttatataccgcgtgcgtgcctga

SEQ ID NO: 123967 - DNA, 1554 bp, Zea Mays
ttggttgctgcttgcatgcacgcaaggtgggtggctgcaatcggcgtcgccctcgggtccaaacgcatccagatgtctcccaccgagtcagcacgagagatagcagctccaagggaaggcttcacgaaactaccgtcacacgaggatctcgggcctataaattgtcgacctcgtcgctcttcgcagagcacaaacaacgctcatactcatagtcataaaccactcctgcactctcactcgattcacctctaccagcaactcgccacttcctccctgagaaattaaactgagaaatggcaccgcctcacagtcacagaagcttccgcggctggcagaacgcgagccacgtcgcgcttgtgctggtgtccgtgctgttcctgagcaaggcacgtccctccgcgggcgccaggagcctgctggagctgtacaagccgccggccagcgcgctcctcacgtaccacaacggcgccgtgctgcagggccgcatcccggtgaccatcctctggtacggccgcttcgcgccggcgcagaaggccgtggtcaccgacttcctccagtcgctcaccaccaccgcctcgccgccgtccccgtccgtgtcgcagtggtggggcaccatcgaccagctgtacctgtccaaggcgcggagcggcggcggcggcagcgcgcaggtggcgctcgtggggcaggccgccgacgaagggtgctcgctggggaagcgcctcgcgctgtcccagctcccgcagctggcggcgcgggccgggccggcggcgaagggcggggtcgcgctggtgctcaccgcgcaggacgtggccgtggacgggttctgcacgagccgctgcggcctgcacggctccgacgccggggccggggccgcctacgtctgggtcggcaacgccgaaacgcagtgccccgggcagtgcgcgtggccgttccaccagccgctgtacgggccccaggcgccggcgctcgtgccgccgagcggcgacgtcggcatggatggcatggtggtcaacatcgccagcatggtcgccggcgcggtcaccaacccgttccgcgacgggttctaccagggcgacaaggacgcgccgctagaggccgccaccgcctgcacgggggtctacggcagcggcgcctaccccggtttcgcaggcaacctggcggtggacggcaccacgggggcgagctacaatgccaatggtgccaacgggaggaagtacctgcttcccgctctgttcgaccctgcaacctctacgtgttcgactttggtttaacgcccaaggaaacagtcctgtcaactgtgtagtaacgctgtgtatatagtatgagtttgataaggagtgtactgtggttagtgttgatatctgcatcataatacaatataaaaaaaacatatgtgtgtggtgcatgagggagcaatctggcctgaaaaaaactttaaaatcatgcgtctaaatattagctaaccttttggtttctaagttatgatttgtcaacgatagttgatttagtctatccgcactcatctcactctatatctagactttaaaataatac

SEQ ID NO: 123968 - DNA, 465 bp, Zea Mays
atggacaagcaattcaacgcagtagttggtcggggtctcggggaggaggaggaggagccagggatcagctcagggaggactggagggaggaccggaggagtcgttcctcgttcaccaggaaggagaagacagatgggaattgagaatttgagatcacgagacagagagatcaaaagaaaacaagaaagtaaatatggttttggaaacaaggcgcctgctcggagtacatcgatgggaatgcttcctcagcgccgcaacgtcctgttgttgggcctcgtcgtcggcgagatcgagcggatccgagtcggccttcctccgccttgcacattgtcgtgtccaggcctccgcgctggagtccaaacccaccgcaacggagcgggaggtttcttcgccaaggcgcgctcgctgccatcctccggaaggaaaggttgggggatgaatagtgctccgcctgatctagcgtga

SEQ ID NO: 123969 - DNA, 188 bp, Zea Mays
tttttttcttttttgcaaaaatattacgccgctttctcatatcatgaccatccaaagaattccgtgcttctgagcttaataataagaaaccgaaaacgttttcgaatatatccatatgatgtcgatgaagcgattgtcgtatcaatcatatgagaaaataattaactacgagggactcttctatagcc

SEQ ID NO: 123970 - DNA, 436 bp, Zea Mays
atgggcatgcaaaaaccaagaacagatgacaccaagaacctggatggcctccagtctcccccaccctaccggaccggagcagagtgcactggcgttgcacgctcggctaggggtcgtacaggcggccgtcgcagccgcatttccaccccagcggcttgtagtcggagtagcgggagaagccggccaccgcgtcggcgtcggcgtcggtgacgcgggccgcgcgcccgagccccgcgggcgcggtcgtcacctgcacgggcatgcaggggttgcaggcgctgcaccggttgcggcagatcggcggcgtcgaccccagccgcgacttgtcctccgccaggttctcctgagaaggggaaaacgtcgcggtgcggatgctggtggcggcgccgaggaggaggcagagggacacggccgcgacgagcgctcggcgaggtga

SEQ ID NO: 123971 - DNA, 1745 bp, Zea Mays
atccatcaaagtcacagagacgaccagctgaagcgaacacagagctgctcgccgtgtaacgcagcaggcagcagcacccagaggcggcaggccacacacacagcacacgcagatcttcgatcaccaccatgggttctctcggcagcgccgcgcagcagcagccgcagcaaccgcacgccgtgtgcctgccgtacccagcgcagggccacatcaccccgatgctcaacgtggcgaagctgctgcacgcccggggcttccacgtcaccttcgtcaacaccgagtacaaccaggcgcgcctcgtccggacccgcggggcggcggccgtggccggcctcccgggcttccgcttcgccaccatccccgacggcctgccgccgtcggaggacgacgacgtcacgcaggacatcccctcgctgtgcaagtccaccacggagacctgcctcgggcccttccgccgcctgctcgcggacctcagcgacccgcccgtcacctgcgtcgtctccgacgtcgtcatgggcttctccatcgacgccaccaaggagctcggccttccctacgtccagctctggactgccagcaccatcagcttcctcggctaccgccactaccacctcctcaagagccgtggcctcgctccgctcaaaagtgtggagcagctgacgaacggattccttgacacggcggtggaggacgtgccggggctgcggaacatgaggttccgggacttcccgagcttcatccgctccacggacccggacgagtacatggtgggctacgtcctccaggagacggggcgcacggcgggcgcgtcggccgtgatcctcaacaccttcgacgagctggagggcgaggcggtggcggccatgcgctcgctcggcctggcgcgcaaggtgtacacgctgggcccgctcccgctgctggcgcgcgaggacccgcccaccccgcgctccgccatcagcctcagcctgtggaaggaggaggaggagtgcctgcggtggctcgacggcagggaccccggctccgtcgtctacgtcaacttcggcagcatcaccgtgatgaccagcgagcagctggtggagttcgcgtgggggctggccaacagcggcaggccgttcctgtggatcatccggcgcgacctcgtcaggggcgacaccgccgtgctgccgccggagttcctgtccgagacggccggccgcgggctcatggccacctggtgcccgcagcaggcggtgctggaccacccggccgtggccgcgttcctcacgcacagcggatggaactccacgctggaggccatgtgcggcggcgtcccggtcatcagctggcccttcttcgccgaccagcagaccaactgccgctaccagtgcaacgagtggggcgtcgggatggagatcgacagcaacgtccggcgcgacgccgtggcgagcctcatcgctgagctcatggagggggagcaggggaaggagatgaggagaagggcactggaatggagggacaaggccatcgaggtggccaagcccggaggcacgtctcaccggaatttcgatgacctggttcgcaatgtgctcctgccaaagaactaggcaacttagctctatatttgcagtttgcacggtgcttctgccagtgccgtgtgattttgttcctttgttttggagggagatggacaggtcagtgtcgttgtgtaaacaataaaaatacatgcatacgagcgtccaattgatgatgggcaagtctgaaacaaa

SEQ ID NO: 123972 - DNA, 1751 bp, Zea Mays
atccatcaaagtcacagagacgaccagctgaagcgaacacagagctgctcgccgtgtaacgcagcaggcagcagcacccagaggcggcaggccacacacacagcacacgcagatcttcgatcaccaccatgggttctctcggcagcgccgcgcagcagcagccgcagcaaccgcacgccgtgtgcctgccgtacccagcgcagggccacatcaccccgatgctcaacgtggcgaagctgctgcacgcccggggcttccacgtcaccttcgtcaacaccgagtacaaccaggcgcgcctcgtccggacccgcggggcggcggccgtggccggcctcccgggcttccgcttcgccaccatccccgacggcctgccgccgtcggaggacgacgacgtcacgcaggacatcccctcgctgtgcaagtccaccacggagacctgcctcgggcccttccgccgcctgctcgcggacctcagcgacccgcccgtcacctgcgtcgtctccgacgtcgtcatgggcttctccatcgacgccaccaaggagctcggccttccctacgtccagctctggactgccagcaccatcagcttcctcggctaccgccactaccacctcctcaagagccgtggcctcgctccgctcaaaagcgcaggtgtggagcagctgacgaacggattccttgacacggcggtggaggacgtgccggggctgcggaacatgaggttccgggacttcccgagcttcatccgctccacggacccggacgagtacatggtgggctacgtcctccaggagacggggcgcacggcgggcgcgtcggccgtgatcctcaacaccttcgacgagctggagggcgaggcggtggcggccatgcgctcgctcggcctggcgcgcaaggtgtacacgctgggcccgctcccgctgctggcgcgcgaggacccgcccaccccgcgctccgccatcagcctcagcctgtggaaggaggaggaggagtgcctgcggtggctcgacggcagggaccccggctccgtcgtctacgtcaacttcggcagcatcaccgtgatgaccagcgagcagctggtggagttcgcgtgggggctggccaacagcggcaggccgttcctgtggatcatccggcgcgacctcgtcaggggcgacaccgccgtgctgccgccggagttcctgtccgagacggccggccgcgggctcatggccacctggtgcccgcagcaggcggtgctggaccacccggccgtggccgcgttcctcacgcacagcggatggaactccacgctggaggccatgtgcggcggcgtcccggtcatcagctggcccttcttcgccgaccagcagaccaactgccgctaccagtgcaacgagtggggcgtcgggatggagatcgacagcaacgtccggcgcgacgccgtggcgagcctcatcgctgagctcatggagggggagcaggggaaggagatgaggagaagggcactggaatggagggacaaggccatcgaggtggccaagcccggaggcacgtctcaccggaatttcgatgacctggttcgcaatgtgctcctgccaaagaactaggcaacttagctctatatttgcagtttgcacggtgcttctgccagtgccgtgtgattttgttcctttgttttggagggagatggacaggtcagtgtcgttgtgtaaacaataaaaatacatgcatacgagcgtccaattgatgatgggcaagtctgaaacaaa

SEQ ID NO: 123973 - DNA, 1595 bp, Zea Mays
ctccacctctcccgagtggagtccttcctgactcctgagacctgaggtggaggaacatggaagtggagaagccgcatactaggaaacccaaggggagggagttgtgaggtagagggacatggaagtggtggtgacaagtatactaggaacgccaaggggagggagctaggaggaaccgcaggaggtccggactttctacgacacaagcagacggctaggccggaaccgccagcaaggatccaggagtccgggtccgcttttctcgtcccgcccgcaaagatcgatcggaacaactagcctagccctaggccctagcccagagccctgccctgcgcaccaaagcggaggggagagacgggagactagagagagcaaatacggtacggtgcttgcgttgcggcggatggcgacctcgtcgtcgtcctctggccccggcgggccgtaccaccaccaccggtcgcggttcggcgacacgacgctgaccaaggtgttcgtgggcgggctggcgtgggagacgccgtccgaggggctgcgccaccacttcgaggcctacggcgacatactcgaggccgtcgtcatcaccgatcgcgagaccggccgctcaaagggctacggcttcgtgattttccgggaccccggtgcggcggcgctggcggtgcagaacccgaacccggtgatcgccggccgtcgcgccaactgcaacattgcggcgttcggcccgccgcggaccgcgcagccgagagggagaggaggaggaggaggtgccgtccgcgagccgcacgggccggatcagccgccgcaggggtcgccttacagctacaggttgccgtcgcagatgaccccgcctcaggccgccgcggtgttctacagtccccagtacggcgggtactggtacccacctgattattcataccaacaggtgctacaacattactaccctcagatgtatggtccagcctctcattcagtaccaccctaccaatacatggggtatatgcctagtggcccaagtccaagtgctggattctcaccgatgcagcaacccatgcgaccagcgttctttcagcagccaacggcacagatggatggttctttcccaccagggcattcgcttccgcctaatttcagactccagctgccctctcatgcagtctcaaaggaatctgacgatgcatctggctatcagtcagctcagccaacttcaactccagatacaatcgcaaacaaccaggaagattcgaggcctgtagtgtcagattcagatacaaacacaccaaattgactttctaaaaatcctggcaacacgatctgatgtcaatctgatgcagactattggtggtctgtaacagagtcctcatgatactctcacatcttgactgaaaaagtttcccaaatatttgttctttcattatttctaattccttttctaattcttgcactgcatttcttcaccgaatccattgtatcgctgactgaacttcaagttcaaacttcagtaattcgctagcataagttccggtggcatgttagtgttcaaagtactaccgtgctgttagttcgtgtctcaaatatgcagtacagtttttcattgagga

SEQ ID NO: 123974 - DNA, 1034 bp, Zea Mays
aatcttgaactcacgcttcaagattggtgcgagcaccccactacgacaaaaccggatagaccaacccttatcctcgagcccaaactgcggtagcgaaaacgcgagcgctgcggaacaacgatggcgacgatgtctcttgccgcggcgtcacccctcgcctccattccccgcggcatcgccgctcaggctccttgcgcggcattcctgtccatccgcttaggtggcgcgacggcgacgcggttcgctggactggcggtggcctcgcagccagcggagcgtcgcgccgcggcgatggtcgcgatggcgaagagggagcaggagctggaggagatccgggccatgacgacggaacagatggaagaggaggtggtagacctcaagggggagcttttcctgctccgccttaagcgctcggcgcgccaggagttcaagaacagcgagttcagccgcatgcgcaagaggattgctcgtatgctaaccgtgaaaagagagcgggaaattgaacaaggaatcaataaaagattgtctaggaagcttgataggaaatggaagcagagcattgtggtcagaccaccaccatctctaagggggaacaaagaggagtagaaagccgcaaaaagagggcaatgtgcaaaagtcgtttcatgcgagtgttgcaggaaggtcccttcatgatttcaacccttattgcgttgttatgtattccatgtttacattttgctaagcattgctatctgaatctgaatttcagttgttagtctcttctgtaaattttgacttatttaaatttacacttctatctgtgttatcagtaattgaggatggccagtcatttgcacctgaaggtgcatgcttccttgccatgctgaatcaaatcaaattgatgtcttatgaaggctttcatacctctatttgaatgaacacgaaaaatagttttcaatatagtttttaagttctgatagtccattatactgtcggtgtgtaactctgttgctggactgtaagaataacctttgccgacctccaatatcttc

SEQ ID NO: 123975 - DNA, 1022 bp, Zea Mays
aatcttgaactcacgcttcaagattggtgcgagcaccccactacgacaaaaccggatagaccaacccttatcctcgagcccaaactgcggtagcgaaaacgcgagcgctgcggaacaacgatggcgacgatgtctcttgccgcggcgtcacccctcgcctccattccccgcggcatcgccgctcaggctccttgcgcggcattcctgtccatccgcttaggtggcgcgacggcgacgcggttcgctggactggcggtggcctcgcagccagcggagcgtcgcgccgcggcgatggtcgcgatggcgaagagggagcaggagctggaggagatccgggccatgacgacggaacagatggaagaggaggtggtagacctcaagggggagcttttcctgctccgccttaagcgctcggcgcgccaggagttcaagaacagcgagttcagccgcatgcgcaagagggtacattattctccctatccattgctgtatgagttttattgacggattgttaacttcatctgggaacttcagctgagtaagttgcatagtttggtggaaatgtgtcgatcctatgatatacttatatgaaaaacaaaccgatagtttcttttgtcaaacgatggatggtatatggttgacggggtctgccccatatgctcactttataatctgtattattcggtgataatgagtttaatatagtttgagttctgactaagtcataactcataacgaagaaaaggttatatgcctgatttttgtattagttgattacaaggataaatcttgtaagccacagaatgatacggatattgttcacagcatatgagaaagacctgcaaggcatagaaacaaatgtcttacaacgagatgattaggaatcacacttatcaccttctttgtcttaagtgacttgtcactttctttttactggactagacatatgcatgcctagaactagaacaaacaattcgctgcagattgatcaaaacctttgttcctctaacatggtctgatca

SEQ ID NO: 123976 - DNA, 1840 bp, Zea Mays
gtcgcctcccccgcgcacggtgagccgctgctgccggcgttgcgtacccgctaaccgccgcggacaaggccaccacgacgtcacagaaaaagggaaggggtcgaaatatccaatcgagacccaccaccgaacgagtccaaatccgctcgtctcccctcgaagtcactccctccagccctcgccggctccgcgtcctccggctctcccacccgagccgagaccacccatccaagcgcgcgcagctccggaagcgacagggccggacgagcgcctcccaaatttagcagccgcggagcgcgtgggcgtgggtccgtaaggagggtcgatggggtacctgccgtccctgagcagcaaggcggcgcacttcgtgtccgacctcaccaccgtcatcctcagccccgtctccgagcgcgagacgtcccacctccccgaggttgacgaagtgctagaaaatttggacgatgataaagattccgagcacaattccgatagccttgatggccctgacacatcttcctttagagcattcttgatctcatttttgtcatcatcgagctctaataacgattcaatggagataattcctgagcagaatggggacatgggttaccctactttaacacccatggggaagggaagcaagggaagaacgggtctgttaagtagggggaagcattccatcggaaaaatcattaacaaggcggcaaggattagtggtttcaaacaaacaactgcagagcctaaaattgacagggaggcagtaactcatactgaaccagatgcacctgtactggagcaccaggaaccaaaggaagttgcttccttcggtagtttgccaactatgtcggaaccatctgttcttttgtcagaactgatgcaaaggattctttatgcctctctcccggctcttgcccagggaaggaactgggtcttgctatacagtacatggaggcatggcatatctttatctactttatatagaaggagcatgctttgccctggtttctcactcttggttgttggggataaaaaaggcacagtttttggtggtttagttgaggccccattgcagccatctagttcaaagaagtatcaggtttcacctcagcattttgatatattgtttgttaaaaaaattcttgtgctgaatattttgcaaattaatcttgcaggggaccaataattcctttgttttcactaatttacacaatcgccctgtcatctatcgaccgacaggtgcaaataactactttacgatgtgctctaccgactatttggctctggggggaggaggtcatttcgcactttatcttgacgcagaccttttgattggttcaagttctaattcagagacttttaacaacgggtgtttatcgcattcttcagacttctcagtgaaagatgttgagctttggggcttcgtctacccttccaaatacgaggagatgctgacactctgccggactgagaaaccaggaatctgtcgatggtgagtggtgaccaatcccatagccagttgaacagacaaatggacatgtcgcgtctgtacagtttttagtaggctttgagagttgcgagcatttttgtgcgccggtagtactggagacttgctttttctcaagcgacttcgctcagatttgtaaatagtgtacttttgttactgtcacatggcgaaacatgtacgctactagttgttccagtgatgggcactttgaggtaaactgtcactggtggatcaggcttctacccaggactcgtgaaacagcatcaacctgttcaaagacagccttttagatccggaagcaatcaaattaagcgtccactgatgaatgctcctcat

SEQ ID NO: 123977 - DNA, 2023 bp, Zea Mays
taatagtgatattttactgtacacttttttttttctacatagcaccgttttcttatattgaatatttttctatataaaactcactcgcagtaatcaagtcgagttgtaccttttcatttttaataaaatttctcagtagcctcctgatcttttaaaaaaaactcactcgcaaaaaaaaactttagaactcggatgtcggaatggctaaccatccactgactggtagggccgcataggatggtcgacttcggctctacatgtcgcctcccccgcgcacggtgagccgctgctgccggcgttgcgtacccgctaaccgccgcggacaaggccaccacgacgtcacagaaaaagggaaggggtcgaaatatccaatcgagacccaccaccgaacgagtccaaatccgctcgtctcccctcgaagtcactccctccagccctcgccggctccgcgtcctccggctctcccacccgagccgagaccacccatccaagcgcgcgcagctccggaagcgacagggccggacgagcgcctcccaaatttagcagccgcggagcgcgtgggcgtgggtccgtaaggagggtcgatggggtacctgccgtccctgagcagcaaggcggcgcacttcgtgtccgacctcaccaccgtcatcctcagccccgtctccgagcgcgagacgtcccacctccccgaggttgacgaagtgctagaaaatttggacgatgataaagattccgagcacaattccgatagccttgatggccctgacacatcttcctttagagcattcttgatctcatttttgtcatcatcgagctctaataacgattcaatggagataattcctgagcagaatggggacatgggttaccctactttaacacccatggggaagggaagcaagggaagaacgggtctgttaagtagggggaagcattccatcggaaaaatcattaacaaggcggcaaggattagtggtttcaaacaaacaactgcagagcctaaaattgacagggaggcagtaactcatactgaaccagatgcacctgtactggagcaccaggaaccaaaggaagttgcttccttcggtagtttgccaactatgtcggaaccatctgttcttttgtcagaactgatgcaaaggattctttatgcctctctcccggctcttgcccagggaaggaactgggtcttgctatacagtacatggaggcatggcatatctttatctactttatatagaaggagcatgctttgccctggtttctcactcttggttgttggggataaaaaaggcacagtttttggtggtttagttgaggccccattgcagccatctagttcaaagaagtatcaggggaccaataattcctttgttttcactaatttacacaatcgccctgtcatctatcgaccgacaggtgcaaataactactttacgatgtgctctaccgactatttggctctggggggaggaggtcatttcgcactttatcttgacgcagaccttttgattggttcaagttctaattcagagacttttaacaacgggtgtttatcgcattcttcagacttctcagtgaaagatgttgagctttggggcttcgtctacccttccaaatacgaggagatgctgacactctgccggactgagaaaccaggaatctgtcgatggtgagtggtgaccaatcccatagccagttgaacagacaaatggacatgtcgcgtctgtacagtttttagtaggctttgagagttgcgagcatttttgtgcgccggtagtactggagacttgctttttctcaagcgacttcgctcagatttgtaaatagtgtacttttgttactgtcacatggcgaaacatgtacgctactagttgttccagtgatgggcactttgaggtaaactgtcactggtggatcaggcttctacccaggactcgtgaaacagcatcaacctgttcaaagacagccttttagatccggaagcaatcaaattaagcgtccactgatgaatgctcctcat

SEQ ID NO: 123978 - DNA, 841 bp, Zea Mays
atgtactccttcgacttggagcaagaccacacggcggcggcagcgcgcactaccgccacgacgacctaccagccctgcgcccgcggtgcccgctcgctccagctctccggcgcccaccactaccaccccggcgaacaagcactccggaccgccgccgccgtgcggccacggcgcgccaagagtagcagcagcaggaagcacgcgccgtcgtcgtcgcgccgctcctcgaccaccgtggtggcgaccgacgtgagcaacttccgggccatggtgcaggagctcaccggcttcttcccgccgcctgccgcggtcttccggccgctgccgcgcagggtgcacgcgaccagccccagcgtcgccgtcgccgtcgccgcggggcaagggtgtggctgggaacgccgtggaagtcacggaagctcggaggccgcaaacagtagcactgccggcggtggcagcagccccgacgagggaccggccgtgccgccgcctctggtggtggcgccgcagccgcagttcgcgccgctgggcgtgttcgacggcctgcccgacctcgggtcgccggagttcggctggtggggagatctgtccatcgatttttaggccggccggtactcggtgtggcacaggctagatttcatgggacgattattcgatcgaggagggcgtttgctaattttccttgtgttcaagcgtgttgtatatgtttattatcgctatgtgcacgtgaagccacccgtggcgcagtagttagtgcttgttgttgttttcacacataatcatgcttatgtaatgtaatgcaaatcacatctcgatcggttgacttgcttcgtttttctattta

SEQ ID NO: 123979 - DNA, 1476 bp, Zea Mays
ttttttctccctccatgatgatgcctagttttttaagcgccgggcacggccgcaccaactggaagctggaggccgcctgcttttcaacaaacacctagtagtataaacagatctctctctctctcacacacacacacagcaggcagcaccatgcttcacaggaggagccgcacgctgggagggagctccgaccgagccgcgcgccgagcggtggcgaccaagagcgggacgagggggagcggcaatggcgcggccacggacctgctcgtctgcttcccgtcgcgggcgcacctcgccctcatgccgcccaaggccatctgcagcccgtcgcgcccgccgtccgcgtccgagcccgtcaagcgccggcacagcaccagccgggcggggccgacgccattgccgcccagctggccggggctctacaagtcggccacgtgcacggccaggaacccgccgatccaccggcaccgaggcgcggatcgcgcccccgtggacgacgagccgacgtcgcccaaggtgacctgcgcgggccagatcaaggcccgcccgcccaagcccagtggcggtgggaagaaggccacgtggctgcaggcgctggggatcaagaaggatgccatggcgctcttggacgccctgcacggcgctttcaggttcaacgtcgccggctgcttcggcagcttccccggtgccgcgggcgtggcggggtacacttccgcggaggatgacgacgacgacgaggaggaggaggaggacgtgccgcgcgccgagaaggatacggagcacggcggcgcggcacgggcgcggtggttcatggtgctggaggaaggcaataagaaggtgtctaccaagaagctgcagggacaagagccggaacggagccaggaggaagacgcggccccgccggcgaacgcgctgatgctgatgcggtgccggtcggcgccggcgaagggattagcgaggagggtagaggcagaggaggagcgcgaggatgtgaagatcgccaccaataagactccggagaaagagacggaaaaggagagggagagcctggtgctcatgacgtactccccggacttcttcaaggtgtcccttgacattgccaaggagacttggatcgtcggcggtgatgacgccgtcctgcgctgccggagctggaagagatagatgatcgcagtgacggttcattcaacaaggaatgcatgtgccttttactccttcgattgttttcttcttcttttatttttcttttcgcccctcttgataaagtacaactctttgcataaggctcgtgtgaagggcatgatcagcacacagcagaattgatttagccaaggccactctgtattgatggcctctctgcagaacatttctgctctgtaaatagttttgtaacgtcccttgtcaaaatgttacccaggtatacttggccggtggtatgtgaggctgaatagtactggactagtggactgtatgatg

SEQ ID NO: 123980 - DNA, 1088 bp, Zea Mays
ccacaaggccacaaacacaaaaactacacttcggtgtccctatatgaatatgatccgcatacccccattccccgaaggccgagctcatccaatccagtcgcctgattgcattgggatcccatggccaagctcgccgtcctcctcctcctcctcgccgtggccgcgtccgccacagtgccggcgcacggccgcgataccccgactgagatcaagctcatcaaaggcacggacgcctccggcgtgggcgacgacagcatggagtgcgtgtacacggtgttcatccggacggggtcgatcttgaaggccgggacggacgcgaacgtcacgctggagctggccgccgcggacggcaacggcgtggggatctcgaacctgcccgcctggggcgggctcatggggcagggctactcctacttcgagcgcagcaacctggacatcttcagcggccgcgggccctgcatggcgaaggcgccgtgctggatgcggctggccaccgacggcaccggcgaccaccacgggtggtactgcaactacgtggaagtcaccaccacgggcccgcacaaggggtgcgggcagcagctgttcaccgtcgagcagtggctcgccaccgacgccccgcccttcaagctcgaggccgttcgcgactactgcagcggcgacgccaagggcgcctcggcggcgtgacgtggccggcggccggtagaggagagcacagcacacacgcctggactggacctgctgggtggcttggtttggttggttggtgacgagtcgtaataagttgtgggcgcatgggcgccgcgctcgtgagtggcgtgcgccacgatgcatgcgtgtatggtgatgaactgaattggagccgtgcagcaagtcgaataatcgggagccacctcgcgtgatgtgtagtggctagtttttgtacatggacgtgttggatcttgatccatgttttgatctgatctttgagaaatggtaatccgcgttatcatgcgtgtttcttgctgctggcaatgcttggataccgactgaagttcctccaagatctttatcatggacagcaccgtccttgattttcatcctagttgagg

SEQ ID NO: 123981 - DNA, 898 bp, Zea Mays
ccacaaggccacaaacacaaaaactacacttcggtgtccctatatgaatatgatccgcatacccccattccccgaaggccgagctcatccaatccagtcgcctgattgcattgggatcccatggccaagctcgccgtcctcctcctcctcctcgccgtggccgcgtccgccacagtgccggcgcacggccgcgataccccgactgagatcaaggccgggacggacgcgaacgtcacgctggagctggccgccgcggacggcaacggcgtggggatctcgaacctgcccgcctggggcgggctcatggggcagggctactcctacttcgagcgcagcaacctggacatcttcagcggccgcgggccctgcatggcgaaggcgccgtgctggatgcggctggccaccgacggcaccggcgaccaccacgggtggtactgcaactacgtggaagtcaccaccacgggcccgcacaaggggtgcgggcagcagctgttcaccgtcgagcagtggctcgccaccgacgccccgcccttcaagctcgaggccgttcgcgactactgcagcggcgacgccaagggcgcctcggcggcgtgacgtggccggcggccggtagaggagagcacagcacacacgcctggactggacctgctgggtggcttggtttggttggttggtgacgagtcgtaataagttgtgggcgcatgggcgccgcgctcgtgagtggcgtgcgccacgatgcatgcgtgtatggtgatgaactgaattggagccgtgcagcaagtcgaataatcgggagccacctcgcgtgatgtgtagtggctagtttttgtacatggacgtgttggatcttgatccatgttttgatctgatctttgagaaatggtaatccgcgttatca

SEQ ID NO: 123982 - DNA, 1059 bp, Zea Mays
atacggcatgaaattgctatactagatttgcaggcagttgagccgaacggaaagaaccaaaaaataaccagacaatgagcttaacgcttctccagggctactcctccgctgaggacgacgacgatcccgccgccggcgccggcgctggcaccgagctgagcgagtctggtgattcgtcagccgaggaagccggatcggacgaagacgaggagtccgctcctccaaagccgccccccaagctccgccgccgaccaaaccctaaggggggagatgccggcggcagcgacgggggctccttgctgccctccgcgctggaggccttcgctgatgtctcgggaccaccagattttttgaggcacagggttgccgagccagaggaagggacggaggccctcggtgtactcgatcgccgtgggaaagaggggagcaaacagccgcctccaggtgctgttgtggtggcaaaaccacagatagttgctatccgcgagcgagttaccacaactggagccaaccccccaggttcagtgacagctggttctattgatggaaaaagagtaataggtgctgcaaatcctgggccagaagacgcagctgatcttctaaggatgtgtctacaatgtggtgtaccaaagacctattcacatggaaagggtatggtgtgccctcagtgtggtggtagaccgatgcagacaaaagagcccgaaaagaagaagggttccactgtcaaagacaaggagaaggtcaagaggatgagggggcaatcgtcacatgcatcatggaagagtgaaaccgagatggctcttcggcaacaattcgactgataactagttagggtgcccaatatttagatggagtactgggtaaactgtacgctgcgaaaaccttttttagctctgtgtaatgtaccatatgatgtcctttgtgcctcacactaggttccagaaagccagaaccaacgctgtgtttgtttgtatctgctgctttaatttttcagccattttgcgcttgcgttggcgcgccttttgcattttagcccttttagtgtttttttcacaatta

SEQ ID NO: 123983 - DNA, 904 bp, Zea Mays
gcccacgtatgggcccgataatgctgaaagttaagcccgtaaacacccctctattatacggcatgaaattgctatactagatttgcaggcagttgagccgaacggaaagaaccaaaaaataaccagacaatgagcttaacgcttctccagggctactcctccgctgaggacgacgacgatcccgccgccggcgccggcgctggcaccgagctgagcgagtctggtgattcgtcagccgaggaagccggatcggacgaagacgaggagtccgctcctccaaagccgccccccaagctccgccgccgaccaaaccctaaggggggagatgccggcggcagcgacgggggctccttgctgccctccgcgctggaggccttcgctgatgtctcgggaccaccagattttttgaggcacagggttgccgagccagaggaagggacggaggccctcggtgtactcgatcgccgtgggaaagaggggagcaaacagccgcctccaggtaagtagatttaaatactcatttttttgtggaaactggagactaatgtttttttatcctctcctgtttattttggtaatggtagaggaagagataattgtatttttgccactcacaatgttgtcttcctgttataattaccactgtgtctatgaattgtgggtccagctgggtctatgaaatgtgggcctgatggcaattttacaaacctgtttcttgctgatggcaaatatcaaaatctctcggtagaggaatggaggtcgattagattgctaccaatgtagttgcaggtcttgcattgttagagaattgacgtagattttatagcagtacatgtagcgttttaagatgcatttaacagagtctggatgcaatttcagttccgagttcccaagatatttgatg

SEQ ID NO: 123984 - DNA, 100 bp, Zea Mays
cggtctctttcctagtggttaaaccgtcacgatcgcgatcgcactctcagagagtgacggttgttgttgcatatcctcacgagttcatattcggactcca

SEQ ID NO: 123985 - DNA, 1916 bp, Zea Mays
gcccacatctcaagccctgagaagcccgcacactcccccaggtccctgaggctaactgcgttcgtcccgtccaagtgcttcgtgttgggacgatcgagaaagtcgccgggtttgcctcccacgagcctgccctgctgcctggggccgctggtgaagcggaagcacatgacgaaccaggacgtggtcgtgtcggagatgggcattgcggccgggaccgcgctgccgggctcgagcccggccctcctggcctgccggggcgcggcggccggcgccatgtccctgcggtacctcgacctggcagcggcggcggcgcgctcggccagctgcacctgggtcgaggccatgcgcgcctcctcgcccacccgctcccgcgccgccgccgacgtcgacgagctcacggcctggatgaggaagcacccgtcggcgctcgggaagttcgagcagattgccagcgcgtcccaggggaagaaggtcgtcatgttcctagactacgacggcacgctcgcccccatcgtcgccgacccggacgccgcctacatgagcgacgtgatgagagcggcggtgcgcgacgtcgcgaagcacttcccgacggcgatcgtgagcgggcgctgccgcgacaaggtgcgcagcttcgtcgacctgtcggagctctactacgccggcagccatggcatggacatcgaaggaccaagctccaatcccgagtcagttctgtgccaacctgcgagcgagttcctccccgtgatcgacgaggtgtacaaggcgctggtggagaagacgaagtccacgcctggcgccaaggtggagaacaacaagttctgcctgtccgtgcacttcagatgtgtagatgaaaagagatggaacgcattggccgagcaggtcaaggcagtgatcaaggactaccccaagctaaagctcactcaaggcaggaaggttctggagatccgtccgagcatcatgtgggacaagggcaaggccttggagtttctgctcgaatcgctcggattcgccagctgcagcgacgccctcccggtgtacatcggtgacgaccgcaccgacgaggacgccttcaaggtgctgaggaagaggggccaaggcgtcgggatcctcgtgtccaagtgccccaaggagacgaacgcctcctactcgctgcaggaccccggcgaggtcatggacttcttgctccgcctggtggagtggaagcggaaatccacgacgactcggccgccggtgtagctcttgttcttggtcgactagtcaatcgatggaccgaccgatcgatcgaatgggcgtccaatcatgcgcgaaaacataccccaccactgcaagaccaatttttttttctgtctctctctctccctctctctccactctctctgacgattcttcagcttgtggtggcctccgaaaccgacgactcgtggtggttgctgtgttacatgttcttcgattccctgaccaccgtgtgctgccggcctccgccaccaccgagcgaggaaaaaggaggccggccggccgcacacaaagcacagcgtcactgaaagtgttttgagcatgttggcgctactgtcgaatacagtatcagtaaccggttctactccaaggcagtgtactgtccccccacccccattattctctcctgttgtttttggccctagcttgttccccatgactctggaaggcatcgtcgtctatctgcaaagctacctgacgtccttgaattgaagaacctttgaaagaaacagagaaggttcggtaatttcacttcacccccaattaatataagtatgtaactatagtagctgctgtatgtctaggcactgtttacgcaccctctctgtaagatgtgtactcctggtgaatgaatgtgagatcccaagcaatggaattatattctgcaaattatttcgtgccaa

SEQ ID NO: 123986 - DNA, 1840 bp, Zea Mays
gcctggccgagagacctttcttccccagagaggcgcctcaactcaaccccacccccccacaagaacaacaagccacatcccatcccaactccacggtgaggtttgagcgatccgagcaaaaaaaatcaaccgaggcgcagcaacgcaggttcgttctctgaactctctggttcttttagcagcagggacgcgcagcacaagaaaggtccggttcaagaggctcttcttttgggtttattagaatcctcaaaggaagcgtgttcttgggttaggatttttttttctcacctcatcacacctctcctaggaggagcagagatccagagaaccttttttctcttctggattctcaccgcttcttttttttttctctgcacaaacacaccctcgtttctctacttttattgaggaacagggctgatttccaaactttttcctacccctgttttcataaacaagctccttttatttcttcccgttttaagttctgcccagcctcttcttctagctccatccaagctttctccatctagtagttccaatggccgcagccatagacatgtacaagtactgcaataccagcgcacaccttatcgcctcctcgtccccctcggatcaggagctcgcgaaagcactcgagccttttataacgagtgcttcctccccctaccatcgctactcgttggccccagattcttacatgcctacaccctcctcctacaccacctcgcctcttcccacccccacctcctcgcctttctcgcagcttccgccactctactcgtcgccttacgcggcttcgacggcgtcgggcgtggctgggccgatgggcctgaaccagctcggcccggcccagatccagcagatccaggcccagctcatgttccagcaccagcagcagaggggcctgcacgcggcgttcctgggcccgcgggcgcagccgatgaagcagtccgggtcgccgccggcgcagtcgaagctgtaccgcggcgtgcgccagcgccactggggcaagtgggtggcggagatccgcctccccaagaaccgcacgcggctgtggctcggcaccttcgacaccgccgagggcgcggcgctggcctacgacgaggcggccttccgcctccgcggcgacacggcgcgcctcaacttcccgtccctccgccgcggcggcggcgcgcgcctcgccggcccgctccacgcctccgtggacgccaagctcaccgccatctgccagtccctggcggggtccaagaacagctcgtccagcgacgagtcggccgcgtccctgccggactcccccaagtgctcagcgtcgacggagggggatgaggactcggcctccgccggctcccctccttccccgacgcaggcgccgcccgtgccggagatggcgaagctggacttcaccgaggcgccgtgggacgaaacggaggccttccacctgcgcaagtacccgtcctgggagatcgactgggattccatcctctcatgaacgatcaactacaactagtattttagtagtagcagcagcagcagcagcaaggttcagtcagtgatagctctgtgtaattttcgatttggggtttgcagctgcggtggatcgatggcattttagacatcggccatggcggctgtgttgtgatgcagaagtaaacgtacgtgctaatctcctggttgagctgccggttgttttttctcacggcacggccagtcgagaaagtcagtgtaatcccctgttatgatctcctctgttgcaacttaattaattcttctggcgtatgtatgtaaccatgtgtgttcatcttgaacgtatcgtgatgctgtgcgtctttcttggtct

SEQ ID NO: 123987 - DNA, 371 bp, Zea Mays
caaagtgtgtggtggcaagtaattaggcacatggtcacatactcacatggaggagatggaggagacaggagagggagagataggacctgggagaggagacatgagaggcacatggtcattacattttgttggctgtaattgtaagcctgtaaggctgtaactgtaagcctgtaattattggttgcaacttgtaagttgcaactgttagctgttgctaacctgacatattttgttggctccctacaactttgtcctaaactcctgaactcttgtaaggctgcatcactgcatgtattttggttctagaactagaactatgaaagtatggaattatggattatggaatggaatggaactattatgaactataa

SEQ ID NO: 123988 - DNA, 1839 bp, Zea Mays
aagaaaacaaccgcggcgcgcgcgacccccgcccctaccacccccttacgaccagaccacgacggcctcccggatgagggtcctgccgcgccttttaccgtcagctggatgtcaaactcaaaccacaacacgccctgtgacatccccaagccggcgtccgtcgacgagttcctcgccaggaatggcaagaagaagaagtccttcatgtcgggcctgttccgcaagaaagggaggggcgtggacaggaagctgctctcgcggcgcgacatcatcttcgatttggagggtaaaggcggcgacaggatggacctcctggagacgtccgccgctgtccgcaagagcttctcagatcggcactgcacggcgcggatcgagaacctgaccctcagctgcctggattctcccgggagacccaacgtcgatacccgggaataccgggtgtttgtaggcacatggaatgtgggagggaagcctcctgacagcagcgttaacctcgaagagtttctgcagattgaaggattgcccgatatatacgtcttggggtttcaggagatcgtgcctctgaacgcgggcaacgtgctggtcgtggaggacaacgagccggcgggcaagtggatggagctcatctaccaggccctgaacaggccgccggcccaccaggacggggagtcctcgggcgacgagctctcgccgccggcgtccacctcctcctcccgctacccccagccgtcccagggccggcaagtcggccgcgaccccagcaacaacgccgccatccccaagtcctccagcggcggcgtgctcttcgcgcagaggcccccgcccccgcccctcaggatggtcaacaagagctaccgcgtcgacaacgcgctggccaagacgtgcacctgcatgtccgacccgcccggcatgcagcgccgggcgcgggagatgcgcgagttcctctaccgcgtcgaggccgccgccgcctcgccgggccgcggcgccgacgaagaaacgctggcctccatcgaaggcggcggcatgaactactgcctcatcgcgaggaagcagatggtcgggatcttcctgtcggtgtgggtgcggcgggagctcgtgcagtacgtcggccacctccgggtcgactgcgtcggccggggcatcatgggccgcctcgggaacaagggatgcatcgccatgagcatgacgctgcaccacaccagcatctgcttcgtgtgctgccacctggcgtccggcgagaaggagggcgacgaggtgcggaggaactccgacgtcgccgagatcctcaagaacgcgcagttcgcgcgcatctgcaaggtgcccggccagcgcgttcccgagaagatcatcgaccacgaccggatcatctggcttggggatttgaactaccgagtctcgttgagctacgaggaaactaaggcgctgctggaggagaacaaatgggacgtcttgttggagaaagatcagctcgcaatggagagacaagccgggagagtgttcaaagggtggaaggagggcaagatctacttcgcccctacatacaagtacaggcagaactccgactcatacgtgtgggagaccgccaaatcgaagaagaagcgacgaacgccggcatggtgtgaccggatactgtggcacggccagggcatcgagcagctgcagtacatcaggggcgagttcaggctttccgaccacaggcccgtctgcagcgtgttcgtgatcgaagccgatgtggataacgggagcaagatcagaaagggctactcgactctggacgctaggatccactgcgactcccccgcgatacccaagagacacagcttctatgacgacttctga

SEQ ID NO: 123989 - DNA, 1772 bp, Zea Mays
ctccggtcgctctcccggtcgcagccaccgtttataaaaaaaaaacccgaccgagcagcgccgcaccagaagtcgggagcacgacccactggagccagcaaacaacaacgagtcccttttcgcctcttgcccgttgcccctcggtttcgtcgccgctacccggcgatctccgcgacagcgacccggtgccgccgccgcagatctcgccgagaagacaggtatcggtgccgccgccagatcaactggacctgtaaaacgagggcctgcgctacctgtggctgtggagttcccgaggcgctgttctgccaggattcggcatcctttgttgcccacatggccacttccacatctcagcatgcgctttcatccatcaaattgctgtccacaggctgcttgcatcccgataagagaaattgccgcgtgctttctgtttcagtagggcgtcgctgccccagtgcccgcaatttgggtctactttgtgcttcaaactctcaatcttcagtgattgagccggtccagctaccgaggagccctaaaagtggcgtagctccaaagaaatcaggtgaaagtgcactcattctgatacggcatggagaatcgttgtggaacgagaagaacctgttcactggatgtgtcgatgttcccctgacccctaagggcgttgacgaggcaattgaggcggggaaaaggatatgcaatatcccagtcgatgtaatatacacttcgtcgctgattcgggctcagatgaccgctatgcttgccatgatgcagcatcgccgaaagaaggttccaatcattttgcacaacgagagtgaacaagctcacatgtggagtcagatatacagtgaagagacaaagaagcagtccattcctgtcataacagcttggcaattgaatgaacggatgtatggtgagcttcaaggccttaacaaacaagaaactgccgatcgatttggtaaagaacaagttcatgaatggcgtcgcagttatgatattcctcccccaaatggcgagagccttgagatgtgtgcagagagagcagttgcttatttcaaagaccaaattatacctaaacttgtggatggaaagcatgtaatgatcgctgcccatgggaattcacttcgttcaatcataatgcatttggacaagctgacttctcaagaggttatcagccttgagttgtctactggcattcctatgctgtatatatttaaggaagggaaattcatcaggcgaggaagccccgctggaccttctgaagcaggtgtctatgcttataccaagaatttggctcagtacagacagaagcttgatggcatagttcagtagccatctgcaggcttttcctttgctactcatccgtcgaacatgcatttggtcccggaaaacaaggggccaagctcctaccatctcatcgacattcaactgccaagtagtccattcctgtcacaagtttgtagcggctcatttatctcttcagaaacctcccaccacgtggtagtaaaatatacggagtagatgccaattttaggtggtgagctgtagatacaaatggagatatactggatggcagttgtgttatctttccgctttccccagtcacttagatctcagatgtttgtaatggtgcagtaataaacacttgtagcgaactgcatggaacgagacgctgttatcgaatgcttgttccccgtctcatcaattctttgtgtgccccggtgtgtgatcggaatgttatgccctagcttggcagacattccttttcggatcct

SEQ ID NO: 123990 - DNA, 1811 bp, Zea Mays
ctccggtcgctctcccggtcgcagccaccgtttataaaaaaaaaacccgaccgagcagcgccgcaccagaagtcgggagcacgacccactggagccagcaaacaacaacgagtcccttttcgcctcttgcccgttgcccctcggtttcgtcgccgctacccggcgatctccgcgacagcgacccggtgccgccgccgcagatctcgccgagaagacaggtatcggtgccgccgccagatcaactggacctgtaaaacgagggcctgcgctacctgtggctgtggagttcccgaggcgctgttctgccaggattcggcatcctttgttgcccacatggccacttccacatctcagcatgcgctttcatccatcaaattgctgtccacaggctgcttgcatcccgataagagaaattgccgcgtgctttctgtttcagtagggcgtcgctgccccagtgcccgcaatttgggtctactttgtgcttcaaactctcaatcttcagtgattgagccggtccagctaccgaggagccctaaaagtggcgtagctccaaagaaatcaggtgaaagtgcactcattctgatacggcatggagaatcgttgtggaacgagaagaacctgttcactggatgtgtcgatgttcccctgacccctaagggcgttgacgaggcaattgaggcggggaaaaggatatgcaatatcccagtcgatgtaatatacacttcgtcgctgattcgggctcagatgaccgctatgcttgccatgatgcagcatcgccgaaagaaggtttttaaatctttcccttttatatatttccagtattcacattgagttgtattcatgttggcaattaataaacttgagaggttgtggcatctgccactgaccattttaggttccaatcattttgcacaacgagagtgaacaagctcacatgtggagtcagatatacagtgaagagacaaagaagcagtccattcctgtcataacagcttggcaattgaatgaacggatgtatggtgagcttcaaggccttaacaaacaagaaactgccgatcgatttggtaaagaacaagttcatgaatggcgtcgcagttatgatattcctcccccaaatggcgagagccttgagatgtgtgcagagagagcagttgcttatttcaaagaccaaattatacctaaacttgtggatggaaagcatgtaatgatcgctgcccatgggaattcacttcgttcaatcataatgcatttggacaagctgacttctcaagaggttatcagccttgagttgtctactggcattcctatgctgtatatatttaaggaagggaaattcatcaggcgaggaagccccgctggaccttctgaagcaggtgtctatgcttataccaagaatttggctcagtacagacagaagcttgatggcatagttcagtagccatctgcaggcttttcctttgctactcatccgtcgaacatgcatttggtcccggaaaacaaggggccaagctcctaccatctcatcgacattcaactgccaagtagtccattcctgtcacaagtttgtagcggctcatttatctcttcagaaacctcccaccacgtggtagtaaaatatacggagtagatgccaattttaggtggtgagctgtagatacaaatggagatatactggatggcagttgtgttatctttccgctttccccagtcacttagatctcagatgtttgtaatggtgcagtaataaacacttgtagcgaactgcatggaacgagacgctgttatcgaatgcttgttccccgtctcatcaa

SEQ ID NO: 123991 - DNA, 258 bp, Zea Mays
caggggcgggccacttagcgctggtcctcgacgtttgggcctcggcgcgggcgcggcagcgcgacccggtcacaggcgcggctgcgcgtcctggctccctgccggcgcggcacaaggagcaggcagggcgccgccgcagccacgcggacgagcgcgagcaggcagggcgccgccgcagcctcgcgggcgcgccggccccggccacgctggtgagtgcctcagccccaacgcaggccggtcacgcggcatgcacagacg

SEQ ID NO: 123992 - DNA, 86 bp, Zea Mays
taactaccactcacatcaccatcaaagccggacgtcatcagggctatcgcggccacggtgagcaccggtcgtctcgggcacggatc

SEQ ID NO: 123993 - DNA, 971 bp, Zea Mays
agcatccaagagattctttctggggcaacaaatcggtcggtccagaccagatcccagatcccatgcgttgctctgctccgcagctccgctccgcctcctttttatgcgccgctcctccgcaaaacccctcctcccccgcacggccgcacccaccagtctccctcgcccctccgccaccacctctccaaatctcgcccatctcgaaccacagcgcgcggagggccgcgtacaggagaagaggggggtatggagcccgccgagcgaatcgagtccggtacggcgctggggaagcggccgaggagcagggcgctgccgcggacgcccagcatggtgacggtgccgtcggcggcgaagcaggggcgccaggagcggcgcgccgcctcgctgccggctgccggcactgggacgggagccgctggcgccatgccggtgggttactgttactactacggcggctcattcgccgcggtggagacggcggccttcttgaaggcgtgcggccgatgcagccgccgcctcgggcccggccacgacaccttcatctacaggggcgaggtggcgttctgcagccaggagtgccgggagaagcggatcgagtacgacgagcgcatggagaagacctgctgctcactgacctccatcaaggaggccccgtccgtgtccggcgccagcggctccgaccagtccggcagcggcggggagaccgtggccgccgcctagccggggtggccttggaggtgcagtgcagcgacgccggatggatcgatcggcccggtagtttctgccatgccagagcgtctgtgcatagtacagctctggctctgggttccggcagtgatgaatgcgtcagtgattttattatcaggtgattgatgcatgtaactctggaaacatggcgttctattctatgtcgaaacaaaagaaaaagaaaaaaaaggaaaaagagagacccgggttctgtttgcgtcgca

SEQ ID NO: 123994 - DNA, 809 bp, Zea Mays
agcatccaagagattctttctggggcaacaaatcggtcggtccagaccagatcccagatcccatgcgttgctctgctccgcagctccgctccgcctcctttttatgcgccgctcctccgcaaaacccctcctcccccgcacggccgcacccaccagtctccctcgcccctccgccaccacctctccaaatctcgcccatctcgaaccacagcgcgcggagggccgcgtacaggagaagaggggggtatggagcccgccgagcgaatcgagtccggtacggcgctggggaagcggccgaggagcagggcgctgccgcggacgcccagcatggtgacggtgccgtcggcggcgaagcaggggcgccaggagcggcgcgccgcctcgctgccggctgccggcactgggacgggagccgctggcgccatgccggtgggttactgttactactacggcggctcattcgccgcggtggagacggcggccttcttgaaggcgtgcggccgatgcagccgccgcctcgggcccggccacgacaccttcatctacaggttgctccaatccgtccgtccgtcttttcacgctgcttttacgtgggactgcaacttttccactctagagttgggggggattattgcgatctcttccggtctatcggattactgtgctccgtgtccaagtccttcgattccttttgcgaattaattaattaattgccatccgatccattccatcaccactcgacacgttcgttctagctagttcgtgacttcgtaccgggggattgtgtgaatctaattccccccctgttt

SEQ ID NO: 123995 - DNA, 1658 bp, Zea Mays
gataccgtctccgacctcctcccttttgcgctagcttcagagcatcatcaccactccacaccaccgccccagctcgcttccctccccgctacacggtcgctcaccagtcaccacccaccactgcttccatgctcctcgcctcgtttccagctcgcgaaacttagctccagatcctctcccccccccccccccatccaccgcgccgcattaacctcagatccacccggcgagctcatttcagatccatccatgcgcttcccgttccttttcgccctccagctggtcgccttggcggcggcagcgtcggcggccgaggtcgcggtgacgcgctcttcgaggatggtgcaccgtctgtcagacgaggcccggctggaggtgggcccgcgtgtggggtggtggccgcagcgaggaagcggggagtactaccgcgcgctagtgaggagcgatatccagcggcagaagcggcggctcgcggtcctctcgctctcaaagggcggcagcaccttctccccgggcaacgacttaggctggctatattacgcttgggtggatgttgggacgcctgctacctcctttttggttgcattggatactggtagtgaccttttctgggttccctgtgactgtatccagtgtgctcccttgtctggctaccgtggaaatctggatagagatcttagaatatacaggcctgctgaatcgacaacaagtcggcatcttccttgcagccatgagctatgccaatcggttccaggctgcacaaacccaaagcagccttgcccatacaacattgactacttttcagaaaatactaccagctctggtttgctaattgaggatacactacacttgaactacagggaggaccatgtacccgtgaatgcttcagttattattggctgtggtcaaaagcaaagtggtgattatctggatggtattgcaccggatggactccttggccttggaatggcagatatttcagttcctagtttccttgctagagctggactagttcagaattccttctcgatgtgctttaaggaagatagttctgggagaattttctttggagaccaaggagtgccctctcaacagtctacaccgtttgttcctctgtatggcaaacttcaaacttatgctgttaatgtcgacaaatcttgtattggacataaatgtcttgagggtactagcttcaaggctttagtcgatagtggaacatcatttacttctcttcctttcgacgtttacaaggctttcacaatggagtttgacaaacaaatgaatgctacaagggtgccttatgaagacactacctggaaatattgctacagtgctagtcctcttgagatgcctgatgtgccaaccataaccctgacatttgctgcggacaagagcttgcaagctgttaatcctatcttgccatttaatgacaaacagggggcacttgccgggttctgcttagctgtgctgccatcaacagaacccattggaattattgcccagaatttcctggttggataccatgttgttttcgacagagaaagcatgaagctgggctggtaccgctccgaatgtaagccatatccatctgccatggaaatagaccaaattctaccattcacctggtactccggaagtgctaaacatgtggtaacggc

SEQ ID NO: 123996 - DNA, 1496 bp, Zea Mays
tgcgctagcttcagagcatcatcaccactccacaccaccgccccagctcgcttccctccccgctacacggtcgctcaccagtcaccacccaccactgcttccatgctcctcgcctcgtttccagctcgcgaaacttagctccagatcctctcccccccccccccccatccaccgcgccgcattaacctcagatccacccggcgagctcatttcagatccatccatgcgcttcccgttccttttcgccctccagctggtcgccttggcggcggcagcgtcggcggccgaggtcgcggtgacgcgctcttcgaggatggtgcaccgtctgtcagacgaggcccggctggaggtgggcccgcgtgtggggtggtggccgcagcgaggaagcggggagtactaccgcgcgctagtgaggagcgatatccagcggcagaagcggcggctcgcggtcctctcgctctcaaagggcggcagcaccttctccccgggcaacgacttaggctggctatattacgcttgggtggatgttgggacgcctgctacctcctttttggttgcattggatactggtagtgaccttttctgggttccctgtgactgtatccagtgtgctcccttgtctggctaccgtggaaatctggatagagatcttagaatatacaggcctgctgaatcgacaacaagtcggcatcttccttgcagccatgagctatgccaatcggttccaggctgcacaaacccaaagcagccttgcccatacaacattgactacttttcagaaaatactaccagctctggtttgctaattgaggatacactacacttgaactacagggaggaccatgtacccgtgaatgcttcagttattattgggtaaattcttgccgctttctcagtcaacatgaactttgtacttatacttcataagcaataccgtttccatggcataaatgagtaatgctatttggcaaatcacattgtcctcacatggattgttgtattgtacatttactagtgaagtactcataattactcgttacactttgtaggtatcagatctgtgcatttgcataagacattagtatgtttatccatagccactctcccaatctttgcctcttgatttcatcttgtgttgttactgagcttcaatgcaatcttgtatcaaaataactggagttagagatgctgctcaatggttgattgtcatgattttcctgactttgtggcacttagttttactgacattgtgtgtccttctggtatagctgtggtcaaaagcaaagtggtgattatctggatggtattgcaccggatggactccttggccttggaatggcagatatttcagttcctagtttccttgctagagctggactagttcagaattccttctcgatgtgctttaaggaagatagttctgggagaattttctttggagaccaaggagtgccctctcaacagtctacaccgtttgttcctctgtatggcaaact

SEQ ID NO: 123997 - DNA, 873 bp, Zea Mays
tgcgctagcttcagagcatcatcaccactccacaccaccgccccagctcgcttccctccccgctacacggtcgctcaccagtcaccacccaccactgcttccatgctcctcgcctcgtttccagctcgcgaaacttagctccagatcctctcccccccccccccccatccaccgcgccgcattaacctcagatccacccggcgagctcatttcagatccatccatgcgcttcccgttccttttcgccctccagctggtcgccttggcggcggcagcgtcggcggccgaggtcgcggtgacgcgctcttcgaggatggtgcaccgtctgtcagacgaggcccggctggaggtgggcccgcgtgtggggtggtggccgcagcgaggaagcggggagtactaccgcgcgctagtgaggagcgatatccagcggcagaagcggcggctcgcggtcctctcgctctcaaagggcggcagcaccttctccccgggcaacgacttaggctggctatattacgcttgggtggatgttgggacgcctgctacctcctttttggttgcattggatactggtagtgaccttttctgggttccctgtgactgtatccagtgtgctcccttgtctggctaccgtggaaatctggtatgcacccccttagttcagtaactttgatgttaatatctgaagatgtcgtattgtcaagcggctgtcagcttgagttgggacctacgagaatcttttttttcccaaagacatatttgcttggttcatgccaaattactgatgcagatgatgacctgaatcttgacatttttattacctaagacacaaatcttggttgaagaaactaatacattgcatgcggtttgctctaa

SEQ ID NO: 123998 - DNA, 189 bp, Zea Mays
atgccgaggccgagggcgaggcagagcgagggattctatgcgcggcgcgaggcgggcagtcagcagcagcaggaggaggaggaaacagaccgccggccgggattcgacgtcggcgatggcttctatctctggcgttttgaccgccctgggtctcgtcgccttcttccctgttctgtactgctgccgtag

SEQ ID NO: 123999 - DNA, 1760 bp, Zea Mays
ctttgtgggaaaagatgcaaccacgtttcattcagagtaaagtgtaatgctagcatgtctatctcataaagcatagctaagcaaaatttactccaacatacaggaaatgcctgcacctaaacatgagactcaccaaatttcagcatgatggatttttttttctttcggttcattccatatcttcatgttctgctaggtattcagatggatgcagaaacaacggtggtatgttgctgacaacggcatctactccaagttaatatctgtgatgggaaggaaagggcagatacggatggcaatgtggctgttctctcagatgcggaacagcgggtgcaagcctgacacttctgtatataactcccttatcggcgcacatctgcattcacgagacaagactaaggctttggccaaagctctcggctattttgagaagatgaagtgtatagagagatgtcagccgactattgtgacatacaacattctgctaagggcttttgcacaggctggtgacacaaagcaggtagacatgttgttcaaggatctggatgaaagtgtagtatcgcctgacgtatatacttacaatggggtgcttgacgcatacgggaagaatggcatgatcaaagagatggaatctgtgttggtgcggatgaaaagcacgcaatgccgtccagatgtgatcacattcaacatactcatagattcatacgggagaaagcagacatttgataagatggagcaggtgttcaagagcctactgcggtcaaaggagaggcctacacacccgacgtttaattccatgataacaaattatgggagagcaaggctcagagagaaagcggagtctgtggttgagaagatggaagaattgggattcaaaccaaactatgtgacacaggaatgcctcatcataatgtacgctcattgtgattgtgtatcaaaggcccggcaagtgtttgatgagcttgtgacctcgcaaaccaaagtgcacctttcttcgttgaactcgatgcttgaagcctactgcatgaacggcttgcacacagaagcagatcggctgctggatactgcactgcagcaatgtgttgtgcccaatggttccacctacaagctgctctacaaggcctacaccaaggcgaacgataagttactagtgcagaagttgctcaagagaatgaataaacaggggattgtcccgaacaaaaagttcttcctggacgctttggaagcatttggcacctctgacaggaaacccaggacatcgccaggcataaactctgcaagcaagccaagtacagattctgctggtgattcagaaacagctacttctgacaaaccagaggtaagcgtttggcatgtagctgctacataaggctgttggtttgagcaagctcgtcgaattacctgacatcaggaagaacacatttgatctgcaccagaaaccgttaatacagtgtacttggagctacaggagttcctctactcccaacaggacgctcctttcttaacggaagaatgctaaaacctttcgtgtttcggcaaaatctgcttgtacatgtactctgttatcaaacgtaggtattttgtttctagtcattattgggcatcacaaaaattctggctctctgtactcgtcgattgttattacatgcctgttccttcaatccttctgtggtctctatttactgagcatctcccgatacataaaactgggaactggaatgacatgcatgctgcagcacgttgtttcagaaaaatgctcc

SEQ ID NO: 124000 - DNA, 1958 bp, Zea Mays
caacttttctgtaactcgtctaatctgtaatctgcacggctccacccctatccccttcctctcccctacccaagcaggcaggcagacatcgcaattcttcaattgccaaccacagcgcagtccaatgcagcactagagccggcgcagcctttctttggtccaacccgatgcttgcctgcccaagcacatcaagtccatggccgcagcggcagccgccgtccccgtgcccgggcgggggtggcggcgccacgcgccacgtggcgctcgcggccaggagcaagcggcggggtgcgggccccgcggcggcggagggggtggacgaggcggcggcggaagcggcggagctggtgcgctcgctgctgcggaggacggcgggcggcaaggagaggctggtgccggtgctggaccggcacgtgcgggtggtccgcaccgagcactgcttcctcctcttcgaggagctcggccgtcgcgacgcctggctccagtgtctcgatgtattcagatggatgcagaaacaacggtggtatgttgctgacaacggcatctactccaagttaatatctgtgatgggaaggaaagggcagatacggatggcaatgtggctgttctctcagatgcggaacagcgggtgcaagcctgacacttctgtatataactcccttatcggcgcacatctgcattcacgagacaagactaaggctttggccaaagctctcggctattttgagaagatgaagtgtatagagagatgtcagccgactattgtgacatacaacattctgctaagggcttttgcacaggctggtgacacaaagcaggtagacatgttgttcaaggatctggatgaaagtgtagtatcgcctgacgtatatacttacaatggggtgcttgacgcatacgggaagaatggcatgatcaaagagatggaatctgtgttggtgcggatgaaaagcacgcaatgccgtccagatgtgatcacattcaacatactcatagattcatacgggagaaagcagacatttgataagatggagcaggtgttcaagagcctactgcggtcaaaggagaggcctacacacccgacgtttaattccatgataacaaattatgggagagcaaggctcagagagaaagcggagtctgtggttgagaagatggaagaattgggattcaaaccaaactatgtgacacaggaatgcctcatcataatgtacgctcattgtgattgtgtatcaaaggcccggcaagtgtttgatgagcttgtgacctcgcaaaccaaagtgcacctttcttcgttgaactcgatgcttgaagcctactgcatgaacggcttgcacacagaagcagatcggctgctggatactgcactgcagcaatgtgttgtgcccaatggttccacctacaagctgctctacaaggcctacaccaaggcgaacgataagttactagtgcagaagttgctcaagagaatgaataaacaggggattgtcccgaacaaaaagttcttcctggacgctttggaagcatttggcacctctgacaggaaacccaggacatcgccaggcataaactctgcaagcaagccaagtacagattctgctggtgattcagaaacagctacttctgacaaaccagaggtaagcgtttggcatgtagctgctacataaggctgttggtttgagcaagctcgtcgaattacctgacatcaggaagaacacatttgatctgcaccagaaaccgttaatacagtgtacttggagctacaggagttcctctactcccaacaggacgctcctttcttaacggaagaatgctaaaacctttcgtgtttcggcaaaatctgcttgtacatgtactctgttatcaaacgtaggtattttgtttctagtcattattgggcatcacaaaaattctggctctctgtactcgtcgattgttattacatgcctgttccttca

SEQ ID NO: 124001 - DNA, 1565 bp, Zea Mays
gactgaactggtctgtattaaactctgcctggttgcatcggttcatattattgtaacaaaattgtaaaatcacgcgtattttaacacggataccgacacttgcagtggaaatatgcccccctctctctctttttttttaaaaaaaaacagttccatgataataaactgctgtgcgcctgtgcccctcttgggtcctggctgatgaagcggttggcctgaattttcttttcgggatgactgcttctgtaaaatccccaggccccaaggcccaagcgcagcgcagacgcacaatcatccgtttcttatccacctcatcccaccactggccacacgtctccggccacgcgacgccctccagccccaccgtcgtgcgatccgtcggccacccaatcccgtacgtccgtccgctcccaccccaagtccccaaccccctcagtcctctccgccctggacctttccaagtctcaaaccagagcgaggccgcactgcccgcgagtcctccactccgaccgcacgatggctgcgctgcgcctcgcctccttcaccctccgccccgccgctgccgcggcctccgcctcctccggcgcgaccccagccgcgtccggctccgtctccgtctccttcacccgcgcggcgcgggggctgccctccctccgcctggccccgccccgccgccgcggggacctcgccaggccccgcgccgcggccgaggccgcggcggagagctacgcgtccgcgctgtcggaggtggccgtcgagaacggcaccctcgagcagacggtctccgacctggagaagctggagaaggtcttcgcggacgaggccgtcgccgagttcttcgacaaccccaccgtcccgcgcgaggagaaggccgagctcatcgacgagatcgccaggtcgtccgagctgcagccgcacgtcgtcaacttcctcaacgtcgtcgtcgacaacttccgcgcggccatcgtgccgcagatcgtcgccgagttcgagaacgtctacaactcgctcacgggcaccgaggtcgccaccgtcacctccgtcgtgcagctcgagtcgcaggacctggcgcagatcgcgcagcacgtccagaagatgaccggcgcccagaacgtccgcatcaagacgcagctcgacccggagctcatcgccggcttcaccgtgcagtacggccgcgacggctccagcttaatcgacatgagcgtccggaagcagatcgaggagatcgcgtccgagttcgagttgcccgccgtcccgctcgaagtctgaccggcccgaggcgtcctccatcctcgcccatgagatgctttgttgctactgtctgaaaggtatggcaagaatcaagcgggaatgtcgttggtcctgtccccttcaggcctgcggatcagtggtggtggctccggatctgcaatacatatcaacggacattcttctgtgcgtttctgttttccattttttggcgggaacctgtgtaaaagtttctcctttttgattgtggttgagagacactgtaatatggttaaaacacacatatgtagctgggtctgcacctcctctctccgata

SEQ ID NO: 124002 - DNA, 1466 bp, Zea Mays
gactgaactggtctgtattaaactctgcctggttgcatcggttcatattattgtaacaaaattgtaaaatcacgcgtattttaacacggataccgacacttgcagtggaaatatgcccccctctctctctttttttttaaaaaaaaacagttccatgataataaactgctgtgcgcctgtgcccctcttgggtcctggctgatgaagcggttggcctgaattttcttttcgggatgactgcttctgtaaaatccccaggccccaaggcccaagcgcagcgcagacgcacaatcatccgtttcttatccacctcatcccaccactggccacacgtctccggccacgcgacgccctccagccccaccgtcgtgcgatccgtcggccacccaatcccgtacgtccgtccgctcccaccccaagtccccaaccccctcagtcctctccgccctggacctttccaagtctcaaaccagagcgaggccgcactgcccgcgagtcctccactccgaccgcacgatggctgcgctgcgcctcgcctccttcaccctccgccccgccgctgccgcggcctccgcctcctccggcgcgaccccagccgcgtccggctccgtctccgtctccttcacccgcgcggcgcgggggctgccctccctccgcctggccccgccccgccgccgcggggacctcgccaggccccgcgccgcggccgaggccgcggcggagagctacgcgtccgcgctgtcggaggtggccgtcgagaacggcaccctcgagcagacggtctccgacctggagaagctggagaaggtcttcgcggacgaggccgtcgccgagttcttcgacaaccccaccgtcccgcgcgaggagaaggccgagctcatcgacgagatcgccaggtcgtccgagctgcagccgcacgtcgtcaacttcctcaacgtcgtcgtcgacaacttccgcgcggccatcgtgccgcagatcgtcgccgagttcgagaacgtctacaactcgctcacgggcaccgaggtcgccaccgtcacctccgtcgtgcagctcgagtcgcaggacctggcgcagatcgcgcagcacgtccagaagatgaccggcgcccagaacgtccgcatcaagacgcagctcgacccggagctcatcgccggcttcaccgtgcagtacggccgcgacggctccagcttaatcgacatgagcgtccggaagcagatcgaggagatcgcgtccgagttcgagttgcccgccgtcccgctcgaagtctgaccggcccgaggcgtcctccatcctcgcccatgagatgctttggtgcttcctgctgcctctctctccctgctcttcatgtgtaccattctctgattgaatatttgagtgaatggtgaatactgcatacctggatttcaggattcatatttgaatgaatggtggatacaccgcatacctggattccaggatcgtattga

SEQ ID NO: 124003 - DNA, 252 bp, Zea Mays
atgcccatggagcaagcattcaggcactgcgataaagacacgctgaagatggccatgctgaaacacgaagagattttcagacagcaagttcacgagctccatcgcttatacaggatccagaagctcctgatgcgagacttcacacgggagctcaagctcaagagccagaggagcctgcccacctcgccgaacggcagctgcgccgagtacagcagaggggctgccggctcctctgtgcccctcgcgacttag

SEQ ID NO: 124004 - DNA, 110 bp, Zea Mays
ccaaggtaagtacattttctaaagaaacatcaagtacttctttttacaccccaaattacagagccagtaggatggtgagatcccccctcccacatgcgcacacgcatgcg

SEQ ID NO: 124005 - DNA, 1027 bp, Zea Mays
gatcaatgattactatggagattgcatgtgtttttgtaccagtctaatgttattgtactatgatttcagagaaaatcagaagaagttctgttctacttaaacgggaggtgtatttacttagtgggaatgatgggttctggaaaaagtactgtggggaagatcatgtctgaagtcttgggttattcgttctttgatagtgacaaattagtggagcaagctgttggaatgccttcagttgctcaaatattcaaagttcacagtgaagccttctttcgggataatgagagtagcgtcttgagggatctgtcctccatgcgacgattagttgttgccaccggaggtggtgctgtcatccgaccagttaactggaaatatatgaagaagggcctatccgtttggttagatgtgcccttggatgctcttgctaggcgcattgctaaagtgggaaccgcttctcgtcctcttctggaccaaccgtccggtgatccatacacaatggccttttctaagctcagcatgcttgcagagcaaaggggtgatgcttatgcaaatgcggatgtaagggtttctctggaagagattgcatctaaacaaggtcatggcgatgtctctaagctgatgccgactgatatcgcaattgagtcacttcataagatcgagagtttcgtcatcgagcacgctgctgataatccagctagcgactcgcaagctgagtcacagatccaaaggatacagaccttgtaatatcttaatccttctgttttgtaccgaagcgtaccccctagagcatcgttggtttatttgttcgttgaagtgtcacgagggagagaaaaaaaaccctgaagtatttcttcttgtaagttgtaaaggaatggaataaaggagctaataatccgaagtgtaccgttggctgaaacatcagtttgatactttggtgaacacctatgctggttgctggacatctcatctcagcaaaacgtaaacaacgtggacttgttgaaccggcgtgggctggaggctggaatcg

SEQ ID NO: 124006 - DNA, 1083 bp, Zea Mays
atggacatgggcgaagccaggaaagaggtgtcaccggtgtccagggccaactggccaaggcagggcccgtggaggcagtggtttggagacgcagagaagctcacaaaggcccttttctcctttgcgactcgactagctcctgttatcatatttgtggacgaggttgacagcttacttggtgcaagaggtggtgcatttgagcatgaagcaacaagaaggatgcgcaatgaattcatggcagcttgggatggtctcaggtccaaagagaaccaacggatccttattcttggtgcaacaaatcgtccatttgatctggatgatgctgtgatacggcgtttacctagacggatatatgttgaccttccggatgcgcagaaccgaatgaaaattctaaagattttacttgcgaaggaaaaactagaatctgattttaagttcgatgagcttgcaaatgccacagaaggctattcagggagcgacctaaagaacctatgtgtagctgcagcatataggccagtccatgaactactagaagaagagaaaaagggacgtgtgagtaacgaaaacagttatctgagacccctttgcttggatgattttatccaagcaaaagctaaggttagctcgtctgtttcttatgatgcaacaagtatgaatgaattgagaaaatggaacgagcagtatggggaaggtggcagcaggactaaatcaccatttgggtttggcaactgacactacagtagagatttaccaatactgtatctttgtaacatttaggctgcctcttgttggtagattagggagtcagttccatttttttaccatgagcttatttgaacaacctcgtaatcacctcgtgcaaacaaaaaagaatctagttaaacgccaattttgcctactagttaatggtcggaaataccagtgtagaatcagaaatcggctacacactacaaaataatgtatctgagctactctgggtaagcattaagctttaacaagatgtaaacggcttaagaattttcagttaattcatactagttctcagcatggaattcagtagaactaatttagtattgatagcta

SEQ ID NO: 124007 - DNA, 1226 bp, Zea Mays
acgcaaaccacagcgaccgaacaaacaacatgtatgatttcacaagccgcccgctgaaaccaaagccttttgccctgtcgtcaggggcgaggtttcatcaacctcagtacctcaccctcctctcccggagagcctctcgcctccgctccgctcctctgccctgccctgcccttccccgccacaccaaccaaggcgccaaaaataaacgccgcgccactgcgtggcgagggagcctgtcacattgcttgccgctgcgccctgccgcctcgtcttcgcggaggcctcgtcgcgcgacgatatggagctcgccgaggcgccggcgcccgtgcccgacgaggacgggctggacgaacgcggcgtggcgctgcacctcccgaggctgctggccggcgtcgtctccggcgccctcactggcatcttcgctctcgctggagctctgaccggggcagtcaccggcgcggtggcgggcagggcttccgacagcggcggcgtcctgcggggagctggactgggggcggtcgccggagctgtcctctccattgaggtccttgaggcttctcgcgcttactggtgctcgtcggaccggctgggctcgcacggcggagcatcgtccatggctgatttcattgagcagcttcttcgtgcccggtttgtgcaagagcaatttactgcttcaggatatgcatcatatcgctggcaggatgacctatacgacatctttggggacatttcatctgaagggctctcgcaagagtcactgaagaaactaccacatcatgtggtcagtgaccaccagacgcgggacttactcggcgaaatcctgtgttgtcctatctgtctacaggacattgtggccggtgagacagcgaggaggctgcccggctgctctcacgccttccaccagccttgcgtggacagatggctcgtcggccatggctcgtgccccgtctgcaggcaacgcgtgtaaaagatatataggcgacctgtgtctgtgtacgtagatagacgtggagtgaagagaaacgaccgtgcgcatctggcaatctcacttcgtttcttgcaccccggttccaacatgtaatggcaatggaataagattgctgtcggagcagttcctgtttctgtagaatttgtttgtccgcttggcgctccgatccgcgtgatttctgaacaggctccgggcgctgttccgcccgtgtcggcgatattcttgctgtcctcgttct

SEQ ID NO: 124008 - DNA, 1295 bp, Zea Mays
acgcaaaccacagcgaccgaacaaacaacatgtatgatttcacaagccgcccgctgaaaccaaagccttttgccctgtcgtcaggggcgaggtttcatcaacctcagtacctcaccctcctctcccggagagcctctcgcctccgctccgctcctctgccctgccctgcccttccccgccacaccaaccaaggcgccaaaaataaacgccgcgccactgcgtggcgagggagcctgtcacattgcttgccgctgcgccctgccgcctcgtcttcgcggaggcctcgtcgcgcgacgatatggagctcgccgaggcgccggcgcccgtgcccgacgaggacgggctggacgaacgcggcgtggcgctgcacctcccgaggctgctggccggcgtcgtctccggcgccctcactggcatcttcgctctcggtacttgcacagttgcacttacttgcgcaagctcctttcgcctcccttttgccctgttgttagctgtcctgagatcgagctcgatcgacgttggctctgtgtggtgcgtgcgtgcatgtgccgcgtacgtccgcgtgtaaagctggagctctgaccggggcagtcaccggcgcggtggcgggcagggcttccgacagcggcggcgtcctgcggggagctggactgggggcggtcgccggagctgtcctctccattgaggtccttgaggcttctcgcgcttactggtgctcgtcggaccggctgggctcgcacggcggagcatcgtccatggctgatttcattgagcagcttcttcgtgcccggtttgtgcaagagcaatttactgcttcaggatatgcatcatatcgctggcagctcagcatatcatattttggtcaggatgacctatacgacatctttggggacatttcatctgaagggctctcgcaagagtcactgaagaaactaccacatcatgtggtcagtgaccaccagacgcgggacttactcggcgaaatcctgtgttgtcctatctgtctacaggacattgtggccggtgagacagcgaggaggctgcccggctgctctcacgccttccaccagccttgcgtggacagatggctcgtcggccatggctcgtgccccgtctgcaggcaacgcgtgtaaaagatatataggcgacctgtgtctgtgtacgtagatagacgtggagtgaagagaaacgaccgtgcgcatctggcaatctcacttcgtttcttgcaccccggttccaacatgtaatggcaatggaataagattgctgtcggagcagttcctgtttctgtagaa

SEQ ID NO: 124009 - DNA, 1233 bp, Zea Mays
acgcaaaccacagcgaccgaacaaacaacatgtatgatttcacaagccgcccgctgaaaccaaagccttttgccctgtcgtcaggggcgaggtttcatcaacctcagtacctcaccctcctctcccggagagcctctcgcctccgctccgctcctctgccctgccctgcccttccccgccacaccaaccaaggcgccaaaaataaacgccgcgccactgcgtggcgagggagcctgtcacattgcttgccgctgcgccctgccgcctcgtcttcgcggaggcctcgtcgcgcgacgatatggagctcgccgaggcgccggcgcccgtgcccgacgaggacgggctggacgaacgcggcgtggcgctgcacctcccgaggctgctggccggcgtcgtctccggcgccctcactggcatcttcgctctcgctggagctctgaccggggcagtcaccggcgcggtggcgggcagggcttccgacagcggcggcgtcctgcggggagctggactgggggcggtcgccggagctgtcctctccattgaggtccttgaggcttctcgcgcttactggtgctcgtcggaccggctgggctcgcacggcggagcatcgtccatggctgatttcattgagcagcttcttcgtgcccggtttgtgcaagagcaatttactgcttcaggatatgcatcatatcgctggcaggatgacctatacgacatctttggggacatttcatctgaagggctctcgcaagagtcactgaagaaactaccacatcatgtggtcagtgaccaccagacgcgggacttactcggcgaaatcctgtgttgtcctatctgtctacaggctacaactggtttcttcaaaaatggtttccgagcgagatagtagatgagaccatgaatgcaagtccaggcgcacgcaatggttggacaacgagacaatgaatgcatggacattgtggccggtgagacagcgaggaggctgcccggctgctctcacgccttccaccagccttgcgtggacagatggctcgtcggccatggctcgtgccccgtctgcaggcaacgcgtgtaaaagatatataggcgacctgtgtctgtgtacgtagatagacgtggagtgaagagaaacgaccgtgcgcatctggcaatctcacttcgtttcttgcaccccggttccaacatgtaatggcaatggaataagattgctgtcggagcagttcctgtttctgt

SEQ ID NO: 124010 - DNA, 1267 bp, Zea Mays
acgcaaaccacagcgaccgaacaaacaacatgtatgatttcacaagccgcccgctgaaaccaaagccttttgccctgtcgtcaggggcgaggtttcatcaacctcagtacctcaccctcctctcccggagagcctctcgcctccgctccgctcctctgccctgccctgcccttccccgccacaccaaccaaggcgccaaaaataaacgccgcgccactgcgtggcgagggagcctgtcacattgcttgccgctgcgccctgccgcctcgtcttcgcggaggcctcgtcgcgcgacgatatggagctcgccgaggcgccggcgcccgtgcccgacgaggacgggctggacgaacgcggcgtggcgctgcacctcccgaggctgctggccggcgtcgtctccggcgccctcactggcatcttcgctctcggtacttgcacagttgcacttacttgcgcaagctcctttcgcctcccttttgccctgttgttagctgtcctgagatcgagctcgatcgacgttggctctgtgtggtgcgtgcgtgcatgtgccgcgtacgtccgcgtgtaaagctggagctctgaccggggcagtcaccggcgcggtggcgggcagggcttccgacagcggcggcgtcctgcggggagctggactgggggcggtcgccggagctgtcctctccattgaggtccttgaggcttctcgcgcttactggtgctcgtcggaccggctgggctcgcacggcggagcatcgtccatggctgatttcattgagcagcttcttcgtgcccggtttgtgcaagagcaatttactgcttcaggatatgcatcatatcgctggcaggatgacctatacgacatctttggggacatttcatctgaagggctctcgcaagagtcactgaagaaactaccacatcatgtggtcagtgaccaccagacgcgggacttactcggcgaaatcctgtgttgtcctatctgtctacaggacattgtggccggtgagacagcgaggaggctgcccggctgctctcacgccttccaccagccttgcgtggacagatggctcgtcggccatggctcgtgccccgtctgcaggcaacgcgtgtaaaagatatataggcgacctgtgtctgtgtacgtagatagacgtggagtgaagagaaacgaccgtgcgcatctggcaatctcacttcgtttcttgcaccccggttccaacatgtaatggcaatggaataagattgctgtcggagcagttcctgtttctgt

SEQ ID NO: 124011 - DNA, 938 bp, Zea Mays
acgcaaaccacagcgaccgaacaaacaacatgtatgatttcacaagccgcccgctgaaaccaaagccttttgccctgtcgtcaggggcgaggtttcatcaacctcagtacctcaccctcctctcccggagagcctctcgcctccgctccgctcctctgccctgccctgcccttccccgccacaccaaccaaggcgccaaaaataaacgccgcgccactgcgtggcgagggagcctgtcacattgcttgccgctgcgccctgccgcctcgtcttcgcggaggcctcgtcgcgcgacgatatggagctcgccgaggcgccggcgcccgtgcccgacgaggacgggctggacgaacgcggcgtggcgctgcacctcccgaggctgctggccggcgtcgtctccggcgccctcactggcatcttcgctctcgctggagctctgaccggggcagtcaccggcgcggtggcgggcagggcttccgacagcggcggcgtcctgcggggagctggactgggggcggtcgccggagctgtcctctccattgaggtccttgaggcttctcgcgcttactggtgctcgtcggaccggctgggctcgcacggcggagcatcgtccatggctgatttcattgagcagcttcttcgtgcccggtttgtgcaagagcaatttactgcttcaggatatgcatcatatcgctggcaggatgacctatacgacatctttggggacatttcatctgaagggctctcgcaagagtcactgaagaaactaccacatcatgtggtcagtgaccaccagacgcgggacttactcggcgaaatcctgtgttgtcctatctgtctacaggtacggtctgagcaagcgcgatcctaccactacagagtaactgtcaaagaaaccttctgccacaatgcatgtatacagtatgcactttgtttac

SEQ ID NO: 124012 - DNA, 1348 bp, Zea Mays
cgccatctgcgtgcggtcgtgtggaactgtagtgctggacatcctcgccttccagccttctcgaaaatcgaaaccctagaccgcgcgccccctcgccctccggccttccacgtccgatccgatccaaaatgcataagctaggcagaggaagccgggacaaggtgcaacagttcatggcaattaccggcgcaagtgagaaagctgcccttcaggctcttaaagctagtgattggcacttggaaggagcttttgatgttttctacagccagccacaaattgctgttgctaatactcgacatctggaagagctctacaacagatataaagaaccagatgctgatatgataatggtggaaggcatatcacagatctgcaatgatttacaggcccgcacatcatttattttggttggctatcttgtcttcatctatgtgtcctgatataagattctgatacgcaaatcatgtgtgtttccctttgtcaggtggatcctcaggatattgttatgcttgtcatatcgtggcatatgaaagcttccactatgtgtgaattcactcgccaggagttcattggtggactgcagtcaataggagtggattcaatagagaagcttcaggcgaagttaccttcattgcgagctgagcttaaagatgatcagaagttccatgaaatatacaactttgcatttgcctgggcaagggagaagggccagaaatctctcgcattggagactgctattggcatgtggcagttgctatttgctgaaaggagctggcctctcattgactactggtgccaatttctacaggtaaggcataataaagcaatctccagggatacatgggcacagttattggagtttgttaagacaattgatcctcagctaaccaactatgacgaagaaggtgcttggccctacctaatcgatgaatttgtggactacttgaaagagaacggtcttgcctagcatagaaggtgtacggaattgggctgtaggggggagaatttgtcacccacaaggccaccatcattgtataacttaatggtcggatgcttgtattcattgcactaccaatagctaatgcggctcgtgcgtctggggatggagtttatcctctatatagacaaaacttgttgaatgatgtgggtgtaaaacgaaggctagaatggaagtcaagccctggttatcgccattttgaattcctcatcacgtgcctcgcctacgtcattgtgactttgccatcctgagctcgttgcttgaatgatcttgagtattactgcccccgttcgcttatatttatcgctgtttgaactaagcagcgtcaaaatcaaaaaaaaataaaaaatc

SEQ ID NO: 124013 - DNA, 1484 bp, Zea Mays
attgcagtagtacgccatctgcgtgcggtcgtgtggaactgtagtgctggacatcctcgccttccagccttctcgaaaatcgaaaccctagaccgcgcgccccctcgccctccggccttccacgtccgatccgatccaaaatgcataagctaggcagaggaagccgggacaaggtgcaacagttcatggcaattaccggcgcaagtgagaaagctgcccttcaggctcttaaagctagtgattggcacttggaaggagcttttgatgttttctacagccagccacaaattgctgttgctaatactcgacatctggaagagctctacaacagatataaagaaccagatgctgatatgataatggtggaaggcatatcacagatctgcaatgatttacaggtggatcctcaggatattgttatgcttgtcatatcgtggcatatgaaagcttccactatgtgtgaattcactcgccaggagttcattggtggactgcagtcaataggagtggattcaatagagaagcttcaggcgaagttaccttcattgcgagctgagcttaaagatgatcagaagttccatgaaatatacaactttgcatttgcctgggcaagggagaagggccagaaatctctcgcattggagactgctattggcatgtggcagttgctatttgctgaaaggagctggcctctcattgactactggtgccaatttctacaggtaaggcataataaagcaatctccagggatacatgggcacagttattggagtttgttaaggtaacctcaccctgactttttccctggaatacaatcacgagcgaaatgcatacccatcatatttggagaccatgccatactgtagctttgcttagcttatctgtaacccttcacctgcttttcatttgttgatgctgttgggtagtgtcagagcatgttcttcgctgctagtcgagcctgcttgtcgcgtaatgcatttctactcttatgttgttgcttcagacaattgatcctcagctaaccaactatgacgaagaaggtgcttggccctacctaatcgatgaatttgtggactacttgaaagagaacggtcttgcctagcatagaaggtgtacggaattgggctgtaggggggagaatttgtcacccacaaggccaccatcattgtataacttaatggtcggatgcttgtattcattgcactaccaatagctaatgcggctcgtgcgtctggggatggagtttatcctctatatagacaaaacttgttgaatgatgtgggtgtaaaacgaaggctagaatggaagtcaagccctggttatcgccattttgaattcctcatcacgtgcctcgcctacgtcattgtgactttgccatcctgagctcgttgcttgaatgatcttgagtattactgcccccgttcgcttatatttatcgctgtttgaactaagcagcgtcaaaatcaaaaaaaaataaaaaatc

SEQ ID NO: 124014 - DNA, 1262 bp, Zea Mays
attgcagtagtacgccatctgcgtgcggtcgtgtggaactgtagtgctggacatcctcgccttccagccttctcgaaaatcgaaaccctagaccgcgcgccccctcgccctccggccttccacgtccgatccgatccaaaatgcataagctaggcagaggaagccgggacaaggtgcaacagttcatggcaattaccggcgcaagtgagaaagctgcccttcaggctcttaaagctagtgattggcacttggaaggagcttttgatgttttctacagccagccacaaattgctgttgctaatactcgacatctggaagagctctacaacagatataaagaaccagatgctgatatgataatggtggaaggcatatcacagatctgcaatgatttacaggtggatcctcaggatattgttatgcttgtcatatcgtggcatatgaaagcttccactatgtgtgaattcactcgccaggagttcattggtggactgcagtcaataggagtggattcaatagagaagcttcaggcgaagttaccttcattgcgagctgagcttaaagatgatcagaagttccatgaaatatacaactttgcatttgcctgggcaagggagaagggccagaaatctctcgcattggagactgctattggcatgtggcagttgctatttgctgaaaggagctggcctctcattgactactggtgccaatttctacaggtaaggcataataaagcaatctccagggatacatgggcacagttattggagtttgttaagacaattgatcctcagctaaccaactatgacgaagaaggtgcttggccctacctaatcgatgaatttgtggactacttgaaagagaacggtcttgcctagcatagaaggtgtacggaattgggctgtaggggggagaatttgtcacccacaaggccaccatcattgtataacttaatggtcggatgcttgtattcattgcactaccaatagctaatgcggctcgtgcgtctggggatggagtttatcctctatatagacaaaacttgttgaatgatgtgggtgtaaaacgaaggctagaatggaagtcaagccctggttatcgccattttgaattcctcatcacgtgcctcgcctacgtcattgtgactttgccatcctgagctcgttgcttgaatgatcttgagtattactgcccccgttcgcttatatttatcgctgtttgaactaagcagcgtcaaaatcaaaaaaaaataaaaaatc

SEQ ID NO: 124015 - DNA, 1520 bp, Zea Mays
attgcagtagtacgccatctgcgtgcggtcgtgtggaactgtagtgctggacatcctcgccttccagccttctcgaaaatcgaaaccctagaccgcgcgccccctcgccctccggccttccacgtccgatccgatccaaaatgcataagctaggcagaggaagccgggacaaggtgcaacagttcatggcaattaccggcgcaagtgagaaagctgcccttcaggctcttaaagctagtgattggcacttggaaggagcttttgatgttttctacagccagccacaaattgctgttgctaatactcgacatctggaagagctctacaacagatataaaggtggaatattttactctctgttgcgccaatcatctttttatgccttgtctctgatttttttttccaattttacctgcgccatcatgttgtgtcttgattgctcagaaccagatgctgatatgataatggtggaaggcatatcacagatctgcaatgatttacaggtggatcctcaggatattgttatggtacgttcagattttatcttgtatcttctttctctatatgaacactaactaaatgcatttgcaaagttcaaatatgaaagttgacactgggatatagctatttgtgttattttgttcatacatgctttttgattacctcgtccctgttaacagcttgtcatatcgtggcatatgaaagcttccactatgtgtgaattcactcgccaggagttcattggtggactgcagtcaataggagtggattcaatagagaagcttcaggcgaagttaccttcattgcgagctgagcttaaagatgatcagaagttccatgaaatatacaactttgcatttgcctgggcaagggagaagggccagaaatctctcgcattggagactgctattggcatgtggcagttgctatttgctgaaaggagctggcctctcattgactactggtgccaatttctacaggtaaggcataataaagcaatctccagggatacatgggcacagttattggagtttgttaagacaattgatcctcagctaaccaactatgacgaagaaggtgcttggccctacctaatcgatgaatttgtggactacttgaaagagaacggtcttgcctagcatagaaggtgtacggaattgggctgtaggggggagaatttgtcacccacaaggccaccatcattgtataacttaatggtcggatgcttgtattcattgcactaccaatagctaatgcggctcgtgcgtctggggatggagtttatcctctatatagacaaaacttgttgaatgatgtgggtgtaaaacgaaggctagaatggaagtcaagccctggttatcgccattttgaattcctcatcacgtgcctcgcctacgtcattgtgactttgccatcctgagctcgttgcttgaatgatcttgagtattactgcccccgttcgcttatatttatcgctgtttgaactaagcagcgtcaaaatcaaaaaaaaataaaaaatc

SEQ ID NO: 124016 - DNA, 728 bp, Zea Mays
cgccatctgcgtgcggtcgtgtggaactgtagtgctggacatcctcgccttccagccttctcgaaaatcgaaaccctagaccgcgcgccccctcgccctccggccttccacgtccgatccgatccaaaatgcataagctaggcagaggaagccgggacaaggtgcaacagttcatggcaattaccggcgcaagtgagaaagctgcccttcaggctcttaaagctagtgattggcacttggaaggagcttttgatgttttctacagccagccacaaattgctgttgctaatactcgacatctggaagagctctacaacagatataaagaaccagatgctgatatgataatggtggaaggcatatcacagatctgcaatgatttacaggtcattttttgggattttttttctttgaatgtatgttgttacactaaagtatcagcctgcagtcacttgtaatggataggtatatcaggcatcaggctcgaaatttgtgaactgtgattgtttcctttgttttgtgttttcttcatagtattcttcaatggaattcgtggaactattcaattttttcctatctacatttgctcttagtctgtgaagtgtagtaaattatagatttagaataccagcaacagacaacctgtctaccaccatggcgcgaaagggcctctagccgagttggttaggtgtgttctgagtagcacttcttagatcctgagtttgaat

SEQ ID NO: 124017 - DNA, 1380 bp, Zea Mays
attgcagtagtacgccatctgcgtgcggtcgtgtggaactgtagtgctggacatcctcgccttccagccttctcgaaaatcgaaaccctagaccgcgcgccccctcgccctccggccttccacgtccgatccgatccaaaatgcataagctaggcagaggaagccgggacaaggtgcaacagttcatggcaattaccggcgcaaggtacatatatttttttaaacttttcgatttgttcggagagaccggtgttcagtgctaaattgtggtttggttggttagtggccgtagtatgtcaattttgcgagctgttgggagaacttgtttgtagtgcagcaacagcattcgtgttctgcaatttggcaataatatcatgctagaaagtaagaagttcttttggttgcaggaacatggaattttgtactgtcttttatgtggaaacatgtgttactgcctaatcttgatttgtaattttgtaatggaattctccaacacactggtagcattatactccccctttgtttgggatggaccactttttcatcttttaccaaaagttaacttttttttttggtgctgcaagagtgatccattgtcattgtcctgaaaaatcactagggttgtacattacagtcagtcatcggaccaactgaacctccgaggactactgtacactttagacactgctatcccaattttatttctgttaattttgtcaagcattgcatatttcacacagtgagaaagctgcccttcaggctcttaaagctagtgattggcacttggaaggagcttttgatgttttctacagccagccacaaattgctgttgctaatactcgacatctggaagagctctacaacagatataaaggtggaatattttactctctgttgcgccaatcatctttttatgccttgtctctgatttttttttccaattttacctgcgccatcatgttgtgtcttgattgctcagaaccagatgctgatatgataatggtggaaggcatatcacagatctgcaatgatttacaggtcattttttgggattttttttctttgaatgtatgttgttacactaaagtatcagcctgcagtcacttgtaatggataggtatatcaggcatcaggctcgaaatttgtgaactgtgattgtttcctttgttttgtgttttcttcatagtattcttcaatggaattcgtggaactattcaattttttcctatctacatttgctcttagtctgtgaagtgtagtaaattatagatttagaataccagcaacagacaacctgtctaccaccatggcgcgaaagggcctctagccgagttggttaggtgtgttctgagtagcacttcttagatcctgagtttgaat

SEQ ID NO: 124018 - DNA, 100 bp, Zea Mays
acataacgatgtatcgctcaatttcatgcaaagttatgagtgctgctttagttattaccatccccaaaggacttccagagaaactatcaaaaatcaagac

SEQ ID NO: 124019 - DNA, 99 bp, Zea Mays
gccctatgattggtatcttcagttggctcacaaaagacttcgaaaagctagtagcctcattttgggttcaagacaaacaacatccttcatgatgatagc

SEQ ID NO: 124020 - DNA, 272 bp, Zea Mays
caacttctatataactatgtccaaaaatctgttaaacaaataatgattgcaactgttgtctggtgtaattgcaactgctggtctgtgtgtgattgcaacctctatataactatgtccaaaaatctgttaaaacaaacaatgattgcaactgctgtctggtaattgcaactgctggtctggtgtgattgcaacttctatataactatgtccaaaaatttgttaaacaaaacaatgattgcaactgttgtctggtataattgcaactgctggtc

SEQ ID NO: 124021 - DNA, 1554 bp, Zea Mays
cctccaagaacggccgctcctcgcatttcttggacccgcacacccacgcttccaaaagttaggaggggaacccatcagccaagagctacgcaaacgcacagcgatgcacaagcacgagataccagccaccatgcgcctgtccctcctcctcgtcgtcgtggccgccctctcggcgcgcaccgcggcgcagctgccgctggcgggcggcggcggcggcgccctgaagccggacttctatagccagtcgtgcccgcgcgcggagcggatcattgcggaggtgatgcagacgaagcagatggcgaacccgacgacggccgcgggcctgctccgcgtcttcttccacgactgcttcgtcagcgggtgcgacgcgtcggtgctgatcgcgtccacccagttccagaagtcggagcacgacgcggagatcaaccactccctccccggggacgccttcgacgccgtggtgcgcgccaagctggccctggagctggagtgccccggggtggtgtcctgcgccgacatcctcgcactggcgtcgggcgtgctgattaccatgaccggcgggccccggtacccggttccgctggggcgcagggactcgctgtcgtcgtcgcccacggcgcccgacgtggagctgccgcacgccaacttcaccgtggaccgcctcatccagatgttcggcgccaaggggttcacggtgcaggagctggtggcgctgtccggcgcccacacgctgggcttctcccactgcaaggagttcgccgaccgcctctacaacttccgcaaccagggcgggaagccggagcagttcgaccccagcatgaacccgtcctacgccagggggctgcaggacgtgtgcagggactacctcaaggaccccaccatcgccgcgttcaacgacatcatgacgcccggcaagttcgacaacatgtacttcgtcaacctcgagcgcggcctcggcctgctcagcaccgacgaggagctgtggacggacccacgcaccaagcccctggtgcagctctatgcatccaacgccacagccttcttcgacgacttcggccgcgccatggagaagctcagcttgttcggcgtcaagaccggcgccgacggcgaggtcaggcggcgctgcgacgcctacaacagcggccccgccgtcgccgccaccatacccaagatgtgacgacgctgcgcgtggtacgacgacgggcgcgcacgtgcttgtctgcatgcggatcgatcgacggccgagctgtctggcacgacgacggcgtgttgatcgagggcctcggctcctcctgcgacggtcacgatggtgttaagatttcgtgccgaaatgtgatatgtttcatgctcgatcaagtaatttattcctaatctgtgtgctgcgcaaaagaaagaaaaacttcgaagtgttgcgctactcgctagtatgaattaattcgtttttccctttgatcgatggtcttgccagtttattcatcatcatacgcagatcatcacatatttacattgttttgtcgttttttttgttgctaaaggataatttgagaaccttaa

SEQ ID NO: 124022 - DNA, 1670 bp, Zea Mays
cactattttacattgacatatcggaggaagtacaccacctatctgcatctcccttcgcggcgcgaacggttcctctgacgtccggccgctgccatgtggggcatgccatccccgatcctgccggctttgcggtctgctcactcgatcgtcgaatagtgcgtcccttcggctcatcgcgcaaagcaaggaggcatggcagctagggttcgtgcgccactcatccccatctccctccgccgtcgactcccttcataccagtagcgccgcccaccccatccgccgaatagtagcgctgcccattccatccgctcggaagaaccgccgccctcctcccttcaccatccaccgcacctatccaaggtaaaagcacaatctgcgtattcgccgaaaagtagcgctgcccactccatccgttcggaagacccgccgccctcctcccctcaccatccaccgccattggcaaatccgtcgctaaggaggacaattgaccggcttaggtgaaccaccttgagttacgagctacagttttagtacaggatttcaagccgttcggttgctggtcatggtgttggctgttggtacagtatttggtgagagcttgatgtcacagcagcagtagaagcggtgctgtaaaacctggcagccgaacagcgtgaaaggaaggtttgtatttcaaaggatctataacaatcaaattctgcggttttgattatgtccgttctatcgttgagctgatattgtagttcagttctttcttgtgcttggagtattattacatacatgtatgacaatatgagttaataaacttggagcgctttgaattatgctatccgatgtagcatcataagagtcattataccttgaattagggtctgtttggatcaatagtgctaaactttagcaatacacttaaactttatcacttggagatccaaaatatgagtgctaaaaggtgctaaaaactgaagtgctaaactttagcactcaatagcagttgagctcttcaagatgtgctaaactttagtactctgttaaaattaagcacatgagatccaaacagtctcttagtagatggctgtagctttaatggatgcatatatgtatttactagataagaaattgcacatatcacttgttttgtacgagggcaacaccgattctagatttttccccgatttttttattttttagctgtcccagattttaatcagtgtagcttccaattagccatccagcttccgtcacccggtgggaaaagaggatgacatgtgcaggttacagacttccttcgcttaggtcttctccaccccgccctgctgcttgccgctgcggtccagacggccccgcgcgcgggggatcgcctcctgtgatgacttttgctccgcgaataaaatatctatacggaagatgcagcatttccctctgtcaatgatccccgtgattatacccattttgtttcctgaaaagtcaggaacctcgccagcctttcagaaatggtgtaaacaaatgtaccacgtagttttgtgagttgtgaccctagccggatcccggatactgttgtatttaatctcaagttggacaatgaatgatgaatatatatgtacattagagatcgtggtgtgctggctaaaatcccaattcagatttattcaatttatttgatgatgtct

SEQ ID NO: 124023 - DNA, 1644 bp, Zea Mays
cactattttacattgacatatcggaggaagtacaccacctatctgcatctcccttcgcggcgcgaacggttcctctgacgtccggccgctgccatgtggggcatgccatccccgatcctgccggctttgcggtctgctcactcgatcgtcgaatagtgcgtcccttcggctcatcgcgcaaagcaaggaggcatggcagctagggttcgtgcgccactcatccccatctccctccgccgtcgactcccttcataccagtagcgccgcccaccccatccgccgaatagtagcgctgcccattccatccgctcggaagaaccgccgccctcctcccttcaccatccaccgcacctatccaaggtaaaagcacaatctgcgtattcgccgaaaagtagcgctgcccactccatccgttcggaagacccgccgccctcctcccctcaccatccaccgcccctatccaaggcttaggtgaaccaccttgagttacgagctacagttttagtacaggatttcaagccgttcggttgctggtcatggtgttggctgttggtacagtatttggtgagagcttgatgtcacagcagcagtagaagcggtgctgtaaaacctggcagccgaacagcgtgaaaggaaggtttgtatttcaaaggatctataacaatcaaattctgcggttttgattatgtccgttctatcgttgagctgatattgtagttcagttctttcttgtgcttggagtattattacatacatgtatgacaatatgagttaataaacttggagcgctttgaattatgctatccgatgtagcatcataagagtcattataccttgaattagggtctgtttggatcaatagtgctaaactttagcaatacacttaaactttatcacttggagatccaaaatatgagtgctaaaaggtgctaaaaactgaagtgctaaactttagcactcaatagcagttgagctcttcaagatgtgctaaactttagtactctgttaaaattaagcacatgagatccaaacagtctcttagtagatggctgtagctttaatggatgcatatatgtatttactagataagaaattgcacatatcacttgttttgtacgagggcaacaccgattctagatttttccccgatttttttattttttagctgtcccagattttaatcagtgtagcttccaattagccatccagcttccgtcacccggtgggaaaagaggatgacatgtgcaggttacagacttccttcgcttaggtcttctccaccccgccctgctgcttgccgctgcggtccagacggccccgcgcgcgggggatcgcctcctgtgatgacttttgctccgcgaataaaatatctatacggaagatgcagcatttccctctgtcaatgatccccgtgattatacccattttgtttcctgaaaagtcaggaacctcgccagcctttcagaaatggtgtaaacaaatgtaccacgtagttttgtgagttgtgaccctagccggatcccggatactgttgtatttaatctcaagttggacaatgaatgatgaatatatatgtacattagagatcgtggtgtgctggctaaaatcccaattcagatttattcaatttatttgatgatgtct

SEQ ID NO: 124024 - DNA, 2069 bp, Zea Mays
cactattttacattgacatatcggaggaagtacaccacctatctgcatctcccttcgcggcgcgaacggttcctctgacgtccggccgctgccatgtggggcatgccatccccgatcctgccggctttgcggtctgctcactcgatcgtcgaatagtgcgtcccttcggctcatcgcgcaaagcaaggaggcatggcagctagggttcgtgcgccactcatccccatctccctccgccgtcgactcccttcataccagtagcgccgcccaccccatccgccgaatagtagcgctgcccattccatccgctcggaagaaccgccgccctcctcccttcaccatccaccgcacctatccaaggtaaaagcacaatctgcgtattcgccgaaaagtagcgctgcccactccatccgttcggaagacccgccgccctcctcccctcaccatccaccgccattggcaaatccgtcgctaaggaggacaattgaccggcttaggtgaaccaccttgagttacgagctacagttttagtacaggatttcaagccgttcggttgctggtcatggtgttggctgttggtacagtatttggtgagagcttgatgtcacagcagcagtagaagcggtgctgtaaaacctggcagccgaacagcgtgaaaggaaggtttgtatttcaaaggatctataacaatcaaattctgcggttttgattatgtccgttctatcgttgagctgatattgtagttcagttctttcttgtgcttggagtattattacatacatgtatgacaatatgagttaataaacttggagcgctttgaattatgctatccgatgtagcatcataagagtcattataccttgaattagggtctgtttggatcaatagtgctaaactttagcaatacacttaaactttatcacttggagatccaaaatatgagtgctaaaaggtgctaaaaactgaagtgctaaactttagcactcaatagcagttgagctcttcaagatgtgctaaactttagtactctgttaaaattaagcacatgagatccaaacagtctcttagtagatggctgtagctttaatggatgcatatatgtatttactagataagaaattgcacatatcacttgttttgtacgagggcaacaccgattctagatttttccccgatttttttattttttagctgtcccagattttaatcagtgtagcttccaattagccatccagcttccgtcacccggtgggaaaagaggatgacatgtgcaggttacagacttccttcgcttaggtcttctccaccccgccctgctgcttgccgctgcggtccagacggccccgcgcgcgggggatcgcctcctgtgatgacttttgctccgcgaataaaatatctatacggtgggttcttctttcgtcagtgcttataaggccattctcatttctcaatgggacttttatattcattaaatgcgataacacataatcacacctggttatattgcagtgtgatattgcactgcaattaataggggacacacacacacattagggttttataaaaactgagttggttctaaacatactagtttatgctccaatttatataaactagagtctcaatttcttaaaatcaagaaactattctcacttagttaaaggcactttatgaaaattaatgttgttccaaacaccattaaccagtttgtttttttataaatcagtttctagaaattggagatagaaactagattattaaaaactaggttgcttccaaacaagtttatagaaggtggtagagttccatgaccatgaaattctgcacacaagatgattataatcgtcatttgacctccaggaagatgcagcatttccctctgtcaatgatccccgtgattatacccattttgtttcctgaaaagtcaggaacctcgccagcctttcagaaatggtgtaaacaaatgtaccacgtagttttgtgagttgtgaccctagccggatcccggatactgttgtatttaatctcaagttggacaatgaatgatgaatatatatgtacattagaga

SEQ ID NO: 124025 - DNA, 1310 bp, Zea Mays
cactattttacattgacatatcggaggaagtacaccacctatctgcatctcccttcgcggcgcgaacggttcctctgacgtccggccgctgccatgtggggcatgccatccccgatcctgccggctttgcggtctgctcactcgatcgtcgaatagtgcgtcccttcggctcatcgcgcaaagcaaggaggcatggcagctagggttcgtgcgccactcatccccatctccctccgccgtcgactcccttcataccagtagcgccgcccaccccatccgccgaatagtagcgctgcccattccatccgctcggaagaaccgccgccctcctcccttcaccatccaccgcacctatccaaggtaaaagcacaatctgcgtattcgccgaaaagtagcgctgcccactccatccgttcggaagacccgccgccctcctcccctcaccatccaccgcccctatccaaggacattctccgtgcaccgcccttctatccccgtgcggaggttaggcctccacgccgaagcttgtttcaggcttgtcctagtacataatattgctcgcctctcctgtctcctctcctcgtcgagcggttgtgggtggtcgatccataaggccggaatggcaaaccaccaggagaagcccaccacgtccccaccgccccagccggcggagggcagcgtcgctcgcccccgcttgcccggcgtcggcaacgcacacccgggcagtgccggatacccaaacccgccagatgccgcgatccccgatgcggcgactcttcgggaccagtggcggtttgccgtgcggcagtacagccgctggtactcccacgcctggggcaccgccatccttgccggcgccgccttcttcgcgcttgggtggcttgtcaaggggtcaaacccgctcccgtcccgggccgagccacaacacggcgccattggcaaatccgtcgctaaggaggacaattgaccggcttaggtgaaccaccttgagttacgagctacagttttagtacaggatttcaagccgttcggttgctggtcatggtgttggctgttggtacagtatttggtgagagcttgatgtcacagcagcagtagaagcggtgctgtaaaacctggcagccgaacagcgtgaaaggaaggtttgtatttcaaaggatctataacaatcaaattctgcggttttgattatgtccgttctatcgttgagctgatattgtagttcagttctttcttgtgcttggagtattattacatacatgtatgacaatatgagttaataaacttggagcgctttgaattatgctatc

SEQ ID NO: 124026 - DNA, 116 bp, Zea Mays
ttttttttttgttattgccgcttccttacgagttacgaaatcgaacgcctaggctatctcctgcgtacccccatcgtatgtcatatttcattatttatttcaaacttcactaatat

SEQ ID NO: 124027 - DNA, 2114 bp, Zea Mays
ggtcatcggtcaggatgcactcatcgattcgtttcaaatcaacttaatccatattatacgagtgtactgaatagacatgtaaatgaaacaattcctgaactaatggaccaaaaactggaacctgtatcctgtccaagaattgtacaccaccaatcaagtaatttcttcccaactcatgatagtcacaacctccaacaacccagggcctaatgaatcaatatgtatcatagtgcaaaatgaacaagaatttggctccccatacccctattttactgtcttcgtcccctcgctgccgctgcaatctgtataccgcccctcacctcactgtcctgtacagccgagggcggcagctggcttgcagcagccgctgtggcggcactggtgcatcgcaaggcaattccattaccggccaagaaccacggcatccccaaatcaaagaactatcgtgttgcgtatctgaacttctaccatgccgccaaagatgacaatgctgaccgtgacggccctgaagatgatgaatcattctcgccaatgtagaggtcgtacgccttccaggtgtggtccagtgggcaaggcttgccggcgtcgagacggtcccatggcttgcccttcccggaccagtgcatgaggctgacaggcccgttatggagagggcggcagctaccgaacacgttgtcgccgcccaagccgtgctggttccaccggtggtcgacggcctctatctcgccggcgaagacgagcaggaaggggggcaaggagccaagctcgtagatcctcttctccttctgcatctccatccagcgctcgatgcgctggcggtagttgccgacgcgccacctccggaggtcgatgaccatgacacccgtgttgaagtagcagggcgcgcggcggcggccggcgaagaccctggcgccgaggacggggtcgtcccagaaggcgtcggtgaagtagcgcgagaagttggcgtggcagtactcgggcgcggcgacgaccgcggcggcgggcagccgcgtctcccagagccaccgcacgtcgtcgacggcgagcacgtcggagtcgaggtatatcgcgcgcggcacgcagcgcgggagcaggccggcgaggtggttccgcgcgtagttgagcggcgcctcgagcgcggcgcgcacggacgcggagatgagcccggcgaccgcgtcggcgcggaacgggtagatctcgaagctcagggacgggaaggaggccgccacgacggcccggagcccggaggccgccggcgcgccgccgccctccgccgcagcgaggaagtggaagaagagcgactccgggcaggaggcgtgcttgagcaacgagtagatggctgccatggagcccctgaggtagtgggcgtcgagcgtcatggcgatgtgcaccaggcccgggtcgcagacccccgcgcccgccacaggggcagggcacccctccccgttcctgtactcgggcgcctcggcgaacctcggcagccccgccgccaccgccggccccgatacggccaataacgccaccagcaccagcccggcccacatcgccggggaggccgcgcccatggccaccgccgccgaggggaccccccttggtccccgccccggccggcccaccgctcgcgctcgcctcgggggcgtcgggtccggttgtgtggttccctccctggaagtggtcggcgcgttggtctatgcgcctacgcgtaggtgtgcgcgcccggtggcgtccgctccgttcgctggacgcctcctcgacctcgatggcagctcgatcggccggccaggtcgttttgtcggggacatttagatgtggagaagaagcgttaccaataaagcacgcgtgaaaggttccaacgcgcgcttcgttggcttctgtcatttctttgcttaccgggcttcagcatttcatcgtctgcaggactgcaattgcaattgcaattgcaatgcaaggccgcgggacaggggttaattacggcgtggttaacgagctggggtgtttaattagggctaattcgggcggaattagcagcaggacgccagctcctgttcgacgtccttcccgtgttctgttgttgtcgtcgacgtctgatgctttattatgtgctgtgttagtac

SEQ ID NO: 124028 - DNA, 1782 bp, Zea Mays
cggaccgacgccgacagttgccggacggacctaacactaacagcaagccttaccagccgcgggatcggactaggcttgttggcctcgcgtcgcgtctcggtccccttgccgcggagtcgccaccatcggcatccagcaccttcccccagcagcagagcagtctccggccgcagccatggcgccgcccatctccacctccgaccccgcgctccccaacactaccacaaccacctcgtcggcccccaagtcgtcgtctcgccccttcctcgccccgctcgcagcctccgcgcgctccctcctcgcctcggcgcgccgctccccggtcaccacgctcgccgccgccttcttcctcctcgcgctcgtcatgtacggcgaggacgcccgcaccatcgccgagctctccatcgacgactacctctacccggacgctgacctctacaacgtctccggcctgccgcccctcgcgctgcccccgctcacctgcgacctctcccgcggccgatgggtcttcgacaacgtctccgttccggcgtaccgggagaaagactgcaccttcctcaccaagcaggtctcctgcctcgccaacggccgccccgacgacatgtggcagtactggagatggcagcccaacgagtgttccctccccacgttcgacgctcggagattcatggaggcgatgcgtgggaagcgcctcatgttcgtgggggactcactgaaccgcaaccagtgggagtcgctggtgtgcctggtgcagcccatcctgtccaagggcaggaagaagatcgtcaagcggggctccctcaacaccttctacgccaaggagtaccgcgccacgctcgagttctactgggcgcccttcctcgtcgagtccaactctgacaaccccaacttccacagcatcaaggaatggatcatcagtcccgagcggatcgaggcgcacaccaagcactggaaggacgttgactaccttatattcaacacctacatctggtggatgaacactgccgacatcaaagtcaggagatcgaactcgaggtactggtctgagaacgacgaggttcccaggattgaggcgtatggccgggtgttcaagacatggtctgattggctcaatgacaacatcgatcctgcccgcacgtccgtcttcttcatgacgatttctcctcctcacctcagtccacagaattggggaaacccggatgggatcaaatgtgtaggagagactcttccgtatcagaactacagccaacccctggatctttaccatgacatgcggctgtatgacttagtggtcaaggtggccagctccatggagaaggtcccagtgacagtgatcgatatcacaaggatgtcagattaccggaaggacgcccacacgtccctgtacaccatccggcaagggaagctgctgacgcctaagcagaaggcagacccggagaagttcgcggactgcatccactggtgcctacctggcgtgccggacgtgtggaaccaaatactctacacgaggatcctttcgaaatcatcatggcattctaattttagcccccctctgttccagtccctgcctcttcctccccaatgagaatcagaagtgggagcttggtttttgtcggagaatgtatgatttttcattcttttttttcttcttttttgggtagattgaccaaaatgttagcgcaaaaaggaaaatggatatgctgattactgatggtatagcatgtaagaaggtatagcatgtaagatggtatagcagccaacaaggagtttgaaaagatcgga

SEQ ID NO: 124029 - DNA, 3116 bp, Zea Mays
tcgccaccgccaccgccaccgccggtgtcgtctatcctgaccccgacacctcgccgcccggtgccacctcaccgccggattcacatcgcccagtcgccccaccagccagaacctcgtcgcctcgcccgccttgctccgcaggttaggcagccagtacccccaaaccctagcatcctcggcgctgtcggtcgtagaagagcactgggggcgtgagagagggagtcaccagccctcgagacctcctcccgcttctaccactcagccgacgctcccaaaaggggcatctcaaatcccacctcactcccttcgacctctgagatgtcgatatgaatggagacctgtaacttgtatatatattagggcttagttttcttgtttcagtatctgtttggagttagaagcaagggttctcatggcatctccacaagaatccaattctctgtgcttgaagcgaaagcttgttgatgactgcctgtcaaaagactgcaaatctcgccgtgtcaaatctgagaatgagccctcatctgattcatttgctaaacgctgcaactgttgctgcactcgacctaatcttgccaatgattgtgtgaatttcctgaagagtggagcgccaaaccgtgtcatgtattacaaaaaaggttcgtggcacaattttccagagcaaataatgaattccctcatcgatgaatttaaaggaaataaatcaagtgttgtctctgtgatggatgatgaaccaatccttgttgatttcttatcaatgaccctggtcaacctgaaaaccagaaagcagcggtctgttgcctggtttgatgacactggcaagcgtttctttccttctctgttctttgatgaggaaagtgatgaaatgcccaaacaggattctggcaatgttaataacactgcacaaggaataatgttagataaggtcacgagttctccacctgaagtggtcaagcaagttgttcttgaatctagtccaccagtccctcaaaaaccttcaactgtggatgtcttgcgcaagaagatcacatctgtggaaagaggtagcgaagggtttctatttgtccaggacctttttctctctggtatgaacccgtttgcaacaccaaataacatacttcatgtccaccgctactctccaaacgatatcaccgcacaatgtagatttgaagcttttgaaagacagatgaagtcaactaaagaagcacgtggtgatgcaaatgttaagtatggctggctaggatctaggaagagtgacatagttaggattctcattaatggtttgggtactactgcaaatcctgttgagaaagctggtttgagtgctggtgtatatctttcacctgaaaatcgagcctttaccagtgtcggtctttgtgatgttgacgaaaaaggagtgcagtatatgttgctgtgccgtatgatattgggcaatgtagaagctgttgaacctggatcccaagagtcttttccaagcagtgagatatatgattctggtgttgatgattgttcaaaccccaagtgttatgtgatgtggccatcacatctaagcactcacatccgtttagaatatcttgttagtttcaagcttgccccaaaagttcgaagaaagcataattacccgtgaagaaatggtgaagaaaatgataattgtagttggagagaaagtacttttggaggccttgaagaagcttcattactgtccatcattatggtacaggccttctgttgaagcagtgtctagtgattctgtaatggcagcaccaggaaaattatccttggataaggcaggtggagttttttcattaactcttagtgttaaccatgttgattcacatgcaccaaatggtgtgtctgaacaatccacagttcttagcaccaaaggatgtgaaacccttgcagcggatatggtgcccaatggtcaagattgtccggcaccaagtggtgtgccagaaacatctagttctgctgttgccatgcgtggggcttctacaagtgtggaacccaagcgcagagatcctcctgtacagattgtgccacctggaagctctgcaaccccatgtgccaaaaatcaagattcttttgtaggaagagtgacacctatagctcgtgatgggcttttgaggacaatttgtggaagctcttcatctcctggcggttatgcttctctagcgcaagctaatacctcccaaaccaatggagtttctgccccaggtgtcactcctaggggctatgaatctgctgtaccaagcttgtcacttggaaattccgaaagtacaggcgtgaaacaagtaaattctgcaccaagaatgacacctgaaggccagaagttcctttcgctgggtattgcgccacgaagcccagcactgcgtgatttagtaaaatgccaggccagttcgacactcgttgccatgcctccagcgggcctgggaaaatcacggtccatgaagatcgagggccatgattctctggcaccgagtgtgaaggagccaaaaggcaatggtggtctagcaccaagtaaaacgccaaagctgcatgaacctgtgatagctgatatgagcatcaagagctgtgattctctagcactgggtatcgcaccaaatggccatacccatgatggtccagcatcaggaagtggggaggccaagaaagagcaggcagcactagtaactggctcgcagagtaaatcatctgtaccaagtcttgacgctagcagccatgttaccggggcagcgagcgcccttgtcgcactatcaactctgcgggagaagggcgggcgttagaggagcagcagcagcagcagtgtagttcccgttggatcagatcctttttctctactgtacatgtttctatgtacaggaatcatccccgtcgactctgatccccagtgcgtacggttgctgttggtggccagtcccctatatgttgcttggcagcaaatgttttggttaataattagtttttataaaaggaatattcacccttgttatgttctctacatgtaaattatctgaggtatacttgcattattatgagtgctataatcttttcttttactacatgctctaaactgtatcgtgtattcaataataaaatgttaatttactccctccatt

SEQ ID NO: 124030 - DNA, 1408 bp, Zea Mays
ttttttcttactggcatctagcgtcactttgttattggcttctgttgcagccatcattatggtacaggccttctgttgaagcagtgtctagtgattctgtaatggcagcaccaggaaaattatccttggataaggcaggtggagttttttcattaactcttagtgttaaccatgttgattcacatgcaccaaatggtgtgtctgaacaatccacagttcttagcaccaaaggatgtgaaacccttgcagcggatatggtgcccaatggtcaagattgtccggcaccaagtggtgtgccagaaacatctagttctgctgttgccatgcgtggggcttctacaagtgtggaacccaagcgcagagatcctcctgtacagattgtgccacctggaagctctgcaaccccatgtgccaaaaatcaagattcttttgtaggaagagtgacacctatagctcgtgatgggcttttgaggacaatttgtggaagctcttcatctcctggcggttatgcttctctagcgcaagctaatacctcccaaaccaatggagtttctgccccaggtgtcactcctaggggctatgaatctgctgtaccaagcttgtcacttggaaattccgaaagtacaggcgtgaaacaagtaaattctgcaccaagaatgacacctgaaggccagaagttcctttcgctgggtattgcgccacgaagcccagcactgcgtgatttagtaaaatgccaggccagttcgacactcgttgccatgcctccagcgggcctgggaaaatcacggtccatgaagatcgagggccatgattctctggcaccgagtgtgaaggagccaaaaggcaatggtggtctagcaccaagtaaaacgccaaagctgcatgaacctgtgatagctgatatgagcatcaagagctgtgattctctagcactgggtatcgcaccaaatggccatacccatgatggtccagcatcaggaagtggggaggccaagaaagagcaggcagcactagtaactggctcgcagagtaaatcatctgtaccaagtcttgacgctagcagccatgttaccggggcagcgagcgcccttgtcgcactatcaactctgcgggagaagggcgggcgttagaggagcagcagcagcagcagtgtagttcccgttggatcagatcctttttctctactgtacatgtttctatgtacaggaatcatccccgtcgactctgatccccagtgcgtacggttgctgttggtggccagtcccctatatgttgcttggcagcaaatgttttggttaataattagtttttataaaaggaatattcacccttgttatgttctctacatgtaaattatctgaggtatacttgcattattatgagtgctataatcttttcttttactaca

SEQ ID NO: 124031 - DNA, 3162 bp, Zea Mays
gcttttctttctttctttcttgatcgagacgatcgactgctttgtctcgcctccccaagcgagaagcgaccgactcccgccgccgttgccagccatggacggcggtgacgacctcgccgccctgcacgagcaggtcgccctcgcattctccgccgccatctcggcctccgacctcgaccttgccttccagctccaggtcgccgaggccatccaagcctccctcggcttgcccaatgccgccgccccgtcatcatcgtcgcaagccgccccagagtcatcctccgacgccacctacgccttcgccgtccaggccgccgatctcgcgcgcgcagaggaggaccgccgcgacgccgaggcctgccgagccgccaacgcccgagccgccgccaacgcccgcgtcgtcgcgcacgacgccctcttcgcccgcgacctcgctgccatccccgaggaacagtgggaccacgacggcgactacttcgagcgccccgtcgagtcctcgccctgcccgccgttccgcgtcttctccaagggcatggcgagcagggaggttgtggccccgcgggaccgggaccccagcgtcgccgtgctcgccgtcgctatctatgggccgcagggggaggaggtccttaggatacagaagctggtggagcgcttcgtgggtggccgcatgatggtggagttgatggcgctgatggaaggcctcgacgcagctctggggctgggcatccgcagtgtcaccatggttacgggttacggccctctctacaagcatatgcttggcatttggcgcccgtcagggaagaaggtggcagatatgatgaatcaggttctgtcagtgaaaaggaagtttgatcaatgtgaggtgtcactcgttggggcaagccaagtcagccatgtggtaaaattagcaagagattcattagccgctgagatcaccaaggctcgttctgccaatgctagagaggagaaaagagaaagctgcgccatctgcttggaagacactgacgctaccaaaatccatgcggttgaagtgtgcgcgcatcgcttttgcttctcgtgcatgaaggagcacgtgaaagttaagctgctgaatggaactctcccaggttgcccacaagagggatgcgccacgaagctcagtgtggagggttcgagggtatttctttcgccgcggctggtagagatcatggtgcagcgcatgagggaaggacagatccctccgagccaaaaggtctactgtccgtatcccaggtgctcggccttgatgtccttgggggaagtgattcatccgatgcaggagtcctcatcaaggcacacggctgctgatgctgccacgttgaggaagtgcgtgaaatgcagaggctccttctgcctgagctgtaaagtcccatggcatgatggcatgggttgctttgagtacaagatgtggtaccccctcgctcacccaggagatgccaagctgcagaacctggcaaggcagaggctgtggcgccaatgcgtgaaatgcaagcacatgatcgagcttgcggagggctgctaccacatgatctgcgtgtgcggctatgagttctgctacacctgtgggaaagaatggaagaataagaaagcaagctgctcctgcccgctgtgggatgaacgcaacatcatcagagatgaagacgacgatgacgacgaagatgatctttactagagaaggctgtttttgctgctttttttaatgatgatattcagcggctgcatggatacattgaaatgaccacctgatgttgaaattgaaactgctcatcctgtacatgttgggtactgcttatgagcgtgtagctgacactgtcgaaggggggatgacaccgcctccttcttcttcatctggtggctcctgcatcgtggccagctcttcctgcagagtcggatggcgatgcatcggcgtgtccagcaccaccaccacctcgtaggcgtctgccgtacggacctcctgcgctagcgagcacgggtagcagcagagccacagtaggcagtcggtgaggtccggcttgccgcagcaggcgcggttctcggggaggccgaaccgcctgcgcatctggatcctccagaatccgccgtagagcaggccgaacacgcagaggaagatgccggccagccccagcgcgtccctgaccgcctcgtcgtccacgttgatggccgccaggtccaagatgaagaagggcgccaggcacaggagcacgaaggtggcgacgtggacgtacatgttgcccaagccgagcctgctcgcgttccacccgaacacgcagcagctgcagaacagcgacaggtacgccagcgacatgtcgtcccacaggtcctcccacagcccgccgacccactgcggttcttctccttgtccttgccgtggcaccaacgagtagcgcctctcggtgtcgggcgttttgcgctggagctgcgactcttcctcacttattatcatcccctccgccggcgccggcgcctcgtagtctctcccgagaggactgaggttgttgtacatcccagcgacggccggcgcgcagatggcgaccgctacggtgagggcgacaccgaccaccggacgccggggcctccggtagccaaggttgaggccacagagcgcgtactgagcaaagcagttgaggtggagcagcaggatgacagccgtcatgtgcttcctctcgttgggcttgcaggccccgtccttgcagtacgcttggcggagctggtgcatgtcgccggccttccagcggcacacgagggccaggtggtagaacctcctcgggtgctggtacaggcacatgagggtgaagagcgcgttcaggatctggttgttcacctcgaaccacgtgtccctccgcggcttgcttggcagcacgcggttgagcatccccgtcatcaccatgaagaggatggcgcccgagacgccgacggccaggatccagacggacagggccatgttcatggggttccggatccacgccctggacttgacccacagcgacctgctccaccactggatacctcctccaatcatctgtcgggtggaggaagatgatgagactgagttctgctcctgcacggatttctccggcagcagcccccctgtgggaggagtcgtacgttgttggcccaaaacgaccatcttggaggaggatttct

SEQ ID NO: 124032 - DNA, 542 bp, Zea Mays
cttagggataccaacagtcagatttatatatctttatgaccattctttcagcaacaagcaagtaatcaagcacctggtgaagagcgtgtcgcagtcgcaacggtactcgtgagggccgtaggtcttggcgtgtgccttgagggtcaaactactaaggaagtatgtttggcagtaatgaatactgcctcttcagactagggagtggtgcatgcagttgggctcgggcacacgtacacccggcggagcgtttcgtggctagcagcatccccggcaagagcgcaatcacctcgacatatagtccccccatagaaacaagtggtagtattgatgtgttctctttcaatcttattattctatcttcctgacctatatttgaagcaacatatagttcccccacagaaacaagtggtagtgtcctctatttgatattgtcactttgttagtcacaagtcacataggtatacctagcagtggttgttaaaaaatatactatgcataatattttaggttgtttcctgtaattatagttagaatcttagatg

SEQ ID NO: 124033 - DNA, 2289 bp, Zea Mays
atggactgtcagggagctccgggctgcggctcttcagccatcggtcgtgggggcactgagaaggacgccgacgctgctgatggttggaagactgttgagtcccggcgttccaggcggttgcgcctgaaggctgccaatttccagcgccctgcacctaccaatctttccggcaggtgcttcaactgtttctcaccaaatcacctggtccgtgactgccgttcaaggacaagatgcttcaagtgctgtgggcttgggcatagggcgtcccgctgcccggaggctccagatcgtgctcagttttccacagctgtttccaagcagacaatgaggcaatctattcaccctgcagcgcctcagaaggtttggcggaggaagacttcgatggctgcaatttcaggcagccagtatttgtttcaaggaatggcttctgaccttgttgggggcgctgatgccatcactatcaggggccgttctcgccggcgtcactctcacaagagacggaaaccccccacccctcccagagatgatgggagcaggatttatatgcagccccatctgccttcttcaggacttgtacccccatgcttgctgggttggaaccacgccatgactgttgtcgaggaagatcttcgtttggcagtggttgtctcggtgatcagcaaccgtgactcagtttctaaattcaaagtggcatccctgctctcaccaagattggaaatcactgaagactccattgttctccgtcgcttatcaccaaatagttttctgctggttctcccgtctgaagatatggctcaaaggctcgactcgaggtggtccattcagcgggctgcgactttcacagtggtctgcaagcgatggtctagatttttaaactcttctggcagaactcttcctcagctggttaacctggaattagatggcatcccagtgcacgtgtgggagacggctacggtggaacatttaataaatccatttgcttggctatttaaggtgcactcagatacctctggcctgagtgacctggtttccttcagatgttctgcctggtgcattgatacatccatgattccggagtcacgggagctctggatcactgagcctctacaggcgcctactggagattcgcaaggggttatctctctgggttatacagttaagatcagatggtctattcctccttcagctgctgctgctcctttggtctctgcctcaccgctgtcgccccgtgatcatgatgatggccctcggtcataccggcggtcccggtcacactctccacgagggcgaccacgggaagacatcaacgcaagcaatcttggggagctgggacagcaacgtcgttcagccaaagaaagactgggtcccaaatgcttggattccaaacaaacgaatcctaacccttctgagctggacaattctgtggatggcccttgctgcgatctcaacggagaacaccgcgcgggcctagagactccccacggggatgactcggctccggtgcacaatgaagagcaagcccaacatgctgttttttctgatcaaatggactacaatcccattggccagcagaatttcactagagatttgtgcttggttccaaatctcaatcaccgtgtgggccttgaggctcccttcggagaggcttcggcttcggtgcacattgaaaaccaatgtagcgaccacactgctgaacaccgtgcgggccttgagaatccccacgaggatgactcggctccgtcggactgcaatcctagtggacagcagagtattactagagatttgtactcggtaccaagtgtcaaacaccgtgcgggccttgaggctcccttaggagaggcctcggctccggtgcactttgaggaacattcccatcagcattgtttccaaagacagggcgctgcaacatcagaaagaaggctcatagaggcaccaaacctgctcgtttatcatagaaaaaagaagcataataagccgctagttgaaattgctgaagaaacaacggaaaataataccattccagccctgcagatggatggtgtggaccctgtaacagccaaaaaagaggtatttcttaaacaaattgtgaatgaagtttctggtattctgccagcaccagcaaatccaactccaaagcccataatctccaagcggtccactgctgtgtcccttcgccgtagccgcctcattgctggaatgggagcagaaattggcaagcaagatctttcctcaagagcaacaaagaaagttatgaaggctctcatggtggtggggaactggaagagatag

SEQ ID NO: 124034 - DNA, 1484 bp, Zea Mays
gcgatcctcaatctggtgtcccacggccgtccgatctcacattcactaccacctgtcccgtcctcccgtcccagtcaacaccaccgtcagttcagctgagcctgagcatggcgtcgccggcggccgtgctcgtcagcaatggcggtatctccccacacgctccaccttccgccgccgccttcctcgtctccactccgggcgcctacaccaccgcccccggaaccctcctctggtggacacgtcacctccgccgcctcgccgaatccgccacgctcctcgcccgttcccgccccaacctgctcggcctccccctcccccgatcgcgcgccctcgacctcgatttactatccatccattctctcgtgaacccctccgtgcgggtcgccatccgcgagatgcgcacaaggctgcccatgaccaaggacgaggatttggcgctcacggccctggtcaggggagccgatcccatttctggcggtggcggggctggcctcgacgtcttcgtccacgtggggacgtattccccgccgatctttggagaatcgggggccaggcttgccgcggccggcaggggaagggacgccgctgccgccaagtacgcgtcctgggccaggatccggaagagtttggaaaagatgaggcctcctggggtcactgagctcttgctgactaatgacggggatcacattcttgaaggcgctgttacaaacttctttgttgtctgccaacaggaggaatgcgagagcaacggaaaattctctaatcaaacaatggctactaagtttgaagtgcaaacagcaccactgagtgacggagttctccctgggattatgcgtcagatagtgatcgaggtgtgccatgatattggaatcccagtacgagaggtctctccatcgtggtccatgaatgaattctggaaggaagcctttgttacaagtagcttaaggtttatccagcatgtagagtcagttcaagtgcctttattttgggaggacatacaatctaaaacctggagtgatgtaccttgggcggtgaagaagtttcagggtgttggatgcattaccacacagattcagagggaattactgaagagagcaagaagtgataagtacggcgttaacggtctcctttgagttatgatcattgttgttgattcatttgaagggacttcttttccaggcacttaattatttcatttctgctgggacgacactgttaagactgggtttcttgtgtgtataattcagacattttttgtctgctcagtgctgtgtcggccttctacaagctgcaggtagatagccactgggcagtagcgaagcaattccatgcttgtttattactgtaattatgaggatggatcagatttagctaactgtcggagtccttttttttacttgtacctgcaattaattgatctgatctgtttgccgggtaggtgttcgtgaatatgaatggctgaatgaatttgggttccttaaatt

SEQ ID NO: 124035 - DNA, 1503 bp, Zea Mays
gcgatcctcaatctggtgtcccacggccgtccgatctcacattcactaccacctgtcccgtcctcccgtcccagtcaacaccaccgtcagttcagctgagcctgagcatggcgtcgccggcggccgtgctcgtcagcaatggcggtatctccccacacgctccaccttccgccgccgccttcctcgtctccactccgggcgcctacaccaccgcccccggaaccctcctctggtggacacgtcacctccgccgcctcgccgaatccgccacgctcctcgcccgttcccgccccaacctgctcggcctccccctcccccgatcgcgcgccctcgacctcgatttactatccatccattctctcgtgaacccctccgtgcgggtcgccatccgcgagatgcgcacaaggctgcccatgaccaaggacgaggatttggcgctcacggccctggtcaggggagccgatcccatttctggcggtggcggggctggcctcgacgtcttcgtccacgtggggacgtattccccgccgatctttggagaatcgggggccaggcttgccgcggccggcaggggaagggacgccgctgccgccaagtacgcgtcctgggccaggtgggtgctgtactctactgatccggaagagtttggaaaagatgaggcctcctggggtcactgagctcttgctgactaatgacggggatcacattcttgaaggcgctgttacaaacttctttgttgtctgccaacaggaggaatgcgagagcaacggaaaattctctaatcaaacaatggctactaagtttgaagtgcaaacagcaccactgagtgacggagttctccctgggattatgcgtcagatagtgatcgaggtgtgccatgatattggaatcccagtacgagaggtctctccatcgtggtccatgaatgaattctggaaggaagcctttgttacaagtagcttaaggtttatccagcatgtagagtcagttcaagtgcctttattttgggaggacatacaatctaaaacctggagtgatgtaccttgggcggtgaagaagtttcagggtgttggatgcattaccacacagattcagagggaattactgaagagagcaagaagtgataagtacggcgttaacggtctcctttgagttatgatcattgttgttgattcatttgaagggacttcttttccaggcacttaattatttcatttctgctgggacgacactgttaagactgggtttcttgtgtgtataattcagacattttttgtctgctcagtgctgtgtcggccttctacaagctgcaggtagatagccactgggcagtagcgaagcaattccatgcttgtttattactgtaattatgaggatggatcagatttagctaactgtcggagtccttttttttacttgtacctgcaattaattgatctgatctgtttgccgggtaggtgttcgtgaatatgaatggctgaatgaatttgggttccttaaatt

SEQ ID NO: 124036 - DNA, 1667 bp, Zea Mays
tccatgggatgattcatattcgactgctaacaattttgttaggatgcttagggaatctgaaaataatgatgtccacttcgctgtgccttcatggaaatcaggaaccgggaacaaagagtctagattttcatttgctagacaggataaccaagggaacttattggattcatctctcagaaactgtggtactggtaccgagcagaatttcagtttgctaccccagaattctcgaggaaatatctaccagaatggccttgcattccaatctttggagaacgatttttcgaacagcaactctcttggtgtattagatatgttaactactggtacatcgaggtctaaaatatctgcgcccccaggattttcagcaccagcaagagtcccccctcctggattttctactgcacttccatcccaggagtttccttctggaatttcgtctcatgatgggtctatagcccttcctagattcccttgggcattttcttctcaaatttcagcccaggaactgtctaagccccctagtagactgccttctccattttcttctggtttttcatctctggatgggcctaattcctcgtctaggtttccttctgcatttccttctggattttcatcacagaatggccctaacccttcatctggattccctttttcttctgggttttcatcacaggatgggtctaatcagtcgtatggctcaacaaacccagaaaatcttctccggaatactgttctgggtggcagtagtaatcattatcaatctcagtttggaaggcactcaagtgacatggagttcgatgatcctgctatattagctgtgggcaaagggctgatgcctggaattggcgattcagggctggagatgaaaaatactcctgcttttcaagcacagttgcaaccagcaagcagtgatccaagatttcacttacatatacagccaaatgtgcagtctcaccaaaacatgggattcgcagaccatatgcaggatggtttgaaccatatgaatgataatagatttttaggtcagaaccatggtcctctatccccttatgtgcagattccgcaacaacccagaaactcgcaggttacaaatggtcactgggatgggtggagtgattcgagacaagggaatagcactcctatgtcagacatgtcgaggatattatatccaagtgaagtgaacaagttgcacatgctgggttcaaatgatatctataacagagcctttggaatgtgatcatctcctgggataatgtgtgagtttgagctgacatgttctgacttgggggcgttctgtggaagtaactggttgcacaacacagtatacctgatgtggataatggtggttgtgcttatgagctggtacacgagtattttttgctattggaatttacaaaaacgaacctgagttttggttcagctatttgaaattaccaggttcgttctcttgtatgatctgtgaagcttgagtgaaaagaaagattatgtgccgagaacaaagcagctgaagttgaaatatattgagatatgtctataatgtagtgtggtgtggctcttgaacgtgagcgactaagaagatttggtgggcttgacttgatgatggcagtgttttcttgtgttggtacatgatgatggtgttggtcggtggctgcctggccagt

SEQ ID NO: 124037 - DNA, 1771 bp, Zea Mays
tccatgggatgattcatattcgactgctaacaattttgttaggatgcttagggaatctgaaaataatgatgtccacttcgctgtgccttcatggaaatcaggaaccgggaacaaagagtctagattttcatttgctagacaggataaccaagggaacttattggattcatctctcagaaactgtggtactggtaccgagcagaatttcagtttgctaccccagaattctcgaggaaatatctaccagaatggccttgcattccaatctttggagaacgatttttcgaacagcaactctcttggtgtattagatatgttaactactggtacatcgaggtctaaaatatctgcgcccccaggattttcagcaccagcaagagtcccccctcctggattttctactgcacttccatcccaggagtttccttctggaatttcgtctcatgatgggtctatagcccttcctagattcccttgggcattttcttctcaaatttcagcccaggaactgtctaagccccctagtagactgccttctccattttcttctggtttttcatctctggatgggcctaattcctcgtctaggtttccttctgcatttccttctggattttcatcacagaatggccctaacccttcatctggattccctttttcttctgggttttcatcacaggatgggtctaatcagtcgtatggctcaacaaacccaggtttgtttcctgtcttaatttctctctctctctctctctctctctctctctcttattttcctagaactactttgatttctcatgccttttgcggtgctttgcagaaaatcttctccggaatactgttctgggtggcagtagtaatcattatcaatctcagtttggaaggcactcaagtgacatggagttcgatgatcctgctatattagctgtgggcaaagggctgatgcctggaattggcgattcagggctggagatgaaaaatactcctgcttttcaagcacagttgcaaccagcaagcagtgatccaagatttcacttacatatacagccaaatgtgcagtctcaccaaaacatgggattcgcagaccatatgcaggatggtttgaaccatatgaatgataatagatttttaggtcagaaccatggtcctctatccccttatgtgcagattccgcaacaacccagaaactcgcaggttacaaatggtcactgggatgggtggagtgattcgagacaagggaatagcactcctatgtcagacatgtcgaggatattatatccaagtgaagtgaacaagttgcacatgctgggttcaaatgatatctataacagagcctttggaatgtgatcatctcctgggataatgtgtgagtttgagctgacatgttctgacttgggggcgttctgtggaagtaactggttgcacaacacagtatacctgatgtggataatggtggttgtgcttatgagctggtacacgagtattttttgctattggaatttacaaaaacgaacctgagttttggttcagctatttgaaattaccaggttcgttctcttgtatgatctgtgaagcttgagtgaaaagaaagattatgtgccgagaacaaagcagctgaagttgaaatatattgagatatgtctataatgtagtgtggtgtggctcttgaacgtgagcgactaagaagatttggtgggcttgacttgatgatggcagtgttttcttgtgttggtacatgatgatggtgttggtcggtggctgcctggccagt

SEQ ID NO: 124038 - DNA, 637 bp, Zea Mays
gcagaccagacgcaggcacaccgcaccgtgccccctccctgttcatcgcccgcaccccaacaacaaggaacaggccggagtccagccatccgaccttgaatccgcttgccctcctgcttgatcccaccgccacgcgccacctcaatcgcccactcctccctcaccctctagggttccctgccgctcccacaaatcacgcaatcggagacccccggtccgccctccaatgacgaccatgagcgatgatggcgaccgcacctgcccgctctgtgctgaggagatggacatcactgaccagcaactcaagccatgcaaatgcggctatgatatttgtgtttggtgctggcaccacatcatagacatggctgagaaggaggaaacagagggccgctgccctgcctgccgcacacgctatgacaaggataggatcgtcaagatggccgccacttgtgacaggacagtggcagataaaaatgcggagaagaagcaaaaggcccaaagggttaagccaaaggcagcaccaacagcaacaacaacatcaaccgtagaatctaagaagcatcttgctactgtcagggttatccagagaaatctggtgtacataattgggctacctgcgcatttatgcaatgagagc

SEQ ID NO: 124039 - DNA, 2234 bp, Zea Mays
aggtttttcgacgtttccaaaattcgaaatccttttcacgacgctcgcaaccgccaccctaaatctcaatcgctgctaaggttttcgcacttccactgcaccgatcgggacttcgttctacagctgttgagacggagtggacattgcggggcacttcaggtagggttttcatccgctccaccgaaatcgtttttaatttctaatgcagtttcttcaagtgacatttttacattggaaagggatggagattgctagttagtactggatttatgcgcactgttttttttcaagtaaaacattcccagcaggattatcggctaatatatcaccaagtcagtaatatatatatataccattcagtaataacgccgaacagttagttagcagatattttatagaaatttattatcttttgtattcactttcgtgtttagtcagtaataacctcgactattcagtaataacgtcgaacaacagtaatattttttgccatatatattttttgtccctggatctgttttatgattataatcagtaacaatatcgaatatttagtaataacgtcagcaacgtcgattatagatttttttcgtatcaatttgttttacgagtatagtcagtaacaacgtctaatattcaacaacaacgatcatcaacactatagaatgggggtaacaatctattgtatagcagtatattatgagcagttagtaactattttttttcaagttatcagaaccaataatataaacaacagtaaacattctctgtatgattggtggctaatatatcaccgagtcagtaatatgtgtaccgttcagtaataaccgctaacagttagaaagcagatatttataggaatttattattttaattcactttcgtgtatactcagtaataacctagattactcagtaacaacgtcgaacaataatattttttcatagatatttttgctccctggatttgttttataagtattcagtaacaacgccgaatattcagtaataacgtcgaacattcaacaacaacgttgaatatatatattgtccacatttgctttactagtataatcagcagtaacaatgtcgaatttccagtaacaacgatcaacagtttagtaatacatattcgaatgggggtaacaatctattgtatagcactatattattggcaaatagtaactttttcaaagttatcagaatcagtaatataaacaatatttagtaaaaacatagaacattcagtactagagggggtacaaatatatgtgtttttctttgtatctgatttttttaggtttcacagtcggagacaatatctacatccactgagcacaaccatgggtactatgctacaatgagatatgcaccgtgtgtgttgaagaacacaacatgttttatgtcagataggttaaaagaaatgatggagcggctaggattcagttcattcttgcaaatgaacattgaagcaattggggatcggatgctcgctggtcttttattgtctagtgtgtatggctcttctctacgcatcgaatttggtgaacgatccttgctaataacagtagaggctgttcaaattgttaccgaattaccaaggaaagaagacaagtttcctgagctggactaccagtccatgacttttgctagagctagtttctggtcaataacaatcacacccattttttggttatcatacattttcagtaataattttttcctattattttgttatatatagataacgtgtcaggaaaatggaatggttaagatattcacagatgatcgtgcaaagggaatagctgcatataacaagctcaattcgaaggaggtccctcattgggttgttgaaagaatgatcaacgaccacacaaaacatggggacgagtggattttacaatgtttttttgttcttgcaaccaattctcttttgtttcctatggccagcttgaatatatctgagagtgattttgcccatgtccaagttttggagtcagcgcagcggtatgattggtgccaggctatctgtgatgatctcaagttgaaagcagagaaattcaggagtgatcgttgtaagaaagcagccacacccactgcatgcacgtaaaaattggatgatcgtgcgagtttccattgcatgtgcgaaaattttagaaaatattttcgtttccactgcatgcgtgtaaaaattggatgattccataaatataagatcgctccaactgccatgca

SEQ ID NO: 124040 - DNA, 1629 bp, Zea Mays
acatggaagggagacaggcgaatagaggacagctgagctgcagcatcccgtccaacagcaggaccagcgagggtgtacctccgcctcgcgagtcgggaccatgtggacgggcagcccgctgctccgggacgttggcgccgccgtgctcacgggagtgggcgcggctgccgtgctccgcttctgggaagagatcgccaaccgcgccctgctggaccaggtcacgcttttcctttgtttttttccccagtttctgtgctccgtataaaatccggtatctattgcttgcgctaacaagtacagtagtaattgaagttttggtttcgattcgttccaaattgccctgaaccccaccctcgatagtcaacccaccaagctctagcagtactgcagcttcactagtcataattataatcaaacttttattagctatcaccttcgaagcctattgatatcattttccctttcaagatgaatctactgattgatctctgtatatgtctttctctgtgcattctagaaactctgcaggaaactggtgcacataactgtaggattagtgtttttccttatgtggcctttgttcaggtaaagtaaaaattaggccaccagcaaagacaaaaattcctcctcctccagtcgtagcgtatcaacctgactgcatacaaatagttcctttccttgctcatttcgttttcagctcagatgatgtgtttgctccatctctcgctccgcttatcatcatcatcaacatcatgaaagtgacagtgattggacttggtttcgtgaaagctgaaggtgtggttaactccatgactaggcatggagaccgcagagaacttctcaagggcccgctgtattatgcctgtgctataactctgacaacaatagttttctggaggacatctcccatctcaatcgcggtgatctgcaatttgtgtgccggagacggtgttgctgacatagctgggagacgattcgggcatgttaagctccctcacaaccctgaaaaatcatatgccgggagcatcgcaatgttcttggcaggtttcatcgcatcagtactgttcatgtgctacttcaacattttcgggtttgttgagaagagctggaccatggttgctgcctttggtgtgatatccctggctgcagcagttgtggagtcactcccgatcagcacacgccttgacgacaatctgacggtttctgtcgcatcagtgctagttggcgcccttgttttctattccattggagccagaaacctgtgctgcatgagcagcgaagtcaggagaagtatcccagcaaccgttggaatggtgtttgcaggcagcagctgaaacatgtagccacagtccaggagcagagttgagcagaaagtgcagagaaaggagttcttcaatcctgatgtgtgtgtatcttgtactgtaaccattttcctgtctaagcagacattcttgtaactttattaagaaagaggtaaagcgagaataagtttattagggaaaacagaggatgagctctcataagcaaatgcaaattacagcgtgaaagttatgcgattggtgaaaagggagatgaaactgagcaaaaagaaatctagaagagaaaggaaaatatataaaaaataaataa

SEQ ID NO: 124041 - DNA, 1246 bp, Zea Mays
acatggaagggagacaggcgaatagaggacagctgagctgcagcatcccgtccaacagcaggaccagcgagggtgtacctccgcctcgcgagtcgggaccatgtggacgggcagcccgctgctccgggacgttggcgccgccgtgctcacgggagtgggcgcggctgccgtgctccgcttctgggaagagatcgccaaccgcgccctgctggaccagctcagatgatgtgtttgctccatctctcgctccgcttatcatcatcatcaacatcatgaaagtgacagtgattggacttggtttcgtgaaagctgaaggtgtggttaactccatgactaggcatggagaccgcagagaacttctcaagggcccgctgtattatgcctgtgctataactctgacaacaatagttttctggaggacatctcccatctcaatcgcggtgatctgcaatttgtgtgccggagacggtgttgctgacatagctgggagacgattcgggcatgttaagctccctcacaaccctgaaaaatcatatgccgggagcatcgcaatgttcttggcaggtttcatcgcatcagtactgtacgcaaacagactatctgttatacctatttctatccaacactattgctgtaacctgaactgaaactgctataaatgtgttgtggtatgtgtatatgaaaccaggttcatgtgctacttcaacattttcgggtttgttgagaagagctggaccatggttgctgcctttggtgtgatatccctggctgcagcagttgtggagtcactcccgatcagcacacgccttgacgacaatctgacggtttctgtcgcatcagtgctagttggcgcccttgttttctattccattggagccagaaacctgtgctgcatgagcagcgaagtcaggagaagtatcccagcaaccgttggaatggtgtttgcaggcagcagctgaaacatgtagccacagtccaggagcagagttgagcagaaagtgcagagaaaggagttcttcaatcctgatgtgtgtgtatcttgtactgtaaccattttcctgtctaagcagacattcttgtaactttattaagaaagaggtaaagcgagaataagtttattagggaaaacagaggatgagctctcataagcaaatgcaaattacagcgtgaaagttatgcgattggtgaaaagggagatgaaactgagcaaaaagaaatctagaagagaaaggaaaatatataaaaa

SEQ ID NO: 124042 - DNA, 1141 bp, Zea Mays
acatggaagggagacaggcgaatagaggacagctgagctgcagcatcccgtccaacagcaggaccagcgagggtgtacctccgcctcgcgagtcgggaccatgtggacgggcagcccgctgctccgggacgttggcgccgccgtgctcacgggagtgggcgcggctgccgtgctccgcttctgggaagagatcgccaaccgcgccctgctggaccagctcagatgatgtgtttgctccatctctcgctccgcttatcatcatcatcaacatcatgaaagtgacagtgattggacttggtttcgtgaaagctgaaggtgtggttaactccatgactaggcatggagaccgcagagaacttctcaagggcccgctgtattatgcctgtgctataactctgacaacaatagttttctggaggacatctcccatctcaatcgcggtgatctgcaatttgtgtgccggagacggtgttgctgacatagctgggagacgattcgggcatgttaagctccctcacaaccctgaaaaatcatatgccgggagcatcgcaatgttcttggcaggtttcatcgcatcagtactgttcatgtgctacttcaacattttcgggtttgttgagaagagctggaccatggttgctgcctttggtgtgatatccctggctgcagcagttgtggagtcactcccgatcagcacacgccttgacgacaatctgacggtttctgtcgcatcagtgctagttggcgcccttgttttctattccattggagccagaaacctgtgctgcatgagcagcgaagtcaggagaagtatcccagcaaccgttggaatggtgtttgcaggcagcagctgaaacatgtagccacagtccaggagcagagttgagcagaaagtgcagagaaaggagttcttcaatcctgatgtgtgtgtatcttgtactgtaaccattttcctgtctaagcagacattcttgtaactttattaagaaagaggtaaagcgagaataagtttattagggaaaacagaggatgagctctcataagcaaatgcaaattacagcgtgaaagttatgcgattggtgaaaagggagatgaaactgagcaaaaagaaatctagaagagaaaggaaaatatataaaaa

SEQ ID NO: 124043 - DNA, 1167 bp, Zea Mays
acatggaagggagacaggcgaatagaggacagctgagctgcagcatcccgtccaacagcaggaccagcgagggtgtacctccgcctcgcgagtcgggaccatgtggacgggcagcccgctgctccgggacgttggcgccgccgtgctcacgggagtgggcgcggctgccgtgctccgcttctgggaagagatcgccaaccgcgccctgctggaccagaaactctgcaggaaactggtgcacataactgtaggattagtgtttttccttatgtggcctttgttcagctcagatgatgtgtttgctccatctctcgctccgcttatcatcatcatcaacatcatgaaagtgacagtgattggacttggtttcgtgaaagctgaaggtgtggttaactccatgactaggcatggagaccgcagagaacttctcaagggcccgctgtattatgcctgtgctataactctgacaacaatagttttctggaggacatctcccatctcaatcgcggtgatctgcaatttgtgtgccggagacggtgttgctgacatagctgggagacgattcgggcatgttaagctccctcacaaccctgaaaaatcatatgccgggagcatcgcaatgttcttggcaggtttcatcgcatcagtactgttcatgtgctacttcaacattttcgggtttgttgagaagagctggaccatggttgctgcctttggtgtgatatccctggctgcagcagttgtggagtcactcccgatcagcacacgccttgacgacaatctgacggtttctgtcgcatcagtgctagttggcgcccttgttttctattccattggagccagaaacctgtgctgcatgagcagcgaagtcaggagaagtatcccagcaaccgttggaatggtgtttgcaggcagcagctgaaacatgtagccacagtccaggagcagagttgagcagaaagtgcagagaaaggagttcttcaatcctgatgtgtgtgtatcttgtactgtaaccattttcctgtctaagcagacattcttgtaactttattaagaaagaggtaaagcgagaataagtttattagggaaaacagaggatgagctctcataagcaaatgcaaattacagcgtgaaagttatgcgattggtgaaaagggagatgaaact

SEQ ID NO: 124044 - DNA, 3993 bp, Zea Mays
cccaagagtccagcaacagtgccacgatccaaagacaggctccgccactgcaggtggccccccagagcgaggccggacatccctttcctttccttcacctcactcgctctctcgcctctctctccgtgcggtgactgactgggcaaccgccaccgccctccccctccgtcgggtcttcgccggcgccaccagcgacgactgggcggtctgtgtccctcttcgccggagacgatcacccaccaggtggatgtcgattttttggttgacaagttgaaggttacgaactactttgatcctgaggtgaagaagtaatgatccgcccaggctcaagggactcgcaaaattatgataacaataatcaaagagttcatccgcaaccagttgatgagaacatgaatcagaacggggactcagtggacactatgatcgggaggatattcaacaacatatcctctttaaaatctgcatacattcagctgcaggaagcccacaccccatatgaccctgacaagatccaggaagctgataaacttgtcatagaggagcttacaaatctttcagagctcaagcatgcttacagagaaaaacatcctaagccaatagctgcatcccctcaagattcacgcttgctctctgaaatacaagagcagcagaatttgttgaagacctacgaggtcatggtaaagaagttccagtcccagatccagactagagacactgagataacccatttacagcagcaaattgatgaagctaaacttcggaaatcaaagctagagaagaaactgaaacagaggggcctacttaacagggagtcagaggaatctgacgaagaagagaactacttttccattgaattgacgccaagtttgtttacatctgctgtcgataatgcataccagtccatacatgaattttcaaagcctttgatcaacatgatgaaggctgcaggttgggatcttgatggggctgccaatgcgatcgaacctggtgtggtttacacaagaagggctcacaagaagtttgcttttgaatcctatatttgccaaagaatgttcagtgggttccaagaggagagcttttctatcaaggattctaacatcagtgtttccaatgaggctttcttccaccaattccttgcagtgcgagccatggatcctctggatgtcctgagccagaaccctgattcagtattcggaaagttctgtagaagtaagtaccttttgcttgtgcatcaaaaaatggaaggttctttcttcggcaacatggatcagaggaactacgtcatgagcggtggccatccaaggacacctttctaccaggcattcctaaagctagcaaagtccatatggttgctgcacaggttggcgtactccttcgacccaaaggcaaaggtgtttcaagtgaaaaaggggagtgaattttcggatatccacatggagagcgtcgtgaagaacatcatcctagaagaaggtgcggagaggccaaaagtcggcctgatggtgatgcctggtttcctgatcgggaccagcgtcatacagtcccgtgtgtacctttcagatgccaagtgtgctgactgactgaagattgcacaaggagcttgagggggtgcctttgctccttgggagagctaccagcagcataagtttatggtggactgttgtcttgtatgtaatgcgtgagacctgttgcttcaatgccgtgctacgtgattctgtccagtgggcttgtggtttccccatgttgcatttccatgtgttatacggctatgtaattctgcccagtgttttgcacacattatcagggtgattgattgatcgtgtaggctgcacttttcatctgaaatgtgtttgcccaatcaatcagatgattctgttggtgttccatgtcaagtgttgtagcttagtttctttgaacaaggtgtgtggaggattttgatggacaatgataaaactgatgacaatttagttgcttcatatggattccggcataaacatttctcggtcagagatgctttaaccatttgccaagtcttgtttgtgtttgttctacagcaagcatttgcccattccactctccagtaaagagaagcagcaaagcaaagtatcacaccacaccacgctccagttcagcagccacggccagtctctgctctcaactgctgccatggcagccgcatccgacagcacccacctccctccctcagtcaaccacgacctcgacgaaatggcagccgcatccgacagcacccacctccctccctccgtcaaccacgacctcgacgaagatgatgacgatgaggaattcgacgaggacgacgacgacctcgttgacggaaccgccgacgacgacggcgaaccctccgcgtccccatccgaggcggctcgcctcgaggccgtgctccggcggctcaccgcggacgaggtccggatccgggtgcaccaggtcacgatccggggctgcgcccgcacgcgccgcgccgcggtcgaggcggcggtcggcccggacgtcggccgcgccgccactgtgcgggacctcgtgcgcgccgccgccgccgccggcgaccggctccgtcgcctcggcgccttcgacacagtctcgatcaccctcgacgcggcgccgcctgggatcccaggcagcgccgtcgtcgtcctcgttgacgtcgcggaggcccgcggccgcgcctccggtgatttcggcgtcttcgccaacacacagacgagatcatgctcacttgaaggttcagtgaagttgaagaacctgtttggttactgtgagacctgggatgcatcaggtgctcttgaattagataagacagcagaactaagtgctggagttcaaatgcctaggatcggagcaataccaactcccctgatggctagaatatcgtttctgtctggcgactggttaaagtcctcactcaaagaacacctgatgggcgtttctgttggcttgctctctaccatgaaccacaacattgcttacaatttgacatggagaaaatttactgatccaacacgcatgacatccaattccgtacaagaggaattaggacatagccttttgtcctctattaagtacgcgtacaaggttgaccaaagggactcaagtataagacctacacgagggtacgcttttatgtcgacttctcaagttggaggccttgcaccagagagcaaatattcacgatttcttaggcaggaatttgatcttcgagtggctttgcccctgggtgtgctgaatggtgctctcaatgccggagtggctgcgggagtcatccatccattggaaaggggatccacaggatctgtctcaccacttgtagaaaggtttaacttgggtggtaataggcctctcgtgtgccgcttgggtggatcatcttcactgttaggcttcaaaacaagaggactgcgggcaacagaatccagaacacatgaccttgataattctgacagtggcacttcgccgaatggtgacgtagcagtgacagccttcgccgacctctcatttgatctgcctctgaagccgctcagagagctgggaattcatggccacgcttttgtttgtgctggaaatctcggtaaactaacggagtgtgatctagggaagttccctgttaccgacttcctacagacgttcagaagttctgcaggattcggcgtagttgtgccgaccagactgttccgcatagagatgaattattgctgcatcctaaaacagcttgatcatgacagggcgaagacaggcgtacagtttaacttctcgtcgtcctagtttctaagatgaatattcctattttttcccctcctcctcactgttgtcttttcatggaggagcctgtcaagaacttctacatttatgtagaaaaagaaagccgatgacgctgaagtgataaattgttggatttaatgctgtgtgtttgcagaaataactccaacatggtgacgaaacatcacattatgaaactgactagagccttttgccgctaacaca

SEQ ID NO: 124045 - DNA, 2428 bp, Zea Mays
tactcttgcagccttaatagtagtagagatttcactttttctttgttttttcttcctcccagcagtgccgcaattgcagggcccaaacccaagagtccagcaacagtgccacgatccaaagacaggctccgccactgcaggtggccccccagagcgaggccggacatccctttcctttccttcacctcactcgctctctcgcctctctctccgtgcggtgactgactgggcaaccgccaccgccctccccctccgtcgggtcttcgccggcgccaccagcgacgactgggcggtctgtgtccctcttcgccggagacgatcacccaccaggtatgcccgctcccttctctcccttcccttccttcctttccgaagcggagcaccccaaaccctaagctatctgaacccggatctgaccatgattcctactagcttcgagttttttgcaagaaacaacgggtgcacgtatcctggattcactactttgtgcatcaatgctgctgttgattaggactagagctgcaggctgctgtagactagacttcgcgtggaagcaaggtacgattaggtttcacgtggttcttgcttcgctttgggaccactctctagtcagtaccatgtgtctgtgatatgcgcgacagggaaccttgtccatctgggaactctacctgcatatatagagggaaggaaattggtggatgtcgattttttggttgacaagttgaaggttacgaactactttgatcctgaggtgaagaagtaatgatccgcccaggctcaagggactcgcaaaattatgataacaataatcaaagagttcatccgcaaccagttgatgagaacatgaatcagaacggggactcagtggacactatgatcgggaggatattcaacaacatatcctctttaaaatctgcatacattcagctgcaggaagcccacaccccatatgaccctgacaagatccaggaagctgataaacttgtcatagaggagcttacaaatctttcagagctcaagcatgcttacagagaaaaacatcctaagccaatagctgcatcccctcaagattcacgcttgctctctgaaatacaagagcagcagaatttgttgaagacctacgaggtcatggtaaagaagttccagtcccagatccagactagagacactgagataacccatttacagcagcaaattgatgaagctaaacttcggaaatcaaagctagagaagaaactgaaacagaggggcctacttaacagggagtcagaggaatctgacgaagaagagaactacttttccattgaattgacgccaagtttgtttacatctgctgtcgataatgcataccagtccatacatgaattttcaaagcctttgatcaacatgatgaaggctgcaggttgggatcttgatggggctgccaatgcgatcgaacctggtgtggtttacacaagaagggctcacaagaagtttgcttttgaatcctatatttgccaaagaatgttcagtgggttccaagaggagagcttttctatcaaggattctaacatcagtgtttccaatgaggctttcttccaccaattccttgcagtgcgagccatggatcctctggatgtcctgagccagaaccctgattcagtattcggaaagttctgtagaagtaagtaccttttgcttgtgcatcaaaaaatggaaggttctttcttcggcaacatggatcagaggaactacgtcatgagcggtggccatccaaggacacctttctaccaggcattcctaaagctagcaaagtccatatggttgctgcacaggttggcgtactccttcgacccaaaggcaaaggtgtttcaagtgaaaaaggggagtgaattttcggatatccacatggagagcgtcgtgaagaacatcatcctagaagaaggtgcggagaggccaaaagtcggcctgatggtgatgcctggtttcctgatcgggaccagcgtcatacagtcccgtgtgtacctttcagatgccaagtgtgctgactgactgaagattgcacaaggagcttgagggggtgcctttgctccttgggagagctaccagcagcataagtttatggtggactgttgtcttgtatgtaatgcgtgagacctgttgcttcaatgccgtgctacgtgattctgtccagtgggcttgtggtttccccatgttgcatttccatgtgttatacggctatgtaattctgcccagtgttttgcacacattatcagggtgattgattgatcgtgtaggctgcacttttcatctgaaatgtgtttgcccaatcaatcagatgattctgttggtgttccatgtcaagtgttgtagcttagtttctttgaacaaggtgtgtggaggattttgatggacaatgataaaactgatgacaatttagttgcttcat

SEQ ID NO: 124046 - DNA, 3766 bp, Zea Mays
tcctcccgtcgtcctcgaaaccctaggccagaccacagctgaagccgagcggagttctgctcgccgcccatcgaatccagcttctccaagtccaaggtgtgttctcatcccccggatccgcctgacgccacatctccttcgcgccctccccgcctcaccgtggcccgatccgcgcaggcaccgccgcgacccccatcgtccgcacgacctggatctgacgcgcctccccctgccgccgccgccctccgcctcgtaccttctcgcggcgaccgccgtgctcggactcctcggcggccttctactctacatgcttccccggaagcggggggtcgacgccggcgaggtccaggacttgcacaacaaggccccccgcaccgccgccaccgtcccagtccaggacaaggacaagcaccaggaggaggttgcggaaatggccggcagggcgcccgagatcgatgaggacctccacagccgccagctcgccgtctacgggcgcgagactatgaagcgccttttcggctctaacgtcctcgtctctggactccagggactaggcgctgagatcgcaaaaaaccttgtcctcgcgggtgtcaagtctgtaaccttgcatgatgatggcaaagtcgagctatgggacttgtcaagcaatttcttcctctcagagaaggatattgggcaaaaccgtgctcaagcttgtgttccaaagctacaggagcttaacaatgctgtcatcatctctaccataactggtgatttaaccaaggagcagctttctaactttcaggctgtggtcttcactgatatcagcatagaaaaagcagttgagtttgatgattactgtcatagccaccagccaccaattgctttcattaagtcagaagtttgtggcctttttggcagtgttttctgtgattttggtcctgcgtttactgttttggatgttgatggtgaggaaccacatacaggaattgtggcatcaatcagcaatgacaatccagcacttatttcttgtgtggatgatgagcgtctggagttccaggatggtgatctagttgttttctctgaagtgcatggaatgaccgaacttaatgatggaaaaccaagaaagattaagaatgcaagaccttattcttttactctagaagaagacaccacctcatatggcacttatattagaggtggtattgtcactcaggtgaagccaccgaaggttcttaaattcaaaaccttgaaggaggcaatcaaggagccaggagaatttctcatgagtgatttctccaagttcgaccgcccacctcttttgcatttggccttccaagctttggacaagtttaggactgaattgacacgattccctattgctgggtcagctgatgatgcacagaagctgatagatcttgctattggtattaatgaaactctgggtgagagtaagcttgaagaaattgacaagaagctcttgcagcatttcgcaagtggttccagggctgttttgaatcctatgtctgcaatgtttggtggtattgtaggtcaggaggttgttaaagcatgctcagggaaattccatccactttaccagttcttctacttcgattctgtggaatctctgccagttgaaccgttggagcctagtgatctgaagccagagaacagtagatatgatgcacaaattagtgtctttggggctcagcttcaaaagaaactggagcagtcaaaaatcttcatggttggttctggggctcttggatgtgaattcttgaagaaccttgcgttaatgggtatttcttgcagtcaaaacgggaagctgactgtgacagatgatgatgttatagagaaaagcaatctcagtcgccagtttctcttccgtgactggaacattggacagcccaagtccacagttgctgcaactgctgctatgacaattaatcccgagcttcatgtggaggcccttcagaacagagcaagccctgatactgaaaatgtgtttaatgatgccttttgggagagcttagatgctgttgttaatgcattggacaatgtcacggcaaggatgtacattgactccagatgtgtatatttccagaagccacttcttgaatcaggtactctgggtgccaagtgcaacacacagatggtcattcctcacctaacagagaactatggggcatccagagatccaccagaaaagcaggcacctatgtgcactgtacattcgtttcctcacaacattgatcactgcctgacatgggctagatctgagtttgaaggtctacttgagaagactcccactgaagtaaacgctttcctgtcgaaccctggtggatatgcaacggcagcaagaactgctggtgatgcacaggctagggaccaacttgagcgagttattgaatgccttgagacagacaagtgtgagacattccaagattgcattacctgggcccggctgaagtttgaggattatttctccaaccgtgtaaagcagctgacattcacttttcctgaagatgcaatgactagctctggtgctcctttctggtccgctcctaagcggttcccgcgacctctggagttctcatcttctgactcaagtcatcttagcttcttgttggctgcttctatattaagggcagaaacatttggaatacccatacctgattgggcgaaaaacccaaagaaactagctgaagctgtggacaaggtcattgttccggatttccatccaaagcagggtgttaagatagagatagatgagaaggctactagcctatcctctgcatctgttgatgatgctgctgtcattgaagagcttattgcaaagctggaagcaatttctaaaacattgccaccaggattccatatgaaccctatacagtttgagaaggatgatgataccaatttccacatggacttgatcgctggctttgccaacatgcgggctaggaattacagcattcctgaagttgacaaattgaaggcaaagttcatagctggaagaatcatcccagccatcgccacctcaactgcaatggccaccggccttgtctgcctggagctttacaaagtccttgctggtgggcacaaggttgaagactaccggaacacatttgcgaacctggcgatccccctcttctccatggcggagcctgtgccacccaagaccatcaagcaccaagacatgtcctggaccgtgtgggaccgctggacggtaactggcaacatgacgctgagggagctcctggagtggctgaaggagaagggcttgaatgcgtacagcatatcatgcgggacctcgatgctgtacaactccatgttcccgagacacaaggagcggctggacaagaaggtggttgatgtggccagggaggtggccaagttggaggtgccttcctaccgccgccatctggacgttgttgtggcctgtgaggacgacgacgacaatgacgtcgacatcccgctcgtgtcaatttacttccggtaaagagggacacactgcccgtttatatacatgaatcttgtgcgatgtttgtcagaaggatcgtgtctataagttgcgcatgcaacctccaggactaggctttgcttaaacgcatgctgatggatttcccgagctgggtagagctggctgggaatcgtcgctgagatttgggttcaccgttatggaattcttggaatgacagttactgcaaggcactgttgctgccaagtgttgttgtctttgtacttgggatcttcgatgcgtgcatgtgccggtgttatgcttgcgatt

SEQ ID NO: 124047 - DNA, 2997 bp, Zea Mays
cgtcgtcctcgaaaccctaggccagaccacagctgaagccgagcggagttctgctcgccgcccatcgaatccagcttctccaagtccaaggtgtgttctcatcccccggatccgcctgacgccacatctccttcgcgccctccccgcctcaccgtggcccgatccgcgcaggcaccgccgcgacccccatcgtccgcacgacctggatctgacgcgcctccccctgccgccgccgccctccgcctcgtaccttctcgcggcgaccgccgtgctcggactcctcggcggccttctactctacatgcttccccggaagcggggggtcgacgccggcgaggtccaggacttgcacaacaaggccccccgcaccgccgccaccgtcccagtccaggacaaggacaagcaccaggaggaggttgcggaaatggccggcagggcgcccgagatcgatgaggacctccacagccgccagctcgccgtctacgggcgcgagactatgaagcgccttttcggctctaacgtcctcgtctctggactccagggactaggcgctgagatcgcaaaaaaccttgtcctcgcgggtgtcaagtctgtaaccttgcatgatgatggcaaagtcgagctatgggacttgtcaagcaatttcttcctctcagagaaggatattgggcaaaaccgtgctcaagcttgtgttccaaagctacaggagcttaacaatgctgtcatcatctctaccataactggtgatttaaccaaggagcagctttctaactttcaggctgtggtcttcactgatatcagcatagaaaaagcagttgagtttgatgattactgtcatagccaccagccaccaattgctttcattaagtcagaagtttgtggcctttttggcagtgttttctgtgattttggtcctgcgtttactgttttggatgttgatggtgaggaaccacatacaggaattgtggcatcaatcagcaatgacaatccagcacttatttcttgtgtggatgatgagcgtctggagttccaggatggtgatctagttgttttctctgaagtgcatggaatgaccgaacttaatgatggaaaaccaagaaagattaagaatgcaagaccttattcttttactctagaagaagacaccacctcatatggcacttatattagaggtggtattgtcactcaggtgaagccaccgaaggttcttaaattcaaaaccttgaaggaggcaatcaaggagccaggagaatttctcatgagtgatttctccaagttcgaccgcccacctcttttgcatttggccttccaagctttggacaagtttaggactgaattgacacgattccctattgctgggtcagctgatgatgcacagaagctgatagatcttgctattggtattaatgaaactctgggtgagagtaagcttgaagaaattgacaagaagctcttgcagcatttcgcaagtggttccagggctgttttgaatcctatgtctgcaatgtttggtggtattgtaggtcaggaggttgttaaagcatgctcagggaaattccatccactttaccagttcttctacttcgattctgtggaatctctgccagttgaaccgttggagcctagtgatctgaagccagagaacagtagatatgatgcacaaattagtgtctttggggctcagcttcaaaagaaactggagcagtcaaaaatcttcatggttggttctggggctcttggatgtgaattcttgaagaaccttgcgttaatgggtatttcttgcagtcaaaacgggaagctgactgtgacagatgatgatgttatagagaaaagcaatctcagtcgccagtttctcttccgtgactggaacattggacagcccaagtccacagttgctgcaactgctgctatgacaattaatcccgagcttcatgtggaggcccttcagaacagagcaagccctgatactgaaaatgtgtttaatgatgccttttgggagagcttagatgctgttgttaatgcattggacaatgtcacggcaaggatgtacattgactccagatgtgtatatttccagaagccacttcttgaatcaggtactctgggtgccaagtgcaacacacagatggtcattcctcacctaacagagaactatggggcatccagagatccaccagaaaagcaggcacctatgtgcactgtacattcgtttcctcacaacattgatcactgcctgacatgggctagatctgagtttgaaggtctacttgagaagactcccactgaagtaaacgctttcctgtcgaaccctggtggatatgcaacggcagcaagaactgctggtgatgcacaggctagggaccaacttgagcgagttattgaatgccttgagacagacaagtgtgagacattccaagattgcattacctgggcccggctgaagtttgaggattatttctccaaccgtgtaaagcagctgacattcacttttcctgaagatgcaatgactagctctggtgctcctttctggtccgctcctaagcggttcccgcgacctctggagttctcatcttctgactcaagtcatcttagcttcttgttggctgcttctatattaagggcagaaacatttggaatacccatacctgattgggcgaaaaacccaaagaaactagctgaagctgtggacaaggtcattgttccggatttccatccaaagcagggtgttaagatagagatagatgagaaggctactagcctatcctctgcatctgttgatgatgctgctgtcattgaagagcttattgcaaagctggaagcaatttctaaaacattgccaccaggattccatatgaaccctatacagtttgggaatcgtcgctgagatttgggttcaccgttatggaattcttggaatgacagttactgcaaggcactgttgctgccaagtgttgttgtctttgtacttgggatcttcgatgcgtgcatgtgccggtg

SEQ ID NO: 124048 - DNA, 2916 bp, Zea Mays
cgtcgtcctcgaaaccctaggccagaccacagctgaagccgagcggagttctgctcgccgcccatcgaatccagcttctccaagtccaaggcaccgccgcgacccccatcgtccgcacgacctggatctgacgcgcctccccctgccgccgccgccctccgcctcgtaccttctcgcggcgaccgccgtgctcggactcctcggcggccttctactctacatgcttccccggaagcggggggtcgacgccggcgaggtccaggacttgcacaacaaggccccccgcaccgccgccaccgtcccagtccaggacaaggacaagcaccaggaggaggttgcggaaatggccggcagggcgcccgagatcgatgaggacctccacagccgccagctcgccgtctacgggcgcgagactatgaagcgccttttcggctctaacgtcctcgtctctggactccagggactaggcgctgagatcgcaaaaaaccttgtcctcgcgggtgtcaagtctgtaaccttgcatgatgatggcaaagtcgagctatgggacttgtcaagcaatttcttcctctcagagaaggatattgggcaaaaccgtgctcaagcttgtgttccaaagctacaggagcttaacaatgctgtcatcatctctaccataactggtgatttaaccaaggagcagctttctaactttcaggctgtggtcttcactgatatcagcatagaaaaagcagttgagtttgatgattactgtcatagccaccagccaccaattgctttcattaagtcagaagtttgtggcctttttggcagtgttttctgtgattttggtcctgcgtttactgttttggatgttgatggtgaggaaccacatacaggaattgtggcatcaatcagcaatgacaatccagcacttatttcttgtgtggatgatgagcgtctggagttccaggatggtgatctagttgttttctctgaagtgcatggaatgaccgaacttaatgatggaaaaccaagaaagattaagaatgcaagaccttattcttttactctagaagaagacaccacctcatatggcacttatattagaggtggtattgtcactcaggtgaagccaccgaaggttcttaaattcaaaaccttgaaggaggcaatcaaggagccaggagaatttctcatgagtgatttctccaagttcgaccgcccacctcttttgcatttggccttccaagctttggacaagtttaggactgaattgacacgattccctattgctgggtcagctgatgatgcacagaagctgatagatcttgctattggtattaatgaaactctgggtgagagtaagcttgaagaaattgacaagaagctcttgcagcatttcgcaagtggttccagggctgttttgaatcctatgtctgcaatgtttggtggtattgtaggtcaggaggttgttaaagcatgctcagggaaattccatccactttaccagttcttctacttcgattctgtggaatctctgccagttgaaccgttggagcctagtgatctgaagccagagaacagtagatatgatgcacaaattagtgtctttggggctcagcttcaaaagaaactggagcagtcaaaaatcttcatggttggttctggggctcttggatgtgaattcttgaagaaccttgcgttaatgggtatttcttgcagtcaaaacgggaagctgactgtgacagatgatgatgttatagagaaaagcaatctcagtcgccagtttctcttccgtgactggaacattggacagcccaagtccacagttgctgcaactgctgctatgacaattaatcccgagcttcatgtggaggcccttcagaacagagcaagccctgatactgaaaatgtgtttaatgatgccttttgggagagcttagatgctgttgttaatgcattggacaatgtcacggcaaggatgtacattgactccagatgtgtatatttccagaagccacttcttgaatcaggtactctgggtgccaagtgcaacacacagatggtcattcctcacctaacagagaactatggggcatccagagatccaccagaaaagcaggcacctatgtgcactgtacattcgtttcctcacaacattgatcactgcctgacatgggctagatctgagtttgaaggtctacttgagaagactcccactgaagtaaacgctttcctgtcgaaccctggtggatatgcaacggcagcaagaactgctggtgatgcacaggctagggaccaacttgagcgagttattgaatgccttgagacagacaagtgtgagacattccaagattgcattacctgggcccggctgaagtttgaggattatttctccaaccgtgtaaagcagctgacattcacttttcctgaagatgcaatgactagctctggtgctcctttctggtccgctcctaagcggttcccgcgacctctggagttctcatcttctgactcaagtcatcttagcttcttgttggctgcttctatattaagggcagaaacatttggaatacccatacctgattgggcgaaaaacccaaagaaactagctgaagctgtggacaaggtcattgttccggatttccatccaaagcagggtgttaagatagagatagatgagaaggctactagcctatcctctgcatctgttgatgatgctgctgtcattgaagagcttattgcaaagctggaagcaatttctaaaacattgccaccaggattccatatgaaccctatacagtttgggaatcgtcgctgagatttgggttcaccgttatggaattcttggaatgacagttactgcaaggcactgttgctgccaagtgttgttgtctttgtacttgggatcttcgatgcgtgcatgtgccggtg

SEQ ID NO: 124049 - DNA, 3655 bp, Zea Mays
cgtcgtcctcgaaaccctaggccagaccacagctgaagccgagcggagttctgctcgccgcccatcgaatccagcttctccaagtccaaggcaccgccgcgacccccatcgtccgcacgacctggatctgacgcgcctccccctgccgccgccgccctccgcctcgtaccttctcgcggcgaccgccgtgctcggactcctcggcggccttctactctacatgcttccccggaagcggggggtcgacgccggcgaggtccaggacttgcacaacaaggccccccgcaccgccgccaccgtcccagtccaggacaaggacaagcaccaggaggaggttgcggaaatggccggcagggcgcccgagatcgatgaggacctccacagccgccagctcgccgtctacgggcgcgagactatgaagcgccttttcggctctaacgtcctcgtctctggactccagggactaggcgctgagatcgcaaaaaaccttgtcctcgcgggtgtcaagtctgtaaccttgcatgatgatggcaaagtcgagctatgggacttgtcaagcaatttcttcctctcagagaaggatattgggcaaaaccgtgctcaagcttgtgttccaaagctacaggagcttaacaatgctgtcatcatctctaccataactggtgatttaaccaaggagcagctttctaactttcaggctgtggtcttcactgatatcagcatagaaaaagcagttgagtttgatgattactgtcatagccaccagccaccaattgctttcattaagtcagaagtttgtggcctttttggcagtgttttctgtgattttggtcctgcgtttactgttttggatgttgatggtgaggaaccacatacaggaattgtggcatcaatcagcaatgacaatccagcacttatttcttgtgtggatgatgagcgtctggagttccaggatggtgatctagttgttttctctgaagtgcatggaatgaccgaacttaatgatggaaaaccaagaaagattaagaatgcaagaccttattcttttactctagaagaagacaccacctcatatggcacttatattagaggtggtattgtcactcaggtgaagccaccgaaggttcttaaattcaaaaccttgaaggaggcaatcaaggagccaggagaatttctcatgagtgatttctccaagttcgaccgcccacctcttttgcatttggccttccaagctttggacaagtttaggactgaattgacacgattccctattgctgggtcagctgatgatgcacagaagctgatagatcttgctattggtattaatgaaactctgggtgagagtaagcttgaagaaattgacaagaagctcttgcagcatttcgcaagtggttccagggctgttttgaatcctatgtctgcaatgtttggtggtattgtaggtcaggaggttgttaaagcatgctcagggaaattccatccactttaccagttcttctacttcgattctgtggaatctctgccagttgaaccgttggagcctagtgatctgaagccagagaacagtagatatgatgcacaaattagtgtctttggggctcagcttcaaaagaaactggagcagtcaaaaatcttcatggttggttctggggctcttggatgtgaattcttgaagaaccttgcgttaatgggtatttcttgcagtcaaaacgggaagctgactgtgacagatgatgatgttatagagaaaagcaatctcagtcgccagtttctcttccgtgactggaacattggacagcccaagtccacagttgctgcaactgctgctatgacaattaatcccgagcttcatgtggaggcccttcagaacagagcaagccctgatactgaaaatgtgtttaatgatgccttttgggagagcttagatgctgttgttaatgcattggacaatgtcacggcaaggatgtacattgactccagatgtgtatatttccagaagccacttcttgaatcaggtactctgggtgccaagtgcaacacacagatggtcattcctcacctaacagagaactatggggcatccagagatccaccagaaaagcaggcacctatgtgcactgtacattcgtttcctcacaacattgatcactgcctgacatgggctagatctgagtttgaaggtctacttgagaagactcccactgaagtaaacgctttcctgtcgaaccctggtggatatgcaacggcagcaagaactgctggtgatgcacaggctagggaccaacttgagcgagttattgaatgccttgagacagacaagtgtgagacattccaagattgcattacctgggcccggctgaagtttgaggattatttctccaaccgtgtaaagcagctgacattcacttttcctgaagatgcaatgactagctctggtgctcctttctggtccgctcctaagcggttcccgcgacctctggagttctcatcttctgactcaagtcatcttagcttcttgttggctgcttctatattaagggcagaaacatttggaatacccatacctgattgggcgaaaaacccaaagaaactagctgaagctgtggacaaggtcattgttccggatttccatccaaagcagggtgttaagatagagatagatgagaaggctactagcctatcctctgcatctgttgatgatgctgctgtcattgaagagcttattgcaaagctggaagcaatttctaaaacattgccaccaggattccatatgaaccctatacagtttgagaaggatgatgataccaatttccacatggacttgatcgctggctttgccaacatgcgggctaggaattacagcattcctgaagttgacaaattgaaggcaaagttcatagctggaagaatcatcccagccatcgccacctcaactgcaatggccaccggccttgtctgcctggagctttacaaagtccttgctggtgggcacaaggttgaagactaccggaacacatttgcgaacctggcgatccccctcttctccatggcggagcctgtgccacccaagaccatcaagcaccaagacatgtcctggaccgtgtgggaccgctggacggtaactggcaacatgacgctgagggagctcctggagtggctgaaggagaagggcttgaatgcgtacagcatatcatgcgggacctcgatgctgtacaactccatgttcccgagacacaaggagcggctggacaagaaggtggttgatgtggccagggaggtggccaagttggaggtgccttcctaccgccgccatctggacgttgttgtggcctgtgaggacgacgacgacaatgacgtcgacatcccgctcgtgtcaatttacttccggtaaagagggacacactgcccgtttatatacatgaatcttgtgcgatgtttgtcagaaggatcgtgtctataagttgcgcatgcaacctccaggactaggctttgcttaaacgcatgctgatggatttcccgagctgggtagagctggctgggaatcgtcgctgagatttgggttcaccgttatggaattcttggaatgacagttactgcaaggcactgttgctgccaagtgttgttgtctttgtacttgggatcttcgatgcgtgca

SEQ ID NO: 124050 - DNA, 1867 bp, Zea Mays
tcaaaaaaaattatgtctgtgactgcacaaagtttggtgaaattgatgaaacgggccatccgaagcttcggaaactatgaaactgaagttgcaaactttaaaacattttgataagtcatttttatttaaattatttttaaaaactatttaaatttatattatacaccacggcttcacgtcaaaactagaacctagaacaatgccagactccttatggtatccctgcctcatgggaaaataagttctaggacaaggggaaatttgagtttatttagggctagtttgggaacactaatgtttcatgagattttcatttttccaagggaaattaatttattttccattgggaaaatgaaaatcccataggaaattagtattctcgaactaacccttgtagtaacggcgtataccaaaggaaaagctcaaaaaaaatggacgcctccaccatccagaaatatctccccagtcccccgcccgccacgagccctccacgcgctccctccgccttctccaaatctcagccgtccacgtgtctccaatctgctacccccacgcgcctatatttatccctttcgttcctccaaggcacagccgcacaatccatccatccatctattctccagtccacccattccattccactacccacgcgcagaattcacgcgaacgcacacgcacccacacgacacatccagatgatgcttagggtttccccgtccccggccgccgcggtgccaacccagctctccggtgcgcccgcgacccctgctcccgtcgtcagggtggcggcgccgcgcggcgtcgcctcgccggccgctggcgccgcgtgcagggccgcgggcaaggggaaggaggtgctcagcggggtcgtgttccagcccttcgaggagatcaagggggagctcgccctcgtgccccagtccccagacaagtcgctcgcgcgccacaagttcgtcgatgactgcgaggccgccctcaacgagcagatcaacgtggagtacaacgcctcgtatgcataccactccctcttcgcctacttcgaccgcgacaacgtggctctcaaaggatttgccaagttcttcaaggaatccagcgacgaggagagggagcacgctgaaaagctcatggagtaccagaacaaacgtggaggcagggtgaggctccaatcgattgtgacgcctttaaccgagtttgaccaccctgagaaaggagatgctctgtacgctatggagctggctctggccctggaaaagctggtcaatgagaagctgcacaacctgcatggtgtggcaacaaggtgcaatgatcctcagctgacagacttcatcgagagtgagttcctcgaggagcaggtggaagccataaacaagatctccaagtatgtcgcccagctgaggagagtgggcaaggggcacggggtgtggcacttcgatcagatgctgcttgaggaagaggcctaaaaagaagaacggacagatgaatgaaggaaacaagtgtgtaatgttgatcaggcggaggaataataatgggtcaactgacaactctgggtcggtggatttgtagttggtttgggttttttagttgtagaacggtgttgccctcctagagagggatgaacacattatgcatgcgatgtgtcagttcggtcggtgctatgctcgttgggatttgattgtcggaaataaaacatgggtgatgaatgtgtaccctccctaatctatgaagttgagaaagccctgcgggtgtaggtggatttgtagaggtttttcttcagttggttaggttcgctgttgcctacctcatttgcccctaatcatcatcgccgtaatttatttataataaaaaagatccagcttttccccctctc

SEQ ID NO: 124051 - DNA, 631 bp, Zea Mays
ctctggtttaggataggatctgaatgcccaagtgcctcagaggagagtctgcgtgtgtggtactggtagtctggtaatggtagagcaaggaaagtaacaaaagctcgcggttgtccagaactggaatttattctgcgtctgaacatagttgtatgactgtatgagttgaagctttcagtatgtgcatcgatggatgatgatagattcaaagactggtagcaattctacaaatttaggacgacttatatagaatagaaggctagctattgttagtaaatgtttggttatgtatcaagctatgttgtagttatgttcatgcttgagcttgacatagttggaagctaataatctgttgtctatttctgatatgtgcctctcttttttattgatttcagctatggagctggctctggccctggaaaagctggtcaatgagaagctgcacaacctgcatggtgtaagttgcattcttgcagagaaatatatattgcgtgctttgctcaaggcatacatagaaaatctatgggcaaatataagttgaataactgttgagtcactgcatgctgttgtaattaacaggtggcaacaaggtgcaatgatcctcagctgacagacttcatcgagagtgagt

SEQ ID NO: 124052 - DNA, 925 bp, Zea Mays
tataaaagaggaggctctgcacccggcagtctccccccttccctttgcaaccatcctctctgcactctgctcgctctaaaaccttgtgaggaccagaacgctgcaggttacaccatggccggcagcggcagcggcagcccgccctgcgcatcgtgcaagctgctgcggcggcggtgcacgcaggagtgcgtgttcgcaccctacttccctcccgatgacccccacaagttcgccatcgtccataaggtcttcggagccagcaatgtcagcaagatgctgcagcagagagcggacgccgtgagcagcctggtgtacgaggccaacgcgcgcatgagggaccccgtgtacggctgcgtgggcgccatctcctacctccagcagcaggtctcccagctccaggtgcagctcgccctcgccaaggccgagatcctctgcgtccagatgcagcacgacgagtcagctgcagcttctgccgcgccagcaccggcaaagcaacaacaactctatcaccaccaccagcagcagcagacgatggagtgcgaggcttacggcagcctgctcgtgcagaatggtctgatgatgaacacgttgggcagcgctggtgcagctcatcagcagcagcagatgctgggtggcttcggctctgcggggaacactgcaatggcgctgcaggaggcgtgcctcaagaaagagaccctttgggcatgagtgggtacctccatttgtcgtcgacaagcaagacagaacaaaactagctgtccgccgctgtaattctatgaaaaaagatcatccgaaacaataatctctcagcatttctacttgaaaactaagaacaagaccattcaaaagaaatagaaactaagaaccaagacgaagctagctgagggatcttgatgtgaagtagagttttttgcacaacggctgc

SEQ ID NO: 124053 - DNA, 476 bp, Zea Mays
ggtctggactatggaggtcacttgatcatgtggtgtcgtacgccattccgtctcatggatggattcatgcgttcggtgagaaaattagaaagccgatgctctgtaagagacagggagtcaattaaggcgtcttgtccgaaagatcaatcgtcgcagagaccttgttctgtacttctgttccgtttgattttccattttcatagtagcaggaaattagttaagattaatgcacgggtagagacgtcactgtaagctgatattgtacgtgcatgaatttgttctgtcatgtagattgggaacaagtgtgggtaaaatatagtgagattgttgtggagtcctcatccgactgctggtacatgtgtcacccctctatcttgtacacatgtcaccactactactgcatgctgcatgcatatggtcgatgtatgtaggtatagcatacttgtcttgtctcctgctacaactttagttcctag

SEQ ID NO: 124054 - DNA, 943 bp, Zea Mays
atgtccctacgctcggccacttcgagtgcgcggcgccagcaggaggccgaggtcgccgcggcacaagaacgcgagcgagcagcagcagcggctgcagcgacagcggcgagggcagcacggttggcggcggcggaactggcagcggcgagagcggaagtagaagcagcggaggcggcggatgctgcacgtgcggcggcaacagagctcgaggttctgcgcggcagtagagctggcaggtctgcttctgtcgacgacaacaccgacgaagagctcaggctggcgagggaagcagcgcgagagcaggcggcacagtgggcagccgcgcatccccatgggggcgcgcgtggcggcagcccggataggcgccgccgcgctgacggcgctccaggcgggggcgcacgcggcggcagcccagacgggcgtagacgcgccggcggtgctcccggcggcggcgacagagtcgacggagatcgcggcctctacaggcggcgcggttctccctccccggatcggtaccatggtcgccgcatggcccaggccattgtcagggacatcggtcccggaggatcggcgggcgctggatgccctcattgctgcagtcccgcccgagatgcagttttcgctttcccagaagcggactgccaaggaggcctgggacgccatcgctgcgacccgcatcggtagcgatcgtgcctgcaagaccacactgcaggcacttcgcaaggagtgggagaacctggccttcaagccaggtgaggatgttgatgactttgctctccgcctcaacactctgttgcagaagatggtgcagttcggcgacgacacctacgatgaggaaagagctgttgagaagctcttccgctgcatccccgagaagtacaggcagattgctcgctcgatcgagtctctgctagacctctccacgatgacgatcgaagaggcg

SEQ ID NO: 124055 - DNA, 896 bp, Zea Mays
atttccatcccattcatctccgccagaggagggaggcgagccgcgtttttcatttcgaaatcaaaccacgacgatgccgcaggcgatggcggacgccgcgacgctctccgccctcgctctctttgcctcccgcctctcctgtcgcaggttcggggacgaggacctccgggtgctggaggccgcgctgtccgccggcgccgacgtccccgcgctgctcgccacgcgctcggcggcccggcgcctgctgcgatcgagcgcggcggaggcactcgcgttcaccgcggcgggtgcatcgctggatggtggggatgagagacggagcctcgccgtcgccgacttcttctcacgcgccttcgcgcttgtaggcgatgtcgagagctgccttgccatgagatacgaggcactgttgcttcgagacgctaaatactgcaacgaccttcacttgcaagtgtcccgtcaggagtggctaacttttgcaacggattgtcttgataatggcttctacaccattgcctccaaggcttttgcaaatgctcttgtgcacattcatccaagccacacagggcacttggactctgctaattccattgaggagaaggacaagatcattgaaataaaaggactccagaacttggccaagtcattatctgcacagcattgtgttcagataaagtctgctgaatacatggaaaggagagcttcaggtgttcacgagaagtataatttgcaatcaggaaaaccaaagttaacaggaagttcaatgttcaggctagggattaaaacgaggaacataaagaaattgcttcgtagccaggaaaggaacttgggggatttaaagcaatcttagcgttgcatcttccaaccgagaggaatgttgtaaaaaggtgagttttatg

SEQ ID NO: 124056 - DNA, 2791 bp, Zea Mays
ggagaactcatgatactcacatctatagatgattttgcaaattcagacagtaactgtagcaccgacgtatactgtatacacacacaaaaaaaaaactttccgtttctgatttccgtacaaggggtacaacgacattccaatccgaatactccgacactgccctactttttgtggttagcgcaagggtcagtgttctaggttggttgcttcagtatcactacttttcctagagctgggccacatagccatgtgcaggcaggagtgttgctagtagccctgccagtgtactacagactcgataggtggccataaaagaggagagccaataagcacaatggcgcctgaagagaggatgaagacagaggccagtcacaaggcgatagcagcaggtggtggcaagatgacggtgctccactctccggttggagttaggagcatcgtgacctccttggtggctttcttcatcctagccagctccatcgtgttcctcctcgacagaggccaggaagagcaagtgcaagtggcagtcgagcatggacgccaagaagtgcaggtgaagctggaatccgggctgcaagaaccggcgataagagggacaacccaagagggggacgccagcaacgaggagtgcaactggtccaggggaaggtgggtgtacgacaacgtgtcccgcccattgtacagcgggctcaagtgctccttcatcttccccgaggtggcctgtgacaagtatggcaggaaggatgccatgtaccagcactggagatggcagcctcatggtcatggatgcgacctcccaagatttgatgccatcaagctgcttgaaaatctgagaaacaagagaatggtgtttgtgggcgactcagtcaacaggaaccaatgggtctctctcgtgtgcatggtggaggcctcaatacctgacgacaggctcaagatacgcaccttcaatggctcactcatctccttcaaggcattggaatacaacgcaacgatagatttctactggtcaccactactggtggaatctaacagcgacaaccccattatccaccgggtggagtaccggatcataagggcagacagaattgagaagcatgccagtgtctggagggatgccgacatcattgtcttcaattcttacctgtggtggaggaagcagaaggatgacatgaggatgaaggtcatgtatggttcattcgaagatggtgatgcaaagttagacgagatggaaatggtcgatggtttcgagatagctctcaagaaactaaccgaatggctgggggagaatattgacaagaacaagactaggatatttttcgcaggatcgtcaccaacacattcctgggctagcaactggggtggagaagacaagaacaagtgccttaacgaaacagagccgatctacaaaaccggatacaaagctgcaactacagactacagcttgatggccaaagctaagcactactttcgaacattggagccgaaaggcatacatgttcagatactgaacatcaccgagctgtctgactaccgcaaggacgggcatcctacggtgtacaggaaacagtttgctcctctgacgaaagagcaaatcgcagacccagccagttacgcggattgcacgcactggtgcctccccggagttccagatgtctggaacgagtttttatatggctacctcgtgcaaaaatgatgtacaaaactgtcagtcaggttcgttttgccccttatatataatgtacaaatggcatactccatttagattaggatgctcgctcattctcttgtgcagagaatggttggacctcttacatttaccccgtgcagtgcagagacagacagaaggagaaaagcaagggtctgtctgtacatcacttattaatgggatcagtgtactatttgtttacatctaacagggcgacatgattttgcaattttcgaagaaatttgtcatgcaaaaaggaacagtttaagaatgcccctaaaattcagttcagttcaattcaattcagtcataccggcaggcaggcaacaaaagcacattccacatctgattggtgggtaatataggttagggagagaggagcaacctgaatctgctatcgccacaggttccagttgtcgtcggcccgccgcaccgcgtgcaggaccaccccgccatggccaccggacaccctcgccggcgcgtcgcgcagttacaggctacagctactacctggaaggccaggccagccccagcccatgcagtaacacttggatgatgtggcccgacaacggcccaagtttaacggtctcaaagcttagaggcctcacattgccaaaattatgaataaccgaaatggtacaagtttcttatatatgaaacgcggttcaaaacacggcttctagggctatccacgtcgacttttattttttcagccgttagattcacaatcgaaggacaagcaaacgcgatgtcgtttctatcctccacagatgacacgatgtttccagaaatcgcttcttctttccttcctctgggcatctctctcccgaggctacgggcctacggcttcgatgttaagccagtggagttcctccgcagctgacggcgatggcggagaccacctgcttctccgtgttacgccacagatcttggctgccacggtctcgcgcttgccgactgtaatacccaatttgtaaattgtaagaaataatacaaatggagaaaacaatttctccttatgtgagtttaacctttgtgcatcatcacatgtgtacaccctaggtataaacaaataattaataccct

SEQ ID NO: 124057 - DNA, 917 bp, Zea Mays
tgctacgaataacaagaatatatttctgctcgatgatacataaacaaactccagtatatggtttgatttgttgctttccgtagctatatatagtagtataatttttgagctgcataaatagttccgcgaaaataatcgatcaagaaaatggcagtgacctcaagcatagcatctattacagactcatgatcagacgcggcctccggtggcggaggcgatgagcgacagcagcgggttgccggtgccgccggcagcctggtcaacatcgtcgaggaagaggtcctcgggcacgcggcacgcgccgtgcgcgcagacgatggcggtccccagcgcgagcgcggagaagatgagcgagcccaccgacgtgaggaagacgacgaacgcggaggcggcggcgaggcctccgagcacctcgcggtcggagaaggtgcggccgaacgcggagacggggggcgcgtcggcggggcggagcacgtagaggaggcaccaggcggcgagcagcgccagcagcgcggccagggagaaggggtgcgccaggagcgccgcggcgaggcacagcgcggccacggcggcgtagttgacgcggaagtaggccaggttcttgcgcaagcgggacgtggcctcggcgagggactccgggcgggagagagccgagcggtccgcgagctcggaccaggggcgggcgcccgacagcgcgcgccgggtggtgtcgaggaggcgggagaggaaggcccggatcgccgctgggttggtgtcggtggcgtccgcggaggatatggccgtgggcgcgggtgtcgggggtgctgcggccgccgggacgaccgtggtggggaggagcggaggcgatgccgcggccatggcgatctctctgtctcggcgggtttggcggatctgaggaggacctggacgacgcggag

SEQ ID NO: 124058 - DNA, 1300 bp, Zea Mays
cagttggcaaattgccttttcccttgccaaattgccaatccgtgaattcaggctactgctgattgctctacagcagaaacagatcagctactcgtgctgtatactaggagtaaatcaaatagaaaaaataataacaatgcattattaatactaggagtattctcctctcttccatccgtcgtagggcactacagcgatgattctagagcaaataatatttgcctatacaaactggaaattacctaggaacgcaagaaaatgatcaatccgatccgtccagtgaaacaaacaaatgaaagaattcctacatatattatctctcttaatttctccattgcttctttttctgtctggtaaattcctgtctggcgctgcttgcttgctactcgtcgtcgtctcccgcagaagcagaagccgccggcacatgggcggcggcggcgccaccaccaccttcttcgcttggcccagcgccgccctcgctgccaccaggcctgatctgctcgagctgccgcagcacctcgtgcgcctcgggcctgaccgccggcgccgggtcgacgcagtgcagcgcgagcttcagcgtgtccatgagctgctcgtccgcggccgtccccgcggcggcgtcgcgcaccagctccaggtcgaacacctcgctggtccactcctccttcacgatggacgccacccactgcggcaggtccatgccgttggtgctgtccgcgggggacttgcccgtcagcagctccaggatgatgacgcctaggctgtacacgtccgtcttgccgctcgccttcttcagcttcgacagctccggcgcgcggtaccccagcgcgcccgccgccgccagcacgtttgagtttgccgccgtcgtcatcagccgcgacagcccgaagtcggagatcctggggctgtgctgctcgtccaggagcacgttgctggccgtcaggttgccgtgcacgatgctcatgtcgtcgtggaggtaggccaagccacgcgccgtgcccttggcgatcgtcatccgcgtcgcccagtccaccggcgtgttgggagcgcgagctgatcattgttaacagacatcaagtttagatgctaaacagtgtcaaaagtgcacattaagctttcagaatgtctaaattgaaatgatgctgagtagctgttctgttttcaaacaagaatgtctaaattgatcgggtggcaaaattgtaggaaaacgtgctttcaacacaacttcaaagtttcagtccacagttattgcatagtttgatactgaatgctgatgattttcaggctgaagaaaaaaaaa

SEQ ID NO: 124059 - DNA, 1258 bp, Zea Mays
cgtgaatcgcacagagaaggggggaattcgagtgaggttgagagccgccgcgggctgggagtgagggccgggtcggcaaacctcgtgctcctcgttgccgctgccctaacgtcgtgtctaggagtctccacggaccgcgaggaaggtgtcggtggcctcgacgtgcacgattggtcgacggagaccccgggattcctcaccgtcgtgtgccatctccgccacgccgtggacagggtaattcacccttcaactgtcggtatgcacctccattccatgtccgccgtcgtgccaatttcatttttgcgggtatcgggagtgggggcggtgcaccggaggggaggaattgggtccgccgccggtgatgcgccgccgtgtagcttgggcgccgccgcgctcagctactggtgtttgggggggaaagtcgtgagcgtccatctattgatgaacggctccgagtgagccttagtgtggccgtgttgggcattggatctgggccgcaagcgtttggatcgacggtcgcgattgggttatcccataacccttcgtcgtattaaatctaggccgtagatagtcgatcgcgcggtcctcactgcataccggttcggtgcgtatgggatctaatcctgtgcgcgcagatttgatcgaacggctcagattcaccgatacccccttcgcgggtcaaagttataaaagagaccctcggttttattaaaatcaacccgccgtccgttggggactgttctctgtgtcttgggcgacttaccccgagccccctgtgttctctggaaatagtgcccccggtccagagctgattaaattggattaaatgaattggaaatttgatttttaatatgaaaataaaccctataacttgtgaaattcatagaaaattcatatttagtccaaattagtccattccagttcctaaaattttgtaatttaattctctatcacctagagcctctgttatgtcatgaaaacagtaaagaaatttatttatcacataatcctatttaaagcacataaaacctttgaaaatgcttaacttaaaatctataactcagaaaattatgattcctgttcctaggattttattttaatatgtagaatatctctgtgtattttgtttacatgcttggtgtaatgttaattttccctatatcctgtgcttgtttgtattgtggcgagtagaagagcccgttgctgaggatcctggtgagcagcagattgtagtagctgagcaggagctcattgaagg

SEQ ID NO: 124060 - DNA, 1818 bp, Zea Mays
atccaacggagtagccagcccactcactacccatgcccagttctccctgtccaccggccgccgccgccgctgccgtgcgcttaatcctacccctgtctgtctcctcatccagtgcaaggagcgcccaccgctgcctgtgtcgtttggtcaccggagatggatggggatgaggagaacgtcgggccgttccgccggactagcgcgcgcacgcgccgcatggccacgcgcatggcgtccgcgctcgccagctcggacaatcgcgcccaggtaacggtgggattggactggttgctcctcttcccccgctgtttccctacagtttgtcaattccctttcgtctacgagtattcactgtgttgaaattagaattgctgttgcagagctcactcgatattttatctccgcacgtgctggggtcaaaaaatactatccaattctatctaggagtatcaaattaccatatcaagcattggccttatgttttttttttctagaagaaggattggtctcatcgacaagtagttttggtaatactattacttacgcctatgaactagagcaaatagtcatgtgtctaaaaaatcgatagtagaattagctaactaacaaatagttgactaactattagctaattatagctgggttgaaccaactaataactaaactaatggatagttgagggtgtagctaatggttagctggactattagatgagacatgagagtgtttggatgtctctaactaaaaataaataatatctaaactattagttgggttattcggatgtcttcagctaattttagcagctaattattagctctagtgcattcaaacagggtctaagtatagactctagaaaaaaaaggaacatatttctatcctgggtttacactgcttattatgtgccatgtgtattgttgtacccgtgccttctcatgactccttaccaaaggatttgaggtgttaactcagattccattcatattgagaccattttgtgcttataggttgctgacttgctgatcagttactgtgtctgaaactattctcctttatgttttgctgcctcattatggaaacacctctgtatctgtaatgccattcaggctgcattagctcgccttgaagctcttgagagcgataatggtggggtcgaggtggtagatcttaatgatgatgagtacggatccacggatgaagaagaccctgttctcatgcaaaaaaaacagtccaagatcatgaaacgtaaaacaaggcaagggaaagctttggagaagagggcagcaagatcactcatggatgtgctacaagaagcaaatttggagtccgttcctcctcatgtgccaacatattcaagggctgctgtgggtccaccgagcacttcatctcgacgccactactgctcagtttgcggtagctctgcaacctacacatgcgtgaggtgtgggacgcggttctgttcatgccgctgtcaagtcatacacaatgatacacgctgcctgaagtttgtggcttgatcggctggatatgtataagctacatttgatgtatgtccacatcctaatggctgttcatatgtgctctgatcagtatgatatacttgctgactatgtatcctactctgtaggtgggggtttggtaagttgtagaaaaccattttctcagtagtgtactgcagttgcaccgaccacttttgtttttttttcccagaaatgttgtgcgagctcgcagttatgcagtagagctgaaagtagctcttggttccaagatatctgaatggtaatttgagtgcttggcagtgtttcttgatggactaaa

SEQ ID NO: 124061 - DNA, 964 bp, Zea Mays
atccaacggagtagccagcccactcactacccatgcccagttctccctgtccaccggccgccgccgccgctgccgtgcgcttaatcctacccctgtctgtctcctcatccagtgcaaggagcgcccaccgctgcctgtgtcgtttggtcaccggagatggatggggatgaggagaacgtcgggccgttccgccggactagcgcgcgcacgcgccgcatggccacgcgcatggcgtccgcgctcgccagctcggacaatcgcgcccaggctgcattagctcgccttgaagctcttgagagcgataatggtggggtcgaggtggtagatcttaatgatgatgagtacggatccacggatgaagaagaccctgttctcatgcaaaaaaaacagtccaagatcatgaaacgtaaaacaaggcaagggaaagctttggagaagagggcagcaagatcactcatggatgtgctacaagaagcaaatttggagtccgttcctcctcatgtgccaacatattcaagggctgctgtgggtccaccgagcacttcatctcgacgccactactgctcagtttgcggtagctctgcaacctacacatgcgtgaggtgtgggacgcggttctgttcatgccgctgtcaagtcatacacaatgatacacgctgcctgaagtttgtggcttgatcggctggatatgtataagctacatttgatgtatgtccacatcctaatggctgttcatatgtgctctgatcagtatgatatacttgctgactatgtatcctactctgtaggtgggggtttggtaagttgtagaaaaccattttctcagtagtgtactgcagttgcaccgaccacttttgtttttttttcccagaaatgttgtgcgagctcgcagttatgcagtagagctgaaagtagctcttggttccaagatatctgaatggtaatttgagtgcttggcagtgtt

SEQ ID NO: 124062 - DNA, 1403 bp, Zea Mays
tttcataacgtgaaatctctctctgaaactggttccctgcctgagcatataagcttcgtcacatttggcgagcgcgagccgacgattgcagtgatccagtccagtgctgcgatgggcgtgggccgccgctccgaaccgcggcctgacgcaacggggcagcaccaccaccagcaccgcctgctgtccacccttgcgcgccacggccgcttcgccgccgccgcgaccctgttctgcacggtccaccgcacgaccggcgccctcaacgccctcctggccgcgctgtgctgctcctcgcggtcgtccccgacgctcctccgcgccgcccccgccgtgctcctccgcgccgcgccgcacgcggcccccgacgccgccacgttccgcatcctcaccgccgcgctctgccgcgccggccagccctccgccgccgcggacctcatccgctgcatgccgccgctcctcctcgacccggacccctgccactgccgcgcggtcctcgcctccctctgccgccggggcgcgccggcccgggacgcgctcgatttcctcgacgacatgcgccggtggggcgtcccgccggcgcggcccgaccatcacgccgtcgtcggcgcgctcctgcgcgaggggatggccgccgaggcgtacgaggtcgtggccaggcggatggccgccgacggcgttgccccgggcctcccggagttcgagcagctgctccgcgcgttccgcgagcgcggacggctcgacgccgtcgaggaggcgttcgacgaaatgctcctgcgcgggctcgtcccgtgcgcgcgcgtctacggcgtctacctcggcgcgctgtgcgacgggggcgacctggccgccgcgcgccggatgctggggtgcatggagcgcgccgggtgcccgccggacgcccgggccttcggcgtcgtcgccgccgggtgcgtggccgccggggacgtggaggccgcgagggaggtggcgagggatgccgtcgggcggggcctgcgctgggacgcgcccgcgctgtcggagctggtcgccccgctgcgcgccggcggccacgtcgcacgggcgcgtcccctgctgctggacatcctgcgggacggctgctgcgctgccccggttgatgctgcggtctttgagcagctggttggaggcgcatcgtgcgccgtcggcgagggtctgggcgtcgaggcggtgccacgctgatgtcagttttggtggcggccgactgagcttgtactccactgccgttcaatcacggatcagttactgattcataggctcacagcaaatacggagtaccgtcctcaggtgcacttgtttacgccggcgacggcgccttgtacaggagtgtcatgagttatctgcgacggttcaatttaacaaggaagttataacggtgcaacctggtg

SEQ ID NO: 124063 - DNA, 3580 bp, Zea Mays
ccaagtcctttttttacggaacaactgacggcttttgaagtgtggcttgatcatggctctgaggacaagaaacctcctgaacagttacccatagttcttcaggtactgcttagtcagtcacacagatttagagcgcttgttctgcttggaagatttcttgacatggggccatgggcagttgatttggccctgtctgtcggaatatttccttatgtactcaaactgcttccaacaaatacaatagagttacgtcaaattttagtgtttatatggacaaaaattctctctcttgataagtcttgtcaggttgacttggttaaagatggaggacatacatattttattaggtttcttgacagtttggatgctttcccagaacagcgtgcaatggccgcttttgttatagcagtcatcgtggatgggcataggatgggtcaagaggcttgtatgaatgcagggcttatagatgtttgcctgagacatctgcaacctgagaatcttcatgcacaaacagaacctttgcttttgcagtggctttgtttatgccttgggaaactctgggaagatttccctgaggctcagttacttggtctgcaaacaaatgcaccagaaactgtaatatgcttattgtcggagcctcgacctgaggtcagagctgctgctgtttttgcacttgggaatcttactacattatcaaattgccctgatgatgattctgatgatgatgaaaaggtgaaagctgaaataaatgtagttcgaagccttctccagatatcttcagatggtagtccccttgttagatctgaggttgctatagcgcttactcactttgcgttgggtcacaacaaaaatctcaaatctgttgctgcggagtattggaaacctcaatccaaatcgttgctgaagtcattaccatcattggcaaatataaataatccaagcaatgtttacagtcccaataatattctccaaggcagcattggtcctgtgctgagggttggcagtgatagcggtgccgctggtcgtgatggacacatttctacaagtagcccaattgcagcaagtagcatcatgcatggctctccccagtcagatgattcttcccaacactctgattcaggcatattactgagggagaatgcaagtaatggtggtctcagctacactaggtcgaggcctgttgataatgtcatttattctcaatttatatcaactatgtgttctgtttctaaagatcctgacccaagaattgcaactattggttggagagcactgacccttataggtgttgaacaagtggccatgaaaagtactcgatttaacagtggaggtctacaccgaggagagacatctgcgtcaacctttggaatggcacactcttcttcttggagagatatgaattctggaagcaactcgatgaaatttatgacccctcctgttagccctcctcagcatgattatcttctactaggattgcgccgagtgtgttctatggagtttggacagcatcctataaattcacctgatggctttgctaatctccttttaagctctgctacaggtcccagtaatgcagaactaaagaaacttcccgaatcaacaatttacaactggagttgtggtcacttctctaggccacttttaactgcctctgatgataatgaagaaaccaatgctagaagagaagagagagaacggattgcactagatttcatcactaagtgccagcgctcctcagcctgcaagattacaagccaaattgctagttgggatacaagatttgagttggggacaaaggcagctttattattgccattttctccgattgtcgtagcagctgatgaaaatgaaaaaataagtgtgtggaactatgacgatgcacaaccagtgaactcttttcacaaccataagttgtccgacagagggctatctaaacttttgcttatcaacgagcttgatgagtgcttgcttttggctgcctcaagtgatggaaatgtacgcatatggaaaaattttgcttgtaagggagggcagaaacttgtaactgctttttcatcagttcagggacatcgagctgctggtcgcagtattgtgattgactggcagcagcaatcttgttatctgtacgcatctggtgacatgtcttccatcttggtatgggatcttgacaaggaacaacttctcaacaccattccgtcatccgctgatagtgccatttctgccctgtctgcatctcaggtccgctctggatactttgctgctggttttgctgatggttctgtcaggatatatgatgtttgctctcctgatagtaggcctgtctatgtggccaggccgcatgccccaagaacagaaaaggttgtgggcatagggtttcagcctgggtttgatccatacgagattgtaagtgcatctcaagctggagacattcagtttcttgatgttagaatggcagcagaaccctacctgactattgaggcacacaggggttcacttacagcattagcggttcatcggcatgccccagttgttgctagttcagccaagcagatgattaaagtgtttagtcttgaaggagaacagttgaggataattcgctacctgccatcttttatgggccaaagaacaggcagtgtaaattgcctttcttttcacccatacaaatcactcctggctgccggtgctggtcataatgctcttgtctctatctatgctgaggaaaattacaagtaagatcgaggcctatatctcatgctcatgataatgcagacacagtgcgatcgacaggccttacatttttggccaagtgatgctccacagcatggtgcagcttcaagatccaagatgatggtaagctttgtcacagagaaggtgttgatggctccatggctttcggtgcatattgcctgttggacggcgtgtgcaatttgtatgatacagtcaagaactcaagattcattaggcctccttgcattgtgaaccctaccctgatcctgccgttgaacttggaggccccatcaacaaattaatcatacctaagttaaccaaaatgtaaatagccagtgcattcgggttgtactttgtcagcattaatccctttttcaagtgtaaaaaggtctgaaggtgcttgatatgataaacatggcttggtagtggctgctgactgggcaagtggggttgtgcatatgggcctggtcgcacatttctgctcacagatgatgttgaatagatagatgtctgctcacagatgaggttgaatagatagatgtctgctcacagatgttgttgaatagatagatgcatttgtccagctaatatagcgctagatgggggtagcgttggcctgcatgaatgaaggaaagttgtcgagtgaggagtgaccttcattgccattctgtgccgcaacaagtctccatgtgttatcagatggccctgtagataatacatatatttgtagatgtgttttgttcggtgaattgtgctgaccgctgagtaaaatgtattgtgaacgttgttgataaatgctattgtaatgaatttgcaacaagaaaaaattatatgctattgtagtgtatatcac

SEQ ID NO: 124064 - DNA, 848 bp, Zea Mays
actggtcaatctctcgttctctctcgagtctcggcgtcgcctgcttcctcgctccctcacgcatcgagacgccgcttcccttcccctgccacctctctctctctctcatctcccagctgcatccaaaccctaaccctaaacccctcccctaccaacctctgcccagtctccccaccggcccacccttcactgatctggctccccacctcggacacgccacgcttgtgcgatccgatcgatgtaggtgagcgagcttcccgacctcatgatgactgcggggtgactggagtgtgactgggtgcggaagcgaggcacagcaagcgtcgatggcattgggagatcccatgacgttcaggctcggccactcctcatcttcgccgtcgtcggccgcggccccggtgccaccgctgccccatcaccaccacagccaccagaaccacatcgcggatgacctccccgtcgccaacgggccggagcccaggaacgagctggaggtcgccgaggtggagaagccggcgcccgcggcgtacctgtcccaggtggtcgtgctgtgcgaccagcgccacgaggggattgacgaagctaccgcagccgcctcagcggcctccaccagcggcctcgtttccaagtggcgccccaaggaacgggtaatggatgtgatgcagtttgcagatgctgttcctactgctcgcactgatgttatactagactgtttgctggatttggcgcgaagtgtacagggggggggggggtgtgttcaggatagcaattacttgactgagcttaaaagggacaaattgtggttcaaccgctggtcgtatgaattgattatgatacctgcaaactga

SEQ ID NO: 124065 - DNA, 1155 bp, Zea Mays
atggactgctgcatctgcagccccacggcgtccgtgtacaggcttccgaggaactccatctgtgctccatgccacgagggcgccaaggcagtcatcgcttttctgaacaaggatggtgagcggcaggaggaagacgccggtggccaccaccaccatggctctgccctcaagtccagagggtccacgacgcagcctcatagcgcagccaaggggatgagggacgcgtgggagcaggtgaaggagatgagaggcagggaggaggaggcccaccggagagccgccttcctcgcgatggcgccgtggaaggagcgactccacaccgacatcgtcgtcaaaccgggcactgggtctccaatactggcccacaaagccatcctggtaagcacgtgggcctgatgcactgagccctgcatgcatttcacgccggcctgacgcacgcacgcacgccggccgcgaggtcggaggtgttccgcaacatgctggccgccgccgctggcgacgccatctcgctcccggagctggcccacgacgagctatccctcctgctcgccttcctctacaccggcaacctcctggaggacggcccggccgtgccgccggtcccggaggccggaggagcggcagctgcacgcgctgctcgtggcggccgacaagaagtacgacgtcccgttcctgcgccgggcctgcgaggcgcagctggacgcggccctggacgcctccaacgcgctgcggacgctggaggtcgcggacctgagctccagcgcggcgctcagggagcgcgccatgggcgcggtggtggagcacgcccagcaggcggtgttctcgcccgagtactacgacctggccaccaggaacgcgggcctgtgcgtcgagatcacccgggcgctgctggccaagatgtccatgacgacaaataaagcctcatgcatagatgtagctagagcttcaatgcaaagctgcatgctgcgacgatagtgtttgatttcatcaacgatcctatagatttattctatatgttaaacgcaattctcggcagctgtcattaattaacaccattaattaatgacacctcgtgattaattcacggcgggccgggccgtcaacgattcctgcgcttctttaatttcgattcagagcttcaatttccacacaatt

SEQ ID NO: 124066 - DNA, 693 bp, Zea Mays
acgcatccgcgaaatccaagagcagcagcagcagcagaccaagatcgagggagggaggaagacagacagacagacagagagatggagcggatgagctcgtcggtgcagtcctgggtggaggaacacaagctctcgtccatcggagccgtgtgggcgacggcggtgggcgcgtccgtggcgtacagccggcggagggcgccggcgcgggccacgagcctgcgcctcatccacgccaggatgcacgcccaggcgctcacgctcgccgtgctcgggggagccgcgctcgcgcaccgctattacggcagcagcgagaggaggcagaggcaggaggacctggactacggcttcaaatcccagctgccgccggccaccgacgccgagggcaacgagaacgagcgctggagctggtagtggcagggcagactagcagtgagtgaccagtgagccttcagatgcatacatcagatcagagagaaggaaggaagagggacaataaatagattaattagtactagtagcaataataataattgcatgcctgtttgccaatcaatgatacatgacgtggcgcctgatcctgttcgtcacggcccataaacccaggaagcagctagcccatgtatgtgtggcctgttatgcgttaccgtacttcgttttcactcgttaatagtactctagatttcaaaaaaaaaa

SEQ ID NO: 124067 - DNA, 1584 bp, Zea Mays
ccgcaatccagaacgcctcccccaccgtgccagaaccgcaatccgcgcctccccaatcgcgcgcttccatccatggcacacggtttggtcctttccttcccaaccgcgcccctccatccatggcagtcgccagcgcccttccatccatggaagcgcgcccacactcacacctccatctcccccccttctctctccctcaatcgccctgatccagatacccaagcacgcgcgtggcgaagagacgggtgtaacctccaggatgattcagggtcgatggcgtggatcgaaaatgaccgggcgccttggcgtcatccaaccagcgcggagctccatccgcaacaaattcgagtggcctcgcctccggtcccggtcagtagacccggtcgtgcagatcggcaggaacttcacccccgtcggtgagcagtcaccgacttcatctccaacgactccgacgaagacaggcggctccagagcgcgcgtcacggagatctccgtcatcaccgtgtccgacagcggggtcccatgcctcacgtttgggtccaggaatgcgtctttcctcttggaggtgccactcggcgtcgctgcctcgctccccgatgagggccacattgggggtcgtgcagttgatagcggtgtcatgatcgaggagcgcttgaatcttgtcatacacgcctgctagggcgaacctgaatcctgtcgtgtttgaagggtaccaggtgtgtggtgtccctggtgggcagctgatgaccaccatagagacggttgtccccttctcctctgtttgactgcctccacatccgcttctataaaattttagatgcatggacatctgcttcaatgggttctgttgcatatgctcctgagagagatgcaatggtctggaaagtaaaatcattccctggtggcaaaggagtacatgtgcagagcagaatttagtcttcctagcataacagcgaaagaaggggccccagaagaaggcaccaatacgagtgaaatttgagataccatatttcaccgtatcaggtattcaggtccgttatctgaagataattgaaaagagtggttaccaggcactcccctgggttagatatatcacgatggctggcgaatatgagctgagacttatatgagttttctcttttctggctgatggaacacatttatgaagctgcaagatacatatttgctcgagacaacaaccgtatgacatttggatgttagcctggacgtcttctgtcgaccatacaaggtttccctctggtggcttgttgttcatcttgttaggctcaccttaccttggttattgtaagttacccgtcaagtatagtttttgaaaaaaagagaggataattttaattttcatctctcttgtattatttttgattttttgtgggtaccaaacttgaatttgtttcatctgatcgagttcacaaaaacactgccataactgggtgatagttctgaactgcatgttgaaaacaattatgccctttactgtaaatgtcgtcgtcttgtatccaggcaaaataaaggaaacctaccaagacctattatgacttcattaatttcaactttttttgtttc

SEQ ID NO: 124068 - DNA, 1968 bp, Zea Mays
ccccgcatcgccgcatctttccaccttccctcccctccactcccgcaatctcgtctccgccgtccgccgccgcgccgtagcaaggtaacagagatcacaacaagttaaagcctcaaggaatgctgaaagatgtgctttcctagaagatatttctgttgcgacatcaaggaccttgctgctccccgagggctgctgatctgctcaactcttgatgacctgatctgcatcgattctacaacgttcagactgcgccacgaccaagccataagagtactgttcaccgtcatggatcatgacatgggggaggaaggctaactctttgcccagtcccacctgattggcgccagcagtgtgatttatactttttgcagagagagaagatatggagtcgacaggaaagattttgatggagcggtatgaggtggggaggctactggggaaaggcacatttggcaaggtgcactacgcaaagaatcttgagtccaacgagagtgttgccattaagatgatggacaaggacaaagtgctcaaggccgggctttcggagcagataaggcgggagatcacaacgatgcggttggtggctcataagaacattgttgagcttcatgaggtcatggcgacgcggaacaacatctactttgtcatggagtatgtgaaaggcggagagctctttgacaagattggcaagagtggcaagctcacagaggccgctgcacacaagtacttccagcagctcattggtgcggtggattactgccacagccgaggtgtgtatcaccgggacttgaagcctgagaaccttctgttggatgagaatgagaacctcaaggtctcagattttggactgagtgcactttcagaatccaaggggcaagatggcttactccacaccacctgtgggactccagcatatgtagctccagaggtgatcagcaagacaggctatgatggggcaaagtcagacatctggtcctgtggtgttgttctatttgtactagttgctggttatcttcctttccgggccccaaacatgatggagatgtatcgcaagatacagaatggtgatttcaggtgccctagttggttttcacacaaactcaagaagctcttgtacaagatcctcgaccccagcccagacacaagaatttcagtgcagaagataaaagagtctacctggtttcgaaaaggccctgtggagacccgtacagtaaaggagaaaattctgagtgagaatgacaccacaaatgctgctccagccgttgctatgaggcgcaagaagaatgttcatgaagacgtgaagcccccgactgtcacaagcttaaacgcctttgaaattatatctttctccacaggattggacctctctggcctatttatcagaaaggagtgtaagaaggagacgcggttcacttctgataagggtgccgtgtccatcatctcgaagcttgaagatgttgcaaaagcactgaatctcagggtaaggaagaaggacaatggtgttgtcaagattcaggggaggaaggtggggaggaagggtgtcctggagttcgacactgaaatatttgagatcacggcatcctaccacctcatcgagatgaaacaaacgggcggtgattcacttgagtacaagaaactgttggaagaggacatccggccagcactgaaggacatagtctgggcctggcatggagatgaccagcaacaaaagtagtagctttggatctctcttttttgttccataaaattgttagatctttcacttcagattgattttgttcgacatgtgcgtgttcttcttactagttacattctttctgtttctgtggaccattggactgtattctgtcgtgcaataattgttgggaggcctgagtttgttagtcgttccattctgaaaactggtatctgttctgtaatggttgtccctatcaataatgaaataattgcgtttgatccttgaaaaaa

SEQ ID NO: 124069 - DNA, 1105 bp, Zea Mays
taatttgttttatttaatttggtgtttattttaaggctacggtcccgaacctcggcttacaaatccccctttacaaattgattggttcttttttctaaagttataataaaatgattgaacgtgatttgagattatttgttttaaaaagtggaaggtattttatataaaaatctccttttcaattttttgtttttgttttcgcactgcaaaaatgtcaccgtaccgtacgtgcaagggcgggaaattttgctggcgcccagcagctgcagtaggcatcatcggtcactgtatgccgacatctatttcgttcttagtccacgtaggaaatacagtgctatctgcatagtactctctccgtccaaattttataattcttttaacattcttttacaagttttaccgatacgtcttattcaattattttttggaaaaaaattcgaagtaataatagtcatatattttttttaaacaaagtgttcaaatttagtgtaaaaaaggtactaaacggagagtactgtgataatgagccatgacatttgtgcattcttgtgcaaaaaaaaaaaactttgttggtgtagatcatgactggtacgctttaagcgacaacgacgatgacatgagctccgtgcactccggtaagtactctcctgtgcactacgcgtcaggtgccggccacgaggaggcgccggccagcagcagcggctcgtccaagacaaggttcggcggcggcggctccggttccgccgcggcgctcgcgcggcagctggagcggcagtgcagcgtgtcgccgcagcacgcggggcggccgcggcggcgggaggacgacgacgaccgggccggcaggcggaggaggatgacgcggaaccggtccatggtggacatgcggagccagctgctgcaccgcacgctggtggaggagctcaaccgccgcctcttcttcaacaccgtcggcgccgtcgagaacatcggcttccgcgcgcccaccaccaccgccgcctcgtcctcctcgtctgcgcgcggcggcctcgaccgcggcaggagaccaggcggcggcggcaagcagcggcagctggacgacaaggagcagcagtatttcatgctttga

SEQ ID NO: 124070 - DNA, 2111 bp, Zea Mays
gggtgcagtgcagtgcttcctcatcttttcttctttctattgggatatcaaagatcaaatcgtgcacttcacttttcctcttcgatcttttcagcaattcattacacgtgtgttgatttaattagtaataacagtgtatgcatttatttactttagcactatcaaaatagaactgtttattttaaacaaaaatacacaatacatgcatgcatgcacagttcgacgagctcctgggcaaaggcgccatgaagtcggtgtaccggggcttcgacgaggagcgcggcgtggaggtggcgtggaaccaggcgagcctcgccgacgtgctccgctccccggacgccgtgcagcgcatgtactcggaggtgcagctgctgagcgagctccggcacgacggcatcatcggcttccacgcgtcctgggtggacgtgcccgggcgcagcttcaacttcatcaccgagctcttctcctccggcacgctccgctcctaccgcctccggtacccccgcgtgaacctgcgcgccgtccggtcgtgggcgcggcagctgctggggggcctcgcctacctgcacgcgcgcgacccgccggtcatccaccgcgacctcaagtgcgacaacatcttcgtcaacggccaccagggccacgtcaagatcggcgacctcgggctcgccgcggtgctccgccggggcggcgccgcgcacagcgtcatcggcacgcccgagttcatggcgcccgagatgtacgacgaggagtacgacgagcgcgtcgacgtctacgccttcgggatgtgcatgctggagatgctcaccgtcgagtacccctacagcgagtgcaccaacccggcgcagatctacaagaaggtcaccgcaggcaggctccccgacgcgttctaccgggtggacgacgacgacgcgcgcaggttcatcggccgctgcctcgtccccgccgccaaccgcccgtccgccgccgagctgctgctggaccctttcctcctccaccaccaccaccatgctgctgctgctgctggcacggtaccagtgccgtcaccattgccaactaccgctgttgccgccggcgctccgccgccctcgacgtgtagtagctccgcggccgacgatgatgtcgtctcggcgttggacgacgacgacgaggtggacgtgccgcccaggaatgacatgaccatcaccgggaagctgaacgcggaggaggacaccatcttcctgaaggtgcagatcgccgacgaggcgtcggggcacgcgcgcaacatctacttcccgttcgacatggcgagcgacacggcggcggaggtggcgcaggagatggtgaaggagctggacatcacggaccgccacgcgtcggagatcgccgccatgatccaacaggagatcggcaggctgctgccggggcgagcgcagcagcacgagtacacgtacgcgtcacgcggcggcgactacgacgacgaggagcggcctcctcccttctactacctctcctcgtcccccgcatcctcccatggttctcactgcggggtggggccatatgccttcggaggcttctctggcccatgtggcagtgcttggaccaaagatcatgactggtacgctttaagcgacaacgacgatgacatgagctccgtgcactccggtaagtactctcctgtgcactacgcgtcaggtgccggccacgaggaggcgccggccagcagcagcggctcgtccaagacaaggttcggcggcggcggctccggttccgccgcggcgctcgcgcggcagctggagcggcagtgcagcgtgtcgccgcagcacgcggggcggccgcggcggcgggaggacgacgacgaccgggccggcaggcggaggaggatgacgcggaaccggtccatggtggacatgcggagccagctgctgcaccgcacgctggtggaggagctcaaccgccgcctcttcttcaacaccgtcggcgccgtcgagaacatcggcttccgcgcgcccaccaccaccgccgcctcgtcctcctcgtctgcgcgcggcggcctcgaccgcggcaggagaccaggcggcggcggcaagcagcggcagctggacgacaaggagcagcagtatttcatgctttga

SEQ ID NO: 124071 - DNA, 3047 bp, Zea Mays
ggacctcgcccccgcgcctcccctctcatcagttcttgcacacacgagttgcagttccagcagacaaatcctcccactggtacttccaccacaccacagtccacaggcagagaagagcgaagatgcttcttcccaggcacagattcttcaagttcaggtccttgtagatgagctgcagctgcaggatctcagaatcagctaactattttccacgcatagtcgcctttaattccaggtgacagcaagggcaggtcgactgcgcttgttgcctactgctactccgatcgatacatacatacagattccctgcaccggccgatcgcgatcagagattgaggaggcatcctgtccagctgttccacttccatccatccatccaccaccagagaagagcatacagtagtgcaccactcatctcatccccttctgctgtgcccctgtggtatagcaatagcttcattaatttgcttgtggtgctgctagctgtgctgtgtgcctacctgccctgccactgccacacacaccacatataactccctggtgtccgtgtccacagatgagtgcacggccctgcccctgccgctgcggcctcggcgccgcgcaccacgcgcacgcgggtgcctccccttgctcctccggggtgccgtcgacgtcgtcgtccacgtccatggagccgcgtgccggcacggacttctcctgcctcagctggctcctcttccgcgtctccgcctacgacgacgacgacacccacaacctcctcctcctcgccgccggcgccctctagcgcgcgcctcctgccgcccacagctcttcttccctccacttctaccaatttgctccctccatccacacatacatacatagctaggttagttagttagttgagttctctctccgccgtctgtcagtgtcagctgctgcaactcatcaatacaactgctgctagctagcttattagccttagctgcggtacacccaaaccaagaaagctaattaagggaaggaaataaagctccgtcgtctcgagccgatcgacgaccaccatgtcggcggcacggcggtgcggcggcgtccggcgtcggctggatagggcggcggcgggagacaacgccaacggatacgtcgagactgaccccaccggtcgctatggacggttcgacgagctcctgggcaaaggcgccatgaagtcggtgtaccggggcttcgacgaggagcgcggcgtggaggtggcgtggaaccaggcgagcctcgccgacgtgctccgctccccggacgccgtgcagcgcatgtactcggaggtgcagctgctgagcgagctccggcacgacggcatcatcggcttccacgcgtcctgggtggacgtgcccgggcgcagcttcaacttcatcaccgagctcttctcctccggcacgctccgctcctaccgcctccggtacccccgcgtgaacctgcgcgccgtccggtcgtgggcgcggcagctgctggggggcctcgcctacctgcacgcgcgcgacccgccggtcatccaccgcgacctcaagtgcgacaacatcttcgtcaacggccaccagggccacgtcaagatcggcgacctcgggctcgccgcggtgctccgccggggcggcgccgcgcacagcgtcatcggcacgcccgagttcatggcgcccgagatgtacgacgaggagtacgacgagcgcgtcgacgtctacgccttcgggatgtgcatgctggagatgctcaccgtcgagtacccctacagcgagtgcaccaacccggcgcagatctacaagaaggtcaccgcaggcaggctccccgacgcgttctaccgggtggacgacgacgacgcgcgcaggttcatcggccgctgcctcgtccccgccgccaaccgcccgtccgccgccgagctgctgctggaccctttcctcctccaccaccaccaccatgctgctgctgctgctggcacggtaccagtgccgtcaccattgccaactaccgctgttgccgccggcgctccgccgccctcgacgtgtagtagctccgcggccgacgatgatgtcgtctcggcgttggacgacgacgacgaggtggacgtgccgcccaggaatgacatgaccatcaccgggaagctgaacgcggaggaggacaccatcttcctgaaggtgcagatcgccgacgaggcgtcggggcacgcgcgcaacatctacttcccgttcgacatggcgagcgacacggcggcggaggtggcgcaggagatggtgaaggagctggacatcacggaccgccacgcgtcggagatcgccgccatgatccaacaggagatcggcaggctgctgccggggcgagcgcagcagcacgagtacacgtacgcgtcacgcggcggcgactacgacgacgaggagcggcctcctcccttctactacctctcctcgtcccccgcatcctcccatggttctcactgcggggtggggccatatgccttcggaggcttctctggcccatgtggcagtgcttggaccaaagatcatgactggtacgctttaagcgacaacgacgatgacatgagctccgtgcactccggtaagtactctcctgtgcactacgcgtcaggtgccggccacgaggaggcgccggccagcagcagcggctcgtccaagacaaggttcggcggcggcggctccggttccgccgcggcgctcgcgcggcagctggagcggcagtgcagcgtgtcgccgcagcacgcggggcggccgcggcggcgggaggacgacgacgaccgggccggcaggcggaggaggatgacgcggaaccggtccatggtggacatgcggagccagctgctgcaccgcacgctggtggaggagctcaaccgccgcctcttcttcaacaccgtcggcgccgtcgagaacatcggcttccgcgcgcccaccaccaccgccgcctcgtcctcctcgtctgcgcgcggcggcctcgaccgcggcaggagaccaggcggcggcggcaagcagcggcagctggacgacaaggagcagcagtatttcatgctttga

SEQ ID NO: 124072 - DNA, 3447 bp, Zea Mays
ctcctcacattaaaatccccccgctcgtcttcccccgtgctcccaaatcccgagctctccccctcttccctgccctgccctacctcgccggcggcggcgcgcagatcgcggcccctcgcccgcaccgattcgccccgcggcgcccaccttcccgtccgttctgcttgggcgacggcgattcctgcatcgcatcgcctccttctttagcggctgcttcggctacagcggcggttcctgcgtcgcccgcctcctccagcggctgcttggcggcgtctccagctctggggaagaagcaagcggctagcggctctctcccggcgcccatggtggacatcagcgagtgctcgccggtgcccgagtccgtgccggcgcacccggaccccgcgtccgtttctccggacgcctggcggcgcttcgagaccgccgcgctcgccgtggtgaacaagatccagcccaccgccgcctccgaacacctccgcgccgccgtcgtcgactacgtccagcgcctcttctggttccaagcccggtatcaggtctttccatttggatctgttccattgaaaacatatcttccagatggagatattgacctgacattatttggccctgctatttctgatgagaatctagcaaatgaagtatgcactattctaaaatcggaagagcgaaggaaagattctgaatttgaggttaaagatgtccagtatgtccctgctgaggtcaagctggttaaatgtttggtacaaaacattgttgtagacatctcagttaatcagattggtgggctgtgcacactatgttttcttgagaaggttgatcaacactttggaaaagatcacctatttaagaaaagcataattcttataaaagactggtgttactatgaaagccggattcttggtgctcaccacggcctaatttccacgtatgccttggagactctagttctatacattttccatatcttccacaagtctttggatggtccattggctgttctctataggtttctagactattatagtaaatttgattgggataataaggggatcagcttatttggacctgtttccttatcttcactacctgagctagttactgacccaccagatatccaagatgatgattttcttcaacgggaggaatttctaaaagaatgcatagaatcttttagtgttctccctagaaactctgagacgaatcctagactattctcacggagatttttaaatattgttgatccactaaagcagagtaataatcttggacgcagtgtcagtaaaggaaacttttaccggatacgcagcgcatttgattttggtgctcgtaagcttggcaagattcttcaagtgccttcttgtctcactgttggtgaagtcaatcagtttttcaggaacactctaaagagaaaccgtactggtttaaggccagatgttttggttgtctcttctgaccttgttacaaatgatcctgtatcatcagacttagatgtggaaagagtcaacaatgttgcgcctaacaattcctgtgatgttctgtctaatcagctcagtaacatcaacatttcagattccaataatcatggctcaataaagcaaaaagaatgtaactctatggctgatcacaaggagacaaaatctgtttctttgggtttgctagatagtgatgccacaaatcatgcaactaccgattcattaagtataaggggtggtggcaacttctctgaagcttcaccagtacctagtgaaaccagtaccttgcaatcagaaacaggcaagaaagttgatgttagaaatgacacaaccccatcatactatggggtttcagcaaagcagtttacaggcagatctcaccactatattgaagatactaagcataatgcttacccctattctactggtttagttgatggtctgggcacatctaattcagttttaacatcggatacacaacctggaggtaacaacaatgacacagtgccaaatctcactggagatttcgatacaaatttgcataatcttctgtatgcacgggggttccatcaggacaatcctatgactcaattatactatccaatgcccatgccaccacccctgcaatatcagaacatgcacccatcaaatggccatggcagaaaaaatccgtatggatatgctggtaggaatggggttgtccctggtcatgtttatccacctagctattttgtgtataggccattgtatcaagcagatgatcatatgactttgaggactcgtggaacaggcacctactttcctgacccaaatttgcgcaaggaccgaccacctactggacgtggggagagaggaaggaatcattcccatcagaataattatcataagtttcaccaccacacccgaccggatatgcctgtagatatgatacctttggaggaattgcggcatgagctgccactgcagacatatgctcctaatgcaaatggtcatggaatcccatctccaatgaatataccaatatcatccccatcttcccagtctccaagggatcctttgaatgtaccaatgcattccccatcttcccatgtccgaaaggataattttcatggcaatggttttatgctcccgcaagacagtaaacttgagtttgggaccttgggggcattgccttcggaagttgcctctaaagaccatgccaacagatcaggttctgtctccaacaatcaagcttctgggcctgtgagccccatgtctgtggccaaaaatactggaatgggttccaatggaatgaggaatgttcagccataccgtctcaaggacagtggtgacttcccgccactgtccagttgatgtcgattccgtgtgtatgagaggcagcaggataatgatgagtggtgtgcttccgacacgaatgggacatcgtgtaatggcgccgagttctttggcagaagcatacgccatgatgtacatcctgttttttttttccttcccttttctctagttgccattaagcaccaccactgcaacgcagcctgtgctttcttgcgacaagagagaaggcagaagtaaaaagagatgaaaaacgagagaaggaaaaatgtaagggaaaaaaatgaaagcaaaagggtggagatacttttaggggtatagtcccgttgtttcagttctacagctcaagaggaacagatggtgctggtgaaagatagatctagctagctagctagttttgttgttttgattgacctcagggtgattggagaactggattttgtcgtccatgtccacgtgtaacgaggatagagttgtagctccctgtttgcatttagagggggggaggccttggtgttgaaaggccccaaagtttgaagctactttagctgcttgaaaatggattaggtacacagaatgtgttaaatctgctgtccaaacgaaaatgcgcttgctgtgtgtttccgtttatgcataatctgta

SEQ ID NO: 124073 - DNA, 3229 bp, Zea Mays
ctcctcacattaaaatccccccgctcgtcttcccccgtgctcccaaatcccgagctctccccctcttccctgccctgccctacctcgccggcggcggcgcgcagatcgcggcccctcgcccgcaccgattcgccccgcggcgcccaccttcccgtccgttctgcttgggcgacggcgattcctgcatcgcatcgcctccttctttagcggctgcttcggctacagcggcggttcctgcgtcgcccgcctcctccagcggctgcttggcggcgtctccagctctggggaagaagcaagcggctagcggctctctcccggcgcccatggtggacatcagcgagtgctcgccggtgcccgagtccgtgccggcgcacccggaccccgcgtccgtttctccggacgcctggcggcgcttcgagaccgccgcgctcgccgtggtgaacaagatccagcccaccgccgcctccgaacacctccgcgccgccgtcgtcgactacgtccagcgcctcttctggttccaagcccggtatcaggtctttccatttggatctgttccattgaaaacatatcttccagatggagatattgacctgacattatttggccctgctatttctgatgagaatctagcaaatgaagtatgcactattctaaaatcggaagagcgaaggaaagattctgaatttgaggttaaagatgtccagtatgtccctgctgaggtcaagctggttaaatgtttggtacaaaacattgttgtagacatctcagttaatcagattggtgggctgtgcacactatgttttcttgagaaggttgatcaacactttggaaaagatcacctatttaagaaaagcataattcttataaaagactggtgttactatgaaagccggattcttggtgctcaccacggcctaatttccacgtatgccttggagactctagttctatacattttccatatcttccacaagtctttggatggtccattggctgttctctataggtttctagactattatagtaaatttgattgggataataaggggatcagcttatttggacctgtttccttatcttcactacctgagctagttactgacccaccagatatccaagatgatgattttcttcaacgggaggaatttctaaaagaatgcatagaatcttttagtgttctccctagaaactctgagacgaatcctagactattctcacggagatttttaaatattgttgatccactaaagcagagtaataatcttggacgcagtgtcagtaaaggaaacttttaccggatacgcagcgcatttgattttggtgctcgtaagcttggcaagattcttcaagtgccttcttgtctcactgttggtgaagtcaatcagtttttcaggaacactctaaagagaaaccgtactggtttaaggccagatgttttggttgtctcttctgaccttgttacaaatgatcctgtatcatcagacttagatgtggaaagagtcaacaatgttgcgcctaacaattcctgtgatgttctgtctaatcagctcagtaacatcaacatttcagattccaataatcatggctcaataaagcaaaaagaatgtaactctatggctgatcacaaggagacaaaatctgtttctttgggtttgctagatagtgatgccacaaatcatgcaactaccgattcattaagtataaggggtggtggcaacttctctgaagcttcaccagtacctagtgaaaccagtaccttgcaatcagaaacaggcaagaaagttgatgttagaaatgacacaaccccatcatactatggggtttcagcaaagcagtttacaggcagatctcaccactatattgaagatactaagcataatgcttacccctattctactggtttagttgatggtctgggcacatctaattcagttttaacatcggatacacaacctggaggtaacaacaatgacacagtgccaaatctcactggagatttcgatacaaatttgcataatcttctgtatgcacgggggttccatcaggacaatcctatgactcaattatactatccaatgcccatgccaccacccctgcaatatcagaacatgcacccatcaaatggccatggcagaaaaaatccgtatggatatgctggtaggaatggggttgtccctggtcatgtttatccacctagctattttgtgtataggccattgtatcaagcagatgatcatatgactttgaggactcgtggaacaggcacctactttcctgacccaaatttgcgcaaggaccgaccacctactggacgtggggagagaggaaggaatcattcccatcagaataattatcataagtttcaccaccacacccgaccggatatgcctgtagatatgatacctttggaggaattgcggcatgagctgccactgcagacatatgctcctaatgcaaatggtcatggaatcccatctccaatgaatataccaatatcatccccatcttcccagtctccaagggatcctttgaatgtaccaatgcattccccatcttcccatgtccgaaaggataattttcatggcaatggttttatgctcccgcaagacagtaaacttgagtttgggaccttgggggcattgccttcggaagttgcctctaaagaccatgccaacagatcaggttctgtctccaacaatcaagcttctgggcctgtgagccccatgtctgtggccaaaaatactggaatgggttccaatggaatgaggtaagtatgctgcgagattttagttgacagcaccaaaatttatttctgatgggaagaacatgcaattggtatactagtctcattgtacgagttccaacccccccccccccccccccctttctaaatataacggtaagtagctctccttgcatatttgagggaaaaacatgcaattagtgaacatttccatggtacaaacaatgagataaaatttagctctttgttaggaacttaggttggtgtttagaaggacaagcttggcatagtggtaagaaggcttccccactgagccaggcagcctctctgcattaaatgcagaggtaaggcttgccttggttatttcttcccagaaccttatgggagccatcagtagttggtctgtcttttttgctagattggtgtttctgttaaattatttagatgctcttattgttcacttttggacaattgatatgtggattg

SEQ ID NO: 124074 - DNA, 780 bp, Zea Mays
atggggtggccccatcttcctcctccaatcggagggcctaatggccctcgatccggccgccacgtcggccgtttggggggagggtgtggggagtggcgtagcaaaccccggcgcgagcgcgctctgcggagcacggccggcgctctgcgcatcagggccggcgctcggcgcgacactcggctggccggccaggcgtacacgccctggcgctcggcgtggaagaatgctccggtgcaggcgcggtcgtacgacccggccacggatggctccggtcaggcggctcagcgcggtcggacctgccctggcctgggtacgctcggcaagcgggccagcgggccccagcctcagtcgcggctccctacagagaagcagaccccggcgaaggcgcgctccaggcgctcggcgcggcccgacagcgcgctcgacgcggccaccaggcgggcgctcggcgcggccaccaggtgcgctcggcgcggccaccaggcgagcgcttggcgcggcccgacaggcgcgctcggcgcggctcctccacgcgcgctcggcgcgaccggcacgaggagcagcggctccggtcaggcggctcgtcgcggccaccatggcgacgcgcggcgctcgacgcttgcgaagggcaggcggactccgcgtggagaccaagcgcgcggtcgcctgatgactccggccagggcgcgcgcggccctgaggctcggcgaggcgcgtggcctaggcggcggcggcctggaggccagtggctggcggcggctggttggctggggcggttag

SEQ ID NO: 124075 - DNA, 1659 bp, Zea Mays
tatgagtataatatatacagctacttcccaccctctcccccgcaccgtcggcaccaagatgacgaccccgccgcgccgatcgccgccgctccggggaagaggccatgcgggacttcgggctctggcgcctatggtcaacatccacgagcgctcgcctgtgcccgcgtgcgtgccggcacacccggacccttcgtcgtcgatctccccggacgactggcggcgtttggagggcgcaacgttctctgtgatgtgcaagatccatcccaccgtctcctcccagcaccttcgcgccagggtaatcgactacgtccagcgcctcttcaggctccaccatgacggctaccaggtcatttcatttggatctgttccattgaagacatatcttcctgatggagatatcgacttgactttattgtgcgctgcaatttctgatgagaatctggaaaatgaagtgtgcgctattctaaaatcggaagagcagaggaaagattctgaatttgaagtcaaggatgtcaagtatgtacctgctgaggtcaagcttgtgaaggtaccatattctaaaatcgtagatctttatggtggcaggtcaagcttgtgaagtgcaaggtgcaaaacattgctgtagacatctcagttaatcagattggtggacccaataaagtttattttctagagaaggttgatcaaaacttggggaaaaataacttgttgaggagaagcataatgcttatcaaacattggtgttattatgaaagctgcattcttggtgctcaacgtggtttggtttccacttatgctttggagacattagtgctgtacattttccatgtcttccacaagtctctggatggtccattggctgttctctataggtttcttgactactatagcaaatttgattgggataacaaggggatcagcttgtttggtcctatttcactatcttcactacccgagctagtcaccgagccaccatatactcgtgatgatggttttctctcacgggaggcgtttctcaaagactgtgctaaggcttttagtgtccccccaataaactctgaggaaaatccgcaagtattctccaaaaagtttgtgaatatagttgacccattgaagcagagtaacaatcttggacgcagtatcagcaaaggaaaccttggccggatacgcaaggaattctattttggtgcttgcaagctcggcaagattcttcaggcgcccgcgtgtttctctgccaacgaaatcaaccggtttttcaggaacacattaagcagggcagatgttccggtgagctctcctgatgatgttctacaggccgctagtgtttctgcgtcaccgggcaacaagggcgtggaaggagtcagcaagggcagttcacccaacaactcgtgtgacgttctgtgcaatcagttcggttacattaaaatctcagattccaacaatgcgctgcagaatctggtcgtggacaggcccgcttaggctgtacctgcacatggtcatagaacctccagcagcttactcatcttactttctaccatattttttttaaaaaaaacttccacattataaagaatacagtctatggtataaaataatgttttacatggctgtatacacggaccgctgatcatagcctaagtcgttgtcgttggtggccac

SEQ ID NO: 124076 - DNA, 1426 bp, Zea Mays
tatgagtataatatatacagctacttcccaccctctcccccgcaccgtcggcaccaagatgacgaccccgccgcgccgatcgccgccgctccggggaagaggccatgcgggacttcgggctctggcgcctatggtcaacatccacgagcgctcgcctgtgcccgcgtgcgtgccggcacacccggacccttcgtcgtcgatctccccggacgactggcggcgtttggagggcgcaacgttctctgtgatgtgcaagatccatcccaccgtctcctcccagcaccttcgcgccagggtaatcgactacgtccagcgcctcttcaggctccaccatgacggctaccaggtcatttcatttggatctgttccattgaagacatatcttcctgatggagatatcgacttgactttattgtgcgctgcaatttctgatgagaatctggaaaatgaagtgtgcgctattctaaaatcggaagagcagaggaaagattctgaatttgaagtcaaggatgtcaagtatgtacctgctgaggtcaagcttgtgaagtgcaaggtgcaaaacattgctgtagacatctcagttaatcagattggtggacccaataaagtttattttctagagaaggttgatcaaaacttggggaaaaataacttgttgaggagaagcataatgcttatcaaacattggtgttattatgaaagctgcattcttggtgctcaacgtggtttggtttccacttatgctttggagacattagtgctgtacattttccatgtcttccacaagtctctggatggtccattggctgttctctataggtttcttgactactatagcaaatttgattgggataacaaggggatcagcttgtttggtcctatttcactatcttcactacccgagctagtcaccgagccaccatatactcgtgatgatggttttctctcacgggaggcgtttctcaaagactgtgctaaggcttttagtgtccccccaataaactctgaggaaaatccgcaagtattctccaaaaagtttgtgaatatagttgacccattgaagcagagtaacaatcttggacgcagtatcagcaaaggaaaccttggccggatacgcaaggaattctattttggtgcttgcaagctcggcaagattcttcaggcgcccgcgtgtttctctgccaacgaaatcaaccggtttttcaggaacacattaagcagggcagatgttccggtgagctctcctgatgatgttctacaggccgctagtgtttctgcgtcaccgggcaacaagggcgtggaaggagtcagcaagggcagttcacccaacaactcgtgtgacgttctgtgcaatcagttcggttacattaaaatctcagattccaacaatgcgctgcagaatctggtcgtggacaggcccgcttag

SEQ ID NO: 124077 - DNA, 590 bp, Zea Mays
tatgagtataatatatacagctacttcccaccctctcccccgcaccgtcggcaccaagatgacgaccccgccgcgccgatcgccgccgctccggggaagaggccatgcgggacttcgggctctggcgcctatggtcaacatccacgagcgctcgcctgtgcccgcgtgcgtgccggcacacccggacccttcgtcgtcgatctccccggacgactggcggcgtttggagggcgcaacgttctctgtgatgtgcaagatccatcccaccgtctcctcccagcaccttcgcgccagggtaatcgactacgtccagcgcctcttcaggctccaccatgacggctaccaggtactctgcaggctaccgtcgtccctgcttagtacatgtatgctagtgtcgttttactgtaactctggtatggctaccaggtaccctggtgcttagtacagttaattaaaggctctcgagttttgttttcactagagtgctgagtgtacatgtatgctagtgtcattttactgtaactctgtgagtgaccctccgtattttcgctcatgttatttgacatggaatggaacagctgcatgtttgg

SEQ ID NO: 124078 - DNA, 1347 bp, Zea Mays
gcggaggagcatggcgggggctgcgcggaggagcgtcggggacgaccgcgatgagcagcacagcgcggccaggatggcgttgagggcgtcggtcgtgcggtggaccgtgcagaacagggtcgcggcggcggcggcaagagtagctctatgaaattcttgagtgctggcaataatgattctatctaatgtgcagcccgatatttgctgagattgtacctgagaggtcaaggacaagcatctatgaattggactctattggagatgcttctgaataattgcggagagcctgtccataggcaggtcattgataatggccttcttccaatacttgtgaagatagtgaagaaaaagacggatttaccagttcgagaaaaaatatttcttctgttagatgcaacacaaacatcccttggtggagctaaagcaaggctccctcagtactatgagtcgtgaaacaatttgtctcccttcttttcagttgtatattgtccttgttagattaaactgtcttactacactttatctaacattctgtttgctttttggctgactggcttatttgttggatggacaacagattaaaggctgctggtggtagagctaatggagatggaacaaggaagacaaggacacgggaccggcctagggctgttccagctccagaggcaaacgccgaactgcaagcaaatattgataaaagaaggttaataactcatgcaaatgcgaagagcaagagtgaaaagttccctccgccgcatcaggatggcgcacttggatttcccttgggttgttcgaaccacatggaaccttcatttgaacccccagacccttcttccttcagcactgtatttccttacaaaaaaagcaccgtgccaacctggtccggaccattggcaaactctacagctggcaaccagaagcggaaacacaagtctggccgctcctcgaaacaaccagcaaccgcccatgctagattatacacatcattccatgcttagtgcaaaccaaatcttcgatacctcccaaagaaataccttgcagtggttcctaaaaactgggatacctgattcgtaatcaagagctacagaaatgaactgttttcttttccttagatccattcatgtacacatttttttcttccctgagcatcaatcaatgtataggctggagatggagctggattagtcagttatgtacattaggttctcttttccgttcttacaagcagcaacatgtcagtttagattaattcgagtgaggaatggagctggtaggtcaacttagcaagctatcattctatatagatacttccaatcaattgaaatattttttacctgctattttgtc

SEQ ID NO: 124079 - DNA, 474 bp, Zea Mays
atgccgtggacgcaggacagggcgccgcactcgaggtcctcgagggtgacgaagcgggtggacttggacggggaggagaggtggtggaggacgtgctcgaagaggccctcgtcgcaggggagcacgaggcagatgaagggcgttgggtgctccaccgggacgcaggtgcgcaacggagacgctgcaggcggagcagggcgttgtggggccgggcggggcgatggcagggtcgccctagggagcggcggcaacggcggggcaggagaagaggaggtggaggcaggcggagcagaaggcggacgggctgtagaggatgacgcaggaggagcagaggaggcagaaaacgccctcatgacggaagtggtggagcggccaggcgtcgcggacggggccgagctgacggcggcgcggcagtggacaggggcgaggcggtggcgtggtggcgagcggacgggggagcgccttcgaccgtag

SEQ ID NO: 124080 - DNA, 107 bp, Zea Mays
atatcataaatatgtattaagatatttatttaaatataattattgtttatatctaaacattaaggtatgtgttcttttggttagtgctacagttttttatatatcat

SEQ ID NO: 124081 - DNA, 1109 bp, Zea Mays
caaatatttgttctgattagcttatgcatgtaatgtgttttcggtttatatacaggatacattccgtggaagagtttgcgagtgtccagttgtgaaaggcgtcaaatttgttggcgatggctatactcactgtgaagcttccggatctggtcggtgtgaaattaacaacggagggtgctggaaagataccaagaatggtcggacatactctgcctgtactgatgatggctgcagatgccctgacggattcaagggtgatggcaagcacaaatgtgaagatgttgatgaatgtaaggaaaggactgtgtgccagtgcgaagaatgcagatgcaaaaacacgtggggaagctacgagtgcggctgcagcgggggcctgctttacatgaaggagcatgacacatgcataagcaaaaacggagcatcagaagccggctggggcttcctgtgggtcgtcgtcttcggcctcgtcgcagcaggaattgcagggtacgcggtgtacaagtacaggatccggaggtacatggactcggagatccgcgccatcatggcccagtacatgcctctggacagccaaggagatgtccagagccacgcgcaccatattgagatgtgaggatgcatgcagacttgatgagaggagacggaggcttggtctagcttatataatacaccagaattagatgtgcatattcgtaacaatcttgtgtctagcacgcaaagtccttgaacatttggtgtctgtgttaggttgtaccatgacatggtcttgtttagcaataattgccgtcttttatttcggtgccaataaaggagatggcaaacggggctctgtgttgctcagttgtgtatgtggtccatgatcagtggtaaaagaatctgagtcccttatggggattgcagggctaaaatcctcttcttatttaaaattgaataaagatgagattttagctcctccaatctagctcttagggttgattttagtgacaaaggatcacgggaggattgatagggaaataaactaatttcctcctcaatccctaacaatcttccgtgatccttgatcaccaaatcagcccttatcttatacttatgtaaaagaaaattgtgcc

SEQ ID NO: 124082 - DNA, 2803 bp, Zea Mays
cttcctctaaggctgctggtttcaacagctgtgctgcagctaatgcgcagtagctgattcttgaagaagctgcttcgttgggaagaaaaagaaaccacatgctaccgtgtcggcctggttttgttcacgtgtttcttctgcctttagttttggttcatcgcgtccgtccttcctcctccttcgccgcctcttgcgcctcccctcccctccccactcctctcctctctccccgaaccaaaccaaacccctcccactccaactcctcgattctcagagtgctgtacaagtgtctcgccctaccgcggccgtcaaaaatccgatctttccgccgtttccggaggccacacggctgcaagactgaccaatcccccgcggatcgagccgcagacgccagcagttcctgctcgcggaccgcaggcggggcccggacggagcatggggtcccgatccgccggcgcggcgctgcggctgtggctgctggcgctcctgctgggctgctgccaggggaggttcgtggtggagaagaacagcctcaaggtgacggcgcccgacggcctcaagggcacctacgagtgcgccattggcaacttcggggtgccccagtacggcggcaccatggtcggcttcgtcgcctaccccaaggccaacaggaaggcctgcaagagcttcgacgacttcgacatctcctacaaggccaagccgggggcgttccccaccttcctgctcgtcgacaggggagattgttacttcgcaaagaaggcatggaatgcacagaaagcaggagcagcggcaatccttgttgctgatgacaaagacgaacctctaattacaatggacaaccctgaggagggtggcaacacggattatttagagaacatcactattccttcggcgttaataaccaagagctttggggacaggctcaagaaagcaatcgacagcggtgacatggttaatgtgaatttggattggagggaggccctgccccatcctgacgagcgtgtcgagtatgaattctggaccaacagcaatgatgaatgtggcccaaagtgcgatagccagattgacttcgtcaagagcttcaaaggagcagcacaggtacttgagaagaagggctatacggagttcactcctcattacattacctggtactgcccagaggccttcattctgagcaagcagtgcaagtcccagtgcatcaatcatgggaggtactgtgcacctgacccagaacaggattttagcaaaggatatgacggcaaggatgtggtggtccagaacttgcgccaagtttgtgtctttaaggttgctaaggagcacaagaagccttggttatggtgggactacgttactgattttgcgattcggtgcccgatgaaggaaaagaagtacacaaaggagtgtgccgatggagttatcaagtcacttggccttgatcataaagcaatagataagtgtattggtgatccagatgcagatgaggaaaaccatgttctgaaagctgaacaggatgcacagattggcaagggttctcgtggtgatgttaccatcttaccaactctggtaatcaacaatagacaatacagagggaagcttgacaaaggagcagttcttaaagcactttgtgctggctttagggaaaccaccgagccagccgtttgcttgagtgatgatatacaaacaaacgagtgcctagagaacaatggtggctgttggcaagataaggctgccaacatcactgcatgcaaggatacattccgtggaagagtttgcgagtgtccagttgtgaaaggcgtcaaatttgttggcgatggctatactcactgtgaagcttccggatctggtcggtgtgaaattaacaacggagggtgctggaaagataccaagaatggtcggacatactctgcctgtactgatgatggctgcagatgccctgacggattcaagggtgatggcaagcacaaatgtgaagatgttgatgaatgtaaggaaaggactgtgtgccagtgcgaagaatgcagatgcaaaaacacgtggggaagctacgagtgcggctgcagcgggggcctgctttacatgaaggagcatgacacatgcataagcaaaaacggagcatcagaagccggctggggcttcctgtgggtcgtcgtcttcggcctcgtcgcagcaggaattgcagggtacgcggtgtacaagtacaggatccggaggtacatggactcggagatccgcgccatcatggcccagtacatgcctctggacagccaaggagatgtccagagccacgcgcaccatattgagatgtgaggatgcatgcagacttgatgagaggagacggaggcttggtctagcttatataatacaccagaattagatgtgcatattcgtaacaatcttgtgtctagcacgcaaagtccttgaacatttggtgtctgtgttaggttgtaccatgacatggtcttgtttagcaataattgccgtcttttatttcggtgccaataaaggagatggcaaacggggctctgtgttgctcagttgtgtatgtggtccatgatcagtggtaaaagaatctgagtcccttatggggattgcagggctaaaatcctcttcttatttaaaattgaataaagatgagattttagctcctccaatctagctcttagggttgattttagtgacaaaggatcacgggaggattgatagggaaataaactaatttcctcctcaatccctaacaatcttccgtgatccttgatcaccaaatcagcccttatcttatacttatgtaaaagaaaattgtgcc

SEQ ID NO: 124083 - DNA, 223 bp, Zea Mays
gagagccgttcacatggagctgacgatggatttgatacggcggccggcggatgccgccatggagcatggagacggcgatcaacgcactgctctccctcctccccgacctccccctcgacctcctctcccaggtcaatctcctgctacaggtttgcatggataaggagagcctaattgaatacattttatgcaaatataattgtgacacttactcctacttgtc

SEQ ID NO: 124084 - DNA, 1346 bp, Zea Mays
agaaccgtcgtctcgtctccaacaccatcaatccatcatccaggccgcaagaaacgcctcctccggccctccctccctctcgccgtccgccgtcctcctcgccatggctctggactcggttcctccttaccccagcgacctgggctccagcagggccgccgccgccgccaggacccagcagaggatcaggaaagaggagcgcacctggacctcggacacgtacgctccgtacgacgacgggcaccagtggaggaagtacggcgagaagaagctctccaactcccacttcccaaggttctactacagatgcacatacaagaacgacatgaagtgccccgcgacgaagcaagtgcagcagaaggacagcagcgacccgccactgttctccgtcacttacttcaaccagcacacctgcagcagctcaagcgccctcggcagcgccagagacgtcgcgtcccagtcgtcttcaaagaaggcggtgtcgatctgcttcagcccgcacgccccctccgagcagacctcgttcctgacgacgactacggtcgcgccgccggttatgcactcctacggcgccaaccgacagcccgacaggagcgcctacaaccaacagccccagtggtggacaggcggtgtgccatctcccacaagcaacggccctgctaagatggaggtcgcggagtccacgcagaagccgagcggttcgtacggcagcaccaccggcaacgctccgtccaggacgctgctaccgatcggccagtccaggtgcatcgagtacttccatttcttgtgatgagcttccgggaaggcaagctggggctcgggcactgcagcttggtgtctgcttgtttggagtggcaagtggagtttgtatctggagctggaggcgaaggcgaaaatgttgctgccgtcgtcctggcctcctggcctgaactacacaggccgggcggggcccaatcagtatactgactgacctgcattgcattacatacagagactgcctgctgcttactgtactgtacatctttgcatttgggttcaagccacgttttggtgcttggatgatgtgaagaatggtattggactgttggggtttctttatctagcagtagcgtacatgatatgatacgacgtacagaatgactgcttgacagttgagatatatccatttgtttgttatgtgttgtttgctgtttgtttagagatgagactaggatgtctcatttctgacagcgggatattggccatggttcagtctgctgctacggaaatgctgaaggttatagattatgtacactaaacagtaacagtttcttattaacatgtcttctacagttttagaagcagaa

SEQ ID NO: 124085 - DNA, 1436 bp, Zea Mays
agaaccgtcgtctcgtctccaacaccatcaatccatcatccaggccgcaagaaacgcctcctccggccctccctccctctcgccgtccgccgtcctcctcgccatggctctggactcggttcctccttaccccagcgacctgggctccagcagggccgccgccgccgccaggacccagcagaggatcaggtacgcagcgtcatcggcccatcgattcctccttgccccccgccgcgaaatttgcgcgagtttcctctgttctgtcaaaaacaaaaattcgaaatcggcaggaaagaggagcgcacctggacctcggacacgtacgctccgtacgacgacgggcaccagtggaggaagtacggcgagaagaagctctccaactcccacttcccaaggttctactacagatgcacatacaagaacgacatgaagtgccccgcgacgaagcaagtgcagcagaaggacagcagcgacccgccactgttctccgtcacttacttcaaccagcacacctgcagcagctcaagcgccctcggcagcgccagagacgtcgcgtcccagtcgtcttcaaagaaggcggtgtcgatctgcttcagcccgcacgccccctccgagcagacctcgttcctgacgacgactacggtcgcgccgccggttatgcactcctacggcgccaaccgacagcccgacaggagcgcctacaaccaacagccccagtggtggacaggcggtgtgccatctcccacaagcaacggccctgctaagatggaggtcgcggagtccacgcagaagccgagcggttcgtacggcagcaccaccggcaacgctccgtccaggacgctgctaccgatcggccagtccaggtgcatcgagtacttccatttcttgtgatgagcttccgggaaggcaagctggggctcgggcactgcagcttggtgtctgcttgtttggagtggcaagtggagtttgtatctggagctggaggcgaaggcgaaaatgttgctgccgtcgtcctggcctcctggcctgaactacacaggccgggcggggcccaatcagtatactgactgacctgcattgcattacatacagagactgcctgctgcttactgtactgtacatctttgcatttgggttcaagccacgttttggtgcttggatgatgtgaagaatggtattggactgttggggtttctttatctagcagtagcgtacatgatatgatacgacgtacagaatgactgcttgacagttgagatatatccatttgtttgttatgtgttgtttgctgtttgtttagagatgagactaggatgtctcatttctgacagcgggatattggccatggttcagtctgctgctacggaaatgctgaaggttatagattatgtacactaaacagtaacagtttcttattaacatgtcttctacagttt

SEQ ID NO: 124086 - DNA, 578 bp, Zea Mays
agaaccgtcgtctcgtctccaacaccatcaatccatcatccaggccgcaagaaacgcctcctccggccctccctccctctcgccgtccgccgtcctcctcgccatggctctggactcggttcctccttaccccagcgacctgggctccagcagggccgccgccgccgccaggacccagcagaggatcaggaaagaggagcgcacctggacctcggacacgtacgctccgtacgacgacgggcaccagtggaggaagtacggcgagaagaagctctccaactcccacttcccaagatgtatcaaactgtgtgatcgtctactactcactctctccggtggagttgtccgtggacaggtgtcgctgcacccttgaatgactgaaatgaaaaacaaatgcctgccagttagaaaactgttttttggtcgtgataaacaggaaaagaacattcaaagtggagatctctttcctaactgacagcccaactaggcacataaagaaacttgtaaagcgttgcttcaggcttcctcttaattaacacttgctgtatgtgaatgaatatacagttcgcaagttggcc

SEQ ID NO: 124087 - DNA, 225 bp, Zea Mays
ttgctccaggtcaatatatattttttgtatgttcagtttgtgggccaaatactttatctttttcatcccaaatcacattgccgcttagcgcgcctaacgtttcgaacatcaggggagacagatgtatcaaactgtgtgatcgtctactactcactctctccggtggagttgtccgtggacaggtgtcgctgcacccttgaatgactgaaatgaaaaacaaatgcc

SEQ ID NO: 124088 - DNA, 1125 bp, Zea Mays
atggcttgcgtggcggaccgtgaggctgcggtgagggaggtagcgcaggtgtacgagctcatcaagctccaccagcctctcctcctcctgcactcgcagcaggcgccaccgccgccgccgtcgacgatccagctggcgcagaacctcctcggccaggcgcagcgagccctcaacgtcgccctctccgtcatgaagcagcctgctgttgcttcttctccagtgacacccataagcgtcatcaaagctgagcctcatcagctgtcgccgcccagcccggcgtccgccgatcccgaggccacaaggggcgccaaaagaagaagatcatccgtaccaccggcgcaagggaagaaggcggcctcgtcgtcgtgggcgaccttgaccgccgtgccctacgacgacggctacgagtggaggaaatacggcgagaagaagatcaacggggcgctcttcacgaggagctacttccggtgcacctacaaggacgacgccggctgcctcgccaccaagcacgtccagcaggtggacgacgacgacagcagcagtggcgacggcccgctcatgttccacgtcacctacaacaacgaccacacctgctgcaacgctagtgccgtcgacagagctagagctgctgcacccaacaccggcgggagcagcaacctcgctgcattgctagcagcaggctgctgcgacggcagcggccgtggcactggcaagggactgacgacgtcgataagtgctcggccaactgggcatcagcatgctgctgccatgaacatgaagcaagaagaaccacgaccgctgctgctgccgttgcctcctctggtcgagcctcctcctgcctcttttccttatggccaccaaacgatgccaatacagtgccaacaggagccactgttccctcctacaagtatggagcagcagctcgtctgtggtgctttaagggaccacggctctcctgccgacggtggcgaaatcccgtcggctactggttcctgcatctccggcgagacgtgctggtgggatgggtattctggggacatggaggcgcagatggccgcagctgaagacgaccctctccacgacctcgaacggttcctcatgcgagatagcttcatggactgctag

SEQ ID NO: 124089 - DNA, 96 bp, Zea Mays
ctaaattctgagttgtggcatgcatgtgccgaccctcttgtttcattgcctacggttggtagtcgtgttgtttattttcctcaaggccacattgag

SEQ ID NO: 124090 - DNA, 1385 bp, Zea Mays
atgaagcaccagcaaagcacgcgtcttcttctccctcaagctgctgcggctccagcagatcacccctctcccgcctgctgcaaccggcggtcggcgacggaggagatcgcccggggccagtccctggtgacgcagctgcgggcgatcgtgctccccgcgctgcaggccgaccagcgcgccgagctcgtcgcccacatgttccagagcgtattggattgctccagcaaggccatggccgagctgcagctccatcatcatcatcgtcggtccccaaccccaagtgctcgacgacctcgtgacgatgatggtgatgggctgcaggtggatgacaagaagagggtcaagaggatttcctctgtcgtcggctgcaaggaggaggaggaggagggtgttgctggtgctgctgctgctgctaataacccccgtcggcatcagcacaagagaaggaggctcgatgactcggccgtgtcgcttgaaacaccagtgccgcactacgacggccgccagtggaggaagtacgggcagaagcacatcaacaacaccaaacactcgaggagctactacagatgcacctacaggcaggaacaaggctgcaaggcaacgaagacggtgcagcagcaagacgacgacagcagcaacagcagcagcagcagcggcaccgccgccctcatgtacacggtagtctactacggccagcatagctgtaacagcaataaggaccataacgacgatggcggcggcgctaattcgagccggcctgtcgacgatgatgactctgaaacaataaaaaccagaagcagcagcgacagccagtccagcagcagcatgtcgagcatcacctgctgtgcggatgctcgtggtggcggccatcagatcatcgatcaggcattcctgccacatgacagtaaacccatcgtcgacgacgacgagtctgcggaagaagagctggacatgcgtgagccgttcgacgtcgctgcgtttgcaccgatggatttcgatagctgggagctggatgcgctcctcagatttggagcctgacgatcgactcggactcggataccaatggaaagctagctagctagcgacaattagtatggtaataatttgatttgttttgaagggagggcattgtgtaataaggtattgcgatgatatcagattatcaggagctgtcgtcgagggctgaaaaatatcatttgcacaatgtacaattctaagtatatatatatagcgtcaagttttgtgtcctgtatcaagaagttataaacgaagagggaaaaaagaaagaaaagagagtggaggataaagaacaatctattgtgtgtataaccctcaacgtacgcttcaaggacagtggtgcaatcatcttagaccctgtttggttt

SEQ ID NO: 124091 - DNA, 3772 bp, Zea Mays
atgccaccagctcctcgtcgagtacccctccattcctgtctacaagtgtggcggctgtggcacggttctcagaggtaccaattgtcccccccatctttcatttctatgtttatggaaacaaacaaacaatctgatcggtatatgtggtttgtcaccggcgcagcgaaacatcgggctgcccctgcagcacgagctggttcagaatctggggagcacagcaccggctctccgtgtagcctgaacggctcccctagccagagtagcggatcgatctgctcgggcgaacagagagctggctcctctgttgatcggcctcatgaggccacggctcatggaagcatgtcctccgctgccaacaacatcgactcgtgtgacggcacagtccatgaaagaaccatgtctgcagcagatagtggtgtaacccatgccgagcatccggaggagggcaagtgctccttagctgatgatggaaatatccagaagtctggggttatggtcaaagaaaaagagacacatggacaaaacgctggggctagtttggatttaactgaaagagttgagaatgttgacactggtgaaaaggcgagcggaggtaaaatcggtgatattggcactagtcaactgagcatgacactgtatgagaaaagtcaggctgctcacagggaggagaggccacgcaggtatgaaggcgtgcatgttgagtctcacaaagctctgatcgaagagttggagaggtctctttcgttcagcagtgaggatgactacttctcggacgaagcagaaagcagtggcctcagtgatgctctgcgtaaccaaatgggtagccgcaggtttatgctagggggcagagtgaatgatgcgccccgaagcgatccacatggtcgattgattgaagaactagagatgtctttcagcgatgcagaagagccattggagcagcatgctatgggttcagagagagttcatggaaatgtgcttgacaaggatccacagatcctgagtgataaaagtgcacatccatgtgaagaaagcctctcatcatttgagagtggacacctcaaatctgaacaaactcctcaccaggaaagcagggcaataggggcaataggcaatggcaatcaaggaaatgagcgtattgaagataacaataatactgccgactctgttcatgggagtgagcatattgtgattgacgatgacaaaattgcagatatattccacgagaaagaacatgataaggattgccagcttgcaaacacagaaagtgcatacccttctgaaggaagcacctctgctgtcgatgattgcagtattgaagttcagcaaagttttcaaccaaatgacctgacagcagtcgatgagtgcagtattgaagttcagcaaagttttcaaccaaatgacctgacagcagatgtcaatcaagaaatggaagatgataagataaccaatgataacattgtacctgcagattcccatgagaaagagcatgagaatgataatcttattcatgcgcctgcagatgaagacatttcagagagagttggtgtaaatgaagagctaacagcagatggcactcaagaaatggaagatggcttcatggaagatgacaacatgatcaattgtgtgcatgacaaagataattctgtgcttgcagatgaaaacattgcagagaaagttcatatgcatgaagatttaaaaactgatggcactcaggaaatggaagagggttgtatggaagacagcaacatgagcaattgtattcatgtcagtgataatcttgtatttgcagatgaaggcattgcagatagagttcatggaaatgaagagacagctgatggcgctggagaaaatgaacagagcctaatggaaaatgaaaatgtgaatgttgctgttgcagctgagttcattgcgaagaagattcacgagaatgagcatggtagggatcagcggtccctggaggacggaagtgcacagctgtatgaaggagtcatcactccattcagtgccagatacgttgaatctgaacaaagttttcaacaagatgagccaatacctgatgccactgaagaaaaggaagatgattttatggaagatggaaatatggccaactgcattgaagaaagcatggcagctgttgctaggttctcaagcttgccaaataagaggaatcagtccaagttagctagctttaataagaacaaagaacaaatgacctacagatctagaggtagccaacttcgtcagggacgttcacttgattctgaagattttggttcaattcaaaacttcatggagtcacaaatggatggcacctcaagttctctctcaagcgggtctcccagtcgaggcgatccggtgcacagaacagcaaacaagttcaataataactgtagacacgagcgcctcaaaaagatggatgaactaagagatcagctaagtaggctttcgagccagaagagctcggagagaagttaccagaagagaggcctagagtaccagcaacaatcaaatgggtatgacgtcgagcaccatattcaaagtgttgatggtgattccgctccaagttcctgtgctctagaatcctattatggtcatggaaggccgccaaggtacccaccaccacaaaatcctttctctccgacccatacatacgcacattgccattttggacatgccgaaacacgcctaccacacagttatgacccatgggagttcaattcatattaccagtcctcgtatgctgaaagcacaatactggaccaagaatcacttaggtcaagctacaaggagcagaaacgggtggtgagaaagcatatcttgcggcctctgtcaggtgcttccccattcactatctgcaacggctgtttcaacctggttcaaatgccatcggatgtctacatatcaaaagcaatggtcggcaaaatgcaatgcggcaagtgctccaaggttctggcattatcattccgtgcagcatacaatgcaaatgcaaagagtagtgtggatgtggcccaagagtcatacaacctggacgatagcgtagtcgctaaaaacgaggatattgcttcttattatgctgagtgcctaacagggggtccggttagtatcagtgaagactatggagcatcgcacacaagaagcatgcctgctcgagctgagtctagtagccttgctgccgcacaaagtggcaagaaggtctctgactcggcgctccatcggctcatggggtatgattcagctagccagttgttacgccatagcagggtgtttgaagatgggtacgagagcttcgagtcgatggtgccagtttccagcagagtgtccagaagaaagaacaagtgaggttctacttcgaagcgtgaaaccttttgctcaccttgcgagtaatcgtacaaaggagaaacagttttggagtgcggtccaaccgtgccgcagaagcccgtcctatgatccgaaggcaagttggcatcttgccatcgaatagttccattattttctcaaataagttgggatgtttgaagcgattttagtttttttttggtcatattctttaggtgtggtgtatagatatattgcttattcttgttgtaaatttgttcatatctggtactggtataatgacaactattaataccacacaattggcaatctcgtggtcggatttgattgtatagtccggatactggtaggttcaggtctttcacaactccctgcatgttgaattaaggctcagaaatgcgagctgtagacattgtattgacactgacatagttca

SEQ ID NO: 124092 - DNA, 517 bp, Zea Mays
tgacaaatctgaggtcctaaatcttgtggtgattattgtttgtgggtagtgttacaagaatttgggcaaccccagtcagtagctttctgcatttgtcatcatagagatttgactattaaattgaacagctgttctggtgcagagaagaaggggctgtgatctgtatctatgaccaaaacctcactgggtggccactttttgatcatggagtcttgctgttgaggatccagcatgtggtcgcgctccatctttatgaaagttcgtttgattcggttcaatctctcatcatctccttcgaagcttgctgtactgatagctgttgcaggccacggacgcatcagcattgaagcaagtactgattcctataccagataaaaataagaatggctttgttgtgatagtcgatcacgctggaattctggcctcaaggcaatggttgttggaggatcatctgctcctgcaccaagtgtcaactcaatctcgttctcgggcaaagtcggagggtctatgtggttta

SEQ ID NO: 124093 - DNA, 566 bp, Zea Mays
gccgacgagggcgagtgggcggcggtggagcgccggggcccgcacctgtgagcgtcggggcggcccttcttcgtgcacgactcatttcgcggcggacgccgccacgcgcgccgcgttcaccgctgctctagtggacgccgcccgcgcggacctcaatgtgtgctgcacctgggccttcaacgacggcgggtaccgcgcgctgcagctcaagcacttctcctacgacgaggaggtcttctatgcattagattttgtgatcagcgaggcaggaaactataagatgaggctgatactgtcactgtgtaatagctggtaagattatggaggtaaggcacagcatgccaaggtggggaaaggaggctggcctggatcatacttctgatgacgccttcttccctgatgccacattcacaagcatacattgttctttcatatcttaggctgttttgatgagaaaaaatacaatcacaaatgtcgcctacatggatgaccctacgattcttgcctgggagctgatcaatgagccatactgccattcagatccatcagccaacacattgcaggtc

SEQ ID NO: 124094 - DNA, 824 bp, Zea Mays
gattagacagactaccagaaatgcccccgccaaacggatttctctacgaattcaattcacggcatcttctccctaaaaccctcccgaaaccacgcgctcctccgatcgccctccacccgcgcgatctcggcatggacgacgcgcgccagcaccagccccgcccgccccacggcgccgggggccgcgtccgcttgtccgattccgacgccgacgaatgccaccgccacctcctccaccagaccgggcacccactcccctcgtccgccgccgcccccgcccccaaaagcaaccgccttgcccccaaaagcaaccggccgttccgcggcgtgcggcggcggccgtggggcaagtacgcggcggagatccgcgacccggggatcgcgggcaagcgccgctggctcggcaccttcgacaccgccgaggaggccgccgccgtctacgacgccgcggcgctccgcatccgtggccaccgcgccgtcaccaacttcccctcctcccccgccgccgtcgcgcccaagcctgccctcgccgccgcggttcgtcctcctcctcccgctccgcccccggcccctgaggccgagacctcctcggcctcaacggtggtcgacgccggcgctggcggcgacgacgaggtctccggcgtgccgccgtggttcggggacggcggcccgctggagctcttggactttggcctgcccctcgcggcgccgaagcgggcccagtgggaagaagagttcggggacctgggcgacctcgatcaaatcttcgacctgcccctctgacaccaccaattttgccctgacgatcgctggcgaggatcatct

SEQ ID NO: 124095 - DNA, 344 bp, Zea Mays
ctaagtaggggttcattgttgtgaagtttgtaaaggcaaggttgagtaaagtatgcaaggctcactcggtatttataaaggaagtacgcttcggagacaagccatccggttgccgtgtaggggaaacaagtccatggcttctcgaagaagagttgtggcttacggtgcaagcttgtcaatttcaaaaaatattttcgtatcgatcaaatactatacggcgctttatcgacaaaagttacacacaacaaaacaaccaatggtaattaatattgacaattcgaatttaaaaatttaaaaaataataaatacattttttacgcatcatttgtgtagcgtgaattggg

SEQ ID NO: 124096 - DNA, 2621 bp, Zea Mays
cagtcacgcacgccgccccgaatctctcccctccacctccaaacaaaaatctctcctcttcctcctcctcctctcccacgatccccactcccaccccaccccctcgatcccaactccacccagccgaggccagcccagcaaatcatggcgacggtcacgcagggggtgctgctgcggctgctgcaggcgatgcacacggaggagcgcgtggcgggggagcaccgttcgccggtgctgcaggtcacgggcgtggtgccggcgctgacagcgtccacctccgacgcgccgctgctcgccgcgccgccgtccaacggcgtgctcctcaacctctccgacggcctccactccacctacgtgcaggtcccgcccgccgacgccgacgcgctgctggccgccgcgcgcccgcacctcgtgggccacctcgtccacctcgaccgcctccgcctcgcgcgccccgtgccgcgcgcgctcggcctccgcaccgtcccgtcctcccgctccctgccctgcgctggcgcgccccagccgctcgtcgtgcgccccgccgcctgcgcccgcggctacgtcatccagcccgccgcgtccgccgccgacgccgcgccgccgctcatgccctcctgccccacctcctcctccgacgacaacgacgccaagcggaccgtcctcgggcccaagaacgccgtcgccgaccccgcgccgccgccgcagcagcccgtcaagcgccggttctcgtcgccggcgccgccgtccaagcagcgagacccgtcgcccgccgccaagcccgcggtctcgcgggcgtcgtctccctccgtcggcaaaagcgcgtcgcggccgtcctcgcccgcgctcaggtccacgcccagggcgacgtcgccggcgccgtccaagtgcgtcgtgcccagcctggtcgccgccagggaggagaaccggagggcggccagggagccggcgatcatcgtgccgtcgaggtaccgccagccgtcgccggcgggcgggaggaggggcgccgcatctccggccgtcgccggtgggaggcgggcgtccctgtcgcctagctcgcgccggctgtccggggaagggaccggcaagaagaaggttggggtgctggtggctgggatctccaagatgacggatctggggagcgggtcggctgccaagcccgggaggaagagctgggacgatcccacgcgcactgtggctgcaacgtccgtcatgaagtctaaggccaaggtggacaaggataccatcctcaggactcaggaagcaatgtcgaggcggctaagtgatgctacgacggaacaatccagtaacgatgattcatctgttgacgagaagcccaagcagcctcgtaagaagatagacgcccctacctcagtgaaggcaaagaccgcagctccgaaaattacacttcacgaccctaaatggactgacggcagcattcctttggacgcacttcctgataaactctcaaaaataggaaaggaagcttttgagcggagagattcagcagcaactgctgcagctagcgccctgcaagaggcattgatctctgaatctgtgatcaggaacataagcaagttctctgaaatctgcgcgtccgcaagggtctccaatccgttcccaacagtagatctcttccttgtcgtctgtgaggatgctctcaagtggaagaccatcgctgccgagtctgtggtgaccaacggggctgaagaggaggaactgctggagaagaaatcgacttggcactgggtcggcgctgcgttagccactgatctcgaggtcctcaagcttctgaacggtgccactgggcccttctcccggacgcggagcagcggcactaccaacaagccaaatgcatcttcggtggaaccgccgaggacagcaagcatgtcgtcgaagaagcaagcgcatggagcttcagccaaggcgcagtctaaggcggcggcggtgtcaccaagctccccgccgaggtgcagcacgtggaacatgggcgagacagctgagctcgccaaggccctgtggcgcgagatgcgcgcgtggttcctgaccttcgtggacgaggcactggacgtggggttccacctgttcgaagatcaacagaacgtcgctggcaaggggaggcagcacggcggcggacacataacgatggtcctctcgcagttcaagaagatcagcgactggctggaccaggtagggaagatcgcggcggcggaggaggaggagcagaggaccaaggaaaagatcgagctcttgaagcgcaagatctacgggtttgtcattagccacatggggtctgcgttggagagcccagcatccgtctcggtttcttcgaggagctgagggctgttagtggatgcttcatgctctgaagctcgctctctctctctgctcgcagtttctgttcgtactggttcttcaactcgtttaagattgaaaaggccacacagtcatgtagcctgttgttggcgcggttcttttgtgttttctttttgggatgcctaatttatgttgtgaataaattaccgtactgtcattttggatacgtgtctgtttgtcgggtaggattatgaatgaaaagttacttggttcagtttgcatatgcaacttaggtgcttatttca

SEQ ID NO: 124097 - DNA, 1259 bp, Zea Mays
ttcacgccggaaaaaatgtattttttttcagttcaaaattggaagacaggaaaatatgggaaggaaatatgcgccgccgccaacttccctttcggtgctcgccgtccggctccggccagggatggatgctgaggtcagcgagatggtcacttgtcacccagagagcagagcgccatcttctccgcgcggccgggtataaatcccctccgcttctcctccaactcctctccacccgctcgactccaagcgcaatggctcatccttgcttaattaccaaggtacctttgcaggtaggtaggtagctagccgccatagcaagctaggccgaagcagaggagtgatggccaaggtccaccccaacgccgcggagtccgtccaggcagaggccgagggagagctgcccacggtgctgacggtgtggcgcaagtcgctgctcttcaactgcgacggcttcaccgtctacgacgcccgcggcgacctggccttccgcgtggactgctacgccggctcgttccgccgccggcgccgcgccgacgtcgtgctcatggacgccacggggaagccgctgctcaccgtgcgccgcaagacgcggttcggcttagcggagcgctgggtcatctacgacggcgacgccgacgacggcacgacggccggggccacgccgctgctgtccgtccgccgccgccgcataggcgcgtgctgcaagacgctggcgctcgcccgcccccgcccccgctccgccgccgcgggaaccgacgcaccgtcgtacgtggtggagggttcctacggtcggcgcgcctgcgcggtgcgcgacgcccgcgggggcgccgtcgtcgcggaggtgcagaggaaggaggccgtcggcgacgacgtgttccgcctcgtcgtggccgggccacgcctcggcgcgccgctgtccatggcgctcgtcatcgccctcgacgacatgttccgcggcggctggtcggcgcggtcgctgctgcgcatgagctcgccggcgtagtactttcactagctatagaagccacgagatggagtggagcccatataccagggactctccctgttacacgtgtaccgttacagtgaccccgggcccagttgtcagcgtcagcagagtttataatgcaggctgcagcaggggcagggctaacccaagcaatatttagatactagaattttcagttcgaatgcgtaaaacagtcggttctctgccaaatcaatcaaatatgaaaaaactatatatttgcaagatcctg

SEQ ID NO: 124098 - DNA, 837 bp, Zea Mays
ccatgtttgcaaaattctcctattctatatagccattctatatagccatggacgaattcttcctgcgtagcaacgaccgcgtcgtcgaccagccgccgccgccggccccgccgcggaacatgtcgtcgagggcgatgacgagcgccatggaaagcggcgcgccgagacgtgaccccgccacgacgaggcggaacacgtcgtcgccgacggcctccttcctctgcacctccgcgacgacggcgcccccgcgctcctcacgcaccgcgcaggcgcgccgcccgtaggagccctccaccacgtacgacagtgcagccgccgccgccgcgtcgtcggtgcccgcggccgcggagtgggcgagcgccagcgtcttgcagcacgcgccgatgcggcggcggacggagagcagcggcgtggccctggccgtcgtcgtcgtgccgtcgtcggcgtcggcgtcgtagatgacccagcgctccgcgaggccgagccgcgtcttgcggcgcacggtgaggagcggcttcccgctggcgtccatgagcacgacgccggcgcggcgccagcgccgggtggagccggcgtagcagtcgacgcggaaggccaggtcgccgctggcgtcgtagacagtgaagccgtcgcagttgaagagcagcgacttgcgccacaccgtcagcacagtggacggctctccatcagcctccgccggggcccggcctactgctgctgctgtggcaacgacggaccccgcggcgttggggtggaccttggccattactcctcttttcttttccccgctctgttagatcctctgcttcggcctagcttgctatggcggctagctgc

SEQ ID NO: 124099 - DNA, 1047 bp, Zea Mays
aatgttcttcttccctggttagtactagctagtagtcatcgtggtcgtccctctctctctccccttccctccactactatatataccaaacaaattcgttcggaggggagaccggcaggccatggctcgacgccgcccttgagtcctgcccccaagatgacgatgatccccctcgccggcttcaccgccctatctgccgccggcctcctgctcatcttctcctccttcctgctgcaaactcaagcaggaggagccagaagcagcgaggaggagcggtacgtgccggtgcgcagggtggtgtaccggtccatgacaccggcggcggcgagtgcggcgacgacggcagaggcagcggcagcggcggcatcgtacgagccgttcgaggtgtgcgaggggtgccggtgctgcgcgccgtcgtcgtcgtcgtccaacggcagcagcagctgcgtggacacgagctgctgctacgccatcgactgcgacctccccggcaagcccttcggcacctgcgccttcaccccgcaaacctgcggctgcggcagcaactgcacccagccctcgtcctgatgatgactcatctttcctgcaacttggctacttcttctggatcatccatcgtcttacgttacgttacgacctgatgacagaggatgacatgattagctagcacgcagattagatgactcacgtgtactcgatcatgatggatagattatccagttaattcccagatagagagttctgcatgaagataataatacaatgaataataatgtgtgttcgtttcagaggttgcgattgctgctgttgttcgtttcagagaattgtgactgcagttggttccattttcagagtcggcggctgctgttggcttgactcttgcgacacaccaaacttgtactgtcagggtcggcggcctaacctgttgtcgtcgtatacctactgtacgttaggtatagattgaaacattattttatactgtgtgactatattataattattatcattacaaaactataaagcaatacactcatttattattgcaaa

SEQ ID NO: 124100 - DNA, 1044 bp, Zea Mays
aatgttcttcttccctggttagtactagctagtagtcatcgtggtcgtccctctctctctccccttccctccactactatatataccaaacaaattcgttcggaggggagaccggcaggccatggctcgacgccgcccttgagtcctgcccccaagatgacgatgatccccctcgccggcttcaccgccctatctgccgccggcctcctgctcatcttctcctccttcctgctgcaaactcaaggaggagccagaagcagcgaggaggagcggtacgtgccggtgcgcagggtggtgtaccggtccatgacaccggcggcggcgagtgcggcgacgacggcagaggcagcggcagcggcggcatcgtacgagccgttcgaggtgtgcgaggggtgccggtgctgcgcgccgtcgtcgtcgtcgtccaacggcagcagcagctgcgtggacacgagctgctgctacgccatcgactgcgacctccccggcaagcccttcggcacctgcgccttcaccccgcaaacctgcggctgcggcagcaactgcacccagccctcgtcctgatgatgactcatctttcctgcaacttggctacttcttctggatcatccatcgtcttacgttacgttacgacctgatgacagaggatgacatgattagctagcacgcagattagatgactcacgtgtactcgatcatgatggatagattatccagttaattcccagatagagagttctgcatgaagataataatacaatgaataataatgtgtgttcgtttcagaggttgcgattgctgctgttgttcgtttcagagaattgtgactgcagttggttccattttcagagtcggcggctgctgttggcttgactcttgcgacacaccaaacttgtactgtcagggtcggcggcctaacctgttgtcgtcgtatacctactgtacgttaggtatagattgaaacattattttatactgtgtgactatattataattattatcattacaaaactataaagcaatacactcatttattattgcaaa

SEQ ID NO: 124101 - DNA, 103 bp, Zea Mays
ctgcatgctgctgctgctatgtaatgccctcagattttcgctggggtcttgtgtagagatggcaatgggtacccgaaacccgaaacccgatgggtttttaccc

SEQ ID NO: 124102 - DNA, 1734 bp, Zea Mays
ccttgaggtatacaaattttcttaggttccgtttggttagagggactaattggcttggctttagttccctcaaaaaggtgctaaaagggattaaagagcaccttttccacttgttgctctcactttttccattgacgccgtacacaacaaacaaggccagaggtatttgtctttgtatactgcatctagtgtgttgagaatctatttagtcgctgtaaccaaacatggtatagttctaggactcatactatatgcttatataattctacatagacgaattcttagtatgtccttaattcagttctgtaacgtgctgggcaatagttaaacttaatattttcttttttgtgtgtgctgaggacttccaatttacatgcccttctcattctctcagttcagcaactccacttgttacaacagccttccaagaacgccaatgcagataggaagcacacctgcatgtcatcagatataagtgacccttccacacctaggaaagttgaagatgccaagaacatttccatatacaacgatgtgattgccttcacattgtttgagctagagacaatcacaaagagcttccgtgttgattatgttcttggcgaaggaggatttgggaccgtttacaagggttacatagatgaaaatgtcagggttgggctgaagtcactgcctgttgcagtcaaggtgctcaacaaagatggacatcaagggcacagagaatggcttaccgaggttaactgcctggggcagttgaggcatccaaatttggtgaagttgatcggatattgctgcgaagatgaccatcggctgcttgtctacgagttcatgtttcgaggaagtctagaaaaccacttattccgaaagacagctacgccattgccctggggtactaggatgtcaatcgcgctgggagccgctaaagggctcgcttgcctccacaacgctcaaaggcccgtcatctacagagatttcaagacatcaaacattctgctggactccgattatactgccaaactgtctgactttggcctcgcaaaagatggccctgaaggtgatcagacgcatgtgtcgacacgggtgatgggaacctacggttatgctgcccctgaatatgtgatgaccggtcacttgactgctcggagtgacgtgtacagcttcggcgtggtcctgctggagctcctgacggggcgcaagtcgatcgacaagtcgcggcccagcagggagcagagcctggtggactgggcgctcccgaagctcaacgacaagaggaggctcctccagatcatcgacccgaggctggaggggcagtactcggccagagccgctcacaagtcctgcagcctcgcgttctactgcctgagccagaaccccaaggccaggccgctcatgagcgacgtcgtcgagaccctcgcgccgttgcagcagggcggcggcggcggcagcgacgcgtcctccggccttcctgactgcagaggccgccgcaggctgaccggcaacagcgtcgtccacttcagggccatccccaaccccaagtgcacgcctgttgtcccggcttgcagagtgcggtgatgttgctgcgcttcggttgaagctgctgggataggttcaggtgtgtactgtgaccatgggtggtggtgcgttttgatgatctgcatgttggattaatgtgggcttggcccaaattaatattcaataatagtcaatgctaatggcccactttaatgctatggt

SEQ ID NO: 124103 - DNA, 1791 bp, Zea Mays
accgttccttttctccaccattgaaacactctctgaccctcactcgctccctgtcacacacactacactcgcaattcatccgcagtcacaagctcggctgctgctcccgctaacggttgaggcgttgctggtgcacacaggaagggaagggaagggagagctgcacacagctttgctctggctcttggctcccctgtccagctgtcctgtccgtccatcatggaggaaacgcccagcccgcagctctagccgccgtcaatctcgtctcgtatcggagtcgaaggaagtaagaggcgggatggcatgaagcgacctaccaagaatgagaggctgggcaacccccggcacaagtaggaggaagaacccgagcaaccgagccacagggaggaggaggagatgggcaactgcggcacacgggaggagaatgccgtcgtcgctgcgcacgcgcaagttcagcaactccacttgttacaacagccttccaagaacgccaatgcagataggaagcacacctgcatgtcatcagatataagtgacccttccacacctaggaaagttgaagatgccaagaacatttccatatacaacgatgtgattgccttcacattgtttgagctagagacaatcacaaagagcttccgtgttgattatgttcttggcgaaggaggatttgggaccgtttacaagggttacatagatgaaaatgtcagggttgggctgaagtcactgcctgttgcagtcaaggtgctcaacaaagatggacatcaagggcacagagaatggcttaccgaggttaactgcctggggcagttgaggcatccaaatttggtgaagttgatcggatattgctgcgaagatgaccatcggctgcttgtctacgagttcatgtttcgaggaagtctagaaaaccacttattccgaaagacagctacgccattgccctggggtactaggatgtcaatcgcgctgggagccgctaaagggctcgcttgcctccacaacgctcaaaggcccgtcatctacagagatttcaagacatcaaacattctgctggactccgattatactgccaaactgtctgactttggcctcgcaaaagatggccctgaaggtgatcagacgcatgtgtcgacacgggtgatgggaacctacggttatgctgcccctgaatatgtgatgaccggtcacttgactgctcggagtgacgtgtacagcttcggcgtggtcctgctggagctcctgacggggcgcaagtcgatcgacaagtcgcggcccagcagggagcagagcctggtggactgggcgctcccgaagctcaacgacaagaggaggctcctccagatcatcgacccgaggctggaggggcagtactcggccagagccgctcacaagtcctgcagcctcgcgttctactgcctgagccagaaccccaaggccaggccgctcatgagcgacgtcgtcgagaccctcgcgccgttgcagcagggcggcggcggcggcagcgacgcgtcctccggccttcctgactgcagaggccgccgcaggctgaccggcaacagcgtcgtccacttcagggccatccccaaccccaagtgcacgcctgttgtcccggcttgcagagtgcggtgatgttgctgcgcttcggttgaagctgctgggataggttcaggtgtgtactgtgaccatgggtggtggtgcgttttgatgatctgcatgttggattaatgtgggcttggcccaaattaatattcaataatagtcaatgctaatggcccactttaatgctatggt

SEQ ID NO: 124104 - DNA, 1765 bp, Zea Mays
accgttccttttctccaccattgaaacactctctgaccctcactcgctccctgtcacacacactacactcgcaattcatccgcagtcacaagctcggctgctgctcccgctaacggttgaggcgttgctggtgcacacaggaagggaagggaagggagagctgcacacagctttgctctggctcttggctcccctgtccagctgtcctgtccgtccatcatggaggaaacgcccagcccgcagctctagccgccgtcaatctcgtctcgtatcggagtcgaaggaagtaagaggcgggatggcatgaagcgacctaccaagaatgagaggctgggcaacccccggcacaagtaggaggaagaacccgagcaaccgagccacagggaggaggaggagatgggcaactgcggcacacgggaggagaatgccgtcgtcgctgcgcacgcgcaagccttccaagaacgccaatgcagataggaagcacacctgcatgtcatcagatataagtgacccttccacacctaggaaagttgaagatgccaagaacatttccatatacaacgatgtgattgccttcacattgtttgagctagagacaatcacaaagagcttccgtgttgattatgttcttggcgaaggaggatttgggaccgtttacaagggttacatagatgaaaatgtcagggttgggctgaagtcactgcctgttgcagtcaaggtgctcaacaaagatggacatcaagggcacagagaatggcttaccgaggttaactgcctggggcagttgaggcatccaaatttggtgaagttgatcggatattgctgcgaagatgaccatcggctgcttgtctacgagttcatgtttcgaggaagtctagaaaaccacttattccgaaagacagctacgccattgccctggggtactaggatgtcaatcgcgctgggagccgctaaagggctcgcttgcctccacaacgctcaaaggcccgtcatctacagagatttcaagacatcaaacattctgctggactccgattatactgccaaactgtctgactttggcctcgcaaaagatggccctgaaggtgatcagacgcatgtgtcgacacgggtgatgggaacctacggttatgctgcccctgaatatgtgatgaccggtcacttgactgctcggagtgacgtgtacagcttcggcgtggtcctgctggagctcctgacggggcgcaagtcgatcgacaagtcgcggcccagcagggagcagagcctggtggactgggcgctcccgaagctcaacgacaagaggaggctcctccagatcatcgacccgaggctggaggggcagtactcggccagagccgctcacaagtcctgcagcctcgcgttctactgcctgagccagaaccccaaggccaggccgctcatgagcgacgtcgtcgagaccctcgcgccgttgcagcagggcggcggcggcggcagcgacgcgtcctccggccttcctgactgcagaggccgccgcaggctgaccggcaacagcgtcgtccacttcagggccatccccaaccccaagtgcacgcctgttgtcccggcttgcagagtgcggtgatgttgctgcgcttcggttgaagctgctgggataggttcaggtgtgtactgtgaccatgggtggtggtgcgttttgatgatctgcatgttggattaatgtgggcttggcccaaattaatattcaataatagtcaatgctaatggcccactttaatgctatggt

SEQ ID NO: 124105 - DNA, 1287 bp, Zea Mays
accgttccttttctccaccattgaaacactctctgaccctcactcgctccctgtcacacacactacactcgcaattcatccgcagtcacaagctcggctgctgctcccgctaacggttgaggcgttgctggtgcacacaggaagggaagggaagggagagctgcacacagctttgctctggctcttggctcccctgtccagctgtcctgtccgtccatcatggaggaaacgcccagcccgcagctctagccgccgtcaatctcgtctcgtatcggagtcgaaggaagtaagaggcgggatggcatgaagcgacctaccaagaatgagaggctgggcaacccccggcacaagtaggaggaagaacccgagcaaccgagccacagggaggaggaggagatgggcaactgcggcacacgggaggagaatgccgtcgtcgctgcgcacgcgcaagttcagcaactccacttgttacaacagccttccaagaacgccaatgcagataggaagcacacctgcatgtcatcagatataagtgacccttccacacctaggaaagttgaagatgccaagaacatttccatatacaacgatgtgattgccttcacattgtttgagctagagacaatcacaaagagcttccgtgttgattatgttcttggcgaaggaggatttgggaccgtttacaagggttacatagatgaaaatgtcagggttgggctgaagtcactgcctgttgcagtcaaggtgctcaacaaagatggacatcaagggcacagagaatggcttaccgaggttaactgcctggggcagttgaggcatccaaatttggtgaagttgatcggatattgctgcgaagatgaccatcggctgcttgtctacgagttcatgtttcgaggaagtctagaaaaccacttattccgaaagacagctacgccattgccctggggtactaggatgtcaatcgcgctgggagccgctaaagggctcgcttgcctccacaacgctcaaaggcccgtcatctacagagatttcaagacatcaaacattctgctggactccgattatactgccaaactgtctgactttggccatccccaaccccaagtgcacgcctgttgtcccggcttgcagagtgcggtgatgttgctgcgcttcggttgaagctgctgggataggttcaggtgtgtactgtgaccatgggtggtggtgcgttttgatgatctgcatgttggattaatgtgggcttggcccaaattaatattcaataatagtcaatgctaatggccc

SEQ ID NO: 124106 - DNA, 2131 bp, Zea Mays
aacccaattatcacatgcgtgtgcggctgtgcgccgccgctacactcgccggcgacgagccttcgtttcggctcagagaaacagacagacatgcagagtccagaaatccaacagagaaacagggctccgacccactcgcgcgctggttcgctggcaccgcgcgtccctcgccacctccgcaccgccgccgcgctcgcggccgcggtgcagggcctcatcgacgcgtcccctgcgcggggcgagtcgcagaccatccacgcgcagctcctagcgtcgggactcgtcggcagtgccgacctctctgtcaagctcctcgttctgcacatacggtgcggctccctgcacaatgcccgcgccgtgttcgacggaatgccgagccggagccgcgccgcgcacaactacctcatcgcgggatacttccggcggggccgccccgcagaggcgctggggatcttgcggcggctcgcggcgtccacggggcggctggacgtcttcgcgctgtccatggcgctgaagctgtctgcggcgctggctctgcccggcgtcgtcgccagggaggcccacgcgcgcgcgctgaggtccgtcgaacagtccgacgatatcctgttcgcggccctggtggatgcctacgtgaagagcgggttgcttggctacgcgcggcgggtgcacggcgcaatgcccgtgcggagcgtcgtgtgctccacggcactgctcgtcgggtgcatgcaggaagggctgttcgaggacgctgaggcgatattcaacgagatggaggggaaggacgtcgtggcgtacaacgccatggtggaggggtacagcaagacggaagagacggcggagggctcgctcgaggtgttgaaggcgatgcagcgagcggggcttcgtcccacggtatcgacattcgtgagcgtgctcggggcctgctcactcttgtcgtcgccagagctcggcgagcaggtgcattgccaggggacgaaaagcggcctagtcttggacatcaaagttggaagcgctctggtcgacatgtatgccaagtgtggacgggtggaagacggccgtaggatcttcaaccagatggcagagagaaacgtgattacctggacttcgatgatcgacgggtatgggaagaacggcctctctgacgaggccctccagctgtttggcgaaatgcgggagcggcgagacgtgaggccgaaccatgccaccttcttgagcattctgtcggcgtgcgcacacgctgggctgctgtcccagggccaggaggctttccagagcatggagagtgagtacttgctgcagccacggatggaacactacgcatgcatggtggacttgctgggtagattcggaggcgtgcggcaggcctatgatttcgtccgaggtatgccggtgaggccaaactctgatgtgtgggctgcgctgctcggggcggctacactgcacggggatatggacatctgcaaagttgcatcgagggaggtcttcgagctgagccgcaaggggagaccgggcgcctacatggcattctccaacacacttgcggcagctggggagtgggacggcgtgcacgacgttagggagatgatgaaacagcgaggcgtgctgaaagacactgcttgcagttgggtcggttctgagaacccgccactcgtcgactgatgtacaggaacgtttacggttgataagagtgaacgcagacacaaggcaccagagagaaccagaacagttatgaagcatggacaagttgtcttgttctaattattggaatatatgtagttttccatttatcaaacgcttcaatcgagtggcgcaccgacaatcaaggccagtgagatgtcttttctggattacaaaagtcgataagcaggtgttatttagaatggtggacccatgctgtctaattgtttccttcctcgtagaggataatgcaaatatgctgatcgcaatggtggatgcagtgacaaattttatcttctgctgaccgagaaacattccatgttttgcatttggaatgaacaaatgtggaggtttggaagtgcaaaatatctgaacactagaaagcaaactgaatgcagtgatatattttctttccgtggattattttaatcatgaataaacgacatttttgtct

SEQ ID NO: 124107 - DNA, 1949 bp, Zea Mays
aacccaattatcacatgcgtgtgcggctgtgcgccgccgctacactcgccggcgacgagccttcgtttcggctcagagaaacagacagacatgcagagtccagaaatccaacagagaaacagggctccgacccactcgcgcgctggttcgctggcaccgcgcgtccctcgccacctccgcaccgccgccgcgctcgcggccgcggtgcagggcctcatcgacgcgtcccctgcgcggggcgagtcgcagaccatccacgcgcagctcctagcgtcgggactcgtcggcagtgccgacctctctgtcaagctcctcgttctgcacatacggtgcggctccctgcacaatgcccgcgccgtgttcgacggaatgccgagccggagccgcgccgcgcacaactacctcatcgcgggatacttccggcggggccgccccgcagaggcgctggggatcttgcggcggctcgcggcgtccacggggcggctggacgtcttcgcgctgtccatggcgctgaagctgtctgcggcgctggctctgcccggcgtcgtcgccagggaggcccacgcgcgcgcgctgaggtccgtcgaacagtccgacgatatcctgttcgcggccctggtggatgcctacgtgaagagcgggttgcttggctacgcgcggcgggtgcacggcgcaatgcccgtgcggagcgtcgtgtgctccacggcactgctcgtcgggtgcatgcaggaagggctgttcgaggacgctgaggcgatattcaacgagatggaggggaaggacgtcgtggcgtacaacgccatggtggaggggtacagcaagacggaagagacggcggagggctcgctcgaggtgttgaaggcgatgcagcgagcggggcttcgtcccacggtatcgacattcgtgagcgtgctcggggcctgctcactcttgtcgtcgccagagctcggcgagcaggtgcattgccaggggacgaaaagcggcctagtcttggacatcaaagttggaagcgctctggtcgacatgtatgccaagtgtggacgggtggaagacggccgtaggatcttcaaccagatggcagagagaaacgtgattacctggacttcgatgatcgacgggtatgggaagaacggcctctctgacgaggccctccagctgtttggcgaaatgcgggagcggcgagacgtgaggccgaaccatgccaccttcttgagcattctgtcggcgtgcgcacacgctgggctgctgtcccagggccaggaggctttccagagcatggagagtgagtacttgctgcagccacggatggaacactacgcatgcatggtggacttgctgggtagattcggaggcgtgcggcaggcctatgatttcgtccgaggtatgccggtgaggccaaactctgatgtgtgggctgcgctgctcggggcggctacactgcacggggatatggacatctgcaaagttgcatcgagggaggtcttcgagctgagccgcaaggggagaccgggcgcctacatggcattctccaacacacttgcggcagctggggagtgggacggcgtgcacgacgttagggagatgatgaaacagcgaggcgtgctgaaagacactgcttgcagttgggtcggttctgagaacccgccactcgtcgactgatgtacaggaacgtttacggttgataagagtgaacgcagacacaaggcaccagagagaaccagaacagttatgaagcatggacaagttgtcttgttctaattattggaatatatgtagttttccatttatcaaacgcttcaatcgagtggcgcaccgacaatcaaggccagtgagatgtcttttctggattacaaaagtcgataagcaggtcagcatatgtactaggcaacaaagtacggcttctactctttgagaaaccccatgtgcttcacttctttctctctccacaa

SEQ ID NO: 124108 - DNA, 1937 bp, Zea Mays
ggcagccagagaccgaacggtgtagaattccgctacgcatattcgccccctcttctctcgttttcttcttttgccccggaggcgcggacaggtaccagcaccaccagagcattccgtcccgcccccgcctccacctcgccgcgaccacacctcctctcctccccgccggctcctcctcctcgcatggcgacagcctctcgtccctagcccccccagatccagcggcacgcacctacacacgcgcaaggaaccgtagacgcgcccccgcgcctcccctctctcccgtcctccgccacccatggacgcggggaatggctgcagcgcgcgggcgctggcggcgtgcgtcgtcggcggcatcgtgctgggcgcgtcggtgctcgcgctccacctcgcgggcgggcccgccgccatcccgcccctgcccctgccgccgcccatcggcgcgcttctccgtcgccgccgccgccccgtgcgcgtctacatggacggctgcttcgacatgatgcactacggccactgcaacgcgctgcgccaggcgcgcgcgctcggggacgagctcgtcgtcggcgtcatcagcgacgacgagatcaaggccaacaagggaccccccgtcacgccgctccacgagagaatggtaatggtccgtgctgtgaaatgggtggatgatatcattccagatgcaccttatgccataactgaagaattcatgaacaagctattcaatgagtacaacatagactacattatccatggagacgatccttgtttgctacctgatggtactgatgcctatgctcttgccaaaaaggctggtcgatacaagcagattaagagaaccgagggagtgtcgacaacagacattgttggacggatgcttctttgtgttagagagagatcatctgatgcacataaccactcgtcactacaaaggcagttcagtagtggacatggtcagaaagttgatgatactggatctggaactggaacaagagtatctcattttcttcccacatctaggcgaatagttcaattctcaaatagcaagggtccaggtccagattctcggatagtttacatagatggtgcttttgatctgttccatgctggacatgtcgagatcttacgacttgctcgagaacttggagattttttgcttgtggggattcacacagatcagaccataagtgcaacacgaggacggcatcgcccaatcatgaatctccatgagcgaagtttgagtgttttggcttgtcgttatgttgatgaggtgatcattggtgctccatgggatgtttcaaaagacatgattaccacgttcaatatctctttagtcgttcatggaacaattgctgagaacatggacttcacagaggacgatttacacccatatgctgttccaatggctatgggcatctaccgccgactggagagccccctggatatcacaacaagtacaatcatcaggaggattgttgcgaaccatgaagcttaccagaagcggaatgagaagaaggaagccagcgagaagaagtactacgagggtaaaagctttgtgaacggggagtgaaggtcggagtagcagcagggactggcatggggattgctgcctcgttcaatttaggtctcccaggcttttagcagaggcaacagttggtcgatctacagttgtaccctttcttttttcttttttcatcttcttcagtaatctttgatgatcttgctgacatagcttaggaagcataggagcatttctcccccgtgtctgcagccaattttcctcactgtgttgtatatgcgccttccagctgttgtttccagctgctgagctgcatttgagatctataggcttttccacacacacacacagagacattttgaaattgtgcgctgcagtatgaagaagatcatgaatgttagcgtgattaactatttgctgc

SEQ ID NO: 124109 - DNA, 1067 bp, Zea Mays
tttttttcccctcactttccctttctccctcgagaaggccgtctccagttcatcaccctcgtcctattccttcgtacacaggccatcatcagacgagagggagaaccagcgaggactgccaagaagatgctgaagagactgctgacgaagactaagagcaagaagaagaaggaggctgcctcctctgccataccgacgttggatcggctccatgagactctagagatgctggagaagaaggagcgtttcctccagaagaaatgttccgcggaaatagagaaggcgaaggattacacaaaagcgaagaacaagaacgccgcaatccagtgcctaaagaagaagaaactgtacgagacacagatcgagcagctatcgaatttccagctgcgagtccatgaccagatcataatgctcgaaagcgccaaggcgaccacggacactgtcgacgctctgcgctcggggtcatctgctgtcaaggcgatgcagcaatcagtcaacgtggacgacatcgagaaggcgatcgaggaggcgaacgagcagacggagagcatgcgggagatgcagcaggcacttgcgacgccgattggcgcttccgctgacttcgacgaggacgagctagaagcggagctggaagagctggaggaggaggaggaggaggagggggagatcgaggacgagctgcctgagccgccggcgaggcggtccgtggaaccatcggcgaaagcggcggcggcgtcttctagacagggcagtgatgtgagcgagctgaccaggcttcaggcagagatggccctctagctgtctagcagtgatgtgatgtgagcgagctcgtcgttgcgcctgtattgtacacacgtgttttgctgtaaattcatcttgttctagaagacaagacacggcatagatgagagaatctagtcggtgtccggcggacgatgccagccggcagaagcagtttgactttgacggtctcggattgcggtccattgttccaacagatacgatgcgatatcattattcttatactctatcatgtaaaatgcaagaattgccaagatgttctaaga

SEQ ID NO: 124110 - DNA, 1237 bp, Zea Mays
ccttgcgctccaccgctccgcgcctgcagccgcattctattcactcacggcgtcggcagcgccacctgatccgcggccgcagccccatcatcggcgatccgctgcgcgctcccagtcccagtcccaggcacgcgggtgcggtttcgggcacggcggagaggcggccatgcttgatcccttccgggaccggagttcactggtgcctgtcgatttctcaagcttgtttctttcggggtaagcgagaggcataggccatcatcagacgagagggagaaccagcgaggactgccaagaagatgctgaagagactgctgacgaagactaagagcaagaagaagaaggaggctgcctcctctgccataccgacgttggatcggctccatgagactctagagatgctggagaagaaggagcgtttcctccagaagaaatgttccgcggaaatagagaaggcgaaggattacacaaaagcgaagaacaagaacgccgcaatccagtgcctaaagaagaagaaactgtacgagacacagatcgagcagctatcgaatttccagctgcgagtccatgaccagatcataatgctcgaaagcgccaaggcgaccacggacactgtcgacgctctgcgctcggggtcatctgctgtcaaggcgatgcagcaatcagtcaacgtggacgacatcgagaaggcgatcgaggaggcgaacgagcagacggagagcatgcgggagatgcagcaggcacttgcgacgccgattggcgcttccgctgacttcgacgaggacgagctagaagcggagctggaagagctggaggaggaggaggaggaggagggggagatcgaggacgagctgcctgagccgccggcgaggcggtccgtggaaccatcggcgaaagcggcggcggcgtcttctagacagggcagtgatgtgagcgagctgaccaggcttcaggcagagatggccctctagctgtctagcagtgatgtgatgtgagcgagctcgtcgttgcgcctgtattgtacacacgtgttttgctgtaaattcatcttgttctagaagacaagacacggcatagatgagagaatctagtcggtgtccggcggacgatgccagccggcagaagcagtttgactttgacggtctcggattgcggtccattgttccaacagatacgatgcgatatcattattcttatactctatcatgtaaaatgcaagaattgccaagatgttctaaga

SEQ ID NO: 124111 - DNA, 561 bp, Zea Mays
tgacgtcggagaggtcgcccgtgacgtggcggcgcggcggcgggaggtccatgtcggacgcggggcgcttgcggaccatggcggcggcggcggcttcttggtggtctagctgatggaggtagtggaggaggaagtggtttggggaagaaggaggaggcggagggaggtgtgggggagggcagcggcggcaataaggagtgagaggaggcggaggcggtggcggtggcatgagagtggggaaaggagtggggggcggtggatgcggcggaggaggacgaggagaagaggagggaggaggaggagcccatctagaaacgccaagaggaagccgccgcgcgcatggcgatcgggcgacccagcgcgggggataggggtgagtgagggagggagcagtttgcgtgttttggcgccgcgcgggctgctgatgcaccaccaccaccacagtcagtcagtcagtccgggctcgggagcggagtggagttgggggtgagttgagtggagtgagtaggctgagctagcagacggacggtgcgagggagggagagcgggaggagtaaagag

SEQ ID NO: 124112 - DNA, 327 bp, Zea Mays
atggacgccccgaggccggtgagcctcaccctgggcgggcccccggggcgggaggcaaggatgtggaagagccccggccactgcagcccctgcatgatgtcgaggtcgatgatgtgcacgcgctcctcccgctcgaacgcctcctggatggcctggttggcggtgaagtgcgagaacttgacgaaggggctgatgccgttgaacacctggaacgcggcggcgacgcggccgtggaggcgcgccgcggcgggggagcccggcggcagcggcgcgtacaggcccaggcaggagctgacgagccgcgccgacatggcctccgcgaagtag

SEQ ID NO: 124113 - DNA, 111 bp, Zea Mays
aaacaaattgcaccctgatttaacacaccatcaaaacaaacggttcaaatcgctagctaatctactctccttactcaaatcaaacggacaatattatttggttcactaggt

SEQ ID NO: 124114 - DNA, 3274 bp, Zea Mays
tttttttacaagcgtgcccccacaccgccccgctcctccaactccgccgcttttcattttcaccttcccttcctcccttcgcttccccttgagtgcagcaggacccccacctgataagagcggactgctccgctcttgtcctgccacccacgcacgccatggacgcctgggaggccaccaaggtggtgttcgaccgggtgcgggcgctggacccggagaacgcctccaagatgatgggcctgctgctcattcaggacaacagcgacaaggagctgatccgcctcgccttcggcccggagcacctgctccactccttcgtcgccaccgcgcgcgccgagctcgccgccaagcccgcgtccccgccgtcgcccgtgctcggcccgctgcagtccggcgcgccctggggcctcccgagccccggctctggagccggcggcggcggcggcggcgaccaccaccaccactcgcccttcgccgccgctgaccagctcgggtacgacggcggcgccgacgcgttctacgccgacgagtacgactgctggtcccccgcgggcgccgccggcgcccaccgccggagcttctcgctcagcgacgccgaggcggccgcttcgtggaggccctgcatgtactacgcgcgcgggtactgcaagaacggctcctcctgccgcttcctccacggcgtgcccgaagacgacgccgcggagcgggagatggccgtcatgcgcgccaaggccctggccgccgcgccgccgacgcagcagcagcagctcatggcgtccgcgtaccccttctcgccgtcgcccaagggaggcgtgagcctcagcttcctgctccagcagcagcagcagagcgagacccaaagggcggcggcgggcatgctgctcggcggcgaggacatgcacaggttcccggtgcgctccccgcggatggaccgcggcgacctcatcggcagccccgccgcgcggcagatctacctgacgttcccggccgactccaccttcagcgaggaggacgtgtccaactacttcagcatgtttgggccggtgcaggatgtgcgcatcccgtaccagcagaagcgcatgttcgggttcgtcaccttcgtgtacgccgagacggtgaaggccatcctgagcaagggcaacccgcacttcgtgtgcgacgcccgcgtgctcgtcaagccctacaaggagaagggcaaggtccccgacaggttcaggaagctgcagcacacgcaccatggcggagccgagttcgtcggttgtgcgtcgcccaccggattgctggattccagggacccgtacgatctccagcagcctcagatcggatcaaggatgatgtacgggaacatagctaaccagcacgaggcgttcctgaggaggaagctggaggaggagcaggcagccgagctgcagcaagccatagagctggaggggcgccgcttcatggggctgcagctcctcgatctcaagagcaggggccaccaccatctcggttcaggcgcgcccatgcctctgcggcaagccaccgatggcaaaggcagcggcatcaacgggaacggcaacgcgtcccatttggaggatgccatctgcatccaagataagaggatgatgagcagccttgcaatgagtgctcctgctgctgctgatgcggaaggcgagcacgaggagcagcaggaagagggcggtggtggctgtgatggcagcagcagcagcagccccaagcaggcagtcaaccctggggaagaggaggtggtggaatctggtcctgtgacagcgacgcccaacgctgcttgtggattccaagaaagcagctatggcgtggtggaggtggagctcgtcttgcctgacagccccttcgcgtcccccaccaaggaggaggcctcatacgctgacgctgtcactactgcagccgctcggaacggtagcatcagcagcagccctcgccatgtggcccttttcgcacccgcgtcttccaccaccctcgagctgcccccctacagctcctcctccttctttcaggtgcccaggttttctcgtgggcatgaagccattgggctgtgatgtgaggtgcacagagcaaaaaagggggagggggccctccattcctctaatctgggaggactaatggctatgattggccccatcaaccaggcgtagagaagctttgacaaagaaaaaagaaatacctttggagaggtgtaatcttcttcagagagtgggaggagggaggggacagtgaagacagcaacagaagaagaaacaagtctaggttgtttttttagctcttaggcctatgataagtatatgatagtaagtgtgagtgagtgagtagtaggcataaataatagtagtagtagttaattagtcgtttattagcagctcctatgctcgtttgtggcatggatggatctcactgttgtgatgatacaggtgattaaactaaaccgtagtagaatggtgtaagctctgccagttgtagttgcgaggctgcatacatcagacatggcatccaaaagaaagaaaatactcactcctagatgagtggacaaaaggcagacagacggacgtagcaggagggaaaagtgatgagcactgagcactcacgggtgcgactgcagcccagcgcagacaagagagaagggagagcaatagtagctgcaatgcaagtcgcctggcgtcgagcaaattggtgaaggttttgtgctcccagttcgctgaattttgggccagccaaagccgaatctgcaggtgctgggagtggagtggagtgaggttgatgtggctgctgggaacggagggagggagacctgacgggaaaagggggaacagcacgcgcacctttccgctagtacgtcctgtcttgtatgggatgcccgatgggacggggcggggcgggttgaagcatcgtgcatgcacgtctcttgggtttccctctccctctgcctcgtcatccgcactacttgttcttgtgggcgatggtaccagcagcgttcgttcggccggagttcaaaatttgaagtggaatccaatatttccctctgttcttgacacctgactacgggccacgagcaccacagggaaaggagcaggcctgcagtcacactggaacagaacaggcacaggagatgccatgggcacttgtcatcgatcgtcttggacggtcaaaactgtgtccttgcctttgttatagctaggcactacacatgtgatgtctgtgaaactgtggtcaacagagaacaaacccaacattgcaataacattgcattgcagtcaga

SEQ ID NO: 124115 - DNA, 2367 bp, Zea Mays
atggacgcctgggaggccaccaaggtggtgttcgaccgggtgcgggcgctggacccggagaacgcctccaagatgatgggcctgctgctcattcaggacaacagcgacaaggagctgatccgcctcgccttcggcccggagcacctgctccactccttcgtcgccaccgcgcgcgccgagctcgccgccaagcccgcgtccccgccgtcgcccgtgctcggcccgctgcagtccggcgcgccctggggcctcccgagccccggctctggagccggcggcggcggcggcggcgaccaccaccaccactcgcccttcgccgccgctgaccagctcgggtacgacggcggcgccgacgcgttctacgccgacgagtacgactgctggtcccccgcgggcgccgccggcgcccaccgccggagcttctcgctcagcgacgccgaggcggccgcttcgtggaggccctgcatgtactacgcgcgcgggtactgcaagaacggctcctcctgccgcttcctccacggcgtgcccgaagacgacgccgcggagcgggagatggccgtcatgcgcgccaaggccctggccgccgcgccgccgacgcagcagcagcagctcatggcgtccgcgtaccccttctcgccgtcgcccaagggaggcgtgagcctcagcttcctgctccagcagcagcagcagagcgagacccaaagggcggcggcgggcatgctgctcggcggcgaggacatgcacaggttcccggtgcgctccccgcggatggaccgcggcgacctcatcggcagccccgccgcgcggcagatctacctgacgttcccggccgactccaccttcagcgaggaggacgtgtccaactacttcagcatgtttgggccggtgcaggatgtgcgcatcccgtaccagcagaagcgcatgttcgggttcgtcaccttcgtgtacgccgagacggtgaaggccatcctgagcaagggcaacccgcacttcgtgtgcgacgcccgcgtgctcgtcaagccctacaaggagaagggcaaggtccccgacaggttcaggaagctgcagcacacgcaccatggcggagccgagttcgtcggttgtgcgtcgcccaccggattgctggattccagggacccgtacgatctccagcagcctcagatcggatcaaggatgatgtacgggaacatagctaaccagcacgaggcgttcctgaggaggaagctggaggaggagcaggcagccgagctgcagcaagccatagagctggaggggcgccgcttcatggggctgcagctcctcgatctcaagagcaggggccaccaccatctcggttcaggcgcgcccatgcctctgcggcaagccaccgatggcaaaggcagcggcatcaacgggaacggcaacgcgtcccatttggaggatgccatctgcatccaagataagaggatgatgagcagccttgcaatgagtgctcctgctgctgctgatgcggaaggcgagcacgaggagcagcaggaagagggcggtggtggctgtgatggcagcagcagcagcagccccaagcaggcagtcaaccctggggaagaggaggtggtggaatctggtcctgtgacagcgacgcccaacgctgcttgtggattccaagaaagcagctatggcgtggtggaggtggagctcgtcttgcctgacagccccttcgcgtcccccaccaaggaggaggcctcatacgctgacgctgtcactactgcagccgctcggaacggtagcatcagcagcagccctcgccatgtggcccttttcgcacccgcgtcttccaccaccctcgagctgcccccctacagctcctcctccttctttcaggtgcccaggttttctcgtgggcatgaagccattgggctgtgatgtgaggtgcacagagcaaaaaagggggagggggccctccattcctctaatctgggaggactaatggctatgattggccccatcaaccaggcgtagagaagctttgacaaagaaaaaagaaatacctttggagaggtgtaatcttcttcagagagtgggaggagggaggggacagtgaagacagcaacagaagaagaaacaagtctaggttgtttttttagctcttaggcctatgataagtatatgatagtaagtgtgagtgagtgagtagtaggcataaataatagtagtagtagttaattagtcgtttattagcagctcctatgctcgtttgtggcatggatggatctcactgttgtgatgatacaggtgattaaactaaaccgtagtagaatggtgtaagctctgccagttgtagttgcgaggctgcatacatcagacatggcatccaaaagaaagaaaata

SEQ ID NO: 124116 - DNA, 2086 bp, Zea Mays
gtctcgatggagcatacttgaagcagcagatcactttgcattgttttgttattatacacatatacaataacaatcattattttctgaggcgctggtctgaataatgctctcgttactgcatgttctttccgctctataaaaacgaatacgttcgcctgaaccttcagcacgcacgcgccgccggtgtgcgacttctgcacacgccacgcctcactggttgccactgcatcagcaagacagcaaggcatatcctgctgggcagcaataatggctcacttcgtcgtcggcatcgcggcggcgctgctccttctgcagcagctgatggcctcgtcgtcgtcctaccccagcagtgcggtccttgcagactctgtgctcggccggaaagctggcatcgtcgtcgacgaggcgtcgtcggcgactgagagttcacccccgggggctaggactgggaggtacgccgtgatcttcgacgccggcagcacagggacccgtgtacacgtcttcaggttcgacaggaagctcgagctcctcgagatcggcgacgacggcatcgaggtgttcgccaaggtgaagcccgggctgagctcatacgctggacatccccaagaggctgcaaattccatgctgcctcttcttgacaaggccaagagcgccgtccctaaacagctgacgaaaaggaccccgcttagactcggagcgactgctgggttgagacttatcggagaggagcaatcagagcagattctcgaagcagtcaggaaccttatccacactaagagcaaatttcagtacaagcccgagtggatcaatgttattgagggatctcaagaaggatcatacctatgggttgctctgaattatctgttggataaattgggaggggactactcacagacagtagctgtgcttgacatgggcggtggatcagtgcaaatggcctatgccgtttctgcaaatgccgctgcaagtgctccggcgccgactcatggggaagacccctatgttacaagagagtatcttaaaggaaaagattacaacatctatactcacagttacttgcactatggtgcttttgcatcacgagcagagattttgaaggcaaaggatggaccattcagcagctgcatgttacgtggattcattggtcaatacacctacaatgaggagcaatatgacgcgactgccgcgccggaaggagcagtctatggcaagtgcagggaagagatcggcagagcactgaacctgaacgcgccatgtgaaatgaagaactgcaccttcaatggcatatggaatggcggcggcggagcaggccaaggcagcatctatgttgcatccagcttctacttcgtggcctcagaggtcggcatcgtagatggcaacgcaccaagcgggaacactacccctggcgcattcggagcttccgcggagaaggcttgccagatgagtgttgaagaagccaagatcgaatacccaaacgtcaacgatgtcgatgtgccctacctgtgcatggaccttgcctaccagtatactttgctagtagatggctttggtgtggagaggaccaaggagatcacagtggtggacaaggtgaagcacggagagtactacgtcgaagctgcatggcctctaggctctgctattgaggctgtgtcgtcaaccaaagaatggcgtcaagataaatgatctgttggtccaatctcatatgctagtattgtatctgacatgtacagtactggcacaacttatgaaataaacgaaaacgtctgtggtctcacgctaatatacgcattaagcactcggcaaagatgattttgccgagtgtctgtcaatgatgagtgtctcacgctcggtaaacattattgttgtcgagagtgttatttcacgcaccgagtacccgacaaaaatgcattcggcaaaaaaccggattccgacagtgaaatgcatattccttgaatggttatatgcaccaccaaagaaaactaagcattttcttcaatgtttgtcaaggaagaaaattacaatatgatcatggcttgtaaagttcttatattgatatatgaattcaatatcatggttgcaatccata

SEQ ID NO: 124117 - DNA, 2310 bp, Zea Mays
atgctcaactgtgtcagggcaagcctaccggacgacaacaatggaagcagggtagtgctcgtattggacatcgagaacgaagaggtagcgtggcatgctaatgccatgaacaagacgacgggcatcagccacggattaatccaccacttgaaccgtctggaccaagacaagagtgtggagttgttctgtatgagggccttgaggacaaatctgtcagatgaaaccacagtgaacagcatgatgagcaagtacagggaagttgtgtacaatataacttccggctaccctctggctatagtggttttggccggactcctacggttcaaggagaagccagggcaatggaacgcggtgctgcagcagctcaggacgacgtcgtctggaccagcagcagcagatcaagaagcgcatcagcaagacgaccaaggcggccataccgaggagaagacgatgagcgcccctacaagtacaacacaagcagccaacaaccagctgtccacaagaacgtcgattgagagggacaccttcctgtctactggcagtatagtgcggttgtggatggccgagggattcattaggccacagaagggcaagaccatcgaggagctgggccacgactatttcaaggagctggccttgagatgcctcgttcaggtttcagggatgaacgaggttggcggcatcaccaatgtcattgttcacggaaggctccatgggttcctgcactcggaggctcgtgaggccggcttcatcgacgtccatgacatgaacgacgtctttgtcccaccatcgctagcgattccgatgaacaaggaggtgcgcgacgcggtctacaagttcgaggccgacttcgagttcagcaagatggagacgatgatccacaggttccctgccggagcagggctaggcgacgggctgcgcaccaggtacccgcacatggtggcgccgaggttcgtcgccatcggcccgtaccaccacggcgagaagcgcctcgcgaagatggagggggtgaagagcgccgccgcctactacgtctgcctgcgcgccgaactcgcgccggagatggcgaggcaggcggtgctcgccgtcgcggacgaggcccgcggcaagtactacgactacgagcacgacgacggcagcagcgatggagggggaggggaagaaggtggtaaggcctgcttcgcggccatgatgttccgcgacgcctgcttcctgctgctgtacatggacgcgtacacccggtcctacggcgacacggaagacgacgtggtgaacaagtcgatgcggcgcttcctcttcgccaaccgcgagagcatcaacagcgacatcatgctgctggagaaccagctgccgtggctggtggtccaggctcttctgggcgccttcccgggggacgaagtcaagacggacatgcgccgcgcagtaggcacgttcgtcgcggccatggggaactcgttcaggatcagcgagccctgtaagctcgtgcggtacgagtgggacgacgagcgcgacccgcccgcgcacctccttgcgctcctccggcgccacaagaccgagaagccgccagaggctggcgacgacggaacgcacggcaacggcaacggcaaccacaacgcggagacgatgcgccatccactcatcaccccaccaccaccagcagcaacagcagcagcaggtcgccgcaaggacgacgacggcgacgaagagaaccccaggccgcgcccccaagcggccgcgaaggctcccgtttccgtctcagcgacttctcccgccgacctcgaacagatcggcatcaagctgacgcccagctggacggcgtcgttctcggacatgggcctggagaaagggcggctcttcgtgagccgcctcacgcttgcgccgctgtcgctgagcgacgcgcgggcggcctgcctcgtgaacatggcggcgctggaggtctgctgcgcgtccaggttcggggaccgggccggcgcggccgccgtctgctcctacctcgcgctgctcgcgttcctcatggccgggccggaggacgtgcgcaggctgcgggccctgggactccttcacgggccccgcggcgacggcgacacgctcgccttcttcagcgccgccgccgagcacctccccagctacggcaagcggttcgcgctcctcatggcggaggtccaggagtacaagcggacgaggcgcgtcaggaccgcgctgtacagatgggttcacaaccacctggccaccgtcgtcaaggtcgtgtctatcattgctatgctcgttggcctctaccagggtctcatcttcctcacgcggaacagctag

SEQ ID NO: 124118 - DNA, 1597 bp, Zea Mays
gcaagataacaggcgcgtaccagagtccagagagaagaacatggcggagacggccatcgcggcggtgctctccaagttcggagggctcgcggcgagcgaggccaaggtgctgctggaggtgggagacgacatgatgctgctgcgggaccgcctcgagtggctgcaggccttcctccgcgacgccgaccacaagcgccgcaccggcgacgaccgcctcacccgcgtctgggtgcgccagatgcgcgacgtcgccttcgaggcggaggacgccgtcgacgagttcttccgcaaggttgacatggaaggcatgggttaccaacgctggatcacatggctcaagaaatgcttgctaggctgctgggccgaaatcattctccggcatgagttgtctggtcgcctcgaaaaaattaacagcaggctccatcagatctcggagaaccaaaaggagtacaaggtcgagcctacaccatcagcgacagtactcacgtcttccactacagccacttcagcatggcgggatggttacaagaacgccgtgggttttgagaaagaagtggagacactaaaggaaatgctgcttggtaaaggtcgccctcagctgacgtttatctccatacttggagagagcggtgtgggaaagcaaacgctgtcacgtattctcttgcatgacatggagaagaacaagcagttcgacgtccgagtctggtacaacatgccgtcgggttccaccacggaaaacctcctcaagcaaatctacaaaaaagcaggaggaggaggactgcggcggatcccgaagtcgaagagtccaccgtcctctggagataaagacagtgcggcatgtgattgccaagaagctcacgctccgccatctatcaaggaagaaatgggcgagctgcaaacgctgcgtggtgtaaaggccagcgaagaagaatgggatcaagataactgcccactgctcaagatgtccaaactccggtcgctggagctgcacggactcattggcgccagacacggcgctgcgctgatcactgccctcggggcaaatgcatctccttggccacttgaagctcaaaggcgacaaagatctcttgctgcgtcttcaccggagaacgccttcgatatcttcagactgtagagctggatggaactgtgcaatggccgcctgtcgctgagtttaatgatcttcgcttcgtccgtccaaaccttgtccagctcagcctgacaaatacaaacgatgcgccggaaggcatccaacaggaactgagaaatgcaggctttgtccgctcctaccagcagctccaacctgtttatcggctttcatacagacaaggaggcgcgcttgcgacgaaaccggagcagcagggtgaagcagggtccaacaaaatggaacagcagcaccaaggcgaggaagctgaagagtgatatggtgtcctggtttctatatctctagttgaatgtttctgtttcatgagacaatctgtttgtattttgttgtaatgacttgtttgcttcggatctgtgtatgttttatgttctgttttgttgctgttgtaatcatgaactgttttgtaaaataaaataaagaatgcttttgaaa

SEQ ID NO: 124119 - DNA, 485 bp, Zea Mays
gtctatcgttctccttcctcctcttggctcctggtcgtactgcttcgaaccctgcagcaccgcaggccgctggagcatcttatcaagaagggacctggcagtggagcatcagattggagcatgttgtcgtcctcttgcccatggcagcgctactgttggaggtggacaatcgagctcccgggcatggcgtgggagcggccgcaaggtccggtcggcactcggcacacgcacacagaacagaagcaagttaaagctcggcggccgtcagccagcatgcagtacacggccaagacaggtccactttaagccagatccaactccaatctctagcaaggcagcaacagaaggtaataaataaatttcccaaatcccaatcccccatcccaagttctcatgtttatttcaacgttgaattccttaatcctggatcatgtcacttgtcgtttgacatttctgagtcataaatgtatgtgtcttttgtcgac

SEQ ID NO: 124120 - DNA, 1565 bp, Zea Mays
gaagtaagcgtggaggttgcccacgtgtcccccggttcctccagaagtagccatacggattcagatcgcggccgcggcgactccccgagcagaagaacccgatcgaacgcggccgcggcggcgactccccgatctcagatccctgctgcgagcgaagggttccattcgagcagagatggcggcggcatgggaggtgctggctgtgttgctcgtcgcggcgcaggtggcgtcagcggcgcaggtcacggcgccagcgttcctgtgggcgcccaaaaactacggattcagctctgatgatgctaaggaggtagtccattaccaaacaatctcaccaaagagcttagctaaatctgttctcgaggaaggtggctggtcaaacttcatgtgctcaagggaggatactcagaataatgttgatgttgccattgtttttattggctcaaagctgcaatcgtcagacatatctaaagataagcaagttgatccagctttagcagacacactgaagctctccttcacacgctcagagttttccatggcattcccctacgtttccacgacagtcgacgagagactagaggactcgttgctatccagctttgccgagaactgcaacaatggtttcggaagaaaccgcatcacctacacagacacgtgtaccggtcaagatctgaagaaataccacaacatggatgccatcaatgacctggtagtgtcaggggtagcgtcaaggagagccaaccacccaagtggacagaccgatgtaatcgtcttctgtagcggcgggttcgagaatccaggcactgcgaaatcagaaggagagctgctttcccagcttgtggactcgctggacttgtcgggagccaaatacacggtcctctatgcgtcccaaccgtctggtttgctggagagcccttccggcctgccgctgggtaggcatctcgcggagaagaagactaacggcacgaaagctgtccagggcgaaaaatgcgatggcgagtgcctcgtcaagtcgagtctcctcgaaggaactttcgttgggatagtgcttctcatcatcctgatatcaggactcatgtgcatgatgggcatcgatactccctcgaggtttgaagctccccaggagtcttgatctctcccttggactgcagaatccgcgggggggttgtgacgagggcacgcggcggcgttgaggggggccggtgttctgttggtgtgcactgtggatatatattgtttagcttcccatttggaagggagtacgccttgtgtattttttttaccgagccaactgtcactcacgatgtgctagaattttttggtgtaatatttgcgtttcgcgcctatggacaactaataagctgaggcattgcagcagataaattcatgtgctgcgtgaggcaggcttgtgttgtgtaccagacgcacagcattgttgcctccagctagtgctttctgtgtgaaataaacctgaaacccagtcccaggccaccgcaccaataaagatgggtactatgcatcaatcaattagaatgaggtcttgcttttgtttgatcagaatcaga

SEQ ID NO: 124121 - DNA, 1554 bp, Zea Mays
gaagtaagcgtggaggttgcccacgtgtcccccggttcctccagaagtagccatacggattcagatcgcggccgcggcgactccccgagcagaagaacccgatcgaacgcggccgcggcggcgactccccgatctcagatccctgctgcgagcgaagcagggttccattcgagcagagatggcggcggcatgggaggtgctggctgtgttgctcgtcgcggcgcaggtggcgtcagcggcgcaggtcacggcgccagcgttcctgtgggcgcccaaaaactacggattcagctctgatgatgctaaggaggtagtccattaccaaacaatctcaccaaagagcttagctaaatctgttctcgaggaaggtggctggtcaaacttcatgtgctcaagggaggatactcagaataatgttgatgttgccattgtttttattggctcaaagctgcaatcgtcagacatatctaaagataagcaagttgatccagctttagcagacacactgaagctctccttcacacgctcagagttttccatggcattcccctacgtttccacgacagtcgacgagagactagaggactcgttgctatccagctttgccgagaactgcaacaatggtttcggaagaaaccgcatcacctacacagacacgtgtaccggtcaagatctgaagaaataccacaacatggatgccatcaatgacctggtagtgtcaggggtagcgtcaaggagagccaaccacccaagtggacagaccgatgtaatcgtcttctgtagcggcgggttcgagaatccaggcactgcgaaatcagaaggagagctgctttcccagcttgtggactcgctggacttgtcgggagccaaatacacggtcctctatgcgtcccaaccgtctggtttgctggagagcccttccggcctgccgctgggtaggcatctcgcggagaagaagactaacggcacgaaagctgtccagggcgaaaaatgcgatggcgagtgcctcgtcaagtcgagtctcctcgaaggaactttcgttgggatagtgcttctcatcatcctgatatcaggactcatgtgcatgatgggcatcgatactccctcgaggtttgaagctccccaggagtcttgatctctcccttggactgcagaatccgcgggggggttgtgacgagggcacgcggcggcgttgaggggggccggtgttctgttggtgtgcactgtggatatatattgtttagcttcccatttggaagggagtacgccttgtgtattttttttaccgagccaactgtcactcacgatgtgctagaattttttggtgtaatatttgcgtttcgcgcctatggacaactaataagctgaggcattgcagcagataaattcatgtgctgcgtgaggcaggcttgtgttgtgtaccagacgcacagcattgttgcctccagctagtgctttctgtgtgaaataaacctgaaacccagtcccaggccaccgcaccaataaagatgggtactatgcatcaatcaattagaatgaggtcttgcttttgtt

SEQ ID NO: 124122 - DNA, 1232 bp, Zea Mays
gaagtaagcgtggaggttgcccacgtgtcccccggttcctccagaagtagccatacggattcagatcgcggccgcggcgactccccgagcagaagaacccgatcgaacgcggccgcggcggcgactccccgatctcagatccctgctgcgagcgaagggttccattcgagcagagatggcggcggcatgggaggtgctggctgtgttgctcgtcgcggcgcaggtggcgtcagcggcgcaggtcacggcgccagcgttcctgtgggcgcccaaaaactacggattcagctctgatgatgctaaggaggtagtccattaccaaacaatctcaccaaagagcttagctaaatctgttctcgaggaaggtggctggtcaaacttcatgtgctcaagggaggatactcagaataatgttgatgttgccattgtttttattggctcaaagctgcaatcgtcagacatatctaaagataagcaagttgatccagctttagcagacacactgaagctctccttcacacgctcagagttttccatggcattcccctacgtttccacgacagtcgacgagagactagaggactcgttgctatccagctttgccgagaactgcaacaatggtttcggaagaaaccgcatcacctacacagacacgtgtaccggtcaagatctgaagaaataccacaacatggatgccatcaatgacctggtagtgtcaggggtagcgtcaaggagagccaaccacccaagtggacagaccgatgtaatcgtcttctgtagcggcgggttcgagaatccaggcactgcgaaatcagaaggttaggttgaatactactgctaattgttgttccacttcctgattgtgttgccgaaagctaaatctctacgacgacgacaacggcggcgatggcaccgcaggagagctgctttcccagcttgtggactcgctggacttgtcgggagccaaatacacggtcctctatgcgtcccaaccgtctggtttgctggagagcccttccggcctgccgctgggtaggcatctcgcggagaagaagactaacggcacgaaagctgtccagggcgaaaaatgcgatggcgagtgcctcgtcaagtcgagtctcctcgaaggaactttcgttgggatagtgcttctcatcatcctgatatcaggactcatgtgcatgatgggcatcgatactccctcgaggtttgaagctccccaggagtcttga

SEQ ID NO: 124123 - DNA, 1467 bp, Zea Mays
cctgcctgccgcctgtccttctcctctcctctcctggagagctgcatgttcatctgaaaagttgacaacgacagacagttcctgaccacagggcgcgatggacgtcccggccgtggcggaccctggaacggagcgaggcgaaggcgcgctgatccagtgcccgtactgcgactcggaggcgatgcacaagctggcgcagatcctcctcccgggcctcgccgccgtctgcgtggacggcaccacgggggacccgttccgcagcccgtccgcggtggccgtggacctccgcaaggagatggtggactacatcacgcagcggagcgacagcttcatcgcggacgcgctgatcgagtcggaggcgaaccaggacgcgcccggggccgaggtgcccgacgaccccttcgagaccgtgtccgtcttcatggacgacttcgccagcaccaagcgcaacatcatcggccacgtctcagggtggctgctcaccgacagccgcgacgacaagatcgacgacttcgtgcaggagatggaggccaccaagttctggccgctggagcgccgggaggccgtcgccgagctcctgctcaagaacgtcgacctcaagaccaggttccactgccccgagaagtacgagaacgaggagcgcctcgaggaccacaaggcgcagtgcagcttccgccccgtcgcctgcgccaacgacggctgccgcgccaaggtctccgtccgctgcgtcaaggaccacgacgccgcctgcgtgtacaagctgctccagtgcgagcagggctgcgacaagcgcctgctcaggcgcgacatggaccgccactgcgtcaccgtctgccccatgaggcccatgaagtgccccttcggctgtgattcctcattccctgaccgtgacctcgagaggcactgcgccgagttccttcagccgcatctgctcatggtccttaaggccatccataagaaaggccggtcggaacaagacctcaaggaccttgctcaaaagctggaaaagtttgatggagatggtaaactggctaaggctctagatgcaagacctcttactaatgttgtcaaggacctcgaagccaagatgaaaggtggacagtcaagttaaaagggctgggtctttcatgcagacagacttcacagaatggataatggcattgtttagtcccacgcgcagcatacatacagagaagaatatgagttttgttttattcttatctcctttacgattttttttcacatttctccctgtctgtcagagttttgttttattcttatctcctttacgatttttttttcttcacatttctccctgtctgtcacaaacaaaccaattgtcagtcagtatgcatagtcgtccgctattgctctgtatcttcagcttttgtatgaggatattatatcatttgttttggtatataaatcaaagaacgggccatgtttccagcaggcttgttctgtacc

SEQ ID NO: 124124 - DNA, 737 bp, Zea Mays
cactatagcaaagcattttaaagttagactatgggttcatgtgtcacaagagtttggttttgaaagtattgttgggaagctgtttgaagctattgcccatggcaagtctgaaagccataacttgcagcacatggtcagaagaatatcagacgagttgactgaaaaggtgttcttgcttgtactggatgatgtctggactaaggaccgaatggagttggaacaatttatggtacttgtgaggagcggtgcatctggaagcaggattttactaactactcgcaatagcgatgttgctgaagcggtggaatcttcatatctgatcaacctgccactcttgtctttgtctgacagctggcaactatttattcaaagctttggtacgacggtggaaggtttggacagagaattcctagatgttgggaatgccattgtaaacaaatgtggtggggtgccactagcaattaaagtaattgcaggtgtcctccatgacaagaaacggatacaagagtggcaggccattagagacagtaatctattcgatgctgagggcaaagagcgtagagtatctgcatgtttgaggttgagctatctgaacttgccctctcatctgaagcagtgcttcacgatttgttcactgtttcctaaaggtcacaagattgacaaggaacgtttgattgaccaatggattgctcacgacatgttcgctagtgcggatgctgttgattacttggagtaca

SEQ ID NO: 124125 - DNA, 717 bp, Zea Mays
acaaacaccctctgcctgcctgcagcctgctcatatcatctcatctgacatctccatgtttatcccctctctccagttctccagctcacaagtttcctggcctcgcttgtatctttgagcgcctcaactctgcagcacatatatcctgtaataagctctgtcttgcatacactagctctagagtctttcaagatgagcaaacagatctgagctccagggacttgtggtacaggatctctctacagcctcttcggtgctcgaagcggtggaacttctggcacaagggacactttacagaaagatgactggtgtcgaagctgccgccatatctgctgtagcatctggaatattaaagattgtgggcaacaagttggcaccactggttataagaaagtatagctcaatcgtgggtgtggaaaaagatctccagaagctccaggtcctagttgaggatataaactcttggctagaaagcgcgggatatcaagcttttggtgatgatgcatcacttagttggttcaaacttcaaacagttgaaagatgttgcttatgctgttgacgatgttgtcgatgagtaccagctgaaggccgagagaaatgatgcttctggtgatggtgattttgtatccagatatatgcgtagaaaaccagaatcgttcatatttcagtgtaaggcagctaagaagatcaaggcaatcaagaagagatttgctgcaa

SEQ ID NO: 124126 - DNA, 981 bp, Zea Mays
acaaacaccctctgcctgcctgcagcctgctcatatcatctcatctgacatctccatgtttatcccctctctccagttctccagctcacaagtttcctggcctcgcttgtatctttgagcgcctcaactctgcagcacatatatcctgtaataagctctgtcttgcatacactagctctagagtctttcaagatgagcaaacagatctgagctccaggtaggtgttctattcatattttctaacgaagaaggcaggttattgctccactaactccccccggcctctgtgctttaatctgttgcaaaattcttagcaaataatcagcctttcttctgtatattctcagggacttgtggtacaggatctctctacagcctcttcggtgctcgaagcggtggtatgtttatatatgcatcaagaactagttcattttttaatgtaatatttctcatataacatgttgtccaatgtcctcgccctaactgttgtctcatatgcgacttcattcctaattacggaaaatacgattttttttgggggggggggggggggactgaaatcagttcagcaatttcaagacaaaggctcagcctactttggacacctattagttacccaggtcagatatcaaatcaaccaacaactgttccgaagcactagtcacagcataaggcacgaaaaggacaagaaaaagcactgcatgaatgaagtagttgcaatatgtagaagccatgttttagtacagtttttttgggtgggcatggggctctctattactccctccattcacttttgatagaatgatagtcctattctcaaaattgagttttccatttttgatagtcctatttgagttgtggtcccaaatctgatataaatggctgtttaggtccccgtgcagagtagctcatctagaaaaaagacttgtgcatgtatatgaaaatatcaataccgagtttttgcaaaaaaaaaaaaaaaca

SEQ ID NO: 124127 - DNA, 1865 bp, Zea Mays
ggtgagttcattttataggaacttctggcacaagggacactttaaggaaagatgaccggtgtcgaagctgccgccatatcttctgtagcatctggaatattaaagatcgtggccaacaagttggcaccactggttacaagaaagtatagctcaatagtgggtgtggaaaaagatctccaagagcttcaggtcctagtagaggatataaactattggctagaaagcgccggatatcaagctttagacgatgatgcatcagttagttggttcaagcagttgaaagatgttgcttatgctgttgatgatgttgtcgatgagtaccagctgaaggccgagagaaacgatgcttctggtgatggtggtttcgtgtccagatatatgtgtagaaaaccagaatcgtttatatttcagtgtaaggcagcaaagaagatcaaggcaatcaagaagagatttgctgcaatcgtgaagcaaagagctgacatcaatataatagctagggtctggatgcgagtggaagctgctgcaactgcctgcagaccaatgcctggggtcctcttcctactccaacttcggccacctgaagacccttcggctgtggggggtgacagagctagggtctggatgtgggtggaagctgctgctacacatgccagaggggttgcggagcctcatattcctccagtcactgactgtgtccgcgtgctcagctcttgtagtgctgcgcgtgtccctgccgaagcttcacatccatatctgtcatggcctgagcagccttccccagtcaatgcggcagttcgcatccctccaggtgcttgccatagatgcatgctacggactccaccggctgcctgaatgcctaggggagctctgctctctacgccagctcagaatcagcgattgcccgaggctggcttgccttccccaatccatgtccggcctcacctcccttcaacaactccagatcatcgagtgccagggcctcgcgtccttaccgagggggatgatgagcagcctcgcctcccttgaaaacctggtcgtcgatggctgcccggggatcaaatccttgcctcaagacacaaagggtctcaccactctgatggggttgcggatccgtaggtgccctgatctggagaggcgttgtgaggcaggacagggggaggactggcacctcatctcccacatccctactttgatgattgggttatcagcggcctgcatcatctggtaccttaaccaagggtaaaacaagcaaaggagcggggaaatgccttgctctaatgctgggagaaggggggggggggggattcaacaaaaagatcccggatttcagccgacgagctgggcgacagagaagagggagccgcatgtggctctttatgcatgacatagctgccatgttatccgattgaagcttcctttcaaccatgtccgtgctgagccgcccggccccgggcatggtgcagtgcttcgacgaggccaccaagattgaggtcaaggaccttgtcaaccgctatcctcgtcgccgaccccatgcgccacgaacacaagaagtttggcggctgtggtgcccgcgccaggttccagaagtcctaccgttgagtgatggcctgccgaattttgcgaaagatggctgtgcttgttggtggtttcgttttctgtccatggagctgcttatctggctgctgctgctgctgctttaccttaatgtgcagttatgaagactagtaattagtctctggagtatgttttgctggtcagtctcccgttcaagtgtgttttgctgttataggttatagttgcgactggaatgccttctctgctctaattcatatttcataggcctaatacattgttgggaaagaaag

SEQ ID NO: 124128 - DNA, 310 bp, Zea Mays
cgtcataccactttggcccctacagttaatttgtgtctgcatccaactaactagttggcattctcttacattgtgccccaacgatgcatcagaggattttggttgctcgttgaggggaaatcctcgttggaatggaagtgtgatcataggttcaattccaataggtgctcctagttcggttgcttctttaactaaatccatgctaacattgagtcaagatgacaccgatagtgcatcttcctgctcgctgaaattctttgatcttctctgatttggtctctcggttggtgctgctaccatattctgtgac

SEQ ID NO: 124129 - DNA, 530 bp, Zea Mays
aaagcaaattccttgcactattgaaatatcgattcagaagaatgtctcagaaacgcaacctttggacaaagctttggcttgtccgtgtcttattttcttaacattatcacatcacagtcatgacagagttagtagcaacgtgacaacatcccactcttaagtaggagtactaaccagagtagcaccaatgcaaggaccaccccaacggctcagccagccaatccctgtgtggttgtgtaaggacaccacagccattgccttcaaaaaggactgactagtctatcacaaccaacttattgtcatgagaataccacgtataaccataggctttcttgcacaaaagattcagcagggggaacactgtcacttcgctttcaaaacctatccttgttcacttcttgttgtccatgtcgattttgctatacttttccatggtttctcattgtccctaactaaaatcgttgggtaaagcggcagctgcacttgaacttgggatgcgggcagagcacttgctgtaatcctcaaggaac

SEQ ID NO: 124130 - DNA, 1583 bp, Zea Mays
cgggcacgcacgtatatagcatagcatagcatagctgcagggtgcaggctgcagagagcgagctgcagcgccatgggcaggccgccgtgctgcgacaaggaggggatcaagaaggggccatggacgccggaggaggacatcatcctggtgtcctacatccaggagcacggcccgggcaactggcgctccgtgcccatcaacacgggcctcatgcgctgcagcaagagctgccgcctccgctggaccaactacctccgccccggcatccggcgcggcaacttcaccccgcacgaggaagccatcatcgtccacctccagtccttgctcggcaacaggtgggccgccattgcttcttacctcccgcagagaaccgacaacgacatcaagaactactggaacacccacctcaagaagaagctcaagaagcagcaggccatcggcgccatcttcgcaccacccgactcctcctcgtcgtcctcctccatcgtagtaccacccgccgctaccaccaccaccaccaccgtcgaccaccaccaccgtgacatgctcggcgccaacctcctcgtctcctccaaggacacctactactacgcgcgcccaccagccgaggccgccgccgtcgcccgccgctcgccgttcgccgccgacggcgacagctcctcgtcgtcgtacgcctccagcatggacaacatatccaggctactcaccggcttcatgaagcagcagcacgacgacgctgctgctgctgccgacaccaagcccccggccccggccgcccaagtcaacagcccgccgcctgctgcttttctgtcgccgtcgttccaccaccacatgtccgccggcaccgggagtggcacgccacctgcagcttcagcggcctacttcaacgacatgatgccgccgccgccgccgcagcagcaggcggcgctgatgggcgggcacggcgactacgatgacgggcccagcagccggcagcacctgcagccgtccccgctgtctcccatcgagaagtggctgttcgaagaggctgccgagcaggtcggcgacctcatggatctgtccgaagactgctgctcgtcggttccaatgatgttctagatcaaaaaaaaaaaacaaagaagagaagagatcaataataatatactattatacaatacatatgacagagcccaatatacacacaccagttattagttaggttgttgtaattttctgcaagttttacttttttttttgtcctagaaggaagttatatgcttacatgtatacttattatgttacatatatatattcatgcatgagagagaaaaaaacatacatacatatatataccggtcaaagtcaaacacccctgtgaaaaggtcatcttcctttcaggtgtatacatacatgcaaacgttactagctagcttgtggtagatttgacactgggcaatcaaaaagccagaagaataagagacagcaacaggctagctactaggaataagagtaactgaatgacatgtgtagtaagcatgtcagcatgatgtaaccatggtcatctgtagttcatacttttcttgttatatatatctatatatata

SEQ ID NO: 124131 - DNA, 237 bp, Zea Mays
atggcgttggggaagaagaaaattaccaaagcagaagaagccgcgcaacaggacgagcctcacctgcgcctcgccgcgccgagggggaggggggtcgatcggtcgggggccgttggccagatctgcggttgcgacgacgcgaggaggcgtgaaggtggtgggcactggccactggggcttccgctccgcgtcgaatcccgcaggaagaagcctgcctgcctgggtgatgaatactaa

SEQ ID NO: 124132 - DNA, 1558 bp, Zea Mays
cgagcactgcacgaggacccacctgccagttgctagcacgattccatttcgacctcgccgcgaacgccagctaccggttcgcgctcgcgccacagcgccgaacgcatggcgctcctcctcctcctcgtcctgctccgctccgccgccagcgctggcgcgggcgctgaaccgcatcgctccccggccactgccctcttcgtcctgggcgactccacggtcggctgcgccgcggcgacggcgagcagcattctgtcgctcaacctgaccaccaccaccaccacgctgccgtcctcgctctccggcgagccgtgcctcttcttccacgaggcgcggctccgcgtcccggacctcctcgcggccaagatgggcctcccttcgccgcccccgatctccgcgctcaacggcacagcgtccgccgccgcgcgcggcgtcaacttcggcggcggcggcgggcagctgctgttctacggaggcggaggcggggtgcgcgggccggcgtccgtcttcctcacgggcgccgtcgggcagcaggtccgcctcgcctccgagacgctgcagctgctgcggctcgaggccgccgcgccgggggagccgtcgtcctcgcccgccgcagtgttcgtcctgtccttcggcgccgacgcctacgcgcgcctgctcgcgcgcgggcccgccgaggccgccgccgccgcgcccaagcacggccgccgcgggctcgcccgcctcctcgccgaccgcgtcgcgcgcgcagtctcggagctgtacgaggccggcgcgaggagggtggcggtgatgggggtgccgccgctggggtgcgcgccgcgcgtcgtgtgggagcggtcgtcccccgtccgcgacggcggcgcaggatgcgtcgaggaggcgaacgagctgatccaagggtacaacggcaggctcgcggcgaggctggacgagctgcggctggcgctggccggcgccgacgttgtgttctgcgacgtgtacaaggggatgatggagatcatctccaacccgaccacggttcgaggagacgagggaggcatgctgcgggctggggcccatgagggccacggtgggctgcgtcagcaaggagatggcgtgcggcgcgccggagcgccacgtgtggtgggacatctacagccccacggaggccgcggatgccctcgtgaccaactggtcctggtcgtcggacggctccggcgccaccagcatctgcggccccatctctctgcagcagctggctgcagtgtcgccgtcgccgccgggggcgtaggaacaaaccactcgttgtatttagttcactcgtattacccgccggagaccactcttatttaggaatctcttggcctatgactacgggcggtgcgttaagagaaccgtcaatggatatattgtttttcaatggcctttagcactgatggctccgaaaaaaagctagtaagtaggtttccaatcgtcaatgtatggtttctctgtacttgtggactctaagtcgtctgagcgatgcggttctattgcccggagaacagtaggtaaaaggagacacggacgttatttgaac

SEQ ID NO: 124133 - DNA, 1514 bp, Zea Mays
cgttcatgcatgaccatggagagatctcaaccgcagcaccagcagtctcctccgtcgccgtcgtcctcctcgtcctgcgtctccgcggacaccgtcctcgtccctccgggaaagaggcggcggagggcggcgacagccaaggccaataagagggcccgcaaggacccctctgatcctcctcccgccgccgggaagaggagctccgtatacagaggagtcaccaggcacaggtggacgggcaggttcgaggcgcatctctgggacaagcactgcctcgccgcgctccacaacaagaagaaaggcaggcaaggtgtatctgcaggggcgtacgacggcgaggaggcagcggctcgtgcctatgaccttgcagctctcaagtactggggtcctgaggctctgctcaacttccctgtggaggattactccagcgagatgccggagatggaggcagcgtcccgggaggagtacctggcctccctccgccgcaggagcagcggcttctccaggggggtctccaagtacagaggcgtcgccagacactcaagaagaggcagccaaggcctatgatcttgcggccatcgaataccgaggtgccaatgctgtaaccaacttcgacatcagctgctacctggaccacccactgttcctggcgcagctccagcaggagcagccacaggtggtgccagcgctcgaccaagaacctcaggctgatcagagagaacctgaaaccacagcccaagagcctgtgtcaagccaagccaagacaccggcggatgacaatgcagagcctgatgacatcgcggagcccctcatcacggtcgacaacagcgtcgaggagagcttatggagtccttgcatggattatgagctagacaccatgtcgagatctaactttggcagctcgatcaacctgagcgagtggttcactgacgcagacttcgacagcgacttgggatgcctgttcgacgggcgctctgcagttgatggaggaagcaagggtggcgtaggtgtggcggatttcagtttgtttgaagcaggtgatggtcagctgaaggatgttctttcggatatggaagaggggatacaacctccaacgataatcagtgtgtgcaattgattctgagacctatgcgtggcgtgcgacaagtgtcctgtctttgggtatacttggtttgtccaatgccacggtgccactgctgcgagtcagctgaacttcttgtagaaagcacatggcagcttggcattagacaagtgtgttggtgttccttaattctttggatatgctttaggcattgactaaccttaagggttcgtcactgtctcgcttagcttagattagactaatcacatccttgaatctgaagtagttgtgcagtatcacagtttcacatggcaattctgccaatgcagcatagatttgttcgtttgaacagctgtaactgtaaccctatagctccagattaaggaacagtttgtttttcatccatacatataacacgctttcagaagcagac

SEQ ID NO: 124134 - DNA, 1586 bp, Zea Mays
agtccactccaccaccgttcatgcatgaccatggagagatctcaaccgcagcaccagcagtctcctccgtcgccgtcgtcctcctcgtcctgcgtctccgcggacaccgtcctcgtccctccgggaaagaggcggcggagggcggcgacagccaaggccaataagagggcccgcaaggacccctctgatcctcctcccgccgccgggaagaggagctccgtatacagaggagtcaccaggcacaggtggacgggcaggttcgaggcgcatctctgggacaagcactgcctcgccgcgctccacaacaagaagaaaggcaggcaagtctatctgggggcgtacgacggcgaggaggcagcggctcgtgcctatgaccttgcagctctcaagtactggggtcctgaggctctgctcaacttccctgtggaggattactccagcgagatgccggagatggaggcagcgtcccgggaggagtacctggcctccctccgccgcaggagcagcggcttctccaggggggtctccaagtacagaggcgtcgccaggcatcaccacaacgggagatgggaggcacggatcgggcgagttttagggaacaagtacctctacttgggaacattcgacactcaagaagaggcagccaaggcctatgatcttgcggccatcgaataccgaggtgccaatgctgtaaccaacttcgacatcagctgctacctggaccacccactgttcctggcgcagctccagcaggagcagccacaggtggtgccagcgctcgaccaagaacctcaggctgatcagagagaacctgaaaccacagcccaagagcctgtgtcaagccaagccaagacaccggcggatgacaatgcagagcctgatgacatcgcggagcccctcatcacggtcgacaacagcgtcgaggagagcttatggagtccttgcatggattatgagctagacaccatgtcgagatctaactttggcagctcgatcaacctgagcgagtggttcactgacgcagacttcgacagcgacttgggatgcctgttcgacgggcgctctgcagttgatggaggaagcaagggtggcgtaggtgtggcggatttcagtttgtttgaagcaggtgatggtcagctgaaggatgttctttcggatatggaagaggggatacaacctccaacgataatcagtgtgtgcaattgattctgagacctatgcgtggcgtgcgacaagtgtcctgtctttgggtatacttggtttgtccaatgccacggtgccactgctgcgagtcagctgaacttcttgtagaaagcacatggcagcttggcattagacaagtgtgttggtgttccttaattctttggatatgctttaggcattgactaaccttaagggttcgtcactgtctcgcttagcttagattagactaatcacatccttgaatctgaagtagttgtgcagtatcacagtttcacatggcaattctgccaatgcagcatagatttgttcgtttgaacagctgtaactgtaaccctatagctccagattaaggaacagtttgtttttcatccatacatataaca

SEQ ID NO: 124135 - DNA, 2543 bp, Zea Mays
aacagcataacatagaggaaaacatccacctcccacgaaaaccaccagcacgctgcacgctgcacgccgccgcgccgcacttctccccatccggcgccttctctatcctcgccgctgaagacgtcgtgccgtgcgtagctagcagtgctgacgcgcgctcgtcgaataaggattggatttggcttttcgtccccccaccgcctcctccggtccttcccctgccactccctattctcctcgtccgaagcggcaagctcaagctcaggagctcgcaaccgaggagtaccaatttctctagggatttggcgtatccaccagggagcaggaatagggtgaggcttcctgatggcgggggcgaaagcggatgtagacgcggaaacaggagacggcggctccttcagcgagcagaggctgattgataagctcaaaaggctcaacaactcagccgctagcatccagactctttcgcgttggtgcatttttcaccgcaagaaggccaaaagggttgtagacacatgggaaaaacagtttactagtgcaagggaggataagaaaatatcattcctatatctatcaaatgatatcctgcaaaacagtaaacgcaagggagcagactatgtggatgagttctggagggttctacctagatccctgaagcatgtctatgaaaaaggaggaggagaagggaagaatcaggtggcgagattgatatcaatctgggatgaccgtaaagtttttgggacccgtattgaaagtatgaaaaatggcattcttggtgacaaccctcctatattggataacaatgggaatagtttaaatcctagctctaatcccacttcaaattctaaagctgcacggaaggattctggtacaatagtaaaaaaactcactgttggtggtatgcctgaaaagatcgtgtctgcataccaattagtgcttgatcagcattttgatgaagacactgctttaaacaaatgtaagactactttgggccttttggagaggataaataaagatattaatgattctatcatcaacggtaatcagccagcattgtcattgatctctgaccttcaagaacaggaaatgacccttaaacattgtatcaaacaactcgaaagtgtagatatggcgaggatatccctggtcaatcaattgaaagaagctctcaacgaacaggagtcgaaatcattagttcttcgcgatcaattgcaagttgctcaaacagaggctcaacgtgtcatccaacttaggaaacaactggggggtgcccttgtcacgagcgtcacacattctacttctagtccgctcatgattactccaccagaacaaacttcggctataatgcagggttcagaagtaagatcgacacatccccagtcacaaccactgaatcctgcagcttcgcttccccctacagtcagtgcagtgggtgatgagtccaagagaacggcggcagctatggcggataagcttgcatctttgtcagcacctgtgcaggtgctgacctccattctctcatcttttgctgctgagcaagctgcttccataaatggtggatcatcttctggggaattctctggaggaccaccaggtttccacattgataagaggcctaggcttgagaaaacaggtcaggcctctgacatgggtgctcctcctcccttttttgggcaagcggcacaggtgcaacaacagattggaggcacgcatccaccagctccagctccaggctcattcccaccacctccaccgccattgccgtctctactgccaccgctcctgcaacagttcggtcaaaatactggagggatgattggaatgggaggacctttcgggatgatggctggatctatgccacctccgcctccattgtccaacattctgccggcaggttttccgcgaccaagtgggccacctcctccacctccacttccaccagctcagagccagccccagcagcagtctcctcaggcggcacagcaatcaccaacatcaactggattctttcagtcatcgggcatggggttctttccgcctgcgcaggtgcagcaatctccatctgcccaacgccagtgactcaacggtggctctggcattcatgggcgtaaaggcagcggcgcccttgtgtgttaactttgtacactgaacaatatttcactctgtgtcgagcttaaacgtggctggctggtcctgcaagcgaggcagggccaatggccacgaattagagagattgtagaataggcatgcgtcctctgctatgtataactattcacttttttttgttttgttttgtttgtctgagtagttttaacttttcctttttcccgtttgcattgatcccccgaggcagaagaaagtgactttggaaagaaaaaaaaaactggtgtttgcccaactgatggaaacagttttaggactgaaacagctgtggaactaccggtcatagtctcagatatgataatgaactgcaaatatttcccatgctgtttaaatatgttgattcttattattgaagctacgcactatagctaggaaggaag

SEQ ID NO: 124136 - DNA, 1900 bp, Zea Mays
ttgatgggtgctctcgtctggtggcaagccacacacgacacggcacgggcaccacatcccccaaggcaaggcgtacgtggcacgcgcgcgtccatctccacaacgacgaccttcatggcggtgccggcctccgcctccgcctccgcgtgcgcgcgcgccggcccgccgcagccccgccaccgcgcgcgtagtgccgccgcgaccgcggcggcgttcttgctccgccgccaccagcgaccgccacggcagataataaacatcgtcgacgaccgccgtgccagctccgatctccgctgccggcgacggctcctcacggcgcgaggcgagcgcccgtcccacgacgacgacgaggacgaggacgaggacgaggagcagacgtcgtctgctggtggtggttacgggtccttcggcgcggcggtggcgctgttcaaccgcggcgagtaccacgcgtgccacgacgtggtggaggagctgtggtacagcgccgaggaccccgcccggacgctcctccacggcctcctccagtgcgccgtcggcttccaccacctcttcaaccagaaccaccgcggcgcgatgatggagctcggcgagggcctctgcaagctccgtaagctgcagctagacggcgacggcgacaacgacgggggcggccctttctcccggttccgggacgagatcgccgctgtgctgcagttcctctaccgcacccagaaggagctcgccgcatgtacgtacatccatcgactaccgtcacttcgttccttccttcttcctcgtcgtcgacgtgtgacgtgctaaactaaagctcaccccggtctcggtctgcacatgtaaaaataaatctctgttctttcttttcttctaaattccattcgttcatcaggcaccgatgagctgtgcttaaccatggacggctcgccgagctcgtaccagctgctcggcaacttcgccgccggccagcaactgtaccggctggaactgctggaagcggaggaggacggggcttgttccagcatactgttctctgcgcccaacggcggcggcggcatcgctgcgcaaggagcagctcctcgcccccagagagtgaagcttccaacgctgcgtgccacggagcaacatctggtagcgcttcagtgtacatacgaatatacgtagctataccctagcattcattcatgcgggtccacctgcctgcaaacggcgaagtcataaggataacgcttaataattttactatgtgcgtgcccttgcgttgctatggtagcttaaaaattggttcaaaatagtgatgcaagaataacaggtgcacgtgacaagcaatagtcaaatactcgaatgatgttgatccaagaataactgtaacattaacacttaatacactgaggtgccagcatacgaagtgaaaggtcaaacaaagcattcatgaacaaattcctaagtatagatctttcatcttcatatcctattatgctatataaaagtggtccccttttcagatcaaacaagcacaaatgtacatcttaacaatgcattatacactgaagtggtagcatacgaagtgaaaggtcaaacaaagcattcaagaacaaattcctaagtacagatctttcatcttcatgtccgattatgccacctaaaagtggtctccttttcagatgaaacaagcactctgagagtgatgctagttctttcgggaagcggtaaagctttgattttggagcctggctaccaaattcgagagcttgtcctttactctttcatcaactgagatcctcatatcaatagcatcagaggcagtccgcgcatgcaatatagcttttttaccaatgataactgatgcaacatcctcctgcacacttgctagatatgcagacaaaccatcaattgtatcaatgtggag

SEQ ID NO: 124137 - DNA, 820 bp, Zea Mays
ccgatccgccagtagatcgcactctcgatgaggtgtgtgcaatgctccatcgtcgccatacatgacgatcgatcgccacgtgccctgtgcagaaccaccgcggcgcgatgatggagctcggcgagggcctctgcaagctccgtaagctgcagctagacggcgacggcgacaacgacgggggcggccctttctcccggttccgggacgagatcgccgctgtgctgcagttcctctaccgcacccagaaggagctcgccgcatgcaccgatgagctgtgcttaaccatggacggctcgccgagctcgtaccagctgctcggcaacttcgccgccggccagcaactgtaccggctggaactgctggaagcggaggaggacggggcttgttccagcatactgttctctgcgcccaacggcggcggcggcatcgctgcgcaaggagcagctcctcgcccccagagagtgaagcttccaacgctgcgtgccacggagcaacatctggtagcgcttcagtgtacatacgaatatacgtagctataccctagcattcattcatgcgggtccacctgcctgcaaacggcgaagtcataaggataacgcttaataattttactatgtgcgtgcccttgcgttgctatggtagcttaaaaattggttcaaaatagtgatgcaagaataacaggtgcacgtgacaagcaatagtcaaatactcgaatgatgttgatccaagaataactgtaacattaacacttaatacactgaggtgccagcatacgaagtgaaaggtcaaacaaagcattcatgaacaaattcctaagtat

SEQ ID NO: 124138 - DNA, 1172 bp, Zea Mays
gccaatgattgatgggtgctctcgtctggtggcaagccacacacgacacggcacgggcaccacatcccccaaggcaaggcgtacgtggcacgcgcgcgtccatctccacaacgacgaccttcatggcggtgccggcctccgcctccgcctccgcgtgcgcgcgcgccggcccgccgcagccccgccaccgcgcgcgtagtgccgccgcgaccgcggcggcgttcttgctccgccgccaccagcgaccgccacggcagataataaacatcgtcgacgaccgccgtgccagctccgatctccgctgccggcgacggctcctcacggcgcgaggcgagcgcccgtcccacgacgacgacgaggacgaggacgaggacgaggagcagacgtcgtctgctggtggtggttacgggtccttcggcgcggcggtggcgctgttcaaccgcggcgagtaccacgcgtgccacgacgtggtggaggagctgtggtacagcgccgaggaccccgcccggacgctcctccacggcctcctccagtgcgccgtcggcttccaccacctcttcaaccagaaccaccgcggcgcgatgatggagctcggcgagggcctctgcaagctccgtaagctgcagctagacggcgacggcgacaacgacgggggcggccctttctcccggttccgggacgagatcgccgctgtgctgcagttcctctaccgcacccagaaggagctcgccgcatgcaccgatgagctgtgcttaaccatggacggctcgccgagctcgtaccagctgctcggcaacttcgccgccggccagcaactgtaccggctggaactgctggaagcggaggaggacggggcttgttccagcatactgttctctgcgcccaacggcggcggcggcatcgctgcgcaaggagcagctcctcgcccccagagagtgaagcttccaacgctgcgtgccacggagcaacatctggtagcgcttcagtgtacatacgaatatacgtagctataccctagcattcattcatgcgggtccacctgcctgcaaacggcgaagtcataaggataacgcttaataattttactatgtgcgtgcccttgcgttgctatggtagcttaaaaattggttcaaaatagtgatgcaagaataacaggtgcacgtgacaagcaa

SEQ ID NO: 124139 - DNA, 1019 bp, Zea Mays
gccaatgattgatgggtgctctcgtctggtggcaagccacacacgacacggcacgggcaccacatcccccaaggcaaggcgtacgtggcacgcgcgcgtccatctccacaacgacgaccttcatggcggtgccggcctccgcctccgcctccgcgtgcgcgcgcgccggcccgccgcagccccgccaccgcgcgcgtagtgccgccgcgaccgcggcggcgttcttgctccgccgccaccagcgaccgccacggcagataataaacatcgtcgacgaccgccgtgccagctccgatctccgctgccggcgacggctcctcacggcgcgaggcgagcgcccgtcccacgacgacgacgaggacgaggacgaggacgaggagcagacgtcgtctgctggtggtggttacgggtccttcggcgcggcggtggcgctgttcaaccgcggcgagtaccacgcgtgccacgacgtggtggaggagctgtggtacagcgccgaggaccccgcccggacgctcctccacggcctcctccagtgcgccgtcggcttccaccacctcttcaaccaggttctttccttccattcctcctccagttaattcccttgttaatttcacacatctcacaccgatccgccagtagatcgcactctcgatgaggtgtgtgcaatgctccatcgtcgccatacatgacgatcgatcgccacgtgccctgtgcagaaccaccgcggcgcgatgatggagctcggcgagggcctctgcaagctccgtaagctgcagctagacggcgacggcgacaacgacgggggcggccctttctcccggttccgggacgagatcgccgctgtgctgcagttcctctaccgcacccagaaggagctcgccgcatgtacgtacatccatcgactaccgtcacttcgttccttccttcttcctcgtcgtcgacgtgtgacgtgctaaactaaagctcaccccggtctcggtctgcacatgtaaaaataaatctctgttctttcttttctt

SEQ ID NO: 124140 - DNA, 1340 bp, Zea Mays
agttaggcctcccatgttttcttcacaaaacctgtcgaggaaacgccttcgcaaaacccccaaaccccagcaggcatcctctcttcctctcctctccaatctccattgcagcagcactgcagcggcgggtgcgggtggcatggctatggcgtccgcgctgccgctcctcctcgcgccgcgcgccgtctttgcgtccgcggggccgtcttcgcctcatctccgctcccgccgcctcgcgctgcgtcttcctccccctccccgacccgccgccctctccgcgccaccagccgccgtgcagccgcgcgaggcccggcgcgtccagccgccccgcgccgcctcctgctgccaagatcccgctccggccgcgggaggaggcgccagggactggcggatgttcttagcatggtacctgatggctctggacaagaacccgattgtgactaaggcggtcacttccgctgccctaactctggccggggacctcatctgtcagcttgttatcgatcgagttccagaacttgatttgaggagaacatttgtattcacatttttgggccttgcccttgtggggccaactttacatgtctggtacttgtatttgagcaaattagtgacaatcagtggggcatcaggtgccattgctcgccttatacttgatcagttcattttctctcccattttcattggcgtctttatgagcttactagtcaccttggagggaaagccctctcttgtggtgccaaagcttaagcaggaatggttatcatcagtgttggcgaattggcaattatggataccatttcagtttttgaatttttacttcgttcctcagaagtttcaggtccttggtgctaattttgtagcccttgcatggaatgtgattttatcatttaaagctcacaaggaagttatcgcgaaataggtatgaaggagcgcagtgaactcccccggtcggtccaggatagggataggatagtggcagctgaagctgtagggcttgtaaattgtcgccatgtgggactggagtggatcattctgatcagtagtcaacacaacactgaatggatgattgtgatggacatgcctgtgtgatctcttttgtgcatgctacaccaatacgtgtttggccagcatgtatgcctggacatgtgtgttactatttgtgctgtgatgggttgttcgagatctaggaaacacattgggttgttgatatctttaggccctgtgtggaagcgtctattttttttaagaaactggtttatagaaattgtggtggttctaaacataatagtttataactcagttcacttaaactactaaactttagtcacttttgtttc

SEQ ID NO: 124141 - DNA, 2512 bp, Zea Mays
ggctactaattatttcctgttcctactaattgttatcgtatgagaaatttcatagataagtatatctgcgataatgcaggcacacatctccctttatgcttactttatgccaggttgttcatttcagtttcatgttcatttagtaatacataagaacggaatcttttgcacctcaattccactacctatgtcatgtatagactatagatgttacaaatttatgatctgtttacgaggtttagctgatgaggcatatatgttgcaatttactttgtcaaaccacatatgacatatgttctcataggcctgtggaactaaatgtgtcaggtgttttctctcaaacatattgaaactgatgcgcattgtatgatgctacattgctacacaccatggaagtagttgcgatagtggactggcattcaaagggttttgtaggttaagggatttgttgtacttgcatcctgcacagctgcactataataagatgtgtttgtactgcaaacagtttgtactaatttgtagttcaactttttttctatcaagtctaatggagagataagattcgccttaacctccttgtccactggctaatgtttctaggctttaccttatcttttctgccaccccttaaagcaaccttgtggacctgttctagaagtcagacccttaaagcagcgcgcgtgcaatggccaccactatctgaatttggcgctcaaccatgctgttctgttgaggcgattaaggagcggagaagtgccgctgaatacctttgtcagagcagtaggtggtgaactccatggcgatgaactctccacggttgtcagtgtgaagcacctggaggttgtggccgctctccttctctgcagctgcctggacttgcttgatggcatccgctgctgtccctttgcttggaagtgcccacatgaatcaggaggtatcgtccactaggagcaagaagtagcatcacttgcctggagtcgctggtgtcatggggccgcacaaatcactgtggatgagcttgagctgttcttgtgtgcggtatagggcttggcaagggaatgaacgcctcctctgctttgtggccacacaagtgtcacacagctgtttaacgtgaccgaccagtggaagctcacacaccatcttctctttccacaacttttgcagatcctagaaatggagatagctgaacagctcatgccaacgctaggcttcatcatctcgacgtgtggcgaggtagagtggccgaaccacctctagctctaggtggagtacatagagacggttgaggccttggctggccttggcgagtagactcccgcgtcggtcccaaattcagagaatttcacggtcgatctccacccttgagccaccattgtccagttttttaggctaatgatggaatttcgcagcgccatgatttagtagacgttgtggagcaccctttgctcgtcggtcttggtcgcgaacacaggctgcttgtagttccataactaggcaatgacattacttgatacagcagcataaagcataacaaactcaacaactaaagagcatattctaaccagtaaccactgaagtgcctagaagataagaagctggaatcagctttgacaaagtaaagataactagagagaagcactttagataactattgccggacttgttgtaacccaacaaagtcaaaccttttgcagtttaacatgatcctgattgatgccaaagatacttgttttgcgacaaggtctaaaggggacggatccggtcaaaaaaatacattgttcattctggattatatttttgggatggctcccagcactgtcatgcagtgtggaactgaacttaattccccccccccccccctgaagtgtttaatgaagactttgtttttgaacttttcagagtatgggcaatgtttgtttgggattacaatctagccggattatataatctaacttattttgaacaaattaacacttcgttcaaaaataagttgattatataatctgggcaaattataatccgaaacaaacacccccttagtagctgtagctcagtcatcaacaagcagttactgatctcttggttctttcgaactgtcttattaggtatgaaggagcgcagtgaactcccccggtcggtccaggatagggataggatagtggcagctgaagctgtagggcttgtaaattgtcgccatgtgggactggagtggatcattctgatcagtagtcaacacaacactgaatggatgattgtgatggacatgcctgtgtgatctcttttgtgcatgctacaccaatacgtgtttggccagcatgtatgcctggacatgtgtgttactatttgtgctgtgatgggttgttcgagatctaggaaacacattgggttgttgatatctttaggccctgtgtggaagcgtctattttttttaagaaactggtttatagaaattgtggtggttctaaacataatagtttataactcagttcacttaaactactaaactttagtc

SEQ ID NO: 124142 - DNA, 1653 bp, Zea Mays
accgcaccggcgccaccccacccgccggctcagagcgggggcccggccacccgaatcacacagatcggaacgccggaggaggagcaacgcgggcgcggagaggcccgccagcgaaggcgcaggtaaccgcaaccctcctcctcctcctcctcctcctccgtgcaagctctgggttcccggatccgataccaccggcctctcggcgagtgtgtaatccagcgagcgagcgctcggttttagccgtgagagcgggagatgagtgctctgaagaaatccgacaagaaagccgccctcgacttcgcggcatggagcttcaatgtcaccacgtcggtcggactcatcatggtcaacaaggcgttgatggctacgtatggattcagttttgccacgacattaactgggcttcattttgtgaccactaccttgatgactattgtatttcgatggttaggcctgagccagccatcccacttacccctagcagatctagttaaatttgtgatattttcgaacttgtcaattgttgggatgaatgtgagcttgatgtggaactctgtgggcttttatcagatagcaaagctgtgcatgatacctgcatcatgtcttctggaggttgtctttgatcatgtacattattcccgggacacaaagctgagcataatggttgtgcttataggagttgcagtctgcacagttactgatgtcagtgtgaatgcaagaggtctaatcgcggctgttatagctgtttggagcacagctttgcaacaatattatgtccactttctccaacgcaagtactctctgaactcattcaacctgctgggccacactgctccagcccaagctgggtcactcctgctagtgggaccatttgcagattacttgttgacaggcaaaagggtggatcacttcagtttctcatcgcttgctctgtttttcctggcactctcatgcttcatcgccattggtgttaatctgagccaattcatctgtattgggcgcttctctgctgtatccttccaagtcctaggccacatgaagaccgtacttgttctgtcccttgggttcctattctttggcaaggagggcctgaatcttcaggtagtccttgggatggttctggccgttcttggaatgatatggtacgggaacgcatctgccaaaccaggcggcaaagagcggcgcagcgtcctaccgctgaggtctgcaagtctcaagggaagttcagaagaaaagggtggtgccgagaaatagtcttgctctctctgactgccaacttgaatggggagttttccgttccaaggttgaatttctggtgaggtgacgtgaagtaccacatattgggaactcttgcctaatgtttgacgcagaggacaaactcgttccatctagaaactcaggatcgttatagttacaggtatactgtaaaggttcatttttttttggcgctctgaatcatttgcagtgaggggaaagacagacatggttgttacgagtcttcaagacagtttttttatcgaatatataatgcagttgtttgaggaacatgctcctatatttttcgtggtgatgtactgtaggatgttttgatttgcagtaagatattaatgaaagtataggactgggtttcctgaaatgaatttgatttaaatc

SEQ ID NO: 124143 - DNA, 1630 bp, Zea Mays
aaacgaaaacgagccagccgggcaaacaacactcacatcttacaccagccgcactcccgtgtcctcctctccgagacgagacggacgggacggcaggcaccaccgcaccggcgccaccccacccgccggctcagagcgggggcccggccacccgaatcacacagatcggaacgccggaggaggagcaacgcgggcgcggagaggcccgccagcgaaggcgcagtgcaagctctgggttcccggatccgataccaccggcctctcggcgagtgtgtaatccagcgagcgagcgctcggttttagccgtgagagcgggagatgagtgctctgaagaaatccgacaagaaagccgccctcgacttcgcggcatggagcttcaatgtcaccacgtcggtcggactcatcatggtcaacaaggcgttgatggctacgtatggattcagttttgccacgacattaactgggcttcattttgtgaccactaccttgatgactattgtatttcgatggttaggcctgagccagccatcccacttacccctagcagatctagttaaatttgtgatattttcgaacttgtcaattgttgggatgaatgtgagcttgatgtggaactctgtgggcttttatcagatagcaaagctgtgcatgatacctgcatcatgtcttctggaggttgtctttgatcatgtacattattcccgggacacaaagctgagcataatggttgtgcttataggagttgcagtctgcacagttactgatgtcagtgtgaatgcaagaggtctaatcgcggctgttatagctgtttggagcacagctttgcaacaatattatgtccactttctccaacgcaagtactctctgaactcattcaacctgctgggccacactgctccagcccaagctgggtcactcctgctagtgggaccatttgcagattacttgttgacaggcaaaagggtggatcacttcagtttctcatcgcttgctctgtttttcctggcactctcatgcttcatcgccattggtgttaatctgagccaattcatctgtattgggcgcttctctgctgtatccttccaagtcctaggccacatgaagaccgtacttgttctgtcccttgggttcctattctttggcaaggagggcctgaatcttcaggtagtccttgggatggttctggccgttcttggaatgatatggtacgggaacgcatctgccaaaccaggcggcaaagagcggcgcagcgtcctaccgctgaggtctgcaagtctcaagggaagttcagaagaaaagggtggtgccgagaaatagtcttgctctctctgactgccaacttgaatggggagttttccgttccaaggttgaatttctggtgaggtgacgtgaagtaccacatattgggaactcttgcctaatgtttgacgcagaggacaaactcgttccatctagaaactcaggatcgttatagttacaggtatactgtaaaggttcatttttttttggcgctctgaatcatttgcagtgaggggaaagacagacatggttgttacgagtcttcaagacagtttttttatcgaatatataatgcagttgtttgaggaacatgctcctatatttttcgtgg

SEQ ID NO: 124144 - DNA, 1339 bp, Zea Mays
aaacgaaaacgagccagccgggcaaacaacactcacatcttacaccagccgcactcccgtgtcctcctctccgagacgagacggacgggacggcaggcaccaccgcaccggcgccaccccacccgccggctcagagcgggggcccggccacccgaatcacacagatcggaacgccggaggaggagcaacgcgggcgcggagaggcccgccagcgaaggcgcagtgcaagctctgggttcccggatccgataccaccggcctctcggcgagtgtgtaatccagcgagcgagcgctcggttttagccgtgagagcgggagatgagtgctctgaagaaatccgacaagaaagccgccctcgacttcgcggcatggagcttcaatgtcaccacgtcggtcggactcatcatggtcaacaaggcgttgatggctacgtatggattcagttttggagttgcagtctgcacagttactgatgtcagtgtgaatgcaagaggtctaatcgcggctgttatagctgtttggagcacagctttgcaacaatattatgtccactttctccaacgcaagtactctctgaactcattcaacctgctgggccacactgctccagcccaagctgggtcactcctgctagtgggaccatttgcagattacttgttgacaggcaaaagggtggatcacttcagtttctcatcgcttgctctgtttttcctggcactctcatgcttcatcgccattggtgttaatctgagccaattcatctgtattgggcgcttctctgctgtatccttccaagtcctaggccacatgaagaccgtacttgttctgtcccttgggttcctattctttggcaaggagggcctgaatcttcaggtagtccttgggatggttctggccgttcttggaatgatatggtacgggaacgcatctgccaaaccaggcggcaaagagcggcgcagcgtcctaccgctgaggtctgcaagtctcaagggaagttcagaagaaaagggtggtgccgagaaatagtcttgctctctctgactgccaacttgaatggggagttttccgttccaaggttgaatttctggtgaggtgacgtgaagtaccacatattgggaactcttgcctaatgtttgacgcagaggacaaactcgttccatctagaaactcaggatcgttatagttacaggtatactgtaaaggttcatttttttttggcgctctgaatcatttgcagtgaggggaaagacagacatggttgttacgagtcttcaagacagtttttttatcgaatatataatgcagttgtttgaggaacatgctcctatatttttcgtgg

SEQ ID NO: 124145 - DNA, 1425 bp, Zea Mays
gctggtctggtcgcatatcacctcacttacgattcatcacttcgctctctgcagtgcaagctctgggttcccggatccgataccaccggcctctcggcgagtgtgtaatccagcgagcgagcgctcggttttagccgtgagagcgggagatgagtgctctgaagaaatccgacaagaaagccgccctcgacttcgcggcatggagcttcaatgtcaccacgtcggtcggactcatcatggtcaacaaggcgttgatggctacgtatggattcagttttgccacgacattaactgggcttcattttgtgaccactaccttgatgactattgtatttcgatggttaggcctgagccagccatcccacttacccctagcagatctagttaaatttgtgatattttcgaacttgtcaattgttgggatgaatgtgagcttgatgtggaactctgtgggcttttatcaggttggtgaaatttttagtagctgctataatatgcaaccttaaattgttaacaactgaattcattctattcccttgctcagatagcaaagctgtgcatgatacctgcatcatgtcttctggaggttgtctttgatcatgtacattattcccgggacacaaagctgagcataatggttgtgcttataggagttgcagtctgcacagttactgatgtcagtgtgaatgcaagaggtctaatcgcggctgttatagctgtttggagcacagctttgcaacaatattatgtccactttctccaacgcaagtactctctgaactcattcaacctgctgggccacactgctccagcccaagctgggtcactcctgctagtgggaccatttgcagattacttgttgacaggcaaaagggtggatcacttcagtttctcatcgcttgctctgtttttcctggcactctcatgcttcatcgccattggtgttaatctgagccaattcatctgtattgggcgcttctctgctgtatccttccaagtcctaggccacatgaagaccgtacttgttctgtcccttgggttcctattctttggcaaggagggcctgaatcttcaggtagtccttgggatggttctggccgttcttggaatgatatggtacgggaacgcatctgccaaaccaggcggcaaagagcggcgcagcgtcctaccgctgaggtctgcaagtctcaagggaagttcagaagaaaagggtggtgccgagaaatagtcttgctctctctgactgccaacttgaatggggagttttccgttccaaggttgaatttctggtgaggtgacgtgaagtaccacatattgggaactcttgcctaatgtttgacgcagaggacaaactcgttccatctagaaactcaggatcgttatagttacaggtatactgtaaaggttcatttttttttggcgctc

SEQ ID NO: 124146 - DNA, 2129 bp, Zea Mays
aaaatgcttggctggcagcttgtccatttcccgtcagcctgcctgtgcagtgcagtccatgtggtggatgcagttggaaatccattcattccttcgtcccccacctctcgcttcatctccatctcctcctcatgctgctgctgccactgccactataatagcccagctagctagaggtcacccatcaagctgcccattccctcgtgacagcagctgcctgcctgctccgaggcgccacccagctcttcctcgccccagcagccgcttcccgagatccttttcactttcaccaccagggtacatagaccgcatctgcggtgctctgcgctcctcggactcgatttgttggttcatccatccagctgccgccggacgtcgatcagctacctatcttgaaaccacaggaccgagcgtggaaactcccggaccggacattccattttccattccgaagggggggtgagaaggcggggaatgagtacaaccaaggtgaagagacgtgtgggcaagtatgagctcggccggaccataggcgagggcaccttcgcgaaggtcaggttcgcgagggacacggtcaccggcgaggccgtggccattaagatcctggacaaggagaaggtcctcaggcacaagatggttgagcagatcaagcgggagatctcgacgatgaagctgatcaagcaccctaacgtcgtccgcatatacgaggtgatgggaagtaaaacaaagatctacattgtgttagaattcgctaccggtggcgagctctttgatacaattgttaaccatggtcgaatgagggaagacgaggcaaggaggtacttccaacagttaatcaatgcagttgattattgtcatagcaggggtgtgtaccaccgggatttaaaacctgaaaatttgctgcttgattcatatggtaacctgaaggtctctgactttgggctcagcgcgctatctcagcaaatcaaggatgatggactgctgcacacaacttgtgggactccaaactatgttgcaccagaggtccttgaagatcaaggctacgatggagcaatggctgatctgtggtcatgtggagttatcctgtttgttctgctagcagggtatttgccgtttgaggattctaatctcatgactttgtataagaaaatatcaaatgcagaatttacatttccaccatggacatcttttcctgccaagaggttgttaacaagaatccttgatccaaatccaatgacgagaataacaatcccagaaatattagaggatgagtggttcaaaaagggctacaagcgcccagaatttgatgaacaatatgacaccacattggatgatgtggatgccgtcttcaatgattcagaagagcaccatgtgacagaaaagaaagaagaagaaccagtagctctgaacgcattcgaactgatttcgatgtcagcgggcctaaaccttggaaacttatttgactcagagcaggagttcaaaagagaaacaaggtttacatcaaaatgtccccccaaagaaattgtccgcaagatcgaggaagctgcaaaacctctaggatttgatgttcagaagaaaaattacaagttgaggctcgaaaaggtaaaggcagggaggaagggaaacctcaacgttgctactgagatactgcaagttgcgccctctctccacatggtagaagtccgaaaagcaaagggtgacactctggaatttcataagttctacaagaacctttccaagaccttgaaggacgtcgtctggaaatccgacgatcttcaaacgcaacatgcttcttagcagaacctcagagaggaggaatggcaaactattttgtgcaccatcctttcaagcaaactattctgcatgtaacggtgggtgcccaggaaattgcgctggtgctccaccatcgttgtatatgctgcgtcttgagttgcttgctgtagctgaagggaagttcattcagtaggttttgagtatgagttttgtatatccgtatatgcctatgactatgagccgtgctggaacactatgatcagaaactgcgaaatggagcccagaatgttcttgccatcttgctccagttctcagcaccgggcttaacttgccttgcattttttgaagaagaaaaa

SEQ ID NO: 124147 - DNA, 1488 bp, Zea Mays
cccggttgttgttggtgacatgtttatttacatgtttgattgaatgcagatcaagcgggagatctcgacgatgaagctgatcaagcaccctaacgtcgtccgcatatacgaggtgatgggaagtaaaacaaagatctacattgtgttagaattcgctaccggtggcgagctctttgatacaattgttaaccatggtcgaatgagggaagacgaggcaaggaggtacttccaacagttaatcaatgcagttgattattgtcatagcaggggtgtgtaccaccgggatttaaaacctgaaaatttgctgcttgattcatatggtaacctgaaggtctctgactttgggctcagcgcgctatctcagcaaatcaaggatgatggactgctgcacacaacttgtgggactccaaactatgttgcaccagaggtccttgaagatcaaggctacgatggagcaatggctgatctgtggtcatgtggagttatcctgtttgttctgctagcagggtatttgccgtttgaggattctaatctcatgactttgtataagaaaatatcaaatgcagaatttacatttccaccatggacatcttttcctgccaagagagaataacaatcccagaaatattagaggatgagtggttcaaaaagggctacaagcgcccagaatttgatgaacaatatgacaccacattggatgatgtggatgccgtcttcaatgattcagaagagcaccatgtgacagaaaagaaagaagaagaaccagtagctctgaacgcattcgaactgatttcgatgtcagcgggcctaaaccttggaaacttatttgactcagagcaggagttcaaaagagaaacaaggtttacatcaaaatgtccccccaaagaaattgtccgcaagatcgaggaagctgcaaaacctctaggatttgatgttcagaagaaaaattacaagttgaggctcgaaaaggtaaaggcagggaggaagggaaacctcaacgttgctactgagatactgcaagttgcgccctctctccacatggtagaagtccgaaaagcaaagggtgacactctggaatttcataagttctacaagaacctttccaagaccttgaaggacgtcgtctggaaatccgacgatcttcaaacgcaacatgcttcttagcagaacctcagagaggaggaatggcaaactattttgtgcaccatcctttcaagcaaactattctgcatgtaacggtgggtgcccaggaaattgcgctggtgctccaccatcgttgtatatgctgcgtcttgagttgcttgctgtagctgaagggaagttcattcagtaggttttgagtatgagttttgtatatccgtatatgcctatgactatgagccgtgctggaacactatgatcagaaactgcgaaatggagcccagaatgttcttgccatcttgctccagttctcagcaccgggcttaacttgccttgcattttttgaag

SEQ ID NO: 124148 - DNA, 2148 bp, Zea Mays
atgtggtggatgcagttggaaatccattcattccttcgtcccccacctctcgcttcatctccatctcctcctcatgctgctgctgccactgccactataatagcccagctagctagaggtcacccatcaagctgcccattccctcgtgacagcagctgcctgcctgctccgaggcgccacccagctcttcctcgccccagcagccgcttcccgagatccttttcactttcaccaccagggtacatagaccgcatctgcggtgctctgcgctcctcggactcgatttgttggttcatccatccagctgccgccggacgtcgatcagctacctatcttggctagcttggctgttctctctgcaggcagttgccatcgtgtctgatcatactaatattctgtccagatcccaaggaggcaaagtgaaaccacaggaccgagcgtggaaactcccggaccggacattccattttccattccgaagggggggtgagaaggcggggaatgagtacaaccaaggtgaagagacgtgtgggcaagtatgagctcggccggaccataggcgagggcaccttcgcgaaggtcaggttcgcgagggacacggtcaccggcgaggccgtggccattaagatcctggacaaggagaaggtcctcaggcacaagatggttgagcagatcaagcgggagatctcgacgatgaagctgatcaagcaccctaacgtcgtccgcatatacgaggtgatgggaagtaaaacaaagatctacattgtgttagaattcgctaccggtggcgagctctttgatacaattgttaaccatggtcgaatgagggaagacgaggcaaggaggtacttccaacagttaatcaatgcagttgattattgtcatagcaggggtgtgtaccaccgggatttaaaacctgaaaatttgctgcttgattcatatggtaacctgaaggtctctgactttgggctcagcgcgctatctcagcaaatcaaggatgatggactgctgcacacaacttgtgggactccaaactatgttgcaccagaggtccttgaagatcaaggctacgatggagcaatggctgatctgtggtcatgtggagttatcctgtttgttctgctagcagggtatttgccgtttgaggattctaatctcatgactttgtataagaaaatatcaaatgcagaatttacatttccaccatggacatcttttcctgccaagaggttgttaacaagaatccttgatccaaatccaatgacgagaataacaatcccagaaatattagaggatgagtggttcaaaaagggctacaagcgcccagaatttgatgaacaatatgacaccacattggatgatgtggatgccgtcttcaatgattcagaagagcaccatgtgacagaaaagaaagaagaagaaccagtagctctgaacgcattcgaactgatttcgatgtcagcgggcctaaaccttggaaacttatttgactcagagcaggagttcaaaagagaaacaaggtttacatcaaaatgtccccccaaagaaattgtccgcaagatcgaggaagctgcaaaacctctaggatttgatgttcagaagaaaaattacaagttgaggctcgaaaaggtaaaggcagggaggaagggaaacctcaacgttgctactgagatactgcaagttgcgccctctctccacatggtagaagtccgaaaagcaaagggtgacactctggaatttcataagttctacaagaacctttccaagaccttgaaggacgtcgtctggaaatccgacgatcttcaaacgcaacatgcttcttagcagaacctcagagaggaggaatggcaaactattttgtgcaccatcctttcaagcaaactattctgcatgtaacggtgggtgcccaggaaattgcgctggtgctccaccatcgttgtatatgctgcgtcttgagttgcttgctgtagctgaagggaagttcattcagtaggttttgagtatgagttttgtatatccgtatatgcctatgactatgagccgtgctggaacactatgatcagaaactgcgaaatggagcccagaatgttcttgccatcttgctccagttctcagcaccgggcttaacttgccttgcattttttgaag

SEQ ID NO: 124149 - DNA, 1731 bp, Zea Mays
agcagctgcctgcctgctccgaggcgccacccagctcttcctcgccccagcagccgcttcccgagatccttttcactttcaccaccagggtacatagaccgcatctgcggtgctctgcgctcctcggactcgatttgttggttcatccatccagctgccgccggacgtcgatcagctacctatcttgaaaccacaggaccgagcgtggaaactcccggaccggacattccattttccattccgaagggggggtgagaaggcggggaatgagtacaaccaaggtgaagagacgtgtgggcaagtatgagctcggccggaccataggcgagggcaccttcgcgaaggtcaggttcgcgagggacacggtcaccggcgaggccgtggccattaagatcctggacaaggagaaggtcctcaggcacaagatggttgagcagatcaagcgggagatctcgacgatgaagctgatcaagcaccctaacgtcgtccgcatatacgaggtgatgggaagtaaaacaaagatctacattgtgttagaattcgctaccggtggcgagctctttgatacaattgttaaccatggtcgaatgagggaagacgaggcaaggaggtacttccaacagttaatcaatgcagttgattattgtcatagcaggggtgtgtaccaccgggatttaaaacctgaaaatttgctgcttgattcatatggtaacctgaaggtctctgactttgggctcagcgcgctatctcagcaaatcaaggatgatggactgctgcacacaacttgtgggactccaaactatgttgcaccagaggtccttgaagatcaaggctacgatggagcaatggctgatctgtggtcatgtggagttatcctgtttgttctgctagcagggtatttgccgtttgaggattctaatctcatgactttgtataagaaaatatcaaatgcagaatttacatttccaccatggacatcttttcctgccaagaggttgttaacaagaatccttgatccaaatccaatgacgagaataacaatcccagaaatattagaggatgagtggttcaaaaagggctacaagcgcccagaatttgatgaacaatatgacaccacattggatgatgtggatgccgtcttcaatgattcagaagagcaccatgtgacagaaaagaaagaagaagaaccagtagctctgaacgcattcgaactgatttcgatgtcagcgggcctaaaccttggaaacttatttgactcagagcaggagttcaaaagagaaacaaggtttacatcaaaatgtccccccaaagaaattgtccgcaagatcgaggaagctgcaaaacctctaggatttgatgttcagaagaaaaattacaagttgaggctcgaaaaggtaaaggcagggaggaagggaaacctcaacgttgctactgagatactgcaagttgcgccctctctccacatggtagaagtccgaaaagcaaagggtgacactctggaatttcataagttctacaagaacctttccaagaccttgaaggacgtcgtctggaaatccgacgatcttcaaacgcaacatgcttcttagcagaacctcagagaggaggaatggcaaactattttgtgcaccatcctttcaagcaaactattctgcatgtaacggtgggtgcccaggaaattgcgctggtgctccaccatcgttgtatatgctgcgtcttgagttgcttgct

SEQ ID NO: 124150 - DNA, 1643 bp, Zea Mays
ccccggtgaactggcaacgtcgtcgactcgactcggcgagcaaacctgcgtgcgcagactctcctccgtatagcatacgtgcgtgcatcagctgcctgcctgctccgaggcgccacccagctcttcctcgccccagcagccgcttcccgagatccttttcactttcaccaccagggtacatagaccgcatctgcggtgctctgcgctcctcggactcgatttgttggttcatccatccatgaaaccacaggaccgagcgtggaaactcccggaccggacattccattttccattccgaagggggggtgagaaggcggggaatgagtacaaccaaggtgaagagacgtgtgggcaagtatgagctcggccggaccataggcgagggcaccttcgcgaaggtcaggttcgcgagggacacggtcaccggcgaggccgtggccattaagatcctggacaaggagaaggtcctcaggcacaagatggttgagcagatcaagcgggagatctcgacgatgaagctgatcaagcaccctaacgtcgtccgcatatacgaggtgatgggaagtaaaacaaagatctacattgtgttagaattcgctaccggtggcgagctctttgatacaattgttaaccatggtcgaatgagggaagacgaggcaaggaggtacttccaacagttaatcaatgcagttgattattgtcatagcaggggtgtgtaccaccgggatttaaaacctgaaaatttgctgcttgattcatatggtaacctgaaggtctctgactttgggctcagcgcgctatctcagcaaatcaaggatgatggactgctgcacacaacttgtgggactccaaactatgttgcaccagaggtccttgaagatcaaggctacgatggagcaatggctgatctgtggtcatgtggagttatcctgtttgttctgctagcagggtatttgccgtttgaggattctaatctcatgactttgtataagaaaatatcaaatgcagaatttacatttccaccatggacatcttttcctgccaagaggttgttaacaagaatccttgatccaaatccaatgacgagaataacaatcccagaaatattagaggatgagtggttcaaaaagggctacaagcgcccagaatttgatgaacaatatgacaccacattggatgatgtggatgccgtcttcaatgattcagaagagcaccatgtgacagaaaagaaagaagaagaaccagtagctctgaacgcattcgaactgatttcgatgtcagcgggcctaaaccttggaaacttatttgactcagagcaggagttcaaaagagaaacaaggtttacatcaaaatgtccccccaaagaaattgtccgcaagatcgaggaagctgcaaaacctctaggatttgatgttcagaagaaaaattacaagttgaggctcgaaaaggtaaaggcagggaggaagggaaacctcaacgttgctactgagatactgcaagttgcgccctctctccacatggtagaagtccgaaaagcaaagggtgacactctggaatttcataagttctacaagaacctttccaagaccttgaaggacgtcgtctggaaatccgacgatcttcaaacgcaacatgcttcttag

SEQ ID NO: 124151 - DNA, 104 bp, Zea Mays
gacaaactattcatatgtattttagattgtatatgtatatacaaaagattgaacaactgcatagattcattacttggttctagaacaaaaattgaaaatggaag

SEQ ID NO: 124152 - DNA, 2921 bp, Zea Mays
aaataaaaaccccaccttttccccatctccttccgtctgttcgcggggggcgacggatgtcttctcgttgcggctggggcggccgtccagcgaccacggagtcagtcgggagtagtcgtccgactaccgctccagctccaccagccgctccaatctagccgccggcccggccctggcccctgggggagacgaccagtcgacaacgacgacccggccgcctcctcatggaagaccagtcgcctgaccgtacatcggtcggttcagcttcagcgccgaaaaagcatagcgcttcctcacgaggccggcgccgtaacttctcgtcgtcaacgtgcaaggattttctccgcaagtttgtggacagcgagcttctgacgtcaagcctagaggactggttctccggtcacagcgaagattgtggtttcaggaagccaggtttcgacgttcctttcgagcttacagagttacacaatttcgattacgctctggagggcgttacttttcagcagctagtacggatgccaagcgctctgtacgcgtcgacgtcggatgtttttgaggccagcgcgtatcttgctctggaggatttccttcacgcaggcgttaaaggactgtggcaaactttctggggtcctgatgaagcgatgccgttctcggttgcctgtgtacacagcacgagctccagattttatcctgctgagaaggctataagcagtggaaggctcgatggtgtttgcgcgactgctgtgctgctgaagaatttgaagccttcacaaggaaggtgggatcatatcgtcgtgctggctttgttgagacctgatgtcggaatggtttccgcacagggtgacgaggagccgtctcctgctgtcttaggggaggcactgttctttgctctgcgtgtcctgctatctcgaagcctcagcaagtcctccaccgttcttcgcaattcggactctgtttacgtgcttctttttgattcacagtttggcggagtggtaaaagtgcaaggtgatttgaacaggctggattttgatctcaacaacgtttatgactgtgctgctgaatggataaagaaacattccagaatttcagtctgttccgtagaccgagtatggaacaaacttgggaatgctaactggggagacattgggacccttcaggttctcatcgcaatatttcactcgatgatccaattttacggagagcctaagtattctctcgatgaactggcaacggaacatagttcaaggctacagagccgaagatcagaaagacatctggttgacagacaagctaatggcaatggtttatttcgattccaacagcgaagtcattctcctgaaattgttgagttacaggaggaagcagcagttgatgtgaaaccacatgaaaccttaaggcttgaaatagggtctgttgtattgatggatgatgcttacacacagaaaggttttcaaatcagtgacatcctaacaggcagtgatcctcctatttatacttctgctcctgtggaagaacctaccaaaacttgtttgctgtatgtaggctccagcccttctcatctggatccggcatgggaggatatggactcctggtaccaagtacagaggcagacaaaagtactgaccgtgatgaagcaaagatgcatttccagcagatatataccacacatggaatcgtccggacgggtcatccatccaggcccatgtaacaaccctaactcaaatgcaagttgtggtcatccatggtgcagtactccaatgcttgtcacctcaccagttggtgagaccatttcgaatctgatacggaatggattgtttggtgccgaggaggctctgagatgttgccatgactgtttatctgctcttgctgcagcagcatctgcaggagtccgtcacggtgatatccagccggagaatgtgatctgtgtcaacaatggttcaacacatccgtattttgtgcttattggatggggccatgctatccttgaagatagggatcgaccagtaatgaatctattcttctcgtctacatttgcgctccaggaaggaaaactatgtggagcgtccgacgcagaaagtttaatctaccttctatatttctcttgtggcggagtttgccccgaccttgactctgtcgaaagtgcacttcagtggagggagacgtcatggtctaggagagtcatacagcagaagttgggcgacatctcagcagtgttaaaagcttttgcggattatgtcgacagcctctgtggaacttcgtacccgatggactatgagatctggttgaaacgactgcgaagaacaataaacgaagatcatgggaaggaggttgacacatcctcgagttaatgctgcaacacattctcttgcagatccaaaatttggaagatcaagagtgataatcagctcattaccttttgttgttgttgtagataatttatttgtgggaggtccataggtcatagtattgtccatccttttgcaccatttttcttggatataagggtatttcaaaagttgcgatctgctgctgctatcctcaatgggatcactgtcaatgttttctattccttggtcttgccttcagcccttcacacaggagatccttgatgatatcagcaacatgatgtattttgtgaatctttggtaaattggtgagcctctgctcttgttgccctcagagattctggtcccattttattcggttctggtaggcttcaggatggtttgtttttcttgtgatcagtgtctaaactgttaatcggttggtaaatttgtaactgctctagaatagaggttacatagtagcatttgagcttgactaagttatttgtggggtgcgaggttccatgtaattatgtaaatgttctactgagctgctcagagtcttatcctactactgtttttgaatctctctgtgcg

SEQ ID NO: 124153 - DNA, 1330 bp, Zea Mays
atatattgcctctctctttctcaacactacccggactgcttgttagcacaaacagatcgatcgattacagcaatggcggccaaggtgttcctcctcctccgactcagcatggtcgccgtcgtcctggctgccatcgccacagtagcgctcgcggaggaagccgatccgcgggcactgccggcacagtggaccaccgcgaagaagtacaaggccacgatggacgccaagacgcggcaggctttcgacggcgtggtggccgccgctacggcagagaagcggtcccaggcggtggaggccgtgctgcagcagcagctgaacatggacgtgtccctgtccaaggcgacgtcttccggggacgagaacaactacgtgagcgtggccgccgcctacgagaaggccgcgggcgccgtcatcgcggcgacgccggacaacaagctccgcgctatggcgttcgcgttcgacggcgcggtggcgccggacccgggccggtgccccgccgtcgacaagcccttctgcgagacctacgccaagacggagaaggccttcagcggaaccatcgcctccggggacacgcccaagagcaagctggggatcacggacgccgtgctcaagctgaggctcgccaccgacgccaacatcaacaaggcctacgcggagggggacaaggacaagatcgcaaaaatccttgctgcatacggccaggcggccgacgcggtcgctgcggccccgcctcccgagaagctcaaagtcatggagaagaccttctcggcggtcgccgccgccgctcatcaggaggcggcggcggctgctgctgctgctgcagtgattaaggtttaagggagagctcctgcatgaaattaaccacacgtccacacgtatacactacggaacaagtgtttccatcagacgaccatcagtgaaaaaaaaccatccttctctgtgtgtgtgccgtgtttttgtcatttcttctttccattgctagagaaacgggttatcttttttttcccacatttataagcggcaatacatgcgtgcacctgtagtagtgtgaccatatgtactgtgctctcggtttgtatatcgatagtagcatataaagctactactcccgatttgtaactatagatctcggtattaaagccattttatttttatttttaaaaagccctacaagcatttttttggtgaagctaacctattttagaaaaattgtttggcaaaacagtttcatgtaaagtatagagagagatagaaatgagagggaaagttatgaaatgctacttttttagctcatctgtttcattcctttggtcagaggataaaaaaaaga

SEQ ID NO: 124154 - DNA, 2429 bp, Zea Mays
ttttctttccctccacctcatccgaacgagttctcatcttcgattcctcttcgccgctgcagctccagaatggctgctaaacccttcctctcaatccctgccgcggcggtggctcgccttccctttcgcctcctctgctcggcagctccacctccccgcctcctccctttcttcccccagccattcctgctccaaagacgcagcctttccgcctccaccgtacccgccggcaggcgtagcagtcctccggccccggtcatcagcgagggcagggatgacgaggacgccgccgtcggccggcctgtatgtcctggatgcggggtctttatgcaggatgaggatcccaacctccctggcttcttcaagaacccctcccgcagctcccaggacgagacgggaggaagtggagaagtgctcctggccgccgatacggatgcgtttcttgaagaagaagatgataatgatgatcggagggtggcggatgacgcgtcggatgctgaactggagggtctggacagcgatatcgatgagttccttgaagaattcgataagggggacgaagatgacgggttaccggtgaaaagcgccactgataccgatgctttcgccagcgattgggactctgattgggaggagatggaagaagacgaggatgagaaatggaggaaagaactggatggtttcaccctgccgggtgtcgggtacgggaacatcactgaggaaacgatcgagaggatgaagaaagagaagctgtccaagtcccagaggaagcgccaggcgagggaggccaaaagggctgaggccgaggaggattcagccctcgtctgtagccggtgccactcgctgaggaactatgggcttgtgaagaatgacaaggctgagaacctgatcccggactttgatttcgatcggttcatctcgtctcggctcatgaagcggtcagctggtaccccggtcatcgtcatggtggtggactgcgcagacttcgatgggtcgtttcctaagcgagctgccaagtcattgttcgaggcacttgaaggaaggagaaattcaaaggcgagtgaaacgccgagacttgttcttgttggtacaaaggtggatttgcttccatggcagcaaatgggagtgcggttggataagtgggtccgtggccgtgctaaggctttgggagcacccaagctagatggtgtgttcttgatcagcgtccacagagatttggctgttagaaacctaattacatacatcaaggagtcagcaggacctcgtagcaatgtttgggtgattggtgcacagaatgctgggaaatctacgctgatcaatgcttttgcaaagaaacagggtgttaagatcacaagattgactgaagctgctgtcccgggaacaacattaggcatattgagggtaacaggtgttttacctgcaaaggcaaagatgtatgacactcctggcctgttgcatccttacataatggcaatgagattaaataatgaggaacggaagatggttgaaataaggaaagaaatgcggccacgatccttcagggtgaaagtaggacaatccgtacatattggaggcttggcacggctggatgtgctaaaatcatcagtgcaaactatctatataactgtttgggcatcttccaatgttcccctccatcttggaaagactgaaaattctgatgaattgcgagacaaacattttggcatcagacttcagccaccaattggcccagagcgagtcgatgaattgggtcactggacaggaagatctattgaggtgtctggggcaagctgggatgtcaacagtatggacattgctgtttctggccttggatggtactccttgggccttaaaggcactgccactgtttccttatggacatttgagggcattggtgtgacagaacgtgatgcaatgattctgcaccgagcccagtttctcgaaaggcctggattttggttacctattgccattgctaatgctataggtgaggagacaagaaagaagaacgaaaagagaaaggctgagcaaagaagaagagaggaagaagagctccttttggaagaaatggtttagtgatgattctgtagcccagcccacaaagttaggattctgtttctcttgtcaacacgggcttttgtttatcctagttcttgatgtcttttgacataggctgcatcctgtgattttttttcttagcttatgtatatctcaaattttctgtgtatttgttttccatgtgttttacaaccagttttgtcagttctgcttgcatcttacagattcaattcctgcaacttgaggaaaattgatatcctagattacctattcagctgtgtgcaaaatgggactgtttagacatgcagagcagccaatttattatgtactattttttgaattgaaaacaatttattatgcactaaatgttt

SEQ ID NO: 124155 - DNA, 2251 bp, Zea Mays
gtgtttatcggtttcaacctaactcttgtatctgccttcttctctcgtgtgttaggtagacacgccggcccaaccagaattgacaagtggaagcgtatgggtattaccagcaacgacgcggcccctcgtgccgtcctcctccgcttcttgtttctgctctgcataggctgcaaatgcctggcatcagaggtagaggccacccagacggcgaccctcgcggtggacgcctcgccgcagcttgctcggaagatccctgatacactgttcgggatcttctttgaggagatcaaccatgcaggggctggtggcatatgggctgaacttgttagtaacagagggtttgaagctggaggcctccatactccatcaaacattgacccatggtccatcattggagacgactcctctgtatttgtggagaccgatcgcacatcatgtttcagtcgaaacatcgttgctctcaggatggaggtcctttgcgataactgtcctactggtggtgttggtgtttacaacccagggttctggggcatgaacatagaagaaggaaaggtctacaatcttgttatgtttgttaagtcaccagaaacaactgacttgacagtttcactaacaagctctaacgggttgcaaaatctggcttcagctacagtaacagtttccggcgaatcaaactggataaaagtggagcaaaagttggttgctaaaggaaccaatagaacctcaaggcttcaaataacaactaacaagaaaggagttgtctggtttgatcaagtatcactcatgcctgaagacacatacaagggacatggctttcgcacagaacttatatccatgattttggatttaaaaccacgattcttgagatttcctggaggctgctttgtagaaggtggctggttaagaaatgcctttaggtggagagaatctattggtccatgggaagagagacctggacacttcggggatgtttggcattactggactgatgatggccttggatactatgaatttcttcagcttgcggaggacctgggtactgaaccaatctgggtattcaacaatggagtcagccacaatgatgaagttgatactgttgctattgctccttttgtaaaggatgtattggacagtatagaatttgcaagggggagtgcaaattcaacatggggctctgttagggctgcaatgggccaccctgaaccattcccagtgaaatatgttgcaataggaaatgaagattgtgggaaaaaattttaccgcggtaactacctcaagttctacaatgctataagacaggcctatccagacattcaaatgatttcaaactgcgatggttcatctacaccacttgatcatcctgctgatttatacgacttccatgtctataatgattctaagactttgttcaacatgaagagcacatttgacagaacatctcgtagtggacccaaggcttttgtaagtgagtacgctgtttggagaggtgatgcaggtagaggaagtcttcttgcttcattggcagaagctgctttccttactggactggagaagaatagtgacattgtttccatggcaagttacgcgccactattcgtaaacgacaatgaccagacgtggaacccagacgcaatcgtcttcaactcctggcagcattacggcactcccagttactggatgcagacgcttttccgcgagtctagtggtgctatgttccatccaacgacaatcagctccagctactcaggttcacttgcagcgtctgcgattacctggcaggactccgagaacagcttcctaagagtaaaggtcataaacttcgggtcagatgctgtgaccctgacaatctccacaagtgggctccaggccagtatcaacgctctgggatcaaccgccactgttctcacatcagcagatgtgatggatgaaaactccttcagcaacccaaccaaggttgtgccggtaaagagcgatctgagcaatgctgcagagcagatgcaggtcacgctggctcctcgctccttcagctcgttcgatctcgccctggctcagtccaagcttgtagcggagatgtgagctaggctggtacactagtatacaatacaacgtgtgaagtgtggtacacaaataccagcaaccacaggggttgccaagctgttgttagcatcttgaacacatggctttgtattgtgtataatgacatgatgctgatactaatctctattatataaagcactagtttctatgttgt

SEQ ID NO: 124156 - DNA, 2360 bp, Zea Mays
atcctgccttcggaagccactgctaaccgctttctctgcccttctctacctacataagcgcgagggagcacgcctcccggcctctcctcatccaattcctatgccctgcacccgcagacggggagctcgcgtcttccttcggatggtggatgcatgcatgcatggtagacacgccggcccaaccagaattgacaagtggaagcgtatgggtattaccagcaacgacgcggcccctcgtgccgtcctcctccgcttcttgtttctgctctgcataggctgcaaatgcctggcatcagaggtagaggccacccagacggcgaccctcgcggtggacgcctcgccgcagcttgctcggaagatccctgatacactgttcgggatcttctttgaggagatcaaccatgcaggggctggtggcatatgggctgaacttgttagtaacagagggtttgaagctggaggcctccatactccatcaaacattgacccatggtccatcattggagacgactcctctgtatttgtggagaccgatcgcacatcatgtttcagtcgaaacatcgttgctctcaggatggaggtcctttgcgataactgtcctactggtggtgttggtgtttacaacccagggttctggggcatgaacatagaagaaggaaaggtctacaatcttgttatgtttgttaagtcaccagaaacaactgacttgacagtttcactaacaagctctaacgggttgcaaaatctggcttcagctacagtaacagtttccggcgaatcaaactggataaaagtggagcaaaagttggttgctaaaggaaccaatagaacctcaaggcttcaaataacaactaacaagaaaggagttgtctggtttgatcaagtatcactcatgcctgaagacacatacaagggacatggctttcgcacagaacttatatccatgattttggatttaaaaccacgattcttgagatttcctggaggctgctttgtagaaggtggctggttaagaaatgcctttaggtggagagaatctattggtccatgggaagagagacctggacacttcggggatgtttggcattactggactgatgatggccttggatactatgaatttcttcagcttgcggaggacctgggtactgaaccaatctgggtattcaacaatggagtcagccacaatgatgaagttgatactgttgctattgctccttttgtaaaggatgtattggacagtatagaatttgcaagggggagtgcaaattcaacatggggctctgttagggctgcaatgggccaccctgaaccattcccagtgaaatatgttgcaataggaaatgaagattgtgggaaaaaattttaccgcggtaactacctcaagttctacaatgctataagacaggcctatccagacattcaaatgatttcaaactgcgatggttcatctacaccacttgatcatcctgctgatttatacgacttccatgtctataatgattctaagactttgttcaacatgaagagcacatttgacagaacatctcgtagtggacccaaggcttttgtaagtgagtacgctgtttggagaggtgatgcaggtagaggaagtcttcttgcttcattggcagaagctgctttccttactggactggagaagaatagtgacattgtttccatggcaagttacgcgccactattcgtaaacgacaatgaccagacgtggaacccagacgcaatcgtcttcaactcctggcagcattacggcactcccagttactggatgcagacgcttttccgcgagtctagtggtgctatgttccatccaacgacaatcagctccagctactcaggttcacttgcagcgtctgcgattacctggcaggactccgagaacagcttcctaagagtaaaggtcataaacttcgggtcagatgctgtgaccctgacaatctccacaagtgggctccaggccagtatcaacgctctgggatcaaccgccactgttctcacatcagcagatgtgatggatgaaaactccttcagcaacccaaccaaggttgtgccggtaaagagcgatctgagcaatgctgcagagcagatgcaggtcacgctggctcctcgctccttcagctcgttcgatctcgccctggctcagtccaagcttgtagcggagatgtgagctaggctggtacactagtatacaatacaacgtgtgaagtgtggtacacaaataccagcaaccacaggggttgccaagctgttgttagcatcttgaacacatggctttgtattgtgtataatgacatgatgctgatactaatctctattatataaagcactagtttctatgttgt

SEQ ID NO: 124157 - DNA, 521 bp, Zea Mays
atcctgccttcggaagccactgctaaccgctttctctgcccttctctacctacataagcgcgagggagcacgcctcccggcctctcctcatccaattcctatgccctgcacccgcagacggggagctcgcgtcttccttcggatggtggatgcatgcatgcatggtgagcaactcgccaacaaggaccccgcctattctttgtattcggatttggggctcacgatcatgacttgtttgatggaatgaccagctgaggagaattttgccgtatgctaatatttgagtagttgcgcgttgtctgacgagataaccacacagttccagatgaaggcagctctcctttctctgctatcccaagtgcctgcaccgctcttgcatgacgaaacaataagcgccatttttaaatttcagtcacacagatgagtgttggtgttagttagcttggttaaatgtatgttttttttggcatctatctcgttgttattgcatatgtgcgtaatatagtggtgctgtggttttg

SEQ ID NO: 124158 - DNA, 261 bp, Zea Mays
atgaccatgaccatgagcaagcaacaaccggatgtcctcggcgacgtccaggactacgattccatgctgcaggacatcccggactgcgacgggacgggcgccaggctgtgctgccccgacgacccgatcgagcacgtgttctcggcgtcgtcgctgccgcctcgtcgggagcaggagccgccgcagccgctgcccgagagcacgcatggcgtcgggccggactccacatccgttcttgagggacgacctcggcggatttga

SEQ ID NO: 124159 - DNA, 651 bp, Zea Mays
atctcttctctcacctttctcactcccgtctctctcgcgtctctctctccctcagtcccgtccgccaccggccgcccccgccatgcccgcccacgccaccggccgcccccgccacggccacccccgccaccggccgccccgccgagcccacccccggccccagccccgtccaccgcggccgccccacccacgcccccgttcgctgcggccgcagcgccccggcccgcctctggccccgcttctgtctggtgcaggacagtacaggaacttccagcaccccgatccctacattgttccatgggcaccaggcggcactaaattcacaagaaacccccctccacctcaagggatgtctaaaaaggtgaagcagttcactaagggacttgcgaagagagcgtcctatgtcatgagaaaggagaacttagtgtttaagggcactagtttcagcttgagtaggcgtgagcttccatgtggaggtatcgaccatcactcgtcactgtaacccgatggtgatcgacgaccgtgagcttccatgttattgtgttctaatactaactggataatgagatgtgtcttattatgactatgcatgagacttttgtgatgtaattgatgagactatggatttaaatattgctatgtgattgtgtg

SEQ ID NO: 124160 - DNA, 2233 bp, Zea Mays
ggcggccggcgcctccaatccaaggccactcgcccgcaccgtcgcttcggtggtgcgcgctgcttcgtgcatgctgtggtcggtccggtccggttccgcgcggcctccgcctcctcctcttctccttctgattcctgatccactggtgccggggggcgtgcgtaacgtccgggacacggcacgaccaaaccagaccggaccaggcggcatttgcgcctcgtctcctcccactcccacctgtacctccgtgtctgcctagccattgcccattgggagagcgcgcgcgagcgaaagagaagcggtagctccaccgcctccgccaatggccgaggaggaagaggaggagcgcggcgcggctcccttgcccttgcccttgcccttgccgcgcaacggcgaggccgccgccgccgcccaccgcccagaatgccccggctgcgtgttcgaccggcggaaggacgacctcctgctccgcagagccaagccgtaccgggagttcctctacatctggatcatctccctcaccgccgccttaccgatatcgtcgctcttccccttcttgtatttcatgataagagacctgaatgtcgctaaaagaacagaagacatcgggttctacgctggttttgtaggtgcctcattcatgtttggtagatgcttgacttcaacagtatggggcatagcggcagaccgcgttgggaggaaacctgttgtcgtgttcggcatttcctctgtagttgtgttcaacacattgtttggtctgagtgtcaactactggatggcaatagctacccggtttctgcttggtgccttgaatggtttgcttggaccgataaaggcttatgccattgaagtttgccgacctgaacatgaagccctagcactatcacttgtcagcacagcatggggaataggtctcattattggtcctgctcttggaggctaccttgcactgcctgcagaaaattttccaactgtcttttcacctgactcaatctttggaaggttcccatatttcttaccatgcttatgcacgtcaatcttcgctgcggttgttctcataagctgcatatggatgccggagactttgcacaagcacaaagtccatgaaaatagaagtcggaacattgaagctttggaggcccgtctgattgattcaaatgaaaaggttgaagaaagtggtagtttagatagtaagaagagcctattcaggaattggccattgatgtcatcaataattgtctattgtgtcttctccttccatgacatggcttacacagaggtgttctctctatgggctgaaagcgacaagaagtatggtgggctgagtttatcatctgaggatgttggtcaagtgcttgcagtcacaggtgccagtcttcttgtataccaactctttctataccccagtatcaataaggttcttgggcctatcaaatcttctcgagttgcagctatcctgtgcatacccatcctctttgcctacccctacatgacgtacctgtcggaacctggattatcaatcgttttgaatattgcgtcagtgataaagaataatctcggtgtcaccatcattacaggcactttcatccttcaaaacaatgccgtgcctcaggaccagcgaggcgctgcgaatggactgtccatgactgggatgtcctttttcaaggcacttgctccagcaggagcaggcattgtgttctcatgggcgcagaaacgccagcatgcgtttttcttcccaggtgaccagatggtattcttcctcctgaacgccgtcgagctggtcgggcttctcctcacgttcaagcccttcctggcagtaccagagcagtacgatacgagatagttagacgatctatctatctatacaagttctggaacgttcaagacgattcatcgtgtgcggctgtaccagtgaaggagaagcgccaaagcgtgtgccctttacgccgcggaaggtctacaaacagggacatactcctatataggaagatgcaatgcaagagctgtggtgtacttttaattgtaggtgatgtagtagtgtatggtagtatcagcattttctgcattcatgaaatgcacacgcaggtggtgggaaatgtgggcatggatcgagagtcgctgcgctgttaagtagcaataaatgttaaggttcagtgactcgctgttatttgttgggaatgaaattactgggcatctgtaccctcgttgttttatatctggctgttggattcta

SEQ ID NO: 124161 - DNA, 2111 bp, Zea Mays
actctcgcctcgccgtcgccgtcgtcatctcagctttaattcgcagcaggcgggcagtggcaggccaggccacggcgtccagcaccagctacgcctgtgcgcgcgcttgtgcagtacctacgttggtgggtgggtaggtagctagtgcggcggagcatcgatcgcgcggtactctcagttccatccgtcgagagatcgaccggtcgtcgatcgacatggcgggccggggaggagcctcggcggcggcgccgttgctggagaagacagcggcggcggcggagtcgggcggcgggtgctgctacgtggacgggtgccccgggtgcgccgtggaccggcacaaggcggcgaacccgggcattccctacggcaacttcatctacgtctggatcgtcaccctctgcacagccttaccgatatcgtcgctcttccccttcttgtatttcatgataagagacctgaatgtcgctaaaagaacagaagacatcgggttctacgctggttttgtaggtgcctcattcatgtttggtagatgcttgacttcaacagtatggggcatagcggcagaccgcgttgggaggaaacctgttgtcgtgttcggcatttcctctgtagttgtgttcaacacattgtttggtctgagtgtcaactactggatggcaatagctacccggtttctgcttggtgccttgaatggtttgcttggaccgataaaggcttatgccattgaagtttgccgacctgaacatgaagccctagcactatcacttgtcagcacagcatggggaataggtctcattattggtcctgctcttggaggctaccttgcactgcctgcagaaaattttccaactgtcttttcacctgactcaatctttggaaggttcccatatttcttaccatgcttatgcacgtcaatcttcgctgcggttgttctcataagctgcatatggatgccggagactttgcacaagcacaaagtccatgaaaatagaagtcggaacattgaagctttggaggcccgtctgattgattcaaatgaaaaggttgaagaaagtggtagtttagatagtaagaagagcctattcaggaattggccattgatgtcatcaataattgtctattgtgtcttctccttccatgacatggcttacacagaggtgttctctctatgggctgaaagcgacaagaagtatggtgggctgagtttatcatctgaggatgttggtcaagtgcttgcagtcacaggtgccagtcttcttgtataccaactctttctataccccagtatcaataaggttcttgggcctatcaaatcttctcgagttgcagctatcctgtgcatacccatcctctttgcctacccctacatgacgtacctgtcggaacctggattatcaatcgttttgaatattgcgtcagtgataaagaataatctcggtgtcaccatcattacaggcactttcatccttcaaaacaatgccgtgcctcaggaccagcgaggcgctgcgaatggactgtccatgactgggatgtcctttttcaaggcacttgctccagcaggagcaggcattgtgttctcatgggcgcagaaacgccagcatgcgtttttcttcccaggtgaccagatggtattcttcctcctgaacgccgtcgagctggtcgggcttctcctcacgttcaagcccttcctggcagtaccagagcagtacgatacgagatagttagacgatctatctatctatacaagttctggaacgttcaagacgattcatcgtgtgcggctgtaccagtgaaggagaagcgccaaagcgtgtgccctttacgccgcggaaggtctacaaacagggacatactcctatataggaagatgcaatgcaagagctgtggtgtacttttaattgtaggtgatgtagtagtgtatggtagtatcagcattttctgcattcatgaaatgcacacgcaggtggtgggaaatgtgggcatggatcgagagtcgctgcgctgttaagtagcaataaatgttaaggttcagtgactcgctgttatttgttgggaatgaaattactgggcatctgtaccctcgttgttttatatctggctgttggattcta

SEQ ID NO: 124162 - DNA, 681 bp, Zea Mays
actctcgcctcgccgtcgccgtcgtcatctcagctttaattcgcagcaggcgggcagtggcaggccaggccacggcgtccagcaccagctacgcctgtgcgcgcgcttgtgcagtacctacgttggtgggtgggtaggtagctagtgcggcggagcatcgatcgcgcggtactctcagttccatccgtcgagagatcgaccggtcgtcgatcgacatggcgggccggggaggagcctcggcggcggcgccgttgctggagaagacagcggcggcggcggagtcgggcggcgggtgctgctacgtggacgggtgccccgggtgcgccgtggaccggcacaaggcggcgaacccgggcattccctacggcaacttcatctacgtctggatcgtcaccctctgcacagccttaccgatatcgtcgctcttccccttcttgtatttcatgataagagacctgaatgtcgctaaaagaacagaagacatcgggttctacgctggttttgtaggtgcctcattcatgtttggtagatgcttgacttcaacagtatggggcatagcggcagaccgcgttgggaggaaacctgttgtcgtgttcggcatttcctctgtgttagtgacatcttacctccgtcctaccctatgcaaacagaactaagtgttgactaacagtgcatctgctt

SEQ ID NO: 124163 - DNA, 3375 bp, Zea Mays
acatttgaggaatccgcctttgatataaagaagacgctcccgaatccgtctccgcctcctgtcgctcgctctccctgtctcccgcacgccgacccgcagccgccgccgttcgccatgggtttcctcgacgcgctctaccgtgtggtgatgcgccgcaacgccgtctacgttaccttcgtcgtcgccggcgctttcgcgggcgagcgggcggtggactacggcgttcacaagatctgggagatgaacaacctcggggtaacatttctcttcccagcttccctttccctttgttgttccactcttatcaatacgctgcaattgtcaacggccaattagcgaagaaaattttggctgttctgatgatgaaacatctgtttgatttgatcggttctgggttaaggccgtttgcgagagaatgtcgatcgttttctgcgtgcgattaggtcgcgtgtttagatcctggtcgcgttttgtccttgtcccttttggagtgcggtcctctcctgttaccctctatgctgaatcgctaccctggacggaagtgtacatctggttgtggttctcattttttctcaactagcattgtcctgatgccacaagttttagatgtgatgatgcgccattgcttgcctttatatatgggcagatgagtaactgttttgtgctcatttttcatctctgccagatttaccatgacacggttttccttgacaaggacatgcatataatcatatttatttggttctcagtagtcacatagtctttctataagttgttttattttagtacagcaaagtgccacatctggtacagcgaattacgcttctacacgatgtgttcttttttgtcattagttattttggtctaaaacaaccttagggaattagcgctgtcaccatcactttcatttatatctcaatgtgtgtacaacacctgcttaccattagtttttaaagggcaagggaaagaatagagcattgggatttgctaacctgtacatattgtgtttttgttgttcttgatttatcgtttctgtagagatttcatcttgatgtaatatgtgcagaattgatgtgataatttttctgacaaacaaccggagctacgtattgcctgacacccagtggaaaatagctgaacactaacagacggtctgtgttgccgttatattaccatggatgtccatttcaagacattccatgaggattgtatttccacatcacaaggcagataggcagcaatcatgcatgtttgatgaattgatgttgatgtagaggagttatgtgtctgcacaaattaatgagcaatgcaaagattaccgcagacctagataaacgttaacttgcaattacatctgaagttgtagcccctatttgtttgattaattaattgtaatgtgcaacaggaaaatatttagcagagtcagatgtattaaatttatatatcatttatcaataaaacattctgtagagcatataaagctaattttgagtagaccccatccaattaaactgataagatatgcatttaccagagtctaaaaatatttagcagatgcctcttgtttagttttgagtacaatctaacaattatattataagcataatgctcttttaacaaagtaacttgaatagttgatgcaaaatggaacaacacactcacacagggttgtgatgttgtccagttattgatggcataccacttatcttattcggaggatcctgtatagattattttggtcgaggtcgaggagccttgcggagttctttttatttattagcaatcagccattgattgcatacagagtgcatgccttttgcttctatgtatggtgcataaaaaaagttaggctgcagaattagatcacagtgcaataagctgtttaccattatcttttagagagcaaggaatggagcgttgagattatctagtcatgtacataactgtgtttttgttgtcttagtttcctatttctgtagagacttcattccttctgtcgtaatacacgcggagtgtgatgtaataatgtcctgccgaacaactggggttacttattgcctgacactgtaaaacagtatgattcaatgtttcaaacactactagttcatgtgttgtacacttgtgttttgctattgtcaccgatttcaaaaacattccatgacagttgcattttttggatcacatggcaaataggtagtgaccatgaatattttatgttcaagttattttgacgtacaaattagtgtgcaaaatactatgattattgccagacctcaatgacttgtagccctttgtttgcttatttaatcgattgtaatgtgcaagaggaaagtttttagcagaatcgaatgttcttaatctatacaggatttttcaatacatcattctgaagtctgaacaacatataaaaatctggagtagaatcatatgcagtgaacatacacagcctcctgtttagctctgaagtctgacgtaacaaatatactaggagcataatggtttttaacgaagatacttgaacagttaacctcaatggagcaacacaggattctggtcttgttcagttttgatttgaaaccaaacgagaagctgggtttaatttttattttcccccccagctgcatatatatgacttaagtttaaagacccctcattgtaccctttacatgtggcagtggcactgttgtcaaaattgttccagatccttggctgacgaaatttttttttgggatgaaattgcagaaaaggtacgaagacatatcggttttggggcagaggccagctgaggaatgataaattttggtcaccagtttgcttcggtttgaccgtttcattttggcacagtaataaacgatgtaaacttacgctgctcctatgacctccttctcattcgtttactctgaaaatgcttttgtggggatttcgtggtgcatgattgaaacctgttagggcttgttcggttagctctcaatccacatccatgtggattgagtgggattggatagttttgaatcccaaacaagcccttatatagaacatgcaaatactaaaataccttggaggattcctttgttaccttttccccgttctagtttttgtcatgacccggagcatgtactctgcccttccaaagttcggtggtcgtcgacgttcctccgcatccaaagaggaagtagtgttatagaatgatgtaagcaaactaattggtttgccacattagtgttataggatgatgtaagtaggctaattggtttgccacattagattttcattaagttggatgagagaaagaagagaagtagactgctaagagcaagtttaacctccgtcttaaattaaaattcgttttagataattaatagattcgtacaaaaa

SEQ ID NO: 124164 - DNA, 680 bp, Zea Mays
acatttgaggaatccgcctttgatataaagaagacgctcccgaatccgtctccgcctcctgtcgctcgctctccctgtctcccgcacgccgacccgcagccgccgccgttcgccatgggtttcctcgacgcgctctaccgtgtggtgatgcgccgcaacgccgtctacgttaccttcgtcgtcgccggcgctttcgcgggcgagcgggcggtggactacggcgttcacaagatctgggagatgaacaacctcgggaaaaggtacgaagacatatcggttttggggcagaggccagctgaggaatgataaattttggtcaccagtttgcttcggtttgaccgtttcattttggcacagtaataaacgatgtaaacttacgctgctcctatgacctccttctcattcgtttactctgaaaatgcttttgtggggatttcgtggtgcatgattgaaacctgttagggcttgttcggttagctctcaatccacatccatgtggattgagtgggattggatagttttgaatcccaaacaagtcaaacttcttctcaattttttccaatctcatccaatccatatgtattaggaataaccgaacaagcccttatatagaacatgcaaatactaaaataccttggaggattcctttgttaccttttccccgttctagtttttgtcat

SEQ ID NO: 124165 - DNA, 249 bp, Zea Mays
atgatcacattggacagtgttttcttgaaggtgtttatagcatcctctggatccccttttgctatagatgccaagtgtgtctcatcaagtttgaaaagccagaatctccatttcttagacacttctccatcgatgcgaatagaaatgttagtccagccttcgtggtggaattccagtcggcgcaacccaaatccgacgccagcacctatggccttgacaaatgcttctttgagacaccaatacctataa

SEQ ID NO: 124166 - DNA, 563 bp, Zea Mays
tcgtctgcgggtccggtcccggtggtctcggtccgaccccaacgaagggcgaggagagaggaagaggcgagatgccgcaccgagcgcggccgatgacggggctgctggtgttcatgggcgtcaacctcgcgctcttcaacaccatcactcccgtctacgacttcgtctgcttcctcccccactgggaacgaaggagagaacaccgccgaagggaacttgaaggtctgcaagcgaagggttctgtagaaactactaactgaactctctcctaggtaaggaccaagcttcccaattcctctgttccaaatttttattcgttcttgcagatgcaagaaacgtgctctcatgattcctgaagcaattaaactcataaccttttctttgtcacatatagaccattcttttttgccgctagttgtctcaagtatcaagatgttcgcaatagctactctttttttttatgtagagaaacatccccttgtaccttgtgatgatttgagatatgttttgaccatttctattttctcatttttattgataaattgacaccattgtgtgttctg

SEQ ID NO: 124167 - DNA, 1923 bp, Zea Mays
actataataggttctctcgagccttcgccgccaagagcccgatacccgccgtcctccctgctcctgctgccgcgtgcccctctccggccacccgccgccggcgcagtgtccatgaactagcacctctttcttcgcccggtacccattcagttcgtccgcctccttctcttcgagtttgggtgcccatggagaccagcagtgcgcccgccgccgccaccgaggccggctggtacgtgcttggaccgaaccaggagggcgtcggaccctacgcgcttgctgagcttcgagaacatttcgcaaacggttatttcaatgagagcacaatgctctgggcagaagggaggaaggaatggatgccactctcgtccatctctgagctacactccgcagtcgcagcgaaggatcaatctgaacaagatgctccagatgttgatgatgattttgagaaatttcagaaggaggttatcgaagccgagacagaggtgaaggccttgaaaggcaatgatgtggaccagcaagatgatgagcggccagcaaccccccctgatggagaggaagaatttactgatgatgatggcaccatttacaaatgggaccgtactttgagggcatgggttcctcaaaatgatgcatctggtagcaaggaagattacgctgttgaagagatgacttttgcagttgaggaggaaatatttcaggcacccgatatcctgggtcctgcattagaagaaatcaacaatctacctgaaagcaaaaataaaggatcagataaagcagaaatgagaggagacaaaaagcggaaatcttatgagaatccagctgagaaaaaggaagctaacaaacctccggacagttggtttgatctcaaagtaaacacacatgtctatgtaactggtttgcctgatgatgtcacagtggaggagattgtggaggtattttccaagtgcggaataataaaggaggacccagagactaaaaagccacgagtgaagatttatactgatagagaaaccggcaggaagaagggtgatgccttggtgacatatttcaaggagccttctgtagctttagcggttcaattgttggatgggacaccattccgtcctggtggtaagactcatatgtctgtaagtccagccaaatttgagcagaaaggtgatgttttcgtttcaaagaaaactgacaagcaaaagaagaggaagataaagaaggttgaggacaaaatgcttggatggggtgggcatgacgataagaagctgatgattcctgctacagtaattttaaggcacatgttcactcctgctgagctgagagctgatgaagagcttcttcctgagcttgaggctgatgttagagaggaatgcatcaagtttggtccggtggataatgtcaaggtttgtgaaaatcatccacaaggtgtcatattggtgagattcaaagacaggaaagatggtgccaaatgcatagagaagatgaacggcagatggtttgctggacggcaaatccatgcgagcgaagacgatggctctgttaaccatgctcttatccgtgattacgacgcggaggtgtcaaggctggatcgatttggacaagagctagaagagtccacatagagtgtatatatacacacacacaccagggattagagtaggtgtgttacctcattcataggtaggttcgcctgattgaacatgagaaagaagttattggatacacctgctaataagagtagtgaccggcttgcagagctggtgatatcatcactagcgaagtagcagcacactgctttctcaaatgtgttgtttaatgaatgagaagctcatatcgatactattaacctcggctccctatgaaagtacagtgggcatttctatctgaaatgtgggaatttttatatgcattactggcttgttcgtactggtt

SEQ ID NO: 124168 - DNA, 1808 bp, Zea Mays
cgccgtcctccctgctcctgctgccgcgtgcccctctccggccacccgccgccggcgcagtgtccatgaactagcacctctttcttcgcccggtacccattcagttcgtccgcctccttctcttcgagtttgggtgcccatggagaccagcagtgcgcccgccgccgccaccgaggccggctggtacgtgcttggaccgaaccaggagggcgtcggaccctacgcgcttgctgagcttcgagaacatttcgcaaacggttatttcaatgagagcacaatgctctgggcagaagggaggaaggaatggatgccactctcgtccatctctgagctacactccgcagtcgcagcgaaggatcaatctgaacaagatgctccagatgttgatgatgattttgagaaatttcagaaggaggttatcgaagccgagacagaggtgaaggccttgaaaggcaatgatgtggaccagcaagatgatgagcggccagcaaccccccctgatggagaggaagaatttactgatgatgatggcaccatttacaaatgggaccgtactttgagggcatgggttcctcaaaatgatgcatctggtagcaaggaagattacgctgttgaagagatgacttttgcagttgaggaggaaatatttcaggcacccgatatcctgggtcctgcattagaagaaatcaacaatctacctgaaagcaaaaataaaggatcagataaagcagaaatgagaggagacaaaaagcggaaatcttatgagaatccagctgagaaaaaggaagctaacaaacctccggacagttggtttgatctcaaagtaaacacacatgtctatgtaactggtttgcctgatgatgtcacagtggaggagattgtggaggtattttccaagtgcggaataataaaggaggacccagagactaaaaagccacgagtgaagatttatactgatagagaaaccggcaggaagaagggtgatgccttggtgacatatttcaaggagccttctgtagctttagcggttcaattgttggatgggacaccattccgtcctggtggtgatgttttcgtttcaaagaaaactgacaagcaaaagaagaggaagataaagaaggttgaggacaaaatgcttggatggggtgggcatgacgataagaagctgatgattcctgctacagtaattttaaggcacatgttcactcctgctgagctgagagctgatgaagagcttcttcctgagcttgaggctgatgttagagaggaatgcatcaagtttggtccggtggataatgtcaaggtttgtgaaaatcatccacaaggtgtcatattggtgagattcaaagacaggaaagatggtgccaaatgcatagagaagatgaacggcagatggtttgctggacggcaaatccatgcgagcgaagacgatggctctgttaaccatgctcttatccgtgattacgacgcggaggtgtcaaggctggatcgatttggacaagagctagaagagtccacatagagtgtatatatacacacacacaccagggattagagtaggtgtgttacctcattcataggtaggttcgcctgattgaacatgagaaagaagttattggatacacctgctaataagagtagtgaccggcttgcagagctggtgatatcatcactagcgaagtagcagcacactgctttctcaaatgtgttgtttaatgaatgagaagctcatatcgatactattaacctcggctccctatgaaagtacagtgggcatttctatctgaaatgtgggaatttttatatgc

SEQ ID NO: 124169 - DNA, 939 bp, Zea Mays
tataataggttctctcgagccttcgccgccaagagcccgatacccgccgtcctccctgctcctgctgccgcgtgcccctctccggccacccgccgccggcgcagtgtccatgaactagcacctctttcttcgcccggtacccattcagttcgtccgcctccttctcttcgagtttgggtgcccatggagaccagcagtgcgcccgccgccgccaccgaggccggctggtacgtgcttggaccgaaccaggagggcgtcggaccctacgcgcttgctgagcttcgagaacatttcgcaaacggttatttcaatgagagcacaatgctctgggcagaagggaggaaggaatggatgccactctcgtccatctctgagctacactccgcagtcgcagcgaaggatcaatctgaacaagatgctccagatgttgatgatgattttgagaaatttcagaaggaggttatcgaagccgagacagaggtgaaggccttgaaaggcaatgatgtggaccagcaagatgatgagcggccagcaaccccccctgatggagaggaagaatttactgatgatgatggcaccatttacaaatgggaccgtactttgagggcatgggttcctcaaaatgatgcatctggtagcaaggaagattacgctgttgaagagatgacttttgcagttgaggaggaaatatttcaggcacccgatatcctgggtcctgcattagaagaaatcaacaatctacctgaaagcaaaaataaaggatcagataaagcagaaatgagaggagacaaaaagcggaaatcttatgagaatccagctgagaaaaaggtatagtttccaagtcattcttggagttatttgtaagtttgcgcattttaattctagtcttcaataaactagtaacctattgaacttctgtggtaggaagctaacaaacct

SEQ ID NO: 124170 - DNA, 166 bp, Zea Mays
aaggacaatggcaactgaccacagaatattgttgaattataacatctctgcaaatccaccagtgcaaacaaagactagaccatacaggcaggcaaaaacgaaatacttgtcgcagcacaagccagttgctacaccattgtcagtttgtcactaaacttggaacgac

SEQ ID NO: 124171 - DNA, 2093 bp, Zea Mays
tcgtcgccgacccctcctccctccccgcgtcccccgacaagccatccgcggccatgatcaccgcgctggacctctaccacgtgctgacggcggtggtgccgctgtacgtggccatgacgctggcgtacggctccgtccgctggtggcgcatcttcacgccggaccagtgctccgggatcaaccgcttcgtggcgctcttcgccgtgccgctcctctccttccacttcatctccaccaacgaccccttcgccatgaacctgcgcttcctggccgccgacacgctgcagaaggtggccgtcctcgcgctgctggcgctggcctcccgcggcctctcctccccgcgcgcgctcgggctcgactggagcatcacgctcttctccctctccacgctccccaacacgctcgtcatgggcatcccgctgctgcgaggcatgtacggcgcgtcgtcggccggcacgctcatggtccaggtcgtcgtcctccagtgcatcatctggtacacgctcatgctcttcctcttcgagtaccgcgccgcgcgcgcgctcgtcctcgaccagttccccgacggcgccgccgcgtccatcgtctccttccgcgtcgactccgacgtcgtctcgctcgccaggggggacgtcgagctcgaggccgagcccgacggcgtcgccggcgccggcgccgtctcctcccgcggcggggacgccgggcgggtgcgcgtcaccgtgcgcaagtccaccagctcgcgctccgaggccgcgtgctcgcactcgcactcccagaccatgcagccccgtgtgtccaacctctccggcgtggagatctactcgctgcagtcgtcgcgcaaccccaccccgcgcgggtccagcttcaaccacgccgacttcttcaacatcgtcggcgccgccgccaagggaggcggaggagcggcgggggacgaggagaagggcgcatgcggcggcggcggcggaggacactcgccgcagccgcaggccgtcgccgtgccggccaagaggaaggacctgcacatgctcgtctggagctccagcgcctcgcccgtgtccgagcgcgccgccgtgcacgtcttcggcgccggcggcgctgaccatgccgacgtcctcgccaaaggagcccaggcctacgacgagtacgggcgcgacgactacagcagcaggacgaagaacgggagcggcggcgcggacaagggcgggccgacgctgtcgaagctggggtccaactcgacggcgcagctgtaccccaaggacgacggcgaggggagggcggcggcggtggcgatgccgccggcgagcgtgatgacgcggctcatcctcatcatggtgtggaggaagctgatccggaaccccaacacctactccagcctcatcggcgtcgtctggtccctggtctcctacaggtggggcatcgagatgccagcgatcatcgcccggtcgatttcgatcctgtcggacgcgggtctcgggatggccatgttcagcctaggcctgttcatggcgctgcagccgaggatcatcgcgtgcgggaacaagctggcggccatcgcgatgggcgtccggttcgtcgcaggccccgcggtcatggccgccgcctccatcgccgtcggtctgcgcggcgtcctcctccacatcgccatcgtccaggctgctctgcctcaggggatcgtgccgttcgtgttcgccaaggagtacggcgttcatcccgacatcctgagcacagccgtgatcttcgggatgctcatcgctctgcccatcaccctggtctactacatcttgctggggctgtgagcctctctcgctcgcttcttcagcgtgcggaaggcgccatgctgtggtgtatcggccccacatgaaatttctgatgagcattagcgattactattagcttaggtagggaaacgaaagatagctccgacgacagcgatctattcagtgattcagtgagtgaggcattgcgatctgtcaaacatgctgacctgcggtcgaagaatcgatatatatatatcttatcttgcttcatgctgtctgaagataaacattatatatcttgtttcctttggagaaatattagcaattttagcaata

SEQ ID NO: 124172 - DNA, 2190 bp, Zea Mays
tcgtcgccgacccctcctccctccccgcgtcccccgacaagccatccgcggccatgatcaccgcgctggacctctaccacgtgctgacggcggtggtgccgctgtacgtggccatgacgctggcgtacggctccgtccgctggtggcgcatcttcacgccggaccagtgctccgggatcaaccgcttcgtggcgctcttcgccgtgccgctcctctccttccacttcatctccaccaacgaccccttcgccatgaacctgcgcttcctggccgccgacacgctgcagaaggtggccgtcctcgcgctgctggcgctggcctcccgcggcctctcctccccgcgcgcgctcgggctcgactggagcatcacgctcttctccctctccacgctccccaacacgctcgtcatgggcatcccgctgctgcgaggcatgtacggcgcgtcgtcggccggcacgctcatggtccaggtcgtcgtcctccagtgcatcatctggtacacgctcatgctcttcctcttcgagtaccgcgccgcgcgcgcgctcgtcctcgaccagttccccgacggcgccgccgcgtccatcgtctccttccgcgtcgactccgacgtcgtctcgctcgccaggggggacgtcgagctcgaggccgagcccgacggcgtcgccggcgccggcgccgtctcctcccgcggcggggacgccgggcgggtgcgcgtcaccgtgcgcaagtccaccagctcgcgctccgaggccgcgtgctcgcactcgcactcccagaccatgcagccccgtgtgtccaacctctccggcgtggagatctactcgctgcagtcgtcgcgcaaccccaccccgcgcgggtccagcttcaaccacgccgacttcttcaacatcgtcggcgccgccgccaagggaggcggaggagcggcgggggacgaggagaagggcgcatgcggcggcggcggcggaggacactcgccgcagccgcaggccgtcgccgtgccggccaagaggaaggacctgcacatgctcgtctggagctccagcgcctcgcccgtgtccgagcgcgccgccgtgcacgtcttcggcgccggcggcgctgaccatgccgacgtcctcgccaaaggttggtaacaatgcgtgatcttttgcttgtatttcctaaccaaaatgttgtctgctgcatttttattgtcaccaatgggtgtgcacaacacaagcaggagcccaggcctacgacgagtacgggcgcgacgactacagcagcaggacgaagaacgggagcggcggcgcggacaagggcgggccgacgctgtcgaagctggggtccaactcgacggcgcagctgtaccccaaggacgacggcgaggggagggcggcggcggtggcgatgccgccggcgagcgtgatgacgcggctcatcctcatcatggtgtggaggaagctgatccggaaccccaacacctactccagcctcatcggcgtcgtctggtccctggtctcctacaggtggggcatcgagatgccagcgatcatcgcccggtcgatttcgatcctgtcggacgcgggtctcgggatggccatgttcagcctaggcctgttcatggcgctgcagccgaggatcatcgcgtgcgggaacaagctggcggccatcgcgatgggcgtccggttcgtcgcaggccccgcggtcatggccgccgcctccatcgccgtcggtctgcgcggcgtcctcctccacatcgccatcgtccaggctgctctgcctcaggggatcgtgccgttcgtgttcgccaaggagtacggcgttcatcccgacatcctgagcacagccgtgatcttcgggatgctcatcgctctgcccatcaccctggtctactacatcttgctggggctgtgagcctctctcgctcgcttcttcagcgtgcggaaggcgccatgctgtggtgtatcggccccacatgaaatttctgatgagcattagcgattactattagcttaggtagggaaacgaaagatagctccgacgacagcgatctattcagtgattcagtgagtgaggcattgcgatctgtcaaacatgctgacctgcggtcgaagaatcgatatatatatatcttatcttgcttcatgctgtctgaagataaacattatatatcttgtttcctttggagaaatattagcaattttagcaata

SEQ ID NO: 124173 - DNA, 1775 bp, Zea Mays
tcgtcgccgacccctcctccctccccgcgtcccccgacaagccatccgcggccatgatcaccgcgctggacctctaccacgtgctgacggcggtggtgccgctgtacgtggccatgacgctggcgtacggctccgtccgctggtggcgcatcttcacgccggaccagtgctccgggatcaaccgcttcgtggcgctcttcgccgtgccgctcctctccttccacttcatctccaccaacgaccccttcgccatgaacctgcgcttcctggccgccgacacgctgcagaaggtggccgtcctcgcgctgctggcgctggcctcccgcggcctctcctccccgcgcgcgctcgggctcgactggagcatcacgctcttctccctctccacgctccccaacacgctcgtcatgggcatcccgctgctgcgaggcatgtacggcgcgtcgtcggccggcacgctcatggtccaggtcgtcgtcctccagtgcatcatctggtacacgctcatgctcttcctcttcgagtaccgcgccgcgcgcgcgctcgtcctcgaccagttccccgacggcgccgccgcgtccatcgtctccttccgcgtcgactccgacgtcgtctcgctcgccaggggggacgtcgagctcgaggccgagcccgacggcgtcgccggcgccggcgccgtctcctcccgcggcggggacgccgggcgggtgcgcgtcaccgtgcgcaagtccaccagctcgcgctccgaggccgcgtgctcgcactcgcactcccagaccatgcagccccgtgtgtccaacctctccggcgtggagatctactcgctgcagtcgtcgcgcaaccccaccccgcgcgggtccagcttcaaccacgccgacttcttcaacatcgtcggcgccgccgccaagggaggcggaggagcggcgggggacgaggagaagggcgcatgcggcggcggcggcggaggacactcgccgcagccgcaggccgtcgccgtgccggccaagaggaaggacctgcacatgctcgtctggagctccagcgcctcgcccgtgtccgagcgcgccgccgtgcacgtcttcggcgccggcggcgctgaccatgccgacgtcctcgccaaaggagcccaggcctacgacgagtacgggcgcgacgactacagcagcaggacgaagaacgggagcggcggcgcggacaagggcgggccgacgctgtcgaagctggggtccaactcgacggcgcagctgtaccccaaggacgacggcgaggggagggcggcggcggtggcgatgccgccggcgagcgtgatgacgcggctcatcctcatcatggtgtggaggaagctgatccggaaccccaacacctactccagcctcatcggcgtcgtctggtccctggtctcctacaggtggggcatcgagatgccagcgatcatcgcccggtcgatttcgatcctgtcggacgcgggtctcgggatggccatgttcagcctaggcctgttcatggcgctgcagccgaggatcatcgcgtgcgggaacaagctggcggccatcgcgatgggcgtccggttcgtcgcaggccccgcggtcatggccgccgcctccatcgccgtcggtctgcgcggcgtcctcctccacatcgccatcgtccaggctgctctgcctcaggggatcgtgccgttcgtgttcgccaaggagtacggcgttcatcccgacatcctgagcacagcgtatggtccaataacatcgcatggtttcatcacttgccatagttaa

SEQ ID NO: 124174 - DNA, 5103 bp, Zea Mays
tcctcggcgtccaccgccgccgccgcggagcagacagacgcagagaggatggatgccctggatcggatgctcacgcggctggccctcgccgacgacgcgcacctcgcgccggtgctcgcccgcgtcctcccctacgccgtcacctcactggcgtcccccgcgccggccgtccgaaagctcgttatggaaattcttagtcacattaacaaaagggtgaaacacaggccagagatatcactgccaatgctggagttatggaagatctatactgaacccacttcctcaacaatggtccgaaacttttgtatcctatatattgagatggcgtttgaacgcctgccgactgaggagaaaggaaacatcgcgcctgatcttttaattaatatatcaaatattccacctcagcatcaagggatcatcttgcgacttgtaacaaaggctattggtgaatgtaacacacataaggtggatgagacgattgcatcaaaatatcgagtaataaccgaatccagtgatggtcttttatttgctgacttctgttttcacacattattgtatcaagcaccacctcaaggcagtggatgcccagcaggactgtcagttgtccaatcagaacgtgtcaccgggaaacaacccctaaaaattgacgtacttgcatcaagaaagctaggaatcttaaatgtcatcgaagctatgaacttcacacctgagattgtctaccctctttatttatctgcttcttcagatagccaagatgcagtttctaagaaaggagacgagttcttaaagcgcaaagcttcaacagtgaatttagaagatcccgaccttatcaagagactgttcacactgttcaacggcactgtgggtgcagaaaatatagctgcagagctgaaagtttctccagcacatgcttcattgcgtatgcggcttatgagtgttttctgccgatcagttgctgcagcaaatgcatttccacacacacttcaatgtatcttcggctgcatctacggaagtggaactacttcaaggctaaagcagttaggaatggagttcactgtctgggttttcaaacatgcagtaactgaccagctaaagttaatcggtccagttattcttagtggaatattgcgctcccttgatggttcttcaactgcagaaacagattctactggtagagataccaaaatatttgcatatcaggctatcggtttgcttgcatctcgcatgccaaatttattcagtgataaaactgacatggctatacgactttttactgctttgagattggaggatcaatctcttcgtttgacaattcaagaggcagctacttcccttgctacatcatataagcgtgcttccacgatagtactgaaggatcttgagtcacttcttctggaaaattgtgaagcggagcaaagtgaggttcgcttttctgctataagatgggcaacaacattgtacgatacacgacattgttcaagccggtacatttgcatgattggggcttcagatgttaaactggacataagggaaatggctctagctggtctaaatcttatgaatgatgggaggcaatcatctgcagggtctgttgatttcagctatcctgatataaaggagatgataaattatatctgttgtcagcgacctcagttgctgcattctgatgagcagacaaatggaaaattgcttttcccttcaaaaacatttgtttcaatgatcaagtttctgatgaagtgttttgagtctagtgataacttgaaacttttgcaagaagatccatctcattctgctgtagcaaaaatgtgtgtcatcttggaacatgccatgtcatatgaagggtctagtgaactgcatgcgctggccttgaagtcattggtggacctttcttctcgtgaaccaaagttggtgtcattgaggtatgcagaacgcataaattggctaagatctcttttgggtcatgttgattctgatgcccgtgaagctgtgtcacgcctgcttggtattgcttcttcagctctttcaacctcttctgcactaaatcttctgtctgagctcacttcaactctcagtcaaaaccgtccatcaagatttgaaaattaccatggtgttctttgtgcgatcgggtacctaacagctggtgctttgaagcaatcttgtataactgaggatatggtaaaaaatgtagttgatattcttgtaaaagtagttacttctgaaggttcggcattagcatctgttgcaatggaatctcttggtcacattggtctgcgttgtgcattgccttccatcaaccaaaactcttctacaggtacactattaagcgttctccgtgagaggctgactaagcttctttctgaaaatgatactaaagctcaacagaaaattcttgtatcattgggccacatatcttggaatgagatgtcctttcctcacctgaatgatgcgttagacttgatttttagtctttcacgttctaaggtagaagatgtactttttgctgcgggggaggctctatctttcatatggggagaagttcctgtgacagcagatgtgatattggagacgaactttgtttccctttcccaggccacaaactaccttactggtgatgcatctctagtctcgagtaactcctatgaaaaaagtggctgtgaagaagcacactcaattgcacgagaagaaattattaaaaagttgttcgaaacactaatttatagcagtagaaaagaagaacgctgtgcaggtactgtctggttggtgtcactgacgatgtactgtggccgacataaaaaaatcctagaactacttccacaaatccaggaagccctttcacatcttcttggtgatccaaatgagcttacacaagatttggcatctcaaggaatgagtattgtgtatgagcttggtgatgcatctatgaaagaagagctggttcatgctctagtgaacacactgactggtgctgcaagaaagaaaaaagccattaagttgatggaggattctgaggtctttcaagaaggcacaattggcaataatcctactggagggaaacttagcacgtacaaggagctgtgcagtcttgccaatgagatggggcaacctgacctgatatacaagttcatggatctagctaattatcaggctgctctcaattccaaaaggggtgctgcttttggattttccaagatagccaaacaagctggcgaggcacttcaaccttatctgaataccttaattcctaggcttgtccggtaccaacatgaccctgataaaaacatccaggcgtgttacggacgttttatgttattgggcctcccaaaggtttgtaaacatttgaggaatatatggacaaccaccttccgtgcgatggatgacataaaggaaactgtgcgaactgccggtgacagtttgtgccgagccgtaagctcattgacaattaggctctgtgatatatcactaacttctacttctgaggcaaacgaaacgatgaacattgtgctgccatacttgctttctgagggcatactcagtaaagtatcaagtgttcaaaaagctgctattagtttggtcatgaagcttgctaagggtgctggtcctgcccttcgtcctcatctgccagaacttgttagttgtatgcttgaatgtttgtcaagtctggaagatcaaaggttgaattatgttgagatgcatgcagggaatgctggcatcaaaacagataagcttgaaactttgcgcatagctgttgctaaagattctccaatgtgggaaactcttgatatctgtataaaagttgttgacaagaattcacttgatctattggttcctcgcctggctcaaatgattagatcagctgttggcttaaatacaagggttggtgttgctagtttcataactctattggtgcagaaggtcatggttgacatcaaaccattcgcagcagtcttaatgaagttattgcatagtgcagttctggaggaaaggagttctgccgctaaaaaggccttcgcgtcctcttgtgctactgttttgaaatacgctagtcctccccaggctcagaagcttatcgaagatactacgtctctgcattcaggtgggaaaaacgatcagttgtctggtgcaattcttattaaagcctacttgagcaatgcatcggatattcttggtggatataatgcggtggttatccctgtaatttttgtgtcgagatttgatgatgataaagacaccagtgctttatatgaagaactttgggaggatattcctagtagtgaaagagtaaccctaacactatatttaccagaaattgtatctcttttatgtgatggcatgtcattgtcatcatgggctggtaaaagaaagtcagccaaggctataaagaagctatgtgatgttctaggagaacccctttcagcacactaccagaatattctcaaatcacttctgaaagaattgccaggtcgattttgggaggtgattacggcattcagagatccaggatttttcaatagtgtgtttccaatgctgttcgaggtttctaaccaatctgccatctcgaagacaaagggctctgctgaactagatgaaagtgaaggtgcttctgtttctctggataaagtgctcaattgtgcaacatcttgcatcagtgttgcttttccacaggatattatcaaccaaaagaagaatgttgtagaattaatattgaattctctcttgcctgaggagagttggcaagttaaactatcatccttcttgtgtatcaaggagttgtgcctcaaatttgacaattctggtgatagtaacacatggcctcaagacacagcttacttggttgaggagctatttcatttggtatcaccgaaattagtagactccataagattagtaaagattgctcaggttcacgttgctgcatcggagtgccttcttgatttgagcaaactgtacagagacttcccgctgtcgaacagaacagaggccaagttcgaggatgaactcacagagctctgcgagtctgaaaaaagcgaacaagcaaaggcgattctgaaggaatgcctggccattcttaaagctctccctggagtaaccatgacgacggattag

SEQ ID NO: 124175 - DNA, 333 bp, Zea Mays
tctgtagcattgccagacgcgtttgcagacgcgtaccgacttgtaaatcgggtacgatgcgcagcaccgccgaaagcgaaactcatcgctacattttaccgtcacgcgctggatatagaacgtatgatgtcgatgaagtgccagcggcgcgatggtcgggtttaacgttcatttccactctctggcaagcgcctcgattactgcgatgtttagttaatcactctgccagatggcgcaatgccatctggtatcacttaaaggtattaaaaacaactttttgtctttttaccttcccgtttcgctcaagttagtataaaaaagcaggcttttata

SEQ ID NO: 124176 - DNA, 1526 bp, Zea Mays
agctcgccagccagcatcatggacgtgcaggtgcagcggagcttcgtgatacccgcgccgcagtcggagccgtcggcggaggtgccgctgacggtgttcgacctcgtcgcgcccgcctaccacgtcaccgtgctgttcgcctacgccgcgcccaaccccaccgacgccgccctcctggacgcgctcgccgccacgctcccgcgcttcccgctcctcaccgcgcgcctcgtcgtcgccgacgccgacgagcgccgacgcccgttcttcgtcacggggagaggcggcgcgggcgcgctcgttgtcgaggccaccgtggcgtccgcgctctccgaccacctcccgctcgcgcccgcgccggagctcgcgcgcctgcacgtgccggtcggcggcgacgtggctccgccgccaccgcacatgctcatgctccagatcaaccgcttcgcgtgcgggggcctcgtcatcgcctcgtcctcgtaccaccaggccgcggacggctactccatgtccaccttcttccacgcgtgggccgacgccgtccgcgccaacaacaaacacgacactctactaccggcggcgccgccggcaccggcgccgtacggcccgggcgccatcacgccgcgccggccgccgcggtgcgagttcgagcaccgcggcaccgagttcctgcgcgccgaggacgccgccgccggcaggccggcgccggcccgggtggacccttcggagatcgccaacgtgctgctgcacctcccgagcgacttcgtggcggcgctcaaggcctcagctgcgccgccgcagggacagggccggtggtacacgaccttcgaggccgtgtcggcgcacctgtggcggaagatcacgctggcgcgcgggcgcgccgacgacgcgtcgcgcacggcgctgaacgcggcggtgaacggccgcgcgcgcctcggcgccgacgccctggcgcggggcttcttcggcaacgcggtcctcacggcgagcgccgccacctgcgcccgggacctggcgcggggcgccctggccgacgcggcggcgctgatccgcgcggccgtgcgcgcgcgcgaccgccagtacttccagtccttcgtcgacttcggggagctgcacctgcacggcggcgaggagctgctggagcccacggtcggggacgaggacaacgtgctgctcccggacgtcgcgtccgacagctggctgcacctggagctgcaccgcctggactttgggtgcggcggacggctggccgggatcctgccggcgaaggtcccgctggacggggtggtcgtgctcatacccagcctgcggaaaggaggcggcgtcgacgcgttcgtggcgctgtgggacaagcatgccaaggagcttatggatattgcttacaccatggactagaaaacaactccgtgtcactcatggaggatgaaaacacacacgtcgccaccaaaattatttactgcctaagcatgcgggaaaggaataatatatatatttctcacaagtcaataaagttttatttaaatatatacagt

SEQ ID NO: 124177 - DNA, 2574 bp, Zea Mays
cactgccatggcggcggcccgacccgctcgcccactcggcgctgctccgcctcctcgcccgcgcccgccgatttggacgccgcggacgccgcactacgctgcatgtccctcgcgggggccgcgcccacgcgcgggagcctcggcgcgctcgccgccgcctacgcggacgccggcatggaagagaaagccgccgaggcgtgcgcgcgcgccagggaactgcacggcgcgctccccgacgcgccggactgcaactgcctgctcaggctcctcgtggagcgccgacggtgggagcgcgcccgggggctgtacggcgagatgctcgtccgggagggcggcgcggatgactacagcacctgcgtcatggtccgcgggctgtgcttggaagggcgggtggaggaggggaggggcctcattgaggccaggtggggagaagggtgcgtcccgggtgccgttttctacaatgtgctcatcgacgggtactgccggcgtggggacatcgggagggggctgctgctgttgggcgagatggagacgaaggggatcatcccaaccgtggttacgtatggtgctatcattcactggcttgggaggaaaggcgatttgacgaaggttgagagcttacttggggagatgagggcgagagggctgtcccccaacgtgcagatttacaacaccgtgatcaatgcattgtgcaaatgccggtcggcgtcacaggcatcagatatgctgaaccaaatggtcaaaagcaggtttaacccagatgtcgtcacgtttaatactatgatagcagggttttgccgggaaggggatgttcgagaggctctgaaacttttgagggaggccattaggagggggttggaaccgaatcagttaagctatacgcctttgattcatggcttctgcgtcagaggagaggcgatggttgcatcagatttgcttgtggaaatgatggggagagggcatactccggacatgatcacacttggagcattgattcatggcctcgttgtttctgggcaggttaatgatgccttgattgttcgggagaagatggcagagagacaggtgatgcctgatgctaacatatataatgtgctgatcagtggcctatgcaagaaacggatgctttctgcagctaagaaccttcttgaagagatgcttgagcaaaaagtccagcctgataaatttatatatactactctgattgatgggttcgttaggagtgacaaactcagtgatgcgaggaaaatattcgaattcatggaagaaaaagcctgccctgatattgttgcctacaatgttatgataaaaggatattgtaagtttggaatgatgaaagaggcggttacatgcatgagcagcatgagaaaggctgggtgtatcccagatgagtttacatatactacacttgtcgatggctacgctaaaaaaggtgacataagtgcatcacttaggcttttatgtgatatgatgaagcgaagatgcaagccgaatatttttacatatgcatcactaatatgtggatactgcaacatcggtgacacatacagtgcagaagatttatttgcaaagatgcagtctgagggtctatttcccaatgttgtacactacacagttctaattggtagtctctttaagaaagataaagtgatccaagctgcagcgtactttgagcatatgctgcttaaccattgccctcctaatgatgctacagtgcattatttagtgaatgggctcgtaaactgtaggcacggtatggtcaactcaaaccgcagtgatactaaacaggctcacgagaagagtgcccttttagatgtattcaggggattgatttctgatggattggacccaaggatttcagcgtacaatgctataatcttcagcttgtgtagacataatatgcttgggaaggcaatggacctgaaagataagatgtctaacaaaggctgcttgccagaccctataaccttcctttcacttctttatggattttcttctgctggagaatcagggaaatggaggagtgccttacctaatgaatttcagcaggatgaatttgagataatcaccaagtacatggcattattcaatcagcatgtaactagttcagttgtaggtgaagtctctaggattttacagttatattctgaggagtttcagttcctcaaacaaccagagcagagattcgctggttcctgacccccacaatgtcatggtttacctggcacttggaatcaaggtataacaagaagaatagcatggtttgaaatgccaaggaagctcctgacagggtgtttcctccagcaatgaatttcaagaccgcaagtgcaatctgcaaggcaaagtttccggtggggatcgtccttgaaggtacgcgaattaaatcagccgctccctcgttacagccagcagcactgttgaaactttttcccccccacctgtaatgttagacattagccaaaaacataaagttatttcccgtctgcatatatacttgtgtacatagctgctgaccccataccgagcttctgaccgtgttagcatctagcgcaagaggcatcccgcatgacaata

SEQ ID NO: 124178 - DNA, 310 bp, Zea Mays
cgccccaacggccgggatgcagcacaaacacgaagcgtggcgctggctccgctggccatcgactcgcgccgcggccgtctccacctcctccacctcgctcgtgcagtcgcgctcgcaggccgcggccgccacggcctgagaccgagcccggccatcgcccccgccctcgcggcctcgctcgcgcgcgtgctcgccgcgcgctctaccgacccgtcctggtccagctccctcgcggcgctcctcccttcccgctccccgacgcgcgcctcgccgccaccgtctccgcgctcggggacaacaaccctgacct

SEQ ID NO: 124179 - DNA, 1371 bp, Zea Mays
cccacccatcatccacatcctccagagaaaccggcgagcggggcttcctggaagctgccgttgacccccgacccggaggcataactagggtgtagggggggcggcctgtagtgtagcgcccctcgactcccgagcagcaaccaaccagcaaccgagccagccatgtcgcccacccctgcaccggccgcccgcgccggcgaggagctgccgtccactgaggtggtggtggtccggcacggcgagaccgcgtggaacgcctcccgcgtcgtccagggccaaatggacccggagctgaacgaggccggcaggcggcaagccgtcgtggtggcccgccggctgtcgagagaagccaagcccgccgccgtgtactcgtctgatctgcggcgagccgccgagaccgccgagaccatcgcgagggcctgtggcgtatcaaacgtggtgctgacggaggcgctccgcgagaggcacatggggtacctgcagggcctcaggtgggacgccgcggtggacaagagcccggactccttgcacatcgtcaaggtcatcgagggctctgaccccgacagcagaaaccaggagctgcccggcggtggagagagcctgaaccagctgaacgagcgttgcgtctgcttcctgaacaagatcgcgcaagaacacgccggggagcgggtggtggtggtctcccacggcgcagcgatactggagctctgccggcacaccgacccgccgggcagctgcgtccgcaggcacgtccccaacacctcgctcagcgtcttccgcgtctccgccgccaccgggcagtgggcgctcgagaggtgcggggacgtcggccatctcaagggagacggagacggagacagcttcctggagggctcgttcgggggcgacggggcctcggcgtaaacgtacgtacaggccgatcagccgagagctcgcaccagtcttcctttggatcgaaccattctttggttccgatgctgtttggagcttgtattccattgtttttcaaaaagagaaccaaccattggagtttgaaacgttgatcaatttgtggtttacagccttttgctgtagcgccatgcatggcgtttgacaaaactgcggtatctctgagaaaactgtcttcaaacagcgtgatgcatagctctatcaatctgtcattgcctactgtttgcccctatgttcttaagtcaagactccagagcaaccgctgctcccttgctcgcacgattgaagaatgaaaattaaacattgagggcaagtggattttatctctcctgccccctttagcattcttgctcccaaacaagccataaaattggatgggtcacactagtgatgacaacggtaccattccatatccgtacccat

SEQ ID NO: 124180 - DNA, 1502 bp, Zea Mays
cccacccatcatccacatcctccagagaaaccggcgagcggggcttcctggaagctgccgttgacccccgacccggaggcataactagggtgtagggggggcggcctgtagtgtagcgcccctcgactcccgagcagcaaccaaccagcaaccgagccagccatgtcgcccacccctgcaccggccgcccgcgccggcgaggagctgccgtccactgaggtggtggtggtccggcacggcgagaccgcgtggaacgcctcccgcgtcgtccagggccaaatggacccggagctgaacgaggccggcaggcggcaagccgtcgtggtaacgtctgttcgctcggctcaaccccacccacccattgcacccaccatctacccttattttcttcttctccctggcccaaaacaaaacctgacgacgaagctgctttaattttgtaacgagtgacgaaggtggcccgccggctgtcgagagaagccaagcccgccgccgtgtactcgtctgatctgcggcgagccgccgagaccgccgagaccatcgcgagggcctgtggcgtatcaaacgtggtgctgacggaggcgctccgcgagaggcacatggggtacctgcagggcctcaggtgggacgccgcggtggacaagagcccggactccttgcacatcgtcaaggtcatcgagggctctgaccccgacagcagaaaccaggagctgcccggcggtggagagagcctgaaccagctgaacgagcgttgcgtctgcttcctgaacaagatcgcgcaagaacacgccggggagcgggtggtggtggtctcccacggcgcagcgatactggagctctgccggcacaccgacccgccgggcagctgcgtccgcaggcacgtccccaacacctcgctcagcgtcttccgcgtctccgccgccaccgggcagtgggcgctcgagaggtgcggggacgtcggccatctcaagggagacggagacggagacagcttcctggagggctcgttcgggggcgacggggcctcggcgtaaacgtacgtacaggccgatcagccgagagctcgcaccagtcttcctttggatcgaaccattctttggttccgatgctgtttggagcttgtattccattgtttttcaaaaagagaaccaaccattggagtttgaaacgttgatcaatttgtggtttacagccttttgctgtagcgccatgcatggcgtttgacaaaactgcggtatctctgagaaaactgtcttcaaacagcgtgatgcatagctctatcaatctgtcattgcctactgtttgcccctatgttcttaagtcaagactccagagcaaccgctgctcccttgctcgcacgattgaagaatgaaaattaaacattgagggcaagtggattttatctctcctgccccctttagcattcttgctcccaaacaagccataaaattggatgggtcacactagtgatgacaacggtaccattccatatccgtacccat

SEQ ID NO: 124181 - DNA, 915 bp, Zea Mays
ttttttttttttttttgctcctcaataattcttggttcacatgtcatatctagaacgtgttactggtgccgtgacctgagctccgttactaaccttgtgccggcttgcagacgcgaagataccggcccttgggaggccaaaggctcctgaaatgctggcagtcatgtgctctagcagcactgcagcggcatgtccaagcacgagcagagtttcttcaccacaagaacaaaaaaaatggttctattctacactgataatgaatgctttcttctcgctacaccagcccgccgcacaaagccagacaatgcgtcgtggagaaaccaatttttagtagcaaacaagtggagccttttggtacacggaaagaacgaaccaatccagcgagatctggggaccaagaacaagatccagcgagctgcagtcgagtgcgatcgtttcaacaactccgatgccgaatcagaacgcaagcttcatgccgccgcaccaatccaccctcctacggtacagacaaggccagtcaactcccggacacgccatcgccaccgtcccccatcagcgacgcgtcagcactcgacggcggcgcacgcggcccgccggaacccgggcggcaggtcgggcgcgcggcggagctggaggaatgcctgggacgcgaggagcgaggcgaagcggcggcagacggcggggagcggcgggagcgaggcgcggggcacgcgggcgaggatctccagcaggagctcgtcggggagccccgcgatggggggttcgggctcgggatcctcggcgtcggggactgagaaggggactgggacggggaccgggacggcggtgtggcgggcggggtcggcggggatgcacgacctcgcgaaccacgagagaccgcgcgggtggcagctctccgcggccatggctgaccgc

SEQ ID NO: 124182 - DNA, 971 bp, Zea Mays
cagcccagtcacgtccttcgcagtttgccgtcggccacaccgcatcgagcgccgccgccactcgccctcccctgccatctctcgccggccgccgcctcccgcccaccggccaccgcagcgtgttatatttcagcccctcttgatcggccacccgaaacccgcaggagagaggctaaggaacgatggggtggaaggcggcagagaagctcatcaggcactggaaggtcctgcgtggtgacaacgtgatgatcataagaggcaaagacaagggggagtccgggctcatcaagcgggtcattcggtcgcagaatcgcgtcatcgtcgagggcaagaacttggtcaagaaacacattaagcaaggggaagggcacacaggtggtattttctcggtcgaagccccacttcatgtctcaaatgtccaggtggttgatccagtcactgggaaaccatgtaagattggatacaagtatctggaagatgggaccaaagtcaggtacgctagaggaatgtacgcatcgggcgttgtgataccccggccagaaattctgaaggagagaaggaaaccgaggcccacgtcacctggcccgaaggacacaccaatcgagctggcgcaggagaagacctacgatgaaaaggctgggatcggtatgcccgatctatagctgcggagagttcactgtaatgtgaccaggacctgacgccctgtgctgtgctgtgctgtgcttcccgcgtaataacggtgtactagttaccttcttctgcagaaaatgctttctaggaatgagagcggaaatatttgtaccatttatttaaggtcctgtttggaaacaacccaacagtttttaagacaccagtttttatcttttagctttgagagaccaacttcttgtttttatgaaagtgggaatcaaatttctataaactgagccataaactggtgatatctttagaaccacctcaatttttataaa

SEQ ID NO: 124183 - DNA, 951 bp, Zea Mays
cagcccagtcacgtccttcgcagtttgccgtcggccacaccgcatcgagcgccgccgccactcgccctcccctgccatctctcgccggccgccgcctcccgcccaccggccaccgcagcgtgttatatttcagcccctcttgatcggccacccgaaacccgcaggagagaggctaaggaacgatggggtggaaggcggcagagaagctcatcaggcactggaaggtcctgcgtggtgacaacgtgatgatcataagaggcaaagacaagggggagtccgggctcatcaagcgggtcattcggtcgcagaatcgcgtcatcgtcgagggcaagaacttggtcaagaaacacattaagcaaggggaagggcacacaggtggtattttctcggtcgaagccccacttcatgtctcaaatgtccaggaaaccatgtaagattggatacaagtatctggaagatgggaccaaagtcaggtacgctagaggaatgtacgcatcgggcgttgtgataccccggccagaaattctgaaggagagaaggaaaccgaggcccacgtcacctggcccgaaggacacaccaatcgagctggcgcaggagaagacctacgatgaaaaggctgggatcggtatgcccgatctatagctgcggagagttcactgtaatgtgaccaggacctgacgccctgtgctgtgctgtgctgtgcttcccgcgtaataacggtgtactagttaccttcttctgcagaaaatgctttctaggaatgagagcggaaatatttgtaccatttatttaaggtcctgtttggaaacaacccaacagtttttaagacaccagtttttatcttttagctttgagagaccaacttcttgtttttatgaaagtgggaatcaaatttctataaactgagccataaactggtgatatctttagaaccacctcaatttttataaa

SEQ ID NO: 124184 - DNA, 204 bp, Zea Mays
atgaacaagccgtcatctgccgccaaggcgctcgccgcagtcctgctgctcgcggcctgcgtcgccgcgaccgcccagtacggcggaagcagcagcagcagcagcagcgcgccggggacgggcccggctgacggcgccggctacctcctgggcgtgtccgcggccgcggccgcgctcgccgtcgcggcgttcgtttggacctga

SEQ ID NO: 124185 - DNA, 216 bp, Zea Mays
ggaagcggaggaggacgtagcgcgtatacctgggtggaccgccgctgggcctcgtccaggctgcggcggtggaggtccggcaccatgcggaagcggcggcggcggttcttgacgagcgcgccaacggcggaccgccatcgccgctgcgcctcctcagaggggttcttgggcggcacgtcgaagtgctccttcaggtagctctccagcctctccatc

SEQ ID NO: 124186 - DNA, 1331 bp, Zea Mays
cgaagcagatagtttagttaaattttacactctgatcgagtggccaatattgaatcgatcaagtgcatccatttctctatgcgcaaaatccaagatggtcatgcagatgacttcatggttataaggttatttttttagtaccgatgatgtgctcaaaacatattgtactgtaagtaacatgaagttcccctatggaacttctctgtagcgtttgaacaaatgaagtattgctagtaggctatctcactctcaagactttcgatgtaacagtggcacatagtttggtaatggtaatgatgccttttgggcaatcctgtttgctggagtttggatccagctgggtactgattctgtgtgatttgatattcttaacttgatcttcgtagtcaaaacaatttgtgcaagattttcatataccattttattcaagccatgagacgaatgtttcttcattcgtgtgaccttaaaaggccagtgctaacttgtgttccttttcctctccctttttctgactagtacgaagcacacctatatcagattcagtatttcctttctatgtcctgtacagtctgcttttcttgataaaaatatgctaatttctgtttctgccctttcaggacccaaggaatttacttctgtgttttacagtcttcagaactggagagtaagacgacctgcaactcactgctcccttttccacttcacttgtatgtatgcaaaattgaccaacgaattattgcagtgaagtgatgttttttgctgtatttttcaggcaatatttgagaggtttgatcgtgatcgaagtggcaggatcgacatgtcagaactgcgcgatgctcttctcagtctcggatattctgtgtctccaactgtccttgatctgcttgtgtctaaatttgacaagactgggggcaagagcaaagcaatcgaatatgacaacttcattgaatgctgcctcactgttaaggggctgacagagaagttcaaggagaaggacaccgcctactctgggtcggcgactttcacctacgaggccttcatgctgaccgtgctgcctttcctcattgcgtagtggcagtccactccgccgctcaaaacaagctttataagcttttccaatagtactgtaatattatgcctgctgtaaagagatttatgttcgcagagttgtttttagacgagttgttttgattctggatttaacttgtgttgtgaatcataaagttgctctgaaatggagaatgtacctgttggttgaacagatgctttgtggttgtggtatgtggttggtattggtggctctagggatggcaatgggtaagctatctact

SEQ ID NO: 124187 - DNA, 1306 bp, Zea Mays
aaggaaacctgcccgttgctttgctccccccttcggcatctctacctgcgtgcgtcaccggcatttaatcccgcgttccattccgaacagcgagcacaaccaccgctgctgcgatctcgccgtctccctcctccacgccgtctcggtctccctcccatggccggctacccgcctcccggctccggctacccctacggtcccggcgggggctacggcgccccgccgccgccctacggctcctcgcccgcgccctccgccccgccgtacggcgagaagccgcccaaggaaggcaagacctcgacctcctccgcgcccccctactacggcgcgcctcccccatcctacggcgcgccgcccccctcccagccctacggcggcgggggcgggggcgggggcgggtacgggtacggcgcctcgcagccgccgccctacggcggcgccccgcagcagcagcccccgtacgggggcggggccccggcagggttcggcagcccgttcgcgtcgctggtgccctccgcgttcccgcccggcaccgaccccaacgtcgtggcctgcttccaggcggccgaccgcgacggcagcggcatgatcgacgacaaggagctgcagtccgcgctgtccgggtacaaccagagcttcagcctccgcaccgtccacctcctcatgtacctcttcaccaacaccaacgtccgcaagatcggacccaaggaatttacttctgtgttttacagtcttcagaactggagagcaatatttgagaggtttgatcgtgatcgaagtggcaggatcgacatgtcagaactgcgcgatgctcttctcagtctcggatattctgtgtctccaactgtccttgatctgcttgtgtctaaatttgacaagactgggggcaagagcaaagcaatcgaatatgacaacttcattgaatgctgcctcactgttaaggggctgacagagaagttcaaggagaaggacaccgcctactctgggtcggcgactttcacctacgaggccttcatgctgaccgtgctgcctttcctcattgcgtagtggcagtccactccgccgctcaaaacaagctttataagcttttccaatagtactgtaatattatgcctgctgtaaagagatttatgttcgcagagttgtttttagacgagttgttttgattctggatttaacttgtgttgtgaatcataaagttgctctgaaatggagaatgtacctgttggttgaacagatgctttgtggttgtggtatgtggttggtattggtggctctagggatggcaatgggtaagctatctact

SEQ ID NO: 124188 - DNA, 1524 bp, Zea Mays
gtaccagcaacctaccttgctagtttacacacacgcacgctgcacgcacacgctgcatgcatgtacacaccgacgccaccaccctcctcgtcgtcgtcggccatgcatcatccggttactactcctgccgagaacgacgacgacgtgccaacgtgcgcgccggcgctgtggcaggagcgcctggtgcaggacctgtgcgggtgcgcgggccatgtggaggccggcgccgtcgagagggccgggcgctgcctggcgcgcgccacgggcctcgccgccgccgccgcgggcgacggcccgctccagcgcctggccgtacccatggccgacgccctggcgcgccgcctcgtccgcctcatgctccctgccgtcgccggcgcgctcatcgacccctccgacagcctcgacccgcgcggcgtccgcgccgcgcgccgcaccttcttcgagctctgcccgttccccagggccgccgtcgccgtcgccaaccgcgccatccttgaggccatggagaacgaaaagaatgtccacatcgtcgacttcgcggggcctacggcgcagccatggcagtggctgaagctcctgcacgacttcagccgtcgcccaggcgggccgccgcacctgcgcctcaccatcgtccacgacgaccgggacctcctcgccgccatatcggcgcggctgaccgaggaggccgaggagctggacgtgccattccaggtgcaccgcgtcgtgggcaagatcgaggcgctggaccccagcgacctgcacggcgtgctcaggctccggtccggcgaggcgcgcgcggtcgcgtgcacgctgcagctgcaccgcctgctcgcggtggccgacgacgacgaccacccggcgggcggcggcgccaccctcagcgccggccaccgctccagccggacggcgagcgtcgccgtctcgcggctgcagcggatggcgtccacgtcgtgcccgccgagcgacgtcgacgacagcggcagccccgccacgccgctgggcttcgtctccccgccgccgtccacgccaccgccgccgcagcagcagcgccagacgccgccggcgctggcgagcttcctggcggcggtggcgcgcgcgctggcgcccgcggtggtggtggtcacggagcaggaggccggccacggcggcgtctccttccgcgagcgcttcggcgaggcgctggggtactacgccgccgtgtacgactgcctggacgcggccgccgaggcgtaccgcaggcccgccgccgagcgggcggaggtggagcgcgcggtgctgggcgaggagatccgggacgtgctgctgcgggccggcgcgcatggagctgggcgggttcaggagcgtggcgctgagctacggcgcgatgagggcggggaacgacgtgctggacaggtgcggcctcagcgggtgcgcggcgacggagagcagggagcagggcggctgcctgctcttgtgctggagctcgtggccactctactcggtgtcggcgtggcggccggacgcatcaggctcgtcgggagctga

SEQ ID NO: 124189 - DNA, 456 bp, Zea Mays
atggcgaagcgtgccaccgtggcgagaaatcccgcgtccgattctctttctccggcgaggtggtcaggaaggaggcgcccagggcacgagcatcgatgcctgctcaacggtggcgtcaaggaaggcggggatggaggagagcaccacccacggtcgggactggaactcgacctcctctgctgctatgtactccggtggtggctactcatacttgcggctgtacagagacctaaagaaacctcggctccctacgtccacgacccttcatcgctcgactggatgaacgaggggagggagggcttatatctgtgcgggcacgcgcccccgcaggaagccgcaggccgggaactcgccgcatattccgacgtgtctgttacggtgagcagtcgagtccaagtccatcgtgagatccacgtggaagaaggatttctggatgccgggacccacggtcagtga

SEQ ID NO: 124190 - DNA, 1326 bp, Zea Mays
ctgttgaaaacaaaaatcggcccgatagggcacgccgagagaagcaagctgtaaaaacagccccgaaccgaagaactgttctcctgcgttcgtttctcttctcgacggggacgaccgccagagccgccgccttacgtccagctgccacggtacttcatcgggccctttgccggtgcaggcggcgcagcacccaccgcaccaggctataaatggcaggaaggcaccgggcaccccgacaataccatgatgaacctcgaggataccgtgatggtccaccacctccacttccacgaccaagacctctctcaccgcgtcgcatggcagaggaactgtctaggcgccgtgctgagatccgtagaatccatgaggacaatcagcgtctggcggatgaaattgttagtctcaagcaaaccatgccgcgtttgcaagaagacctccgaatctcaagccaggctgttccaaagctccgggcagagaaagagctcgagtcgagggagctgactcagaggaacctgaagctggaagctgagctgcgtgccttagaacccctcaggcaagacgctctgcatctgcgatctgaagcaagtaaactgcagtctctgaggcaagagttggctgcgaaggttcaaggcctatcaaaagagcttgaacttcagaagtctgaaagccagaaaatgactgctttggtagctgaacgtgatgcgctgtgtcaagaactgctccaggctagaaggcgaagccagagctgactgcgcaggttcaggcaatggagaaggatcttgtggctatggctcaggaggcggagaagctgagggctgatatcgcgaagagaaacacacctactagtttcagcagccgtggaacgtatggagcctcgttgtcgactcctgggatgggtttgcaaggcatgtatgatggcggcggctattctatggctgggagccgctacggcagtggcactggggcttggagctcgcacgatccccatggctacccgcatctttaactgtgcttctgaccggtgttttctcctgaacagctccctgagtaccttggctaagtttcttgtagtagtataacttgtggtgcaccattgctacccttcctctggtcaatacacaacaatataccaactttggttgtcttggttgttttttcccctactgcacacggtgacgctgttgtgagcattagatgtttggccactcggccgttttgccgtggtgagttttggcttaattcattattaggtaacaggcctgtaagctgtatagtaagaataacacaagatcctctaggacctagccaatgcattgtagctacctc

SEQ ID NO: 124191 - DNA, 937 bp, Zea Mays
ctgttgaaaacaaaaatcggcccgatagggcacgccgagagaagcaagctgtaaaaacagccccgaaccgaagaactgttctcctgcgttcgtttctcttctcgacggggacgaccgccagagccgccgccttacgtccagctgccacggtacttcatcgggccctttgccggtgcaggcggcgcagcacccaccgcaccaggattctgattgctcttcattaggctataaatggcaggaaggcaccgggcaccccgacaataccatgatgaacctcgaggataccgtgatggtccaccacctccacttccacgaccaagacctctctcaccgcgtcgcatggcagaggaactgtctaggcgccgtgctgagatccgtagaatccatgaggacaatcagcgtctggcggatgaaattgttagtctcaagcaaaccatgccgcgtttgcaagaagacctccgaatctcaagccaggctgttccaaagctccgggcagagaaagagctcgagtcgagggagctgactcagaggaacctgaagctggaagctgagctgcgtgccttagaacccctcaggcaagacgctctgcatctgcgatctgaagcaagtaaactgcagtctctgaggcaagagttggctgcgaaggttcaaggcctatcaaaagagcttgaacttcagaagtctgaaagccagaaaatgactgctttggtagctgaacgtgatgcgctgtgtcaagaactgctccaggctagggcgaaccttgagtttgagaagaaggcgaagccagagctgactgcgcaggttcaggcaatggagaaggatcttgtggctatggctcaggaggcggagaagctgagggctgatatcgcgaagagaaacacacctactagtaagttctttttttgtgtcccccatttgcatgcttattactgaacca

SEQ ID NO: 124192 - DNA, 567 bp, Zea Mays
aagcgcagatgaggatgacaaaccatctgatccaaattaggacgatcatctaaacccaatgaagtttagcacaaagtagaagatggagagagaagctgaagcttaaatgagctgcttggtaagctggctaggacacggattgaggacgacctgaagccttgccgtgatcttattgagcagctgtttggaaaggagaagggttgacagatcaactggaatggagatgaagccgagcgatcaagagtcagctgcagcagcagtagcacgaccttactccatcctagagttgtgcactaggtggaggttgatgaagactttgccgcaaagatcgatgatgaatttctcgtcgttgaatcaggtggcacagctatgaatctggaatgtggaccaatcgtcatgtgactaattctgtttaaatcacttttttcttctaggagagagctcttttatattcatgaaagatagcctacttactttggcacaatttgctatgaaagtggacagagcatcacaactgaggaatgtatgttcatttaatggtataataataatggcatttgccttgtc

SEQ ID NO: 124193 - DNA, 1696 bp, Zea Mays
atgagggttcaggacgaggacgtggacgacgatggcgaggtgaccgcgccaccgcagcacctggtgttcgcctactacttcaccggccacggcttcgggcacgccacccgcgccctcgaggtggtgaggcacctggtcgccgcggggcatgacgtgcacgtggtcaccgccgcgcccgagttcgtcttcaccatagagatcgcctcccccagcctccacatctgcaaggtcctgctcgactgcggcgccgtccaggccgacaccctcaccgtggaccgcctcgcctcgctcaagaagtgcagtaccaccagacgactgtggtgccccgggagtccatcctcaagaccgaggcggagtggctcaactccatcaaggccttgctccatggatggtcccagcgaagccgaccacgcctcccagcatcgccatgcccgcacctccaaccatcctcgccgacaagctagtgtccccgtccacatccgagatcctcacgcccgggccttggatggaagcccagaatcgccttccatcggggattctacaccacgcgtcgcgccccctccccgcacgcaagcccccgcctgcgcattctccgccaccccatcccctgtccagcgtgtgtgccatggcctccctcgaccagcggcacgcatacgccatcacccctcccaactgctcccacccgagattgtcgctgtccccatctatgcatcaggtctgcgcccgccgaggctgccctcgtcctccccaacggcaaatcgcgatgattatgcccccatccacgcgccgcttccccagttcagcatcaaagttggttgtcttgcaaaacagcttccccaacattttctgaaatctctccaaacaaagaagccacttatgaaaaagcttattggctgcttcacgcgctctttgtttttcaaccatactgtgacttgtgttttgttctatgatgttgtggctataaccaagtggaggtttatggagctaaaggaacatatgcaaggagattttggtgctgaaaatgaagcatatgaaaggtatacacagaatgttaggttattggaggaaacatggtgtcccatggaagatgctgatgttgagcctgaagctgaagcagcttttcttcagaggaaggaaggatggacttgctggtttcggaggcaaatgtgaggttgaagtcgggtaatgaaattgccaatggcttcaactatcttggagcagaagctgaagaaattgccgatgaggatggaaaaccatatgatccaaatgaggacgatcatctaaacccaatgaagttcagcacaaagcatatcagctatttggaaaggagaagccgagaagggttcctctattgataggtcaactggaatggagatgaagccgagcgatcaagagtcagctgcatcagtagcatggccttactctatcctagagttgtgcactatatggaggttgatgaagactttgctgcaaagatcgatgatgaaatcacctctttgaatcaggtggcacagctatgaatctggaatctggcccaatcgccatgtgactaattctgtttaaattatctttttcaaggagagagctcttttatcttcaagaaaggtagcatactttggcacaatttgctatggaagtggctagagaatcacaagtgaggaatgttgaaggatgaattggagcagaaaattaagta

SEQ ID NO: 124194 - DNA, 2284 bp, Zea Mays
aatacctccaccaacatcctccacttttgtgtggctggtggtgccaaagaatctcttatctctggcaacagcgcatcactcacacaatctgtcactccccgacacgcgcacgagctccactccccactccgcacccaacccaaggcgccactgccatggacgcgggcggtccgccgccgctgttcctcctgggcgccgtgctggccgcggcgctggggtggctgctcgtggtctggcgggcggcggcggggcggcggcggtccgcgtcggcgcggctgccgccggggagcacggggctgccgctcatcggggagacgctgcggctcatcgcggcgtacaagtcgccgaacccggagccgttcatcgacgagcgcgtggcgcggcacggcagcggggtgttcacgacgcacgtgttcggcgagcgcaccgtgttctccgccgacccggccttcaaccgcctgctgctggccgcggagggccgcgccgtgagctgcagctacccgtcgtccatcgccacgctgctgggcccgcggtcgctgctgctcacctcgggccccgcgcacaagcgcctccactcgctcacgctgacccgcctcggccgcccggcctcgccgccgctgctggcgcacatcgaccgcctcgtcctcgccaccatgaggggctgggaccgccccggcgccggcgccatgcgcctcctcgacgaggccaagaagatcaccttcaacctcaccgtgtggcagctcgtcagcatcgagcctgggccgtggaccgagagcgtccggcgcgagtacgtgaagctcgtcgacggcttcttctccatccccttccccttcgcctccctcctcccgttcaccgtctacggccaggccctcaaggcgaggaagaaggtggccggagctcttcgggaggtggtaaggaagaggatggacgacaaggcggaggacgactgtggcgccagtaagaagaacggggagaagaaggacatggtggaggagctcctcgaagcggagggcgggagcttctccgtggaggagatggtggacttctgcctgtccctgctggtggctgggtacgagaccacctccgtgctcatgacgctcgccgtcaagttcctcaccgagacacccaccgcactggcgcagctcaaggaagagcacgacagcatcagaggggtaaaaggcaaaggccaagctctggaatggagcgattacaagtcgatgccgtttacacaatgcgtgataagcgaaacgctgcgcgtggccaacctgatcagcggggtgttcaggcgtgcgaacaccgacatccacttcaaaggctacgtgatcccaaagggctgcaagatcttcgcgtcgttccgagccgtgcaccttagcctggaccactacgagaacgcccggaccttcgacccttggagatggcagcagggcaagagcaagctgcagagcgcggaaggggccagtctgttcacgccgttcggcggcgggccgcggctgtgcccgggctacgagctcgcccgggtggtggtttccgtcttcctccaccacctcgtcacgcgctttagctgggaggaagccgaggaggacaggattgtcttcttccccaccacgcggaccctcaagggataccccatcatcctacggcggcgaccggattgcgatgatctctgacctcatggctatgttctccccccttatcttcttcggatcaaggccgaaggctaagcattagatagagtaaggtggatgtcgtggctagtaggtgcatggtggtttctgccactcactcactcactcactctgttgtctgtttgttcctgttcctctctgttttctcttgctctgtaacctggacctggtacgagtcagcagccagcagcaaactcgcgttttgcctgtaaaatctaaaatctgatatgagatgcagatgcccccgcgactgagacggaagactgatgagacagaccatggggacgtcctgcggtgccggtgccgccgctcccttcatgctcgtgcatgcaacgttgttagctaggctgtcgcggtcgtcgccgaccccgcacatgtcgtcgttcctatgaggagaatgatgttgcttgtaagagcatctctacccgtgcacagtacctcaaataggtgcactatatagggccagtttggcagcctgcttcctcgcgtggaattcgcatttttccctgtgtcggcggcccacgcgggattttttcacgggtacggcactagcatgtttggaaggtagcctcgcagagttattggcccggtctcggccc

SEQ ID NO: 124195 - DNA, 2095 bp, Zea Mays
aatacctccaccaacatcctccacttttgtgtggctggtggtgccaaagaatctcttatctctggcaacagcgcatcactcacacaatctgtcactccccgacacgcgcacgagctccactccccactccgcacccaacccaaggcgccactgccatggacgcgggcggtccgccgccgctgttcctcctgggcgccgtgctggccgcggcgctggggtggctgctcgtggtctggcgggcggcggcggggcggcggcggtccgcgtcggcgcggctgccgccggggagcacggggctgccgctcatcggggagacgctgcggctcatcgcggcgtacaagtcgccgaacccggagccgttcatcgacgagcgcgtggcgcggcacggcagcggggtgttcacgacgcacgtgttcggcgagcgcaccgtgttctccgccgacccggccttcaaccgcctgctgctggccgcggagggccgcgccgtgagctgcagctacccgtcgtccatcgccacgctgctgggcccgcggtcgctgctgctcacctcgggccccgcgcacaagcgcctccactcgctcacgctgacccgcctcggccgcccggcctcgccgccgctgctggcgcacatcgaccgcctcgtcctcgccaccatgaggggctgggaccgccccggcgccggcgccatgcgcctcctcgacgaggccaagaagatcaccttcaacctcaccgtgtggcagctcgtcagcatcgagcctgggccgtggaccgagagcgtccggcgcgagtacgtgaagctcgtcgacggcttcttctccatccccttccccttcgcctccctcctcccgttcaccgtctacggccaggccctcaaggcgaggaagaaggtggccggagctcttcgggaggtggtaaggaagaggatggacgacaaggcggaggacgactgtggcgccagtaagaagaacggggagaagaaggacatggtggaggagctcctcgaagcggagggcgggagcttctccgtggaggagatggtggacttctgcctgtccctgctggtggctgggtacgagaccacctccgtgctcatgacgctcgccgtcaagttcctcaccgagacacccaccgcactggcgcagctcaaggaagagcacgacagcatcagaggggtaaaaggcaaaggccaagctctggaatggagcgattacaagtcgatgccgtttacacaatgcgtgataagcgaaacgctgcgcgtggccaacctgatcagcggggtgttcaggcgtgcgaacaccgacatccacttcaaaggctacgtgatcccaaagggctgcaagatcttcgcgtcgttccgagccgtgcaccttagcctggaccactacgagaacgcccggaccttcgacccttggagatggcagcaggtgcactcgttagaaaacacaatttgctatgttgtggcatgctcatgctcttcttttctatgagaagatagatatttatatatgatcgacaagagaatctaggaaggagagagctcatgtggctcccgtcccgtttcgcgtgtgcagggcaagagcaagctgcagagcgcggaaggggccagtctgttcacgccgttcggcggcgggccgcggctgtgcccgggctacgagctcgcccgggtggtggtttccgtcttcctccaccacctcgtcacgcgctttagctgggaggaagccgaggaggacaggattgtcttcttccccaccacgcggaccctcaagggataccccatcatcctacggcggcgaccggattgcgatgatctctgacctcatggctatgttctccccccttatcttcttcggatcaaggccgaaggctaagcattagatagagtaaggtggatgtcgtggctagtaggtgcatggtggtttctgccactcactcactcactcactctgttgtctgtttgttcctgttcctctctgttttctcttgctctgtaacctggacctggtacgagtcagcagccagcagcaaactcgcgttttgcctgtaaaatctaaaatctgatatgagatgcagatgcccccgcgactgagacggaaga

SEQ ID NO: 124196 - DNA, 2080 bp, Zea Mays
aatacctccaccaacatcctccacttttgtgtggctggtggtgccaaagaatctcttatctctggcaacagcgcatcactcacacaatctgtcactccccgacacgcgcacgagctccactccccactccgcacccaacccaaggcgccactgccatggacgcgggcggtccgccgccgctgttcctcctgggcgccgtgctggccgcggcgctggggtggctgctcgtggtctggcgggcggcggcggggcggcggcggtccgcgtcggcgcggctgccgccggggagcacggggctgccgctcatcggggagacgctgcggctcatcgcggcgtacaagtcgccgaacccggagccgttcatcgacgagcgcgtggcgcggcacggcagcggggtgttcacgacgcacgtgttcggcgagcgcaccgtgttctccgccgacccggccttcaaccgcctgctgctggccgcggagggccgcgccgtgagctgcagctacccgtcgtccatcgccacgctgctgggcccgcggtcgctgctgctcacctcgggccccgcgcacaagcgcctccactcgctcacgctgacccgcctcggccgcccggcctcgccgccgctgctggcgcacatcgaccgcctcgtcctcgccaccatgaggggctgggaccgccccggcgccggcgccatgcgcctcctcgacgaggccaagaagatcaccttcaacctcaccgtgtggcagctcgtcagcatcgagcctgggccgtggaccgagagcgtccggcgcgagtacgtgaagctcgtcgacggcttcttctccatccccttccccttcgcctccctcctcccgttcaccgtctacggccaggccctcaaggcgaggaagaaggtggccggagctcttcgggaggtggtaaggaagaggatggacgacaaggcggaggacgactgtggcgccagtaagaagaacggggagaagaaggacatggtggaggagctcctcgaagcggagggcgggagcttctccgtggaggagatggtggacttctgcctgtccctgctggtggctgggtacgagaccacctccgtgctcatgacgctcgccgtcaagttcctcaccgagacacccaccgcactggcgcagctcaaggaagagcacgacagcatcagaggggtaaaaggcaaaggccaagctctggaatggagcgattacaagtcgatgccgtttacacaatgcgtgataagcgaaacgctgcgcgtggccaacctgatcagcggggtgttcaggcgtgcgaacaccgacatccacttcaaaggctacgtgatcccaaagggctgcaagatcttcgcgtcgttccgagccgtgcaccttagcctggaccactacgagaacgcccggaccttcgacccttggagatggcagcagggcaagagcaagctgcagagcgcggaaggggccagtctgttcacgccgttcggcggcgggccgcggctgtgcccgggctacgagctcgcccgggtggtggtttccgtcttcctccaccacctcgtcacgcgctttaggtgagccgtccttctctttattctctcccgccggctgtctcttgaggcggctctgtgtgtgtgtgtgctcggaagtcggaacgatgctatgccgctcgctctgattggattggattcttgaccaacaaacagctgggaggaagccgaggaggacaggattgtcttcttccccaccacgcggaccctcaagggataccccatcatcctacggcggcgaccggattgcgatgatctctgacctcatggctatgttctccccccttatcttcttcggatcaaggccgaaggctaagcattagatagagtaaggtggatgtcgtggctagtaggtgcatggtggtttctgccactcactcactcactcactctgttgtctgtttgttcctgttcctctctgttttctcttgctctgtaacctggacctggtacgagtcagcagccagcagcaaactcgcgttttgcctgtaaaatctaaaatctgatatgagatgcagatgcccccgcgactgagacggaaga

SEQ ID NO: 124197 - DNA, 1391 bp, Zea Mays
aatacctccaccaacatcctccacttttgtgtggctggtggtgccaaagaatctcttatctctggcaacagcgcatcactcacacaatctgtcactccccgacacgcgcacgagctccactccccactccgcacccaacccaaggcgccactgccatggacgcgggcggtccgccgccgctgttcctcctgggcgccgtgctggccgcggcgctggggtggctgctcgtggtctggcgggcggcggcggggcggcggcggtccgcgtcggcgcggctgccgccggggagcacggggctgccgctcatcggggagacgctgcggctcatcgcggcgtacaagtcgccgaacccggagccgttcatcgacgagcgcgtggcgcggcacggcagcggggtgttcacgacgcacgtgttcggcgagcgcaccgtgttctccgccgacccggccttcaaccgcctgctgctggccgcggagggccgcgccgtgagctgcagctacccgtcgtccatcgccacgctgctgggcccgcggtcgctgctgctcacctcgggccccgcgcacaagcgcctccactcgctcacgctgacccgcctcggccgcccggcctcgccgccgctgctggcgcacatcgaccgcctcgtcctcgccaccatgaggggctgggaccgccccggcgccggcgccatgcgcctcctcgacgaggccaagaagatcaccttcaacctcaccgtgtggcagctcgtcagcatcgagcctgggccgtggaccgagagcgtccggcgcgagtacgtgaagctcgtcgacggcttcttctccatccccttccccttcgcctccctcctcccgttcaccgtctacggccaggccctcaaggcgaggaagaaggtggccggagctcttcgggaggtggtaaggaagaggatggacgacaaggcggaggacgactgtggcgccagtaagaagaacggggagaagaaggacatggtggaggagctcctcgaagcggagggcgggagcttctccgtggaggagatggtggacttctgcctgtccctgctggtggctgggtacgagaccacctccgtgctcatgacgctcgccgtcaagttcctcaccgagacacccaccgcactggcgcagctcaaggaagagcacgacagcatcagaggggtaaaaggcaaaggccaagctctggaatggagcgattacaagtcgatgccgtttacacaatgcgtgataagcgaaacgctgcgcgtggccaacctgatcagcggggtgttcaggcgtgcgaacaccgacatccacttcaaaggtttgcttctacaacacaaactgttaactgtcgtcttcttcttcttcttcttggagcctcccccaacccgttcgttt

SEQ ID NO: 124198 - DNA, 2743 bp, Zea Mays
aacttctaagttcaattccatccgagtgcataatatatatacaaaaagttttacaccctaattccaaccatatacaatcacgctgattctaagaataagttcttacaataggtttcacaaaagttcatacacacatcgagaatttgttgatgtatttcctccttctgtagtagttttcagaacctaaaccagtgggtacctccttctgtagaagttttcagaacctaaaccagtgggtacctctgaaaatgactaacacaattgatggtattggtttttgattaaaagccacctcatttcgagtaagccaaatagaccacatattataaagctgatatttcagtaagtagtaatttttttgtatactagaccacaattacttgtctaagaccacaattactagcagttttttttagtattaactctagtacattcaaacacccactaaactggttggttcacaggttttttttcgatccaattgcatgagtggttttaaagtgaacatgatcgttatagtctctggtcggtctttttatcgatccaaccgtcgattcagtggagggtgtggctcgttcaaaaacagctcgaaccctctctctcactcactcactgaaaaacagcttcaaatagactatactactccgtaccttcatgggcatccgatgccatcccatctgcccgtcgtcgtccagccgtctaggctcagagctaataaggctatctgcaaccgttacccctaaatttttccctctattttttcatctcccgcagcggttccccctaaatactccccctataccccactaccactataaaatatcattttctataccaactattaattttttatctactaacaattacttgtggactcacagcacagtgtttagggtgatgaacagtgacacgctatatctggggggagagataagaggaccgacacgtagggggcgctgtaggggcaccgctgcggccatagggtgccccctacgcgccgggagggggatcgctagggtgtaccgctgcgcacagcctaataaagcactctttccgctcctttgatcccaccactctgcagaaccatggccggcgaggaacaccagcagcacagcagccactacggccaccacttcctggtggtggcctacggcatgcagggccacgtcaacccagcgcgcgctctggctcaccgcctcgccaagctcagcgacgtcgtaggcggctgccccatcctcgccacgctctccgtgcacgtcgccgcccaccgccgcatgttcccggcacagctggacccggacgccgccggcgaggaggatgaggaggaggccagcgacggcgtcatctcctacgtgccccactcggacagcttcgacgacggctccttgcccagaacccccgaggactgggcccgcagacgccgcgcgagccgcgagagcctctccgccatgctcgcccgcttcgccggcggcgggcggcccgtcacctgcgtggtgtgcacgctgctggtgcccgcggcggtggacgccgcgacgcgccacggcgtccccttcgccgtgtactggatccagccggccaccgtcctcgccgccgcgtaccactacttccacggctacggcgagaccgtcgccgccgccgacccggcgcacgaggtgagcctgcctgggctacgccgccctctccgggtccgggacttcccgtcctacctggtggacacgacgggcagcccgctggccaggtccgtcgtcgggatgttccgagagctgttcgagagcgtggaccggtggcggcctaaagtcctcgtgaacacgttcgacgagctggaggcgggcgtgctctcggagatgaagcgacacctcgacgtgttcgccgtcggtcccatggtcgccggcgccggtggtggctcgggctcctctggcgcgtcaaacgacgaaggacggatccatctgtacaggcacgacgacgccgacaggaagaggtacatggagtggctcggagcgcagccggagagctcggtggtgtacgtgtcgttcgggagcatagcgacgcacaccttgcagcagatggaggaggttgtccaagggctgctgcaggctggacggccgtacttgctggccgcgcgcagctggcacgggctcgaggacgacggtgcgcgccgcgtcctggacaacgccgcccagagcagcggcggccgtgggacggtcgtggactggtgcgaccagccggaggtcctggcgcacccggccgtcgggtgcttcgtctcgcactgcggctggaactcgacgttggaggccgtggcggccggcgtgccgctcgtcggcgtgcccagcctgtttgaccagccaacgaacacgtacttggtggtggaggagtggggggtcggcgtcagaggggagcgtgacggtgagggcgtgttagctgcgacggagctggcgagatgcgttgagctggtcatgggtcaaggtacaaaagcaacggcgataagggagagagtaaaggctttgagagagatggcgcagcaggcggcacgagcaggtgggccggcggagagaaaccttgaggactttgttaactctgtcggtgatagcttccgtcctgtcggaatttcagttgcggaaaaaactgatgaatctcgtacatgttcatcagaatgacttccgtacagatattatttttatctacattctacaaggagtacctgatataccatgtaatggatggaataaggttccagcttctacgt

SEQ ID NO: 124199 - DNA, 1056 bp, Zea Mays
atggtgtcgcctccggcgctcgacgtcgcgcgggagcacgccatccctctcgccgtcttctggctccagccggccaccgtcctcgccctctgctaccactacttccacggccacggcgcgagcgtggccgcccacgccgcggacccggcgcacgaggtgcgcgtgcccgggctgcgccgccccctccgcatgcgctgcctcccgtcgttcctcaccgacacgtcgggcagcgacagggccacggccctcaccgacgtgttccgagagctgttcgagttcttggaccgctggcggcccacggtgctggtcaacacgttcgacgagctggagccggacgcgctcgcggaggtgaggcgccacctggacgtggtcgccgttggccccatggtcgggcccgccacggacgcccgcatccacctgttcgaccacgacgacgacgccggcaagaagaggtacacggagtggcttcacgctcacccggacggctcggtggtgtacgcgtcgttcgggagcgtcacgaagctcgccaagcggcagatgcaggagatcgccggagggttgcgccagtgcgggcggccgtacttgctggtcgtgcgcagggacggggtcgacgacgacgaaggcggcatccatggcctggagaacgacaccgagatgcaggggatggtcgtggactggtgcgaccagctggaggtgctgtcgcacccggcggtcggctgcttcgtctcgcattgcgggtggaactcggcgacggaggccatggcgtccggcgtgcccatcgtcggtgtgcccaacatgttcgaccagccgacgaacatgtacttggtcgaggaagagtggggggtcggcgtcagaggagagcgagacgccgatggcgtgctgacaggggcggagctggcaaggtgcattgagctggtcatgggtgatggcgcaggagcagtggcgatcagggaaagggcaaaggccttgcaagagacagcgcaggcggcggccagtgcagcaggcgggcccgccgagacaaacctttgtcacctcgtcaagacgatgtcaaaataa

SEQ ID NO: 124200 - DNA, 213 bp, Zea Mays
atttcgtagtgcactctctagtctctccacacaccacagtcgagcgagcactcctctccatggcccacggcgagggacgacgccagcatttcctggtggtggccctcggcgtccaaagccacgtcaacccggggcgcgccctcgcccaccgcctcgcacggctacgcgccgacggctccatcacggccacgctctccgtgccggtaaccacct

SEQ ID NO: 124201 - DNA, 1295 bp, Zea Mays
accattccgattcggcgatttgattccctatccctgcgctgcccacctcccctttcccgcctggccctcccattcacttgcccccttttttccctctcccgacctcccaattcccgaaatcacccccgacactccccacccaagaacccctcgtccccacctcgccatgggcagcgccgccgcctcgccgccgccgtccgggaagctgacgcaggaagagctgaagcgcgtggcggcgcaccgcgcggtggagttcgtggagcccggcatgacgctgggcctgggcacgggctccacggcggcgcacgcgctggaccgcctgggcgacctcctccgcgcgggcgcgctgccgggggtggccggcgtgcccacctccctcaagacggaggcccacgcggcgcgcgccgggatcccgctgctcccgctcccgggcgccaggatcgcgctctccatcgacggcgccgacgaggtcgacccggacctcaacctcgtcaagggccgcggcggctcgctgctccgcgagaagatgatcgagggcgccggcgcccgcttcgtcgtcatcgtcgacgagtccaagctcgtgccgcgcctcggctgcacgggcgccatccccgtcgaggtcatccccttcggcgcgctccacacgctgggcctcatccgcggcctcttcgacggattgcctggattccacgccaggctgaggactgtccccgccgctcccgccaaggggggagaagactcggactcggagtcggagcagcccttcgtcaccgacaacggcaactacatcgtcgagatgttcttcgaggacggcatccgcggcgacctgcgcgacatcagtgaccgcctgctccggatcaccggcgtcgtagagcacggcatgttcctgggcatggccaccaccgtcatcgtcgccaacaaggacggcacggtgtcagtcatggacaggaagaagtagcagtagtaatctacaagcagtagcctgttcttcgaaacagcgatcgcctgatcaccggcatgttccttgacgtggccaccaccaccatcgtcgctgccaacagcgacgacaagaagtactaataattttgcaagtagcctgtgtctgtgcaacacccagctactcttatctaagttggagttgtatcgtgtccgtgcgttatcctcatatgctgagtgtctgcaggagtatgttaatcatcatcctggtgttattatcgtaccttgctaccagtgactctcatgctatttattaaacaagctaattttgcaatcgtattggaatcaccggattgcaa

SEQ ID NO: 124202 - DNA, 1464 bp, Zea Mays
attgttttcctttgtgcggataatttgctgattgcataatcaccttgtagaattacaaatgctgtgaaggagtctggggggttgagagaaaggttgtatcatactgcatacaatgccaagcgacatgcaatgataaatggtagaaacccatcacctatgtgggacaagttggtatttaacaaaattaaagctagacttggtggacgaatgaggcttatgacttcaggtgcttctccattgtcaccagatgtcatggaatttttaagaatatgcttcggtgaagttcttgaagggtatggaatgacagagacatcttgtgtcatcagtacaatgaatattggtgacagatcaattggacatgttggatctccaaatccttcttgtgaggttaaacttgtggacgtcccagaaatgaattatacttcggaggatcaaccgtatcctcgtggagagatttgtgttaggggacctataatattctgtggttactataaagatgaagtccaaacgtaacttgttatcattacacatctatttacatcctttaaataaatacatccattaaactttgataaatgtatttgaaaacctgcagaagagaggtcattgatgaggatggttggttacatactggagacataggtttgtggctgcctggagggcgtctaaaaattatagataggaaaaagaacattttcaagttagctcaaggagaatacatagctccagagaagattgagaatgtctatgctaagtgcaagttcattgctcaatgctttatatatggtgatagtttcaactcttccctagttgccattgtagcagtcgaaccggatgtgttgaaggcttgggctgcatcagaaggaatccagtacgaggacttgagacagctctgtgctgatcctagagcaacagctgctgtcctggctgatatggattccattgcgaaggaagcacagctgagaggtttcgagtttgctaaagcggttactcttgttgctgagccgttcacattggataatggccttctcaccccaacattcaaggtcaagaggccgcaagccaaagcatactttgcaaaagagatctcagacatgtatgcacggttgctagagacagagttagctaggtcgaagttgtaacttgtgcggtatcaggagaagggccatcaatacagccgtacaggagattggattctgcatttttttattccacctcacgaaataagtagtaaaatctttttactgatacgggaaataacggatcatgccatgctccggagtcgatagtttttttcaccagacggggcagtgcttggcgcatgctgaatatatggttctagttataaagaaatgtttttacagagtgtatattgggtctgaacagctgccctggaaggtagttcacagaaaatatattggtattacaaatgcaatactaaaaaaattgtgtcttccgattgta

SEQ ID NO: 124203 - DNA, 2562 bp, Zea Mays
tcggttcccacgccaacaacgcatatccgccacctcggggggtccctccctcctcggcctcgcgcgcgccttcccacacatcctcctcccccccacgccacgaaacgccaaagggagggagcccgagcctagcaggagcagcgcaaggaaacaatggcgcgggaggagcaggagcagtccgcattgggcgccgcccacgtccaccaccaccagcctccggccggcggatgcggcctctccgccaaccccaccgccgccgcagccgagtacgcccacgaacagggctacagtgtcgttctgcctgagaagctgcacactggaaagtggaatgtgtacagatctgcacattctcctctaagattaataaataaattccctgataacccggagattggaacgctgcatgataattttgtatatgcagttgaaactttccgagattgtagatatttgggtacaagaatccgcccagacgggacagttggagactacaagtggatgacgtatggagaagctagcacgagcagaactgcaataggttctggtcttatttatcatggaatatctgaaggtgcacgaattggtctatattttataaacagaccggagtggatcatacttgaccatgcttgtgcggcatactcatatgtatctgtgccgctttatgatactctcggcccagatgcagttcagtttatagtgaaccacgcaacggtagaagttatattctgtgtgccccaaactctaagcgctattttaagctttattactcaaatgccgtgtgttcgtcttattgtggtggttggtggagatgattcaaatatgccatctgcaccagcaactactgaatgcaaaattatgacgtacaacaggctacacaatgagggaaagatgagtcctcaaacttttcgtccaccaaaacctgaagatatagccactatctgctacaccagtggcactactggcacaccaaagggagctgtactttctcatgagaacttaattgcaaatgtagcagggtcaagtttaggcattaagttttacccctctgatgtgtacatctcgtatctacctttggctcacatctatgagagagctaaccaggttgcattgcttcactatggtgttgccattggattctaccaaggggataacttgaagctgatggatgatttggctgttctgagaccaacaatattcgcaagtgttccccggttatataacaaaatttatgctgcaattacaaatgctgtgaaggagtctggggggttgagagaaaggttgtatcatactgcatacaatgccaagcgacatgcaatgataaatggtagaaacccatcacctatgtgggacaagttggtatttaacaaaattaaagctagacttggtggacgaatgaggcttatgacttcaggtgcttctccattgtcaccagatgtcatggaatttttaagaatatgcttcggtgaagttcttgaagggtatggaatgacagagacatcttgtgtcatcagtacaatgaatattggtgacagatcaattggacatgttggatctccaaatccttcttgtgaggttaaacttgtggacgtcccagaaatgaattatacttcggaggatcaaccgtatcctcgtggagagatttgtgttaggggacctataatattctgtggttactataaagatgaagtccaaacaagagaggtcattgatgaggatggttggttacatactggagacataggtttgtggctgcctggagggcgtctaaaaattatagataggaaaaagaacattttcaagttagctcaaggagaatacatagctccagagaagattgagaatgtctatgctaagtgcaagttcattgctcaatgctttatatatggtgatagtttcaactcttccctagttgccattgtagcagtcgaaccggatgtgttgaaggcttgggctgcatcagaaggaatccagtacgaggacttgagacagctctgtgctgatcctagagcaacagctgctgtcctggctgatatggattccattgcgaaggaagcacagctgagaggtttcgagtttgctaaagcggttactcttgttgctgagccgttcacattggataatggccttctcaccccaacattcaaggtcaagaggccgcaagccaaagcatactttgcaaaagagatctcagacatgtatgcacggttgctagagacagagttagctaggtcgaagttgtaacttgtgcggtatcaggagaagggccatcaatacagccgtacaggagattggattctgcatttttttattccacctcacgaaataagtagtaaaatctttttactgatacgggaaataacggatcatgccatgctccggagtcgatagtttttttcaccagacggggcagtgcttggcgcatgctgaatatatggttctagttataaagaaatgtttttacagagtgtatattgggtctgaacagctgccctggaaggtagttcacagaaaatatattggtattacaaatgcaatactaaaaaaattgtgtcttccgat

SEQ ID NO: 124204 - DNA, 1360 bp, Zea Mays
attgttttcctttgtgcggataatttgctgattgcataatcaccttgtagaattacaaatgctgtgaaggagtctggggggttgagagaaaggttgtatcatactgcatacaatgccaagcgacatgcaatgataaatggtagaaacccatcacctatgtgggacaagttggtatttaacaaaattaaagctagacttggtggacgaatgaggcttatgacttcaggtgcttctccattgtcaccagatgtcatggaatttttaagaatatgcttcggtgaagttcttgaagggtatggaatgacagagacatcttgtgtcatcagtacaatgaatattggtgacagatcaattggacatgttggatctccaaatccttcttgtgaggttaaacttgtggacgtcccagaaatgaattatacttcggaggatcaaccgtatcctcgtggagagatttgtgttaggggacctataatattctgtggttactataaagatgaagtccaaacaagagaggtcattgatgaggatggttggttacatactggagacataggtttgtggctgcctggagggcgtctaaaaattatagataggaaaaagaacattttcaagttagctcaaggagaatacatagctccagagaagattgagaatgtctatgctaagtgcaagttcattgctcaatgctttatatatggtgatagtttcaactcttccctagttgccattgtagcagtcgaaccggatgtgttgaaggcttgggctgcatcagaaggaatccagtacgaggacttgagacagctctgtgctgatcctagagcaacagctgctgtcctggctgatatggattccattgcgaaggaagcacagctgagaggtttcgagtttgctaaagcggttactcttgttgctgagccgttcacattggataatggccttctcaccccaacattcaaggtcaagaggccgcaagccaaagcatactttgcaaaagagatctcagacatgtatgcacggttgctagagacagagttagctaggtcgaagttgtaacttgtgcggtatcaggagaagggccatcaatacagccgtacaggagattggattctgcatttttttattccacctcacgaaataagtagtaaaatctttttactgatacgggaaataacggatcatgccatgctccggagtcgatagtttttttcaccagacggggcagtgcttggcgcatgctgaatatatggttctagttataaagaaatgtttttacagagtgtatattgggtctgaacagctgccctggaaggtagttcacagaaaatatattggtattacaaatgcaatactaaaaaaa

SEQ ID NO: 124205 - DNA, 1834 bp, Zea Mays
tattcttccttctaaacatatttccgtgggctggcctgttgggctgctgtattttgtggaaagtttcggacagcccgtaaacttgggcccgttccggttcggcttagctttgctcttcttctccccgttcaccgactaaacaaataacatttttaataataataataataataaaatctcccgtggcctccttcttctccggttctcgctcgtgcccttctctcctggcggcgacggctgggcgagcggcgcggcccgttatcacttcccaggtcttcggcggcgacgagtttccaccaggctgaccggaacgcagtgggtggagaaccggtgagcagctgcagccatgtccgtggcggccggcgtgagcgacgcggccatcgcggtgcgcgacaagctccgtggaaagattggtcagaccaaggtcaaacggtactggccggggaaggcgcctgagtgggccgatgacgtcgatgaggacgtcgacctcaggacggcacgggtctccctcgacaaggcgttccccagggacgaggacggcgatgttcccgccaaggatgaccgccggctccgccggctcgcggagacccgcgcggagaataaggaggagctgagggcggatcaccgccgcatacggcaggcggagatcgtgtcaaccgcggaggaggagaacgagaggcaggaggctgacgccgacgaggaggatgaggaggcccaagaggagaggaggaggagaataagggcaaggcagctgctgagggagcaggaagagctgcttcctcaggaagaggaggaaccggtggaggccgaggagtctgaggaggaatctgagtacgagacagactctgaggatgagcagatgggaatggccatggtgaagcccgttttcataccaaagtcacagagagacaccatcgcggagcgcgaacggctggaggaggaggaacggcagcttgaggagctggtcaagaagaggctggaggctaggaagatcgagactagacagattgtggtcgaagagattagaaaggaggagcacatcgagaaggcactgaacgaagaggccaacatcgaggatgtcgatacagacgacgagttgaacgaagcagaggagtacgagtcgtggaaaaacagagaaatagcaaggattaagagggacagggaggaaagagatgcgaggttgaaggagaaggaggagatcgagaaagtcaggaatatgaccgaggaggagcgtcgcgaatgggagcggaagaatccgaagccgcttcgtcagacgaaacagaagtggaagtttatgcagaagtattaccacaaaggcgccttcttccaggaaggtgctgatgatgttatccagtcagcgggtaaagaggatatctacacccgtgatttctctgagcccactggagaagataagatggataagagcatcctgcccaaggtcatgcaagttaaacatttcgggcgcagcggcaggacgaaatggacgcatcttgttaatgaagacactacagattggaatgcaccatggtcaacaaatgggcctctgcgagcaaagtataatgcaaaaatggcaggcatgaatgcacctattgctaaaccaaagggaagtaagaagctgaaggattgggatgcaaaatgagatgccaggttagctggtattatctaagcgttataagaactatgtagccaaaaagtgcaaacaatgcttatgcagatgctttcttctcattttgactgcataaacaatgtgacctttatgtgctattatctgttgaagtgtcccaatagtatgatgtgatgatccatgaatgatcattattattgacttcctgtg

SEQ ID NO: 124206 - DNA, 1285 bp, Zea Mays
agctcgggccccggcgccgctggacgcacgcggggctccggctatatgaagccacctcggctcgggccttctcctcccagcatccgtatccctccatcagtccctcgggccatccctagcttcatcccaattcttgttcgtgcagctgctcgtggcagcctgagaccaggcgcgaggatgctggcggtgttcagcggcgaggtggtggaggtgccggcggagctggtggcggcggggagccggacgccgtcgcccaagacgaaggcgtccgagctcgtcgcgcgcttcctggggaccagctgccccgccgccgtgtccgtgcgcctcgccgacctcggccacctcgcctactcccacgccaaccaggccctcctccgcccaaggtcgttcgcggcgaaggacgaggtgttctgcctgttcgagggggtgctggacaacctggggcggctgagccagcagtacgggctgtccaagggcgccaacgaggtgctcctggtcatcgaggcctacaaggcgctgcgggaccgggcgccgtacccggccagcctcatgctcgcgcagctcgccggcgcctacgccttcgtgctcttcgacgcgtccaccaactcgctcctcgtcgcgtcgggcggcgacgtgcccctcttctggggcgtcaccgccgacggctgcgtcgccttctccgacgacatcgacgtgctcaaaggctcctgcggcaagtccctcgcgcctttcccgcaaggttgcttctactctaatgcccttggaggattgaagtgctacgagaatcccaagaacaaagtgactgccgttcctgcaaacgaggaggaaatctgcggcgcaaccttccaggtggaaggggctacggtgctcacagcgctgcattaggagatgaggtgtcttcctccgtctccaggcctggactgggggcaactgtacatggtgcctggtggtgtaatgtaacataacggcaatggcatatgcagctgatcctggtctgcctgtatcatctcctcccacccgtaaagagaagttctttctgccgccatcgccatggtcagtcagagcttctctgctatagctgctggatgtgttgtgtgttgcgtctgtatcgtctctagtttgttcgacttacgtggaaacctgagatcagaccgggtatcgagcggctgcttgcatggatggaatgctgtaatcatctgtagtgacaactccattttccttgtcagactgtggcgcatggtccttctgtgcctcgtggatggatgcactgcgattgttgatgctg

SEQ ID NO: 124207 - DNA, 1682 bp, Zea Mays
agctcgggccccggcgccgctggacgcacgcggggctccggctatatgaagccacctcggctcgggccttctcctcccagcatccgtatccctccatcagtccctcgggccatccctagcttcatcccaattcttgttcgtgcagctgctcgtggcagcctgagaccaggcgcgaggatgctggcggtgttcagcggcgaggtggtggaggtgccggcggagctggtggcggcggggagccggacgccgtcgcccaagacgaaggcgtccgagctcgtcgcgcgcttcctggggaccagctgccccgccgccgtgtccgtgcgcctcgccgacctcggccacctcgcctactcccacgccaaccaggccctcctccgcccaaggtactgtactactacatacgctgcctactccgctgcggtccgcagacgcgagccagcgccatggatggacgcagtgctgtgctccccgctccacgcaagcgccatggatggactcagcgccatggatggacaggcatggtacatcattatcaagataattaaaaaaattaaggagttagagttaggaggccgtggcttggcttggcttcccgcacaacaaagagagtgcgtccgatccacatccacatcatgccaccttctggacctcgatccatggacaagcacaagctaggtcaaggtggggggtggctgtcgactgacttgccaacaagcgacgaactgactcgccaactgacttccccaacctccgatgtcactcccgaccagtgagctgatgacgatctggggaaaacaaaaacataataaataaaagcttcccggttcctcgaatccaggtcgttcgcggcgaaggacgaggtgttctgcctgttcgagggggtgctggacaacctggggcggctgagccagcagtacgggctgtccaagggcgccaacgaggtgctcctggtcatcgaggcctacaaggcgctgcgggaccgggcgccgtacccggccagcctcatgctcgcgcagctcgccggcgcctacgccttcgtgctcttcgacgcgtccaccaactcgctcctcgtcgcgtcgggcggcgacgtgcccctcttctggggcgtcaccgccgacggctgcgtcgccttctccgacgacatcgacgtgctcaaaggctcctgcggcaagtccctcgcgcctttcccgcaaggttgcttctactctaatgcccttggaggattgaagtgctacgagaatcccaagaacaaagtgactgccgttcctgcaaacgaggaggaaatctgcggcgcaaccttccaggtggaaggggctacggtgctcacagcgctgcattaggagatgaggtgtcttcctccgtctccaggcctggactgggggcaactgtacatggtgcctggtggtgtaatgtaacataacggcaatggcatatgcagctgatcctggtctgcctgtatcatctcctcccacccgtaaagagaagttctttctgccgccatcgccatggtcagtcagagcttctctgctatagctgctggatgtgttgtgtgttgcgtctgtatcgtctctagtttgttcgacttacgtggaaacctgagatcagaccgggtatcgagcggctgcttgcatggatggaatgctgtaatcatctgtagtgacaactccattttccttgtcaga

SEQ ID NO: 124208 - DNA, 1460 bp, Zea Mays
agctcgggccccggcgccgctggacgcacgcggggctccggctatatgaagccacctcggctcgggccttctcctcccagcatccgtatccctccatcagtccctcgggccatccctagcttcatcccaattcttgttcgtgcagctgctcgtggcagcctgagaccaggcgcgaggatgctggcggtgttcagcggcgaggtggtggaggtgccggcggagctggtggcggcggggagccggacgccgtcgcccaagacgaaggcgtccgagctcgtcgcgcgcttcctggggaccagctgccccgccgccgtgtccgtgcgcctcgccgacctcggccacctcgcctactcccacgccaaccaggccctcctccgcccaaggtcgttcgcggcgaaggacgaggtgttctgcctgttcgagggggtgctggacaacctggggcggctgagccagcagtacgggctgtccaagggcgccaacgaggtgctcctggtcatcgaggcctacaaggcgctgcgggaccgggcgccgtacccggccagcctcatgctcgcgcagctcgccggcgcctacgccttcgtgctcttcgacgcgtccaccaactcgctcctcgtcgcgtcgggcggcgacgtgcccctcttctggggcgtcaccgccgacggctgcgtcgccttctccgacgacatcgacgtgctcaaaggctcctgcggcaagtccctcgcgcctttcccgcaaggttgcttctactctaatgcccttggaggattgaagtgctacgagaatcccaagaacaaagtgactgccgttcctgcaaacgaggaggaaatctgcggcgcaaccttccaggtaagatcggttcctttctcgaagaaagaattcagttccatgcatgcactagttcgtcaggcctccatcatcatcggtctcatgcgatgtttagaaaggaaggatccagagaccagaggttaacttgaaatggatgctacacaattcagatgttgccagtgagctgaaaagcggaaccgaagaagaagaaagaactcctacaacatttctctgaaaaacttgttcctgcactgcaggtggaaggggctacggtgctcacagcgctgcattaggagatgaggtgtcttcctccgtctccaggcctggactgggggcaactgtacatggtgcctggtggtgtaatgtaacataacggcaatggcatatgcagctgatcctggtctgcctgtatcatctcctcccacccgtaaagagaagttctttctgccgccatcgccatggtcagtcagagcttctctgctatagctgctggatgtgttgtgtgttgcgtctgtatcgtctctagtttgttcgacttacgtggaaacctgagatcagaccgggtatcgagcggctgcttgcatggatggaatgctgtaatcatctgtagtgacaactccattttccttgtc

SEQ ID NO: 124209 - DNA, 2085 bp, Zea Mays
gcgtgtctccatttcccgcagcagggcccattggaagtttggaattggaaacccaaaaagcataggcggggggtggcaggggaagcacggagcaagagattcgtttgctgccattattaaccgagccgagccgagagaggtcaagcaacggacccccattcgcatctgcctccttttccttggagccgaagaagagggaaaggaagggaggacagccgccgccgccgccgccgccgccaccgtcaggatgcattccacgaacctcctgctcgaggagcccatccggatggcctccatcctcgagccctccaagcccagctacttcccggcgatgaccaagatcgtcggcactctcggccccaagtcgcgctccgtcgacacgatctccgcctgcctcaaggccggcatgtccgtcgcccggttcgatttctcgtggggggacgccgcgtaccaccaggagacgctggagaacctcaagctctccatcaagtccaccaagaagctctgcgctgtcatgctcgacaccgtgggcccggagctgcaggtggtgaacaagagcgagaccccgatctccctcgaggagaatggcacggtcgttctcacccctcaccggggccaagacgcctcctccagcttgctgcccatcaacttctctggactcgccaaggcggtgacaccaggggcaacaatattcgtgggacaatacttgttcactggcagtgagaccacctcagtttggttggaggtttctgaagtgaaaggagatgatgtggtgtgtataatcaagaacacagccaccttggctgggtcactgttcacgctgcattgctcccagattcacattgacttgcccaccctgtctgatgaggataaggatgtcattagaaaatggggtactcccaataagattgacttcctttctctgtcctacacaagacatgcagaggatgtgcgccaggcacgggaattcctgtcaaaattgggcgatctaagccagactctgatttttgccaaaattgagaatgtcgagggcttgaaccaatttgatgaaatactggctgaggcagatggtatcattttatcaagagggaacctgggaattgatcttccacctgagaaggtctttttgtttcaaaaatctgctcttcacaagtgcaacatggctggaaagcctgctgttgtcactcgtgttgtggacagtatgactgacaacctcaggcctactcgagcggaggcaactgatgtggcaaatgcagtacttgatgggagtgatgccattctccttggtgctgagactctccgaggtttatatccagttgagactatttcgacagtgggcagaatttgtgctgaggctgagaaggtattcaaccaagatttatacttcaagcaaactgtgaaatatgtcggagaacccatgacccatttggagtccattgcttcctcagctgtgcgagctgctatcaaagttaaggcttcggtgatcatttgcttcacctcttctgggagggctgcaaggctcatcgccaagtacaggcccaccatgcctgttctttctgttgtcattcctcgtctgaagacaaaccaactgagatggagtttcactggtgcttttgaggcaagacagtcgctgatagttagaggcctctttccgatgcttgcagatcctcggcatccagccgaatcaaccagtaatacaaatgagtcagttctgaaggttgctctagaccatggcaaggcatgtggtgtgatcaagtcccatgaccgtgttgtcgtttgccagaaggtgggagattcatcggttgtgaagatcattgagctggacgactagggcatactttgccgattttttttttgacgaggccggaatttgttggctatatgtataatcctatagctttctttacaaatgagcagtttttccctatggtgccatcataggacttgcttagcgatttaaaactcgattatgtgccacctaaaatgggcagatggaacaatgaaatcatactgtgccctttatccgaacgaagaagcaaaaaaaaaaaaagaaaaagacatgcgatgatgtatagtaataaagaa

SEQ ID NO: 124210 - DNA, 2149 bp, Zea Mays
ctccatttcccgcagcagggcccattggaagtttggaattggaaacccaaaaagcataggcggggggtggcaggggaagcacggagcaagagattcgtttgctgccattattaaccgagccgagccgagagaggtcaagcaacggacccccattcgcatctgcctccttttccttggagccgaagaagagggaaaggaagggaggacagccgccgccgccgccgccgccgccaccgtcaggatgcattccacgaacctcctgctcgaggagcccatccggatggcctccatcctcgagccctccaagcccagctacttcccggcgatgaccaagatcgtcggcactctcggccccaagtcgcgctccgtcgacacgatctccgcctgcctcaaggccggcatgtccgtcgcccggttcgatttctcgtggggggacgccgcgtaccaccaggagacgctggagaacctcaagctctccatcaagtccaccaagaagctctgcgctgtcatgctcgacaccgtgggcccggagctgcaggtggtgaacaagagcgagaccccgatctccctcgaggagaatggcacggtcgttctcacccctcaccggggccaagacgcctcctccagcttgctgcccatcaacttctctggactcgccaaggcggtgacaccaggggcaacaatattcgtgggacaatacttgttcactggcagtgagaccacctcagtttggttggaggtttctgaagtgaaaggagatgatgtggtgtgtataatcaagaacacagccaccttggctgggtcactgttcacgctgcattgctcccagattcacattgacttgcccaccctgtctgatgaggataaggatgtcattagaaaatggggtactcccaataagattgacttcctttctctgtcctacacaagacatgcagaggatgtgcgccaggcacgggaattcctgtcaaaattgggcgatctaagccagactctgatttttgccaaaattgagaatgtcgagggcttgaaccaatttgatgaaatactggctgaggcagatggtatcattttatcaagagggaacctgggaattgatcttccacctgagaaggtctttttgtttcaaaaatctgctcttcacaagtgcaacatggctggaaagcctgctgttgtcactcgtgttgtggacagtatgactgacaacctcaggcctactcgagcggaggcaactgatgtggcaaatgcagtacttgatgggagtgatgccattctccttggtgctgagactctccgaggtttatatccagttgagactatttcgacagtgggcagaatttgtgctgaggctgagaaggtattcaaccaagatttatacttcaagcaaactgtgaaatatgtcggagaacccatgacccatttggagtccattgcttcctcagctgtgcgagctgctatcaaagttaaggcttcggtgatcatttgcttcacctcttctgggagggctgcaaggctcatcgccaagtacaggcccaccatgcctgttctttctgttgtcattcctcgtctgaagacaaaccaactgagatggagtttcactggtgcttttgaggcaagacagtcgctgatagttagaggcctctttccgatgcttgcagatcctcggcatccagccgaatcaaccagtaatacaaatgagtcagttctgaaggttgctctagaccatggcaaggcatgtggtgtgatcaagtcccatgaccgtgttgtcgtttgccagaaggtgggagattcatcggttgtgaagatcattgagctggacgactagggcatactttgccgattttttttttgacgaggccggaatttgttggctatatgtataatcctatagctttctttacaaatgagcagtttttccctatggtgccatcataggacttgcttagcgatttaaaactcgattatgtgccacctaaaatgggcagatggaacaatgaaatcatactgtgccctttatccgttgctattgttaacctgagcctgtttttttttgttttgtttctcatcaaaagggttgctagaagagtctaacaatctgttctgtgaaatggggaagaggctacttactgcatagtgttgagatagtgag

SEQ ID NO: 124211 - DNA, 1319 bp, Zea Mays
ataccatctcatctcagtgaatcatcacacagacagcatcacagcactcactcacccagcgcgcagtacaatgcaaatggccaggctaggagcactgattccgctggccatcctcctgctcgccgccgtcgcggccactgccgcgcctccttccgacaggccacccaaggcgcaggggcccaagccgcacaaggagaaggagaaggagaagcccaagcccatgaaggtgaagtgccgcccccgtaagctctacccttactgccccggcaagccgatggagtgccccgccgagtgttcccagtcatgctacgccgactgcaactcctgcaaacccgtctgcgtgtgcagcgtgccgggggcgtgcggcgacccgcgcttcatcggcggcgacggcaacgccttctacttccacggccgccgggacgccgacttctgcgtgctctccgaccgcgacctccacatcaacgcgcacttcatcggcaagcgcggcgccgacggcatgtcccgggacttcacgtggatccaggccatcgccgtgctcttcgacggccacgagctctacgtcggcgccaggaagacggccgcgtgggacgacgacgtcgaccgcatggagctcaccctggacggcgagcccgtgcgcctcctgccgggaaccgacgccgcgtggacgtccggcgccgtgccggcgctgtccgtcacccgcaccagcgcggccaacggcgtgctcgtctcgctcgacggcaggttcaccatcagggccaacgccgtgcccatcaccgaggaggagtcgagggtgcaccggtacggcgtcacggccgacgactgcctcgcgcaccttgacctggccttcaagttcggcgcgctcaccgccgacgtgcacggcgtggtcggccagacgtaccgctccgactacgtcaaccggttcgatgtcaaggcctccatgcccaccatgggaggggacagcaactacaccacgtccagcctcttcgccgctgactgcgccgtggcgcgttacgcgccgtctggcggtagccgtgaccgtgacgacggcgttgctatggtgtcagagatcgctggcatcacctgttccagtggcatgggtggtcaaggcgtggtgtgcaagaagtaaccaaggaggtgtgcttctacttgccgacgaaagcacgagagttaatcgggtaaactatatatgatgttaccggaattgtaactgctatgatatataagcgtgggtgtcttcatcattgtcatgacattcacaccgcaataaggcttgccactggttgtggtattcacatttgattataatacaagtgtat

SEQ ID NO: 124212 - DNA, 2270 bp, Zea Mays
gcgcttgcttctcttcgtctactctactgaactctacttccacaccttccccctccggccctccactccgcatcccgccccagtgtcccctccccctccctccacccccgcacccgcgatgccgccggacagagaagacgccgcgggcgcgggcgcggacgtcgcggccgacgagctgcagagcgtgagcttcggctcgtcctcggaccgctcgcgctcgcgctcggcctccacggcgtccacggccacggcgtcctgctccacgtcctcgtcggggccgctacaccagcacctctcgctcccggccccgcgccgcaacccctccccctcccccgcgccaaccccaaccctgcccacgcagatcccgcgcctcggcgccgtctcgctctccgacatccgcttcctgcgccggctcggcgccggcgacatcggcagcgtgtacctggccgaggtccgccgccccacccccaccgccggggccgccggcaaggagaagcacacctcgactttggcggcggcggcggtggtggtggccgccaaggtgatggaccgcaaggagctggaggggcgaaacaaggagggccgcgcgcgcacggagcgcgagatcctcgaggccgtcgaccacccattcctgccccgcctctacggcgtcgccgagggcgaccgatggtcctgcctcctcaccgagttctgccccggcggggacctccacgtgctccgccagcgccagccgcaccgccgcttctccgaggccgccgtcaggttctacgcggcggaggtggtggcggcgctggagtacatccacatgatggacatcgtgtaccgcgacctgaagccggagaacgtgctggtccgcggggacggccacatcatgctgaccgacttcgacctgtcgctcaagtgcgacccgacggcgccgacgccggcgcacgtcatctccgacccgctgtcgctggcggggcggtcgggcggcgccgcgtcgtccacgtcctcctgcgccatctcctcctcctgcatcgtgccggccgcctcctgcttccagctcttcccgggccgcgggcgcgggcgccggcgccgccggccccgctggctgcgcgcgggcaagaaaccgtccccgaacaacaacggcgggctggagctggagctcgtggcggagccggtggagctgcggtccacgtcgttcgtgggcacgcacgagtacctggctcccgagatcgtggccggggaagggcacggcagcgccgtggactggtggacgctgggggtcttcgtcttcgagctgctgtacggggctacgcccttcaagggccacgacaacgagatgacgctggccaacatcgtggcccgcgcgctcgagttcccccgggaccgcgacccgcccgcgtcgcccgccgcccgcgacctcgtcaccgcgctcctcgccaaggaccccgcccgccgcctcggcgccaccgtcggcgccgccgccatcaagcgccaccccttcttcgccggcgtcaactgggccctgctccgctgcgccccgccgccttacgtgccgccgccgttcagcatcgccaaggcggcggctgctgctggtggaggcggcgggaaagacgacgacgacgacgacgtgtcggacgacagttgtcccggcacgcccgtggagtactactagaagaagaataagaagaagaagccaaggaggagaagcgtccgtgtccggccgccgtcgtacgtacgtacgtgcgcgcgcgcgcaaggagccacgccacgccacggccctgccagtcggtcggttcggtaggctcgccggggcgggcccctgccaggcaccacctccgcttgtccgagtccggcggggcaggcgcgtgcacgtggtgggggacggacggacgggccacggcgcgtggcgcgcaggaggcagggccgcgctgtcgcctcgagtggctgccggttcacggtcggtctttaccaataataatagcttactgccgtccctggctgcagcacgcatgtcataacctggcggccgccgtgccattggctccggctcctgtcctgccttggtcagtacaacccccctgtctctgtagccttctcgttctaatatactactatgttattaggggccggggtgctgcttggaacgcaggaattgtcagaggtgaacatcttgtgttccaagcaggacctcacaagtcagaactggtgtcgtatgttggagtcgtcacttgtgttgtgtatcgtgttcaccgttgcttgcaagtatagcacttgcaaggtactag

SEQ ID NO: 124213 - DNA, 1142 bp, Zea Mays
gtacggcaggggcagtacacggcacgcagttggagtttgacgatgcgtgtgcattgcattgcaatcacggtcgtgcagagcgaacaggcacttgtgccccgcatagcttctctgctgaaccgactccgactgcttgtgtggtggcaggttctacgcggcggaggtggtggcggcgctggagtacatccacatgatggacatcgtgtaccgcgacctgaagccggagaacgtgctggtccgcggggacggccacatcatgctgaccgacttcgacctgtcgctcaagtgcgacccgacggcgccgacgccggcgcacgtcatctccgacccgctgtcgctggcggggcggtcgggcggcgccgcgtcgtccacgtcctcctgcgccatctcctcctcctgcatcgtgccggccgcctcctgcttccagctcttcccgggccgcgggcgcgggcgccggcgccgccggccccgctggctgcgcgcgggcaagaaaccgtccccgaacaacaacggcgggctggagctggagctcgtggcggagccggtggagctgcggtccacgtcgttcgtgggcacgcacgagtacctggctcccgagatcgtggccggggaagggcacggcagcgccgtggactggtggacgctgggggtcttcgtcttcgagctgctgtacggggctacgcccttcaagggccacgacaacgagatgacgctggccaacatcgtggcccgcgcgctcgagttcccccgggaccgcgacccgcccgcgtcgcccgccgcccgcgacctcgtcaccgcgctcctcgccaaggaccccgcccgccgcctcggcgccaccgtcggcgccgccgccatcaagcgccaccccttcttcgccggcgtcaactgggccctgctccgctgcgccccgccgccttacgtgccgccgccgttcagcatcgccaaggcggcggctgctgctggtggaggcggcgggaaagacgacgacgacgacgacgtgtcggacgacagttgtccctggctgcagcacgcatgtcataacctggcggccgccgtgccattggctccggctcctgtcctgccttggtcagtacaacccccctgtctctgtagccttctcgttctaatatactactatgtta

SEQ ID NO: 124214 - DNA, 1733 bp, Zea Mays
ggcccaccacctgaggccggtcgcccatccataacgcccgcagtccagtccccaccaggcaccagcccacatctcttctcccacagaacagactcccacgccgtctccgccccctccccttcacggctttgcgcgcgtagatcggaggaatggtgagcgcgtcgagcctgctgctcccgtcgtcggtgcgggacctggcctcctgcgtctccgacggcgccgtccgcgtcgcctgcaccaccccggcgtccacgttcacggtctcctcctcctcgccgtcgccgccgtccacgctctccgtcgccgtctcctaccgcgccacgccgcaggtcgcgtcgtcgccgccgctcctcctgcgcctcacctggtcgcactccccgcgcgggcagccgacgctctccttcgcggggcccacggcgtcgtcgcccgccgtcctcctccggcgccgcaggggcacctactgcctcccctcctcctcctcatcctccgcacacgccccgccgctcgcgatcttctgggacctcacaggcgccaggtacgacggggcgggctcgtcgtccccggagccggtctccgggttctacgtggtggccgtggccagcgccgaggtggtgctggccgtgggcgacctggcggcggggttcgtgaaggcgaagctggagggccagatcccgcgggcgcgctccatcctggccgtgtcccgcgtggtcgtcgtcgcggcggcgggtccgggcgccgcggcgcacacggcgcgggtgcggttcgcggagggcgcgccggagcacgaggtggccgtgggctgctgccgcgggctgggcggccggcccggggaggaggacgagctgtgggtcagcgtggacggcaagcgcgccgtgcacgcgcgccgcctgcgctggaacttccggggcaaccagacggtgttcgtggacggcgcgcccgtcgacgtgctctgggacctgcacggctggtggttccgccgcgacccgccgggctgcgccgtcgtgatgctccgcaccaggagcgcgctcgagagcaggctctggctcgaggaggaggccagggcgcccgggttcgcgctcctcgtgcaggccttcaggacgccgccttgatcttttttttggccttggtgcttggtggtggtggtggatgccatggataagttcgtttgcactttgcagccccctgattgtcgatgaagttgagcagatgctctgctgccagtgcctgctgcttcatgtttttcctctgccttttgacctggggatctggtgcctggtgtttagcaatccaaattcgaatccaacagggcaacggtttgcgttgacaatttagatgtttgggacgacaccatggatttcttcatgtggtttatggtatacaacaaaaaagaggagagattggtttgtgctgtttaggtcttgatcaagcactaactgcttgctttcgagtacacctagagaaattgatgctccgtatccgactgtatcttgttgctcttcactattttgtctattgatggttgcagcctgtcataatcaagggccattttggttccagcatgttgttgtcatttgatcatgtaatttctgcagggggacacagtggatgtccctgtaataaattatggccacatgactgtgtgtgtctctgtcatacaaacgcacttgctgcccccgtcactcatgcaagacaagacaagaccagaaagaaaagaaaagaaaagaaaaaacaag

SEQ ID NO: 124215 - DNA, 86 bp, Zea Mays
gttctaacttcctggtgagaaacatgacacttggaatttggatatctggaactgtaactgtatgcatgctggtttttttctcttct

SEQ ID NO: 124216 - DNA, 3446 bp, Zea Mays
ctcactcctcacacagtcacactgtcgaccgcaccacgagtggccatgctccaactcgcccccacgccgctgccgtcgccggcggccgggcgtaggcctcgaccctcctccgcatgcatctgctgctcgagcgtacgcgcgctggaggaggcgaagcgggtggtgctggtgcggcacgggcagagcacgtggaacgccgagggccgcatccaggggagctccgacgcctccgtgctcacgcccaagggggaggcccaggccgagacctgccgccagatgctcgcctccgactccttcgacgcctgcttcaccagcccgctggcgcgctcccgccgcaccgccgagatcatctggcaggggcgtgggcgtgggcgtggcgacggcctcatcccggaccccgacctccgcgagatcgatctctactctttccagggactcctgaagcgcgaagggagggagaggtacggtcctctgtaccggcagtggcagaagaacgcggccgagttcagcatcgacggccactacccggtgcaggagctgtgggaccgcgcacggagctgctgggagaggattttggcgcaccggggcaagtcagtgctcgtggtcgcgcacaatgcagtgaaccaggcacttgttgccacctctttgggtggggtgcatcctgcatccgagcgtgggatcggagttcattgcgtgtctaagtgtgatcgaagctgatttcgtgctttcctcacggttcatgatgtttagggcttggcgcggagcactttcggattctgctccagagcaactgtggcgctagtgtgctggacttcaccccacgggctgggggaggtcctcctaccgtctgccttaaccgcttaaatcaggtctgttagcatttccgcttggtaacaacttggagatcaaagaaatttcaccagacaatacagggaaaatggaagggtcaaacaattaaaacatggattaatctgcccccaaactgtatcttgtagtacagaccccaaactctcctgtcgctgggggaagttctgcgggaagaaagacgagcaagaggatcattctggcctgtcaaggggctacacaaagcagttctgagattagcttgggtggaacgggatatgcgccgctgaacatgctcgggactatacagtctcagaagactgcggaactactcctggatttgaaggtcgacagcatcgtctgcagcccgcaggtggcagctgttgatgccgcgactatcatatgtgaggtccaagaagctgcagattgcttaggtgctgattgcgtgcctcgttacgtggaaacgaaaaggttgatagaacttgagattgaagacgcctttcaagcaaagcagaagagatttggggacataggcggcggcggcacggagtacaaatcactggagcgagtatgggctcggtccgaggatgcatggcaggcactgctcagggagttgccagatgacacatcggagcgtgttgttgtggccgtaggtcatcctgccattcacctagctctaatctgccggtgccttggtttgccgatggagtatctgtcttctttccacctggacgaaggcagcgtcagtgtgatcgatttcccagacggaccgagaggaagaggcgtcgtcagatgcacgaattacacggcccatctgggaagatgggcgatacccattacacggcccaactgaaaatgactaagaattctaatctaacatgctagttcccctctgtatagcatagcatcaccataccgatgtacgtacatatataaatcttgatctcagtatgtcaccaaggcaaatgatgaatatgtctattcggatgacgtcaagtggttatcagttcaagagaagagagaccagaccgatggattccgtttcgtgtggcatacaggacaggacaggaagagatgctgacaaaggctgatgcctcgatctgcatggcggaagaaggttcagggcttgagcaggagcatgccacatgtcttttctgctgccacgtgtagcgcttcaacttccagcagcacagcactgcactctacaggctgctgcaacgcctcgatcccatgcccatggccatccatgtcgagcgagcccaccatgcactctactctaactaatctaatggagtactcaacgccgcaccaggtgtccgggaaccagcagcacggttactccggcgatggccggccaagaggcacatccggcggggagtccgactccgacgacgacgccctcctcttcctcgccgtcccggcaggctggctcgtgcgcctgctcgcgttcctcggggagctcgtggcgtctgccatcctcggcctcgtcttccccgtcgcagccctcgtgggcgcgctgcgcgccctccccgcggcggccgcgtccagcctccggcgcgtggcgcgcggcctgctcgccgcggcgtgcaccttcgccgcactcgtggccgcgctgctcgtgtccgtgctcctgggcttcgttctcgtccggcgctgcgtcgagggcccggtcaccgtgcgccagcagctcttcttcgactacacggaggcgcagcccagcgccgcggtgctcctcggtggagcgcgaggcgccgtgctgccggcgggtcactccgtcagcgtgtccatggcgttgctccttcctgattcctaccacaaccgtgaggttggcatgttccagataaaagcagaggcggtctcggcaagtggagtcaccatggcatcagcgacacagccgcacatgcttcgttacaagagcggcccagtccggctggcgcagaccgcgctgctgtgcgtgccgctcactctgggcatgcgcagcgaggcccaggccgccagcctcagggtgctgcagtacagggaagggcacggccggcacaggagaacaggggccatcagagtgctgctgcagccgagagccgcgacggtgagcctgccccaggtgtacagggcagaggtggtcgtgcagacggcgcttccgtgggcgaagagcctggcgcgcgggttcaggtggacgctctgcgtgtgggtgtcctcctccgtgtacgccgtcctcgctgtttgctgggtccggcctctcgtgctgtccgcgaggaggaggccgtctggtgttcaggaggccgatggaaacttggcttctggtttgggtttagtagacatgggcgaccgcccaaggaaggaggcgtctgattgtcttgcagcgaggtggagagcgaggagaagcgagcggaaagcgcagctccgaacgcggttacatggaggcggcatggagctggaggccactgaggattcagcttctagtgttgcggtggtagagagagagaaagagcctggtgaggccgtgaatgatccttgagaatctggttgtgtacaatcgtcggtatctggtggtatcaactaattttaattaagggtgtttctatactactctacatctcgagcca

SEQ ID NO: 124217 - DNA, 1605 bp, Zea Mays
catttttcttcctcactcctcacacagtcacactgtcgaccgcaccacgagtggccatgctccaactcgcccccacgccgctgccgtcgccggcggccgggcgtaggcctcgaccctcctccgcatgcatctgctgctcgagcgtacgcgcgctggaggaggcgaagcgggtggtgctggtgcggcacgggcagagcacgtggaacgccgagggccgcatccaggggagctccgacgcctccgtgctcacgcccaagggggaggcccaggccgagacctgccgccagatgctcgcctccgactccttcgacgcctgcttcaccagcccgctggcgcgctcccgccgcaccgccgagatcatctggcaggggcgtgggcgtgggcgtggcgacggcctcatcccggaccccgacctccgcgagatcgatctctactctttccagggactcctgaagcgcgaagggagggagaggtacggtcctctgtaccggcagtggcagaagaacgcggccgagttcagcatcgacggccactacccggtgcaggagctgtgggaccgcgcacggagctgctgggagaggattttggcgcaccggggcaagtcagtgctcgtggtcgcgcacaatgcagtgaaccaggcacttgttgccacctctttggggcttggcgcggagcactttcggattctgctccagagcaactgtggcgctagtgtgctggacttcaccccacgggctgggggaggtcctcctaccgtctgccttaaccgcttaaatcagaccccaaactctcctgtcgctgggggaagttctgcgggaagaaagacgagcaagaggatcattctggcctgtcaaggggctacacaaagcagttctgagattagcttgggtggaacgggatatgcgccgctgaacatgctcgggactatacagtctcagaagactgcggaactactcctggatttgaaggtcgacagcatcgtctgcagcccgcaggtggcagctgttgatgccgcgactatcatatgtgaggtccaagaagctgcagattgcttaggtgctgattgcgtgcctcgttacgtggaaacgaaaaggttgatagaacttgagattgaagacgcctttcaagcaaagcagaagagatttggggacataggcggcggcggcacggagtacaaatcactggagcgagtatgggctcggtccgaggatgcatggcaggcactgctcagggagttgccagatgacacatcggagcgtgttgttgtggccgtaggtcatcctgccattcacctagctctaatctgccggtgccttggtttgccgatggagtatctgtcttctttccacctggacgaaggcagcgtcagtgtgatcgatttcccagacggaccgagaggaagaggcgtcgtcagatgcacgaattacacggcccatctgggaagatgggcgatacccattacacggcccaactgaaaatgactaagaattctaatctaacatgctagttcccctctgtatagcatagcatcaccataccgatgtacgtacatatataaatcttgatctcagtatgtcaccaaggcaaatgatgaatatgtctatt

SEQ ID NO: 124218 - DNA, 98 bp, Zea Mays
gccctcctttttcagcagccttggccaccacccgctctcatctttcttgaccaggtagcatatggttcttggaggcaacaactgctttactctcatgc

SEQ ID NO: 124219 - DNA, 560 bp, Zea Mays
tggagcctgtttttttaatttaattttactatagatagacaaatcacacactacaatccatcatatttttgtcgcctcttgcaacaatacaaaagttgtttgataaaagtatattgtgcaacgattacatagaaataaacaatatatgtattctcgacatcaatatatcacaaatcatttgcacaaatgaatgccaccacaactatagacagacagatcacaccctacaatccactggatttttcccttccctatgcgtccaatgtaatacaacaataatataggcttgatatggcaatacacctatacgacctgtgcgatggccgatccggtcgatcagatggtcaccttgtcaccttggtccaaagagctccatggcttctacaccaagcgagcattcgtccgctgcaaaatccatgtacttttgaagttggagctccgatgagacgaactctggcgtgtctacgttctacgacacctcccatctctgtgtgagcccgtctccttccacctgatcacctcgaacattctaggccagtgagacaagtggtactgactca

SEQ ID NO: 124220 - DNA, 489 bp, Zea Mays
tggagcctgtttttttaatttaattttactatagatagacaaatcacacactacaatccatcatatttttgtcgcctcttgcaacaatacaaaagttgtttgataaaagtatattgtgcaacgattacatagaaataaacaatatatgtattctcgacatcaatatatcacaaatcatttgcacaaatgaatgccaccacaactatagacagacagatcacaccctacaatccactggatttttcccttccctatgcgtccaatgtaatacaacaataatataggcttgatatggcaatacacctatgcgacctgtgtgatggccgatccggtcgatcagatggtcaccttggtccaaagagctccatggcttctacaccaagcgagcattcgtccgctgcaaaatccatgtacttttgaagtaggagctccgatgagacgaactctagcgtgtctacgttctacgacacctcccatctctgtgtgagc

SEQ ID NO: 124221 - DNA, 372 bp, Zea Mays
cacatatgtgcatatataagttatcgagatattatatgtccccgttgcaacgcacgggcactgacctagttacaattaaattatgaaaacatgaaaacaattgcaaaagctattttaatatgtttagcacgtaattataaaactaataaaataagaattattttatttggacctagaatacacattttatatggaaaaagtctttgcagggacatttatgttataaaaacaaagtttgcagggtaaatttaaaaaaaacatgggttggcgcataattaaacctaaatctgagagggtagtgtgcaaaatcaaagcttaggatagaaagcatgataatataaaagagtagggctaaaataggaaaaaagaatc

SEQ ID NO: 124222 - DNA, 917 bp, Zea Mays
aataagcagctcgatcagcgcaaatcgtcgagtgcattagccttgctgcgcatcgtctgtgtgcgaagaaaacaaaacacttgacacctccaactccaactccaaccaaccatgtctagatctgtggagtctctcgtagtcggccgggtgatcggagaagttctcgactgcttcagcccatgtgtgaagatggtagtgacctacaactcaaacaggctcgtcttcaatggccacgagatctacccgtcagcagtcgtgtctaaaccaagagtagaggttcaagggggtgacttgcggtcgttcttcacattggttatgacagacccagacgtcccaggaccaagcgatccatatctaagggagcaccttcactggatcgtgactgatatacctgggacaactgatgcctcattcgggagagaagtcgtaagctatgagagcccgagacctggcattggtatccacaggttcatctttgttctcttcaagcagaagcgcaggcagcagcagactgtagcggcggtgccatcctccagcagggaccatttcatcacgcgtcagttcgctgcggaaaacgatcttggccaccctgtagccgctgtgtacttcaacgcccagagagaaactgctgctaggaggcgctgaaaattccggctctcactgtgtccaagctatatatgggcctctgacgcgtgatgaaccaacgatcttgttctactgtagatgctcctgggtcctacattatattataataaataaaccagaagcattttgcagattgtgtgtgtttgtttcattgtttgtaagggggcaaagattgagaaccatagatggtccatgccattggtcaaaactacatctatcgctgaaaatctgaaaccagtgctggtggacagcattgattccccacagtcaaa

SEQ ID NO: 124223 - DNA, 111 bp, Zea Mays
ttcttggtaaaaaatcaagccagcaaagatggaccacctgagtgtcaagaggcttccacgcaggcagtgcaacattttatctcatcaatagttttacaaaaacaaaaaaaa

SEQ ID NO: 124224 - DNA, 1022 bp, Zea Mays
tgcttttgggatgacataaattttggaccagagttatgggacaagtactgatggcacgcatgtagtcttaactacttgatatgatgtagaaaaataacttaagctgacagtataggtatcatattttgaattagacaagtcttgatgctgcatgattactacctcagggaaaaaaaaataaaactaattagttgtttgcagctgaagtctcatcattttgaaaatatctactgtcaacagctgaggtctcttctcctacccaagagtgccttgagatttcgtttggcccatctatctaccagcatgaacatattttcacattgtgggacttatgatacttgattcatggaagggaagcttcttgatacagaactttcaatttgatgaaacagaccggtagtatttatgggacaaattcccaacttccagaagacaaataaatcacgaatatttcagggtggcgcatggctcttgcagcagaggggaaggtgtattgtttgcaatccagggggcagagggtcctctgctctggcacaattaatttcttgaaggcctgcctggacattttaaatgtgaaagaaagccaccaatagttgatggttgggacgattagtacagcatatacagctttactctgaaatctgagttgcatatttcattaacatgtatttggttgtatctgtgtgtttgcctgtgaggtatataccggaggcgtctccaaattgagtatcctcccatcaagacccacgagacatgtaacttctgcccaagatccagctggtcagcaagctctttgttatccagtgctttgctcttgacatccctccttgtatttgggtcacttttcccatactcagctctatcaaaagaaactaatgacgtgtttggttcgatgtaatgtaacggtatgggacttcttagggtatttgataacgttacatgtgtttgttataggctctattggaatcacatacattggaatcggataccgctgtatagaaaactcaaacccttccacccta

SEQ ID NO: 124225 - DNA, 496 bp, Zea Mays
tgcttttgggatgacataaattttggaccagagttatgggacaagtactgatggcacgcatgtagtcttaactacttgatatgatgtagaaaaataacttaagctgacagtataggtatcatattttgaattagacaagtcttgatgctgcatgattactacctcagggaaaaaaaaataaaactaattagttgtttgcagctgaagtctcatcattttgaaaatatctactgtcaacagctgaggtctcttctcctacccaagagtgccttgagatttcgtttggcccatctatctaccagcatgaacatattttcacattgtgggacttatgatacttgattcatggaagggaagcttcttgatacagaactttcaatttgatgaaacagaccggtagtatttatgggacaaattcccaacttccagaagacaaataaatcacggtgggttgattcacaaagaccttgttgccttgatttattctgaaaaaaaa

SEQ ID NO: 124226 - DNA, 3118 bp, Zea Mays
ctaggcttcgtcgccggttccgccgaccgccgccgcttcgtgttcacctcagtcaagcgcccccgccgccccccaggtcgggggggcacagccttggggcgtgcgccctcggccccgtacggtcgccgaatctggcggatgcgccgcggattcctcctcgccgctgccgccgcgccgtcattcatggcgaggcgtcgccgggtggtgccagagccataacccatgctattcaacatcccacactgcaaatcacaagctcctgtaaccgtcgccgccgccgccgtcgcagctatctccagcccccgcttctcctccgcgtccttgcccctgccggcgctagttccgccgccgcctccgactccgctgccagaggagagcccgttcgccgcgctcctcgcctctgtgcccccgccgccggaacctctccgccaagtgctcgccacgggcgacgtccacgctgcgctccgcggcctcccgggcctcgcgcgccagctgttccggtgggcggaggccaccccgcgcggcttccccagctccgcctccgcgttcgcggccgtcctcgtcccgctcgcccacgccaaccacatccggaccgcctaccccgtgtcgctccgcgccctgcgcctcggtctcctcctccctgttctgtccctccttctctccactcccctctcttccgctctgcgctccctagtgagcctcctcctacgcttgtccaccaacttctcgacggaacgcgatactcgccacgccacgcccgccgcctgttcgacgctgtgccttgccgccttccgcctggtgacctgccacggcgtggcccctgatgtcagggactgcaaccgcgtcctgcgtgtgctccgtgacgcggccaggtgggacgacgtccgtgctgtatacggagagatgctccagctcagggttgagccgaccattgtcacgtacaacactttgctggattctttcctgaaggaggggagaaaggacgaggcttccatgctgctcaaggagatggaaacccaaggaggtggtttctcgctgaatgatgtcacgttcaatgtggtgattagtttcttggccagggaaggtcatctggagaacgcggtgaagctggttgacagtatgcggctgtccaagaaggcctcatccttcacttataacccacttatcactgcgttacttgaaaggggttttgtacgaaaggctgaggctttgcagatggagatggagaatgagggcattatgcctacagtggtgacatacaatgccatcattcatgggttgcttaaatgtgagcaggcagaggccgcacaggtgaaatttgcggaaatgagagcgatggggttactgccagacgtgatcacatacaattcgttgctaaataggtattgtaaggcaggtaatttgaaggaggctctctggttgcttggcgatttgaggcgtgcaggtttagcaccgacagttttgacatataacactcttatagatggttattgtagattaggtgatttagcggaagctaggagattgaaagaggaaatggtagagcaggggtgctttcctgacgtttgtacatatacaattctcatgaatggttcacgtaaggtgaggaaccttgctatggcaagagagttttttgatgagatgctaagcaaaggtttgcagccagattgctttgcctataatacaaggatttgtgcggagctaaccctaagttctactcctatggctttccagttgagggaggtgatgatgttgaaaggaatatatcctgatacagtaacatacaatgttattatcgatggactgtgcaagactggtaacctgaaagatgccaaacgtttaaagacgaagatggtcagtgatggtttacagcctgactgtatcacatacacctgcttgattcatgcacactgtgaaagaggactcctaagggaagcaaggaaacttcttaatggcatggtctcagatggtttgcaaccctcagttgtgacctacaccatattagttcacacatgctgtagaagaggaaacctttattcagcatatggttggttccggaagatgctggatgtgggaattgaacctaatgaaataacatataatgtgctcatacatgcactatgcatgacaggcagaactccgttggcttttcgtcattttcatgagatgctggaaaggggattagcgccaaacaaatacacatatactttattgatagatgggaactgtagagaaggtaactgggcagatgcaataagattgtattttgagatgcatcaaaatggtattcctccagattattgcacacataatgcattgttcaagggatttgatgaaggccacatgtaccatgcaatcgagtacatggagaatattgttttggggtgaataaattgtcctgctggccttgcatcacagatatttcgtgtaagaactttctcatgtattgcagatttctcgtcatcagcgtaccattatttagctttgctcatttcttcaaacatactttactcggagatgatatggtgtttgtgggcaaggcaatacctttcgtaagggaaaggaaaagagagtttgagacaatgttctctgatttatgttgctgggtgctttcaaaaggatagttgtgcacacaaatatctcctcttgctgctcaggagatcatagatggagtttgggtgggtgggtgggaactgtgaaaagatgaaaaacaagagtctggaaccatgatctcttagttaagaagttgggtgctttccaaaagaatagttgagcacaagcaagcctttctcttgtggcttaaacagtgtcagaattctttgcttggcattatactcatggagataattttttttttaaatggaaactggatggaaggaacacgctccggtttctgaagatcttgcatgatattctgctcttttgttatttccttttgattatatgtactggaaacctgaccgccatgaattcctgataccaactatgtcaaatagtaaatggctgtggggcttctgtgactgagctttcttcagttatacgtaggatttctggtaagaacattccaagaatcttctgtaataaatgattattgtatcaccaattttgccataggcat

SEQ ID NO: 124227 - DNA, 2448 bp, Zea Mays
ttctcaggtgaagacaaagccctagacctcctctccggctctccctcccctcttctcccttctctctctctctttctcgggatagccaagggaaagggagaacaaaatcacagtacaaaagcaggccacaaggacaagatcttcctctggactgggggattctcacacccatagaaactgaacctactacactgtcatatcacacaagaagagagcttcagcgtgtgagcaagagcaactctcagaaaagaaacaactagtcaagagtcaagactgcctgcggcctgcctgccctccaaggctccaactctccgaggctccaaagtccaagctacttcggcgtccctgactgggcttgtggtctcagtctcagcccttcgttgccgcagagaaccctcagtagttccggttgctaattaattaatcgacgagaagtaggagggagcgctgatcgtgtgtgtgcggcatcgcaggatgggggatactagtagttctagccattcaaggcaggatccttctcttcttggctatggcttccatggcgccatcgccaactccactcctcctgcaaacttctttgaccaaggaggaggaggcacctatttcggagagctggaagaagcgttcatgcatcaggtcgcctcgctcagaagaactcaacaggctgcaaccgtctctgcacctcatcatggagacaccaagccctttcccactgctgctggtgctacagctgcaacggctacggctacggctaggccacctcctacactggacatcttcccagcttggcctatgaggtctcgtcttcacacgcccaaggagtgctcgaatgtgacagcagacagcacagacgactcggagagcagcagcaagaaccacagcaaccactcctcagaccagctcggagcagcagcagcagcaaacatggcgagccagttcgagcaagcttcacagcagcagcttcagcacaaaaatatggctacaagttccactccaagaactggcaaggctcttgatccaaaggtaatcagaaggctggctcagaatcgtgaggctgcacgcaaaagccggctgcggaagaaggcgtacattcagcagctcgagagctgtaagctgaagctttctcagatggaacaggacatgcagcgagcccgtacccagggcctctttcttggaggagatccgggtgcaagcaccagttcaggtgccgccatgtttgacgtggagtacgcccggtggctggacaaccacagccggcgcctggccgagctgaacggagccctacacgcgcacctggcagacggtgacctcagagccatcgtcgacgacgccctcacccaccacgacgagctgttccagctcaaggccatggcggccaaatccgacgtgttccacctcatcactggggtgtggacgacccccgccgagcgctgcttcctctggatgggtggattcaggccctccgatctgctcaagacactgctgccccagctagatccactgacagagcagcaagtggtcggcatatgcagccttcagcagtcatcacagcaggcagaggaagctctctcgcagggcttggagcagctgcatcagtcgcttgctgacaccatggccggtgggtctctgactgacgacgccaacatgagcttcatgagccaaatggctcttgccctcggcaaactggccaaccttgaaggctttgtgatacaggccgataacttgaggcaacagactcttcatcagatgcaccggattctgacagttcggcaggcagctcgatgtctcttggcaattggcgagtaccacaaccgccttcgtgccttaagttccctctgggcttctagacctcgagagatactggtgaccgatgaaggcaattgtgagataagcatcgcagcacaaccatcccaaaaccaattttcaaccttctgactgacacatgttgtggaactaaccctcagcataggagcaagagaaaaatgactgggaagagaatgactgggaagagagattgtttggatgcacgtagcagatatctgagagctacagaggaaagctgggaaatagaagaagctctaaaacaaggagtgtttctggaaattctttagttttcaaaaaacactttctgaaaatgtgtgtacaagaaaattccaggaaggtgaaattgcttcattgactgcagtgggaaggggaaagagagaagctagaatctcatgtcgagtactccagtacaatgtgttcttttgtctggtctaaattcttgtaacagctcttcctatgatggaagaatccattcaacaattccacctatgattactggattgagtatgttgaataggttggttgaggctatctagtaatttttatgactatgtttatccattatctaggactatttggttactatattatataatctttatcatatatacatccatttagttc

SEQ ID NO: 124228 - DNA, 1958 bp, Zea Mays
ttctcaggtgaagacaaagccctagacctcctctccggctctccctcccctcttctcccttctctctctctctttctcgggatagccaagggaaagggagaacaaaatcacagtacaaaagcaggccacaaggacaagatcttcctctggactgggggattctcacacccatagaaactgaacctactacactgtcatatcacacaagaagagagcttcagcgtgtgagcaagagcaactctcagaaaagaaacaactagtcaagagtcaagactgcctgcggcctgcctgccctccaaggctccaactctccgaggctccaaagtccaagctacttcggcgtccctgactgggcttgtggtctcagtctcagcccttcgttgccgcagagaaccctcagtagttccgctgcaggttgctaattaattaatcgacgagaagtaggagggagcgctgatcgtgtgtgtgcggcatcgcaggatgggggatactagtagttctagccattcaaggcaggatccttctcttcttggctatggcttccatggcgccatcgccaactccactcctcctgcaaacttctttgaccaaggaggaggaggcacctatttcggagagctggaagaagcgttcatgcatcaggtcgcctcgctcagaagaactcaacaggctgcaaccgtctctgcacctcatcatggagacaccaagccctttcccactgctgctggtgctacagctgcaacggctacggctacggctaggccacctcctacactggacatcttcccagcttggcctatgaggtctcgtcttcacacgcccaagacagcacagacgactcggagagcagcagcaagaaccacagcaaccactcctcagaccagctcggagcagcagcagcagcaaacatggcgagccagttcgagcaagcttcacagcagcagcttcagcacaaaaatatggctacaagttccactccaagaactggcaaggctcttgatccaaaggtaatcagaaggctggctcagaatcgtgaggctgcacgcaaaagccggctgcggaagaaggcgtacattcagcagctcgagagctgtaagctgaagctttctcagatggaacaggacatgcagcgagcccgtacccagggcctctttcttggaggagatccgggtgcaagcaccagttcaggtgccgccatgtttgacgtggagtacgcccggtggctggacaaccacagccggcgcctggccgagctgaacggagccctacacgcgcacctggcagacggtgacctcagagccatcgtcgacgacgccctcacccaccacgacgagctgttccagctcaaggccatggcggccaaatccgacgtgttccacctcatcactggggtgtggacgacccccgccgagcgctgcttcctctggatgggtggattcaggccctccgatctgctcaagacactgctgccccagctagatccactgacagagcagcaagtggtcggcatatgcagccttcagcagtcatcacagcaggcagaggaagctctctcgcagggcttggagcagctgcatcagtcgcttgctgacaccatggccggtgggtctctgactgacgacgccaacatgagcttcatgagccaaatggctcttgccctcggcaaactggccaaccttgaaggctttgtgatacaggccgataacttgaggcaacagactcttcatcagatgcaccggattctgacagttcggcaggcagctcgatgtctcttggcaattggcgagtaccacaaccgccttcgtgccttaagttccctctgggcttctagacctcgagagatactggtgaccgatgaaggcaattgtgagataagcatcgcagcacaaccatcccaaaaccaattttcaaccttctgactgacacatgttgtggaactaaccctcagcataggagca

SEQ ID NO: 124229 - DNA, 444 bp, Zea Mays
aaaccttctgtttccctgttagcttctgactgaacatctcaaattctgcaccgatggaaatatgaagttctgtgtgtcctgtcctaaacctttcagggcctctttcttggaggagatccgggtgcaagcaccagttcaggtgcctcatctgatgatacatttctcggcgttctcttcagctgtgtacataccaactgccacggtatgccatttctctctgactgacgagtgacgagtggtgtacgtgtccaggtgccgccatgtttgacgtggagtacgcccggtggctggacaaccacagccggcgcctggccgagctgaacggagccctacacgcgcacctggcagacggtgacctcagagccatcgtcgacgacgccctcacccaccacgacgagctgttccagctcaaggccatggcggccaaatccgacgtgttccacc

SEQ ID NO: 124230 - DNA, 396 bp, Zea Mays
atgggagccgctcggccatgggcgcagcaagccagggatgagcagccggcgcgcataaaaagaagtcaggggcggttcggcggtggaaggataagattcaagaaaaatcagagcatccacgacgtgagatatttcaaagagaagagacgcataggagaaggcttccgggagctaagcggcgtgggccaacatgagggagcagtgaaggatgaagacatacggctcctggagtgtcagggaagaatcgagcaggaaaatgtgtgggcgtttatatggatggagcatgagacgagagtgcttagaagccgcataaaatcatgtgatggaattttccatggattgctcgggctcaagataaacaaagaaaagaaacacctgcatattgatgaggagtag

SEQ ID NO: 124231 - DNA, 829 bp, Zea Mays
tctatatcttcgttcgaccacatctagctatagccatatatatatatatatcgacatgggaaactgcctggtgattcaacaagcagacgacaggaaggagatcaagatcgtgagcgtcgtggacgacggcggcgtcctcgacacgccatcgtcgtccccggcgggcgcgcgcagcctgacgaaggtcccggcggccggagccgccgccctctgcgagcccctgctgccggctgctggcggcgccgccgccgtcagggtgaagctggtgatcagcaagcaggagctcaggaagatgctcgacaaggagggcgtgtcgctggacgacatggtgtcgtctctcgttcgcaaggaagcgagcggtggtgaccgggaacaggagctctgctgcggtgggtggcggcctgcgctggagagcataccggaaggtagcgatctctagcacgtacttcctgctgggcatcgttcgtcgtcgttcaggtgtcttgtggaagtcacaggatcagtgtcagtggtcgtgcctacactgcatgcaagaagctagttacgctgcgcatgatactttttttgggggaataagcgtataattaagcaaaacatgcgtgctctgggtatagcatatatacacacatgtagagtagactattatatacatacccatacacatacacagagagatagtatagatacagatggtaggagttttgatatagggattctcttcatcttttctttctgcctgcctgcatgctttgtaaagaagaggtaaagatgatcctggaaatcaagcaaaggttttatatatgtggtagtactatataccttgtgtcct

SEQ ID NO: 124232 - DNA, 134 bp, Zea Mays
aagggcaatccaaatcacaaatatgaacaatgcagaccattgtcaacatgaaaacatggtagaccagaaaatgtcacaaagatgtaggttatgcatctacgccatctggagacaacaacaaatgcagccggatc

SEQ ID NO: 124233 - DNA, 174 bp, Zea Mays
atggcaccttcacgtccagctcctaccccttggcgctcacttctgcaatcccgatccagggatgcctgtggtgacggcaccctgctacgcccgccaaatcctttggcatctgtgcccccaccacaaccggtccccccggccgagctcatcagattcggacacgaaagcaattag

SEQ ID NO: 124234 - DNA, 2489 bp, Zea Mays
gtctgctccagcctccaggcattcggttccggctcctgcttccctctcccttctccggttctccccctccgccgcggagatggaggccaccgcgctcgcgtcccactcgtccccgttcgccgtccaccgctcgacagggaagccagccttcgcctacccccaccgtggagggccctcgatggtctcctctgtccacctccgcacgtcccggacccccgcccgctctgcggcatggagaaggcggaggagggggaccgggctggttgtgcgcgcggagatgttcggccagctcaccaccggcctcgagtccgcctggaacaagctgcgcggcgttggcgtgctaacaaaggaaaatattgccgaaccaatgcgggacattagacgagcacttctggaagcagatgttagtttgcctgttgtgagacggtttgtttcatctgttagtgataaggctttaggtgcaaatgctatcagaggagtccgaccagaccagcaattagtgaagattgtgcatgacgaactggtacaactgatgggtggagaggtatcggatattgtatttgcaaaaagtggcccgacagttatcttgcttgcaggtctacagggtgttgggaagactactgtctgtgcaaagcttgcgttctatttgaagaaactggggaagagttgtatgctggttgctgcagacatttacaggcctgcagccattgatcaactcactatactgggtaaacaggtgggtgtaccagtttactcagaaggaacagaagccaaacctacacaaataactaagaatgctatggaagaggcaaaaagcaagaatattgatgctattgtggtggatactgctggaaggctgcagattgatagatcaatgatggatgaattgaaagaagtgaagaaggctgttaatcctacagaagttctgcttgtcgttgatgccatgactggccaagaagcagcagcactagtcaccaccttcaatattgagattggtataactggtgcaatactgactaaattggatggtgactccaggggcggagccgcactaagcgttaaagaggtctctgggaggcccataaaatttgttgggcgtggggagcgattagaggaccttgagcttttctaccctgatcgcatggcacagcgagttctgggaatgggagacgtgctttcatttgtcgaaaagacacaagaagtgatgaggcaagaagaagctatagaattacagaagaagatcatgagtgcaaaattcgacttcaacgatttcttaaaacaatctcaaaacgttgcgaaaatgggttccatgagccgcattattggaatgatgccaggcatgaacaagataactcccgcacaaatccgagaagctgagaaaagacttgcattcgtggagtcaatgatcaatgccatgactgctgaggaaagggagaagccagagttactggctgaatcacgtgagaggaggataagagtggctgaggagtctggaaagactgaacaagaggtgagtcaattggttgcccagcttttccaaatgcgtgctcagatgcagaagttgatgggtatggtgcaaggacaagaagcaatagctggcatgggagatctcatggactcgcttaaatctgaagagaaggcacctcctggcaccgcgcggcggaagagaaggaataacacgtctaagcagagggacctggacgcagtgctgagctagtgagtagtggcctagtgtgctgtattatgaaaatgcataggtgggcactgaacctgtgtaattgcggttaattcggcacacattttttttgtacataacgtttagtcccatgagggaagatatgttggtcgctcttgaaattggagtaggttgtcatgaggacatatctagtgcacatagaagattggtgtacatgatgtacatattaaattaccaccactcattttagatttaacgtctctagttgatcattcaatttacaaataacacatttcactactacacaccaccacgttggatgatgtttttagcaaaatataccaaacaactagagacgttaaatctaaaataagtggtgatgatttaatatgtgcatcatgtgcatcaatctttcatgtgcattagatatgttctctgttgtcatacagggcccagaagaactcaggtcttgtaccggaggcctggagcccagtatctttcagttgcaacacttgatgtaaaaaaataagaaaaaacattttacctttcttagtttaagtttactcctcaagcaccaaaaccaaacatcttgctccttgaactctcaaaaacactcaaattatctccttgacctgaattcaagtggttataaaggtggttttgtcttttgtttagttaaaaaattcataagtacttgatagggttttagccatagaatatgtttctaaccttttaaaaattccaaaaaaaaatcatagagatacattcggacaacaacaatcaaagtaaaata

SEQ ID NO: 124235 - DNA, 359 bp, Zea Mays
aggtagtaggtagcagccagctcctaggcagcaccgcagcagccagcagggaggcaccgcggcaggaggtagatgtcctgctgaatatagagggcctcggaacagtagctataaactcaatgctcaattctcggaacagtagctataaacagtagctataaatttgtggatggttttatttcagacaagcacgaccacaatcggatagcaaaactgctttagtttggattagttcttaagacaattcaatgctcaattctgggtttttttacttatttacctattgcatatgaaactcggtggatgtaaattgtaatccctttatttaggcattgttatgtaactctagtattttgtga

SEQ ID NO: 124236 - DNA, 282 bp, Zea Mays
gtaaggggaaaggaaatgctctacaagtactgtgaaaaatgaggtgttgcccacaaacgaatcagcaaactcatcgttgccactggtgctgcagaggttccaaagctgaacatgcttctcagaaatgccaaagaaagcggggtggatgatcttcagttgatggagggttctgaagctatggagatggtgttgcatttagccattctgtaatcatgtcaatatgttatcagtgcatttagctgcattagctcgggtagttaaattataaatctgtttgtgtac

SEQ ID NO: 124237 - DNA, 1047 bp, Zea Mays
gcataaagcagcgagagctcgatcatcatcaggaactatctacccccttcaatttgcagccgcaattaatctatcggtcgtcgtcagcttgcgagcgacaaggcgcgacagatcgagatgatggaaagcagtggtggtagtggcagcagtgatccgttgctgctggcgccgggattcaggttctacccgacggaggaggagctgctgaccttctacctccggcaccgcctcgccggcaccaagcccgtcgtcgagcacctgatccccgtcatggacatctacggctaccacccctccgagctccaggcgatggccggcgcggcgaacgtgtgcgacacggagcagtggttcttcttctgcccccgcgcggagcgggagctgcacggtgggcggcccgcgcgcaccacgccgtcgggctactggaaggccactgggtcgccgtcctacgtctactcctcctcgcccaacaaccgggtcatcggggagaagcgcaccatggtcttctaccagggccgcgcgcccaccggcaacaggacccgctggaagatgaacgagtacaaggccgtcgccgacgatgcgccgccggcgccaggggcgcccgtcatgctgcggaacgacttcagcgtctgccgggtgtacatcagcacgggcacgctgaggtccttcgaccgccggccgctcaaccggccgggcggcctcgccgtcgtctccgctcatcaacaagccgtccactgcggttaccaacagcaacagctacagccacagctaccgccaccagcggcggtggcgaagacgacgacgagacaccaccatcagcagatgcatgctgcggtcgtcgtggacgacgacgcggccgacagcaacggacggcatgcagcggcggcggagaactcccacgacagctcgtcgtcggggtcgcggggcggcgtggacggagcagaagacgccgccatggccatcgactgggactcgctcatccctcctgtggatgatctcgccttcagaggcgtcgatgacttgacccgtgtcatttggccccataattga

SEQ ID NO: 124238 - DNA, 1644 bp, Zea Mays
aggcaaaacagccccggaccgcgtgcgtttcgcttccggcttccgcccctgctgtttcttggcgttcaccccctctttctctcgtggcgacgacggcgaccgtcgccgcccccctacgcgctaggtgccagggtccgtcgggtccttcgctggcgacgagcacctaccaggcgatccagtggtgtgtttgggaaggtttccgcggtcgggcggcgccccccagtggcgaagatgatccgactaccgacgtacgaagcaggaggcgtccgttgccatcttcttctcctttgagtatatgatactagcaacatccacagtatcaacattcgtgaagtatatattctatgttagtgacatgctaatggaaggtcaatgggagaaaaaggcagtgtatacattttacttggagctcataagtgaccttgtgcacttgtcattatacatgctcttcttcatagctatcttcctgaactatggtgtcccgctgcacttgattcgtgagctatatgagactttccgcaacttcagaattcgcattgcagattatgtgcgctacagaaagatcacttccaacatgaatgaacgctttccagatgctacatcagaagagctcgatgtgagtgatgctacatgtattatttgccgtgaggagatgactacagcaaagaaactgctctgtgggcatctgttccatgtgcattgtctaaggtcgtggctagaacgccaacacacttgccccacgtgcagagctccaatcattcccgcagataatggacatgctgtatcagcacgacaacatggagcccaggctggggttcagcctgctgcaggtactgccactccatcctcagaaggagcaccaggtgagaacatgagcaggcaccaagcaaaacttgaagctgctgcagcggcagcttctttatatggaaggtcttttgtttatcctccagcaaacaccctaaaaaggtctgttcctcctcagcctgcatcaagtacaccacaatctgaagcaagtagctccaatcatcagtcacaaaaagaccaagaaatgcagtcccgaaacagcagcgatggtttagtgcctctgcctcttaatgcagatggtgctgttggttcaggaacaagcacaagggaccttgaaaattcacttcagaaggcacaagaaaactttattaagagccagattgagatgttacagatccaactgcaaatggtgcagcgtggcgctgctgggccgcccagtaacgagaatactgagcacacagaagaatgactgaatctgtgaacagacacttctgcatcgtggtgtaataataaggagaatactgatgagcacacagctgaatctgtaaataggcggcgatgaggatgggacaaaagaaagccaaggattggcgatacctggggctgggggaaactgttacatgatgtcttgcctggatttttggcaggcctgttaatttatgcttcactattagtgccttgttgccagcaccagatgtttctctctctctgtgtgtgtgtggtggtttctgtacatgaaagccttttgacgggagaaccaaccatggctagtttaattatgaagttcacttgttgtacccgagggaaaatagaaatgactcttgtttttgcctatctatc

SEQ ID NO: 124239 - DNA, 1294 bp, Zea Mays
aggcaaaacagccccggaccgcgtgcgtttcgcttccggcttccgcccctgctgtttcttggcgttcaccccctctttctctcgtggcgacgacggcgaccgtcgccgcccccctacgcgctaggtgccagggtccgtcgggtccttcgctggcgacgagcacctaccaggcgatccagtggtgtgtttgggaaggtttgcgctacagaaagatcacttccaacatgaatgaacgctttccagatgctacatcagaagagctcgatgtgagtgatgctacatgtattatttgccgtgaggagatgactacagcaaagaaactgctctgtgggcatctgttccatgtgcattgtctaaggtcgtggctagaacgccaacacacttgccccacgtgcagagctccaatcattcccgcagataatggacatgctgtatcagcacgacaacatggagcccaggctggggttcagcctgctgcaggtactgccactccatcctcagaaggagcaccaggtgagaacatgagcaggcaccaagcaaaacttgaagctgctgcagcggcagcttctttatatggaaggtcttttgtttatcctccagcaaacaccctaaaaaggtctgttcctcctcagcctgcatcaagtacaccacaatctgaagcaagtagctccaatcatcagtcacaaaaagaccaagaaatgcagtcccgaaacagcagcgatggtttagtgcctctgcctcttaatgcagatggtgctgttggttcaggaacaagcacaagggaccttgaaaattcacttcagaaggcacaagaaaactttattaagagccagattgagatgttacagatccaactgcaaatggtgcagcgtggcgctgctgggccgcccagtaacgagaatactgagcacacagaagaatgactgaatctgtgaacagacacttctgcatcgtggtgtaataataaggagaatactgatgagcacacagctgaatctgtaaataggcggcgatgaggatgggacaaaagaaagccaaggattggcgatacctggggctgggggaaactgttacatgatgtcttgcctggatttttggcaggcctgttaatttatgcttcactattagtgccttgttgccagcaccagatgtttctctctctctgtgtgtgtgtggtggtttctgtacatgaaagccttttgacgggagaaccaaccatggctagtttaattatgaagttcacttgttgtacccgagggaaaatagaaatgactcttgtttttgcctatctatc

SEQ ID NO: 124240 - DNA, 2104 bp, Zea Mays
aggcaaaacagccccggaccgcgtgcgtttcgcttccggcttccgcccctgctgtttcttggcgttcaccccctctttctctcgtggcgacgacggcgaccgtcgccgcccccctacgcgctaggtgccagggtccgtcgggtccttcgctggcgacgagcacctaccaggcgatccagtggtgtgtttgggaaggtttccgcggtcgggcggcgccccccagtggcgaagatgatccgactaccgacgtacgcagcgttcagcctgctggcgacggcgtcggcggcgtactacgcgttcagcagccgtgagcagttctacccggcgatggtgtacctctccacctccaagatctgcttcgtgctgctcctcaacacgggcctcgtcgccatgtgcgtcgcctggcagctcgccaggcgcctcttcctcggctcgctccgtgaggccgaggttgagcgcctcaacgagcagtcctggcgggaggtcatcgagatcctctttgctgtcaccatcttccgacaggatttctctgtttcctttcttgccatggttgctgcgcttctcctcgtcaaggcgctgcactggcttgcacagaagagggtcgagtacattgagaccacgccctctgtgcccttgctctcgcacatcaggatcgtctccttcatggttttcctgcttaccgtcgactgcctcttcctgtcaaactcgctcaggtcactcatacagaagcaggaggcgtccgttgccatcttcttctcctttgagtatatgatactagcaacatccacagtatcaacattcgtgaagtatatattctatgttagtgacatgctaatggaaggtcaatgggagaaaaaggcagtgtatacattttacttggagctcataagtgaccttgtgcacttgtcattatacatgctcttcttcatagctatcttcctgaactatggtgtcccgctgcacttgattcgtgagctatatgagactttccgcaacttcagaattcgcattgcagattatgtgcgctacagaaagatcacttccaacatgaatgaacgctttccagatgctacatcagaagagctcgatgtgagtgatgctacatgtattatttgccgtgaggagatgactacagcaaagaaactgctctgtgggcatctgttccatgtgcattgtctaaggtcgtggctagaacgccaacacacttgccccacgtgcagagctccaatcattcccgcagataatggacatgctgtatcagcacgacaacatggagcccaggctggggttcagcctgctgcaggtactgccactccatcctcagaaggagcaccaggtgagaacatgagcaggcaccaagcaaaacttgaagctgctgcagcggcagcttctttatatggaaggtcttttgtttatcctccagcaaacaccctaaaaaggtctgttcctcctcagcctgcatcaagtacaccacaatctgaagcaagtagctccaatcatcagtcacaaaaagaccaagaaatgcagtcccgaaacagcagcgatggtttagtgcctctgcctcttaatgcagatggtgctgttggttcaggaacaagcacaagggaccttgaaaattcacttcagaaggcacaagaaaactttattaagagccagattgagatgttacagatccaactgcaaatggtgcagcgtggcgctgctgggccgcccagtaacgagaatactgagcacacagaagaatgactgaatctgtgaacagacacttctgcatcgtggtgtaataataaggagaatactgatgagcacacagctgaatctgtaaataggcggcgatgaggatgggacaaaagaaagccaaggattggcgatacctggggctgggggaaactgttacatgatgtcttgcctggatttttggcaggcctgttaatttatgcttcactattagtgccttgttgccagcaccagatgtttctctctctctgtgtgtgtgtggtggtttctgtacatgaaagccttttgacgggagaaccaaccatggctagtttaattatgaagttcacttgttgtacccgagggaaaatagaaatgactcttgttt

SEQ ID NO: 124241 - DNA, 3077 bp, Zea Mays
tgaatgggctttgcggggagggggaatgagaatgggaatgcaaagaattgggaatgagagaacatagaatgatgactattaactctattgcattcaaacacactctaagtagtacacgggtattttttgcgaactatttagtatctacacgggttgtaaatttaacgtggagttctttgtgcagaattaatgtaaaataatgaagaaaaaagagagtggatagggcacgcgaggaggatcgctgcgatcgagcgcactaaatttcgaaggggcatacaaagatggcagaagctgtggtgtttgctcttgcaaagataagcgtatccttggcagggtctgccatttccggtctgagggaacatgcttctataatcaaggaacttccagggaaggtgcggcgaatagaagcacaactgtcaataataaacggcgccctccagcagcaagattcagcctacctcagcgaccacgcctacatgaaatggatcgcctacatcaggaccttggcctaccaggttgaggatatcatggatacatactcacaccatgctcatcagctggagaacagagggttcatgtggaagctgacccaagaatacctcgggcctttcagaagcatctctgcagagatcaccaagatagaggagaatctcaagcatgccacagagctgaaacaagcatggctggaaaactacggccaccatggccaacagataatggaagctgagctttcccaggactacatccctgccgagcccagctgggaccaagattttgtcgggatggacggcaacacaacactggtgactgaatggctgcgctctgctagcgattcagaaagcacgttcatgacattgctgggcgcgggaggtctgggaaacaccaccctagccatggacgtgtacaagcgcgagaaggacaggttccgtgtccacagtttcatagctgtggagagggactgcaccatggatgccttgatgaggaagatactgttggagattgggagcagcatgaagcagccgccctcggaaagcgtcgacagtatccccgccaaccaactgaaggaagaagcgaggagaaggatcagcaagctcagagacggaaggtgcttgattgtcttggacaacgtccgggacccgagaatttactttgagatgcgtgatgtgatgagcaatctgccaggagttcgcatcatcttgacgacgaggaagacacaggtcgcagccgctcgtgatccctcgtcgtcacgtttcctgcaactccagccgttggaccacatcgacgcgctacgtctgttctgcaggaaggcctttttcaagacgaacgacagcaagtgccccccgaatgtcgaggttttcgctacttctttagtgaatatgtgcaagggcctgcccctagcgatcgtagctatgggaggcatgatgtcgttgaagccaccagtggagcagatatggaaccaggcatgcgttcgtctccagaaagagctggagaggaacgcggatcacgtgcaggccgtcctgaacctgagctaccatgacatgccgggacacctcaggaactgcttgctgtactgcagcatgttccccgaagactaccacatgtcacgggagagcctcgtgcggctgtggatcgcggaaggctccgtgctggcagccaacagcccgacgccggagaccaccgcggaggcatacttcatggagctggtccgccgcaacatgctgcaggtagtggacaacgacgtggttggcagggtgagtacctgcaagatgcacgacatcgtgcgcaagatggtcctcgtggttgccaaagaggagaggttcgcttctgccaccgattacagcacagtgtcgcacaccggtaaggacgttcgtcacctggcattgcatgggtggaaggacacgaacacaccaccagtcaagttccctcgtcttcgacgtctagtggcactcggagcgaactcatgcctgacgaaactgctacccgcgattttctctggatcgagcttcctcactgttctggtgctgcaagactccggcatctccgaagtgcccgcgtctatcgggagcttgttcaacctgcgctacatcagcttacggtacacccaggtcaaatccctcccggaatccgtccaaaggctcgcgtaccttgacacgctggacgtcaggcaaaccagagtacagaggctgccacagggtgtcggcaaggccaggaagctacgccacatcttggcagacgcttgttgtcccgatggcagccagcagtcagaatttcgaagcttcactgcgttggagcccccaaaagcgctgacgagttttggagagctgcaaaccctcgagactgtgcaggctaacaaggacatggcgatgaagctggcgaagatgatgcagctgagaagcgtatcgatcgacaacataagctctgccctttgcggggagctgtttgcttccgtctcagagctgcagttccttaccagcctgcttctctctgcaacagatgagcacgagccgctcagtttccagaacctcgtgccgaagtcaagctacctaagcaggctgactgtgagaggaagctggttggggaagacactggattacccggtttttaaggagcatgggcggaatctcgcgtatctgtcgcttagctggtgtctcgttttgggagatccactccagttccttgggtcacactgtccacatcttcagtacctgtgcctccatagggtgcagagcgcaaactccttggttcttccggagagatgctttcgggagctcaagaatctcgtcttggagcgcatgcctgatgtcagccagatgaaggttggagatggcgcccttcagtgcgtccaagctatccacatcacggcgctgcccaacctagataaggtacctcagggcatggaatcccttaccactctcaagaagctatctctgctcgatttgcataacgacttcatagttgactgggagaagaaggaaatgagccggaagatgcctcttggtctggagttgcgcatataggtgctgtttcgatttggtttgccgtgtgccatttactcatttgttatcatatcttttttt

SEQ ID NO: 124242 - DNA, 1871 bp, Zea Mays
ctccacccgtgagccgctcccccttccgtcccggccctcccgcttccccgaatcccggagaaaccgccgccatggacaaggccgcgctggtggctgagaacagcacggacgccggcgggtcgtcgtcgtcgttctcgggcctgcgcgcgtacgggcgcgcgctggcgcagacgccgcggcgcctggcgcggcgcgcgtgcgccgccacggcgccccgcgaggagatgagccgcgtgcgcgcgcggtcgggcccgcgcatggcgcgcgcgctgcggtggtgggacctggtggggctcgggctcggcggcatggtgggcgccggcgtgttcgtgaccacgggccgcgccgcccgcatctacgcggggcccggcctcgtcgtgtcctacgccattgccggcctctgcgcgctgctctccgccttctgctacaccgagttcgccgtcgacatgcccgtcgccggcggcgccttcagctacctccgcgtcaccttcggggaattcgcggcattcctgacgggggcgaacctgatcatggagtacgtcttctccaacgccgccgtggcgcgcagcttcacggcgtacctcggcacggcggtgggtgtggacgcgcccagcaagtggaggattcctgtgccgggcctgccccaggggttcaaccaggtggacctcgtcgccgtcggcgtcatcctcctgctctctgtctgcatctgctacagcacaaaggagagctcggtggtgaacctggtgctgacgggcgtgcacgtggtgttcatcctcttcatcatcgtcatggggttcgcgcacggcgacgcgcgcaacctgagcaggcccgccgacccggcccacagccccggcggcttcttcccgcacggcgccgcgggcgtgttcaacggcgcggccgcggtgtacctgagctacatcggctacgacgccgtgtccaccatggccgaggaggtggagcggcctgaccgcgacatccccgccggcgtctccggctccgtcgtcctcgtcaccgtgctctactgcctcatggccacctccatgtccatgctcctcccgtacgacgcgatcgacccggaggcgccgttctcgggggcgttcaaggggcgggacgggatggcgtgggtgtccaacgtcatcggcgccggcgcgagcctcggcatcctcacgtcactgatggtggccatgctggggcaggcccggtacctgtgcgtcatcggccgctccggcgtcgtgcccgcctggctcgccagggtcgacccccgcaccgccacccccatcaacgcctccgccttcctcggcctgctgacggcggcgctggcgctgttcacggagctggacgtgctcctgaacctcgtctccatcggcacgctcttcgttttctacatggtggccaacgccgtcgtgtaccgccgctacgtgggcgacccgtgccccggctccggccagaagaggagggcctggccggcgctggccttcatcgcggccttctccctcattgcgatctccttcacgctgctgtggcagttcgcgccggggggcgccgccaaggtcgggctcctgtccgggaccgcggcggtcgcagtcgccgcggttgtcgcgttccaggcgctggtgccgcaggcgcgcgagcccgagctgtggggcgtgcccgggatgccctgggtgcccgccgcgtccgtcttcctcaacgtattcctgctcggctcgcttgaccgcccgtcgtacgtccggttcggcttcttctcggccttcgcagtgctgttctacgtgttctacagcgtgcacgccagctacgacgccgaggagggcggcgcggtggacggaggcggcggcggcgacaagctgcaggaccaaggatgcgatgtgtag

SEQ ID NO: 124243 - DNA, 282 bp, Zea Mays
tgaactactgaaaggcttccacaatgtctacagggcaaatgtaccaacatcaagttcatgtcctatagttcctctgcccaaaagaggggggcaaaaatgaactccctaaaattctttcctgcacacaaatacaagaggagcagagcatcctgtttcagagcatatcaatgtctagaatttggtgttgtatacattaatatgaatcgagtcattttgaaagctacccataaatagagcccagaatcacatctccaccctccgttttcattccttcttgacccg

SEQ ID NO: 124244 - DNA, 704 bp, Zea Mays
tgacgaaatttccagagattatcatttactgcagtacattagctgcatccaggactgatgcacagccttcagataataacagaactgatgccaaaatggaaaagagatccaacttccacacaaccttctacaacagcaaaatctgcacagctaagaacatacagtgttacgataataacagaactgatgcacaaggcggggatccgttcagacttcagatgagcagggccccccgcacctgcgcttccatctgctacgcacagttcaagacgacagtgctgacattacgctagatggggccggtagcacgacattattgacctggatgaggaacctgtcaatgtaagccctgacatagatctttggagcagcagtgtcgctactcacgtgacaataatttggcacatgatgacaggcagtaccacgggaaggtgattgctccttctcgttcagtccttctcaatcagcagaagtccccacaagaccacgatggcacgatccattcttaaaatgtagaaaatctattgagttccgacgccgacgacgactatgtgtccagtaagtaacctgggcgctgccatcttccggaaggaatgcatggaggccataaggttcccgtacgtaacttagaatacaagcagagccctgtttcttggcttcgacaatttcaagtctatttcagcttcttctatccaaacaaattc

SEQ ID NO: 124245 - DNA, 1831 bp, Zea Mays
gcctcaccaccagcctactactacatattttataacctgcctcacgcccacctctgaagcccttcacactttgattcctcctgtctctctagccttctccatgctaatagccagatcaaacgcatcaagacctcatgttgtgtagtaccagcagggggggggggggggggggggggggaatattaatactacgtctcgcgtaaacgctagctagcttagctagctccgtcgtcgtcccaaaagtcctcctgctcttgggctataaatgcctggccaaaacacctgcatggttctctacgcgacacacacacaccatcactgcgctgcgctactctactccccaccaccgccgccacccaagagctttcctcgctgcacaagaaatggccacgaaccatctctcccaagggcagcaccagcacccgcaggcctggccctggggcgtggccatgtacaccaacctacactaccaccaccagcagcaccaccactacgagaaggagcacctgttcgagaagccgctgacgccgagcgacgtgggcaagctcaacaggctggtgatccccaagcagcacgccgagaggtacttccctctcagcagcagcggcgccggcgacaaaggcctcatcctgtgcttcgaggacgacgacgacgacgaggctgccgccgccaacaagccgtggcggttccgctactcgtactggaccagcagccagagctacgtgctcaccaagggctggagccgctacgtcaaggagaagcagcttgacgccggcgacgtcgtgcgcttccagaggatgcgtggtttcggcatgcccgaccgcctgttcatcagccacagccgccgcggcgagactactgctactgctgcaacaacagtgccccccgctgctgctgccgtgcgcgtagtagtggcacctgcacagagcgctggcgcagaccaccagcagcagcagcagccgtcgccttggagcccaatgtgctacagcacatcaggctcgtactcgtaccccaccagcagcccagccaattcccagcatgcctaccaccgccactcagctgaccatgaccacagcaacaacatgcaacatgcaggagaatctcagtccgacagagacaacaggagctgcagtgcagcttcggcaccgccgccaccgtcgcggcggctccggctgttcggcgtaaacctcgactgcggcccggggccggagccggagacaccaacggcgatgtacggctacatgcaccaaagcccctacgcttacaacaactggggcagtccataccagcatgacgaggagatttaagattatgcctgcagaatccaaacagccaaagtagtagcagtagtagttgctagcagcagcagcagccgcctagtactacttgcacacgaagtgacaggattgaattgacctgtacacggggagaaaaaaaaaggaaggaaggaagtggagagagatcccttgtttcccgggcaatcttccttccatccccgcccccagaagaatgctgctgcctttttgctgttccgttttttttttttaatttttattttcttctccatggcttccagaaaaccctacttactgtaggggatctggtagcagggggccgggcatgcgtgggaggtttgcaggaagcatcaagctgccaaggagctggaacgagagacaacagacagagagagatgtgtgtgtatgtatgtgtgtgtcatctgtacctatatgtcttaatttgtgggtccgatagagaacaaactgtgaagttgatgtgtgtgcctgcctgcctcctgaagaaacaatgcaatatccccatggggattttgttc

SEQ ID NO: 124246 - DNA, 1747 bp, Zea Mays
aataggatatcagatcgatagtagcctctctcattcaccaggagtcactctcgattaatctgcaacgtcgatggtcatggagagagtcgtcatcgctgccgtcttccttctcctcttctcatgccaaccatctgaagcgggccgggtcgtcgtccggcggccgccgccgacgctggcgaggcggcagcggcactacacctcaccgcgcgcgggcggcgacggtggtggaggcgtgtccgtgccgccggcggtgcagtacgagacgcggtggtacacgcagcggctggaccacttcaactccgcgccggcgagctacgcgacgttccagcagcggtacctggtcaacgacaccttctggggcggcccgaccgcgcccatcttcctgtacgccggcaacgagggcgacgtggacctcttcaccaacaacacggggttcatgtgggagtcggcgccccggttccgcgccttgctcgtcttcgtggagcaccgctactacggcgagtccatgccgttcgggggcaccagggcggccgcgttccgggacgcccgcaccaagggctacctcaccgtcacgcaggcgctcgccgactacgcgtcgttcgtgctcagcctcaaggccaacctcagcgcgccggcggcccccgtcgtcgtcttcggcggctcctacggcggcatgctggccgcgtggatgcgcctcaagtacccgcacatcgtcatgggcgccgtcgcgtcgtccgcgcccatcctcagcttctacggcatcgtcgacccctacgccttctacgaccgcatcaccgacgacttcaagagcgagagcaagcactgctacgacgtgctccggaagtcgtgggacgtcctcgacgatgcgctcgccaccaaagaaggccaggcacagctgagacgtacattcaccatgtgcaatggaagtagcgtgcaggacatcccgtctctgctggagagcgcggtggtgtacgcggccatgacggactacccgacgccgtcggggttcctgacgccgctgccggcgtacccagtccgcgccatgtgccgcgccatagacgccagccgggcggagtcggcggaggcgagctccggcgccgccaacgacggcaacagcaacagcaccgcccagctgacgctgtcccaggtccgggacgccatggacgtgtactacaaccacacgggcgcggcggcgtgcttccgcgccgaggaggacgacgacccccacggcatgtacgacgggtggaactggcaggcgtgcacggaggtgatggtgatggcgtacggcatccgcgacggcggcgtgctgcagccgtcgcccttcaacttcaccgacgtcgtcgacagctgccgcaactacaccgggctgccgccgcgcccgttctggatcgagaccgagttcggcggattcgatattgggaatgtcctgaagaaatctgctagcaacatcgtcttcttcaacgggctgcgggacccgtggagcactggaggcgtactgaagagcatctctgacagcatcattgcgctggtggagcccaaagggtcacaccacgtggatctgagattttccagcaaggaggaccctgagtggctgaagcaggtgcgagtgaaggagaccaggatcatagcgcgctggctcaagcaatactacagcgacgagggcattgcagcctgaattcatcttcttttaattttcctctctctctctccctccctccccacgtgttctttgatgtcacgtagatta

SEQ ID NO: 124247 - DNA, 2278 bp, Zea Mays
caaacaagccatcctggaaactgacttgaattcagcccaattctgtagatccaaacagggccggcgtcagtgcctcaggtgagagagcagcagacgatgcaaagagccaaaactgcaagcagacgcagccgaagccgaagccgaagcccaagcccaaaactgttttgtctttgcccagaaccgcgacgagcctaaactgcgcttcctcctatctacaagtccctggcacatcacgcatagtccaaccatggcgcgcaggcgataaggcgcgccacggggacgcgacatgtggtggcggacgcgatcaggatagggccaggctggccgggcgcggccacgggagaacggtggccactcgtcccacatccgcttcgtcctgtcctgtactgcgtcctgcccccaacgagagccggagccggccatcccgtcgcacactctccccctctatatatgccgtcggtgtgggggagcctactacaggacgacccaagcaagcaagcaagcagcgagtacatacatactaggcagccaggcagccatggcgcccaccgtgatgatggcctcgtcggccaccgccgtcgctccgttccaggggctcaagtccaccgccagcctccccgtcgcccgccgctcctccagaagcctcggcaacgtcagcaacggcggaaggatccggtgcatgcaggtgtggccggcctacggcaacaagaagttcgagacgctgtcgtacctgccgccgctgtcgacggacgacctgctgaagcaggtggactacctgctgcgcaacggctggataccctgcctcgagttcagcaaggtcggcttcgtgtaccgcgagaactccacctccccgtgctactacgacggccgctactggaccatgtggaagctgcccatgttcggctgcaacgacgccacccaggtgtacaaggagctgcaggaggccatcaaatcctacccggacgccttccaccgcgtcatcggcttcgacaacatcaagcagacgcagtgcgtcagcttcatcgcctacaagcccccgggcagcgactagaccgcgcccgccggccgccccccgccggctagctagctagctagctcctgcgtgagctagtagctagtgccatgcgtcgtctctgtcgttcggttttgcttcgggtcaccgtgtaccctttgcttgcttggtttcttctttccttttttcctttttttttcttcttttccccggccatggttcctttgctttccagcagttctctgctggatgtgatgtatccattgttgcaatcatggccttgcattggctacctctatacctgctacaaaactactgcaacgcctatatatacttggggtgaggaacatgtgaatgcaagctccggctatcatatacatgtaatatggatacaaactatatatataaatccgccgaggcgccgacaatactatacgacaccgtgttaagttaatatataactggtgctttttatttatatatctgtctcatcatatatatgctaattaatggatgtgtgtcctcttcacttcaattccttctttcctttcctatgtcttttttgagatcttaagtgaacgaattcgagatgtaccaacaagcgtgatgctattattaaactgcatatatatgtatatacctatcttgtggaatggaaaacgaaataagccaacagatgcagttttatgtttacatcacacataaagtagtgctagaacactagcaaaatgaaaccagagaaacgaatgaaaaaccagagagaaaatatgtggtacagagcgcacgagtagatcagatgatgtaaagtttgaatgattggcaagtgattgtaccggcctactcccactgtcgatacacagctttactgatggagactgcaaggcaagtcgacggccgttttcttacatgtacgacaaaggcacactgctacttctcttttttttcgagcgagtaaaaccccatttctattattaccatatattttctattattaccgtaatagaaatatagcaggtccagatacaatacagaaggtcaagtaaatgcagagtaactaaggtaactcgcaacagagtttccctatcacagtagttatctggtttagatgacttgacagaggactcctattacaggcacggcacagatagccaaaaggtaggagaagagagatgacctagagtgttgtgaaaagggctaaaggggtgacatacaccatagccacacccaacctcagaagaaaaaaggaagcaaaacaatcatcctgct

SEQ ID NO: 124248 - DNA, 1310 bp, Zea Mays
gccaaaaaattctactgtcactttccaatttcaatgcgctgccaaacaagccatcctggaaactgacttgaattcagcccaattctgtagatccaaacagggccggcgtcagtgcctcaggtgagagagcagcagacgatgcaaagagccaaaactgcaagcagacgcagccgaagccgaagccgaagcccaagcccaaaactgttttgtctttgcccagaaccgcgacgagcctaaactgcgcttcctcctatctacaagtccctggcacatcacgcatagtccaaccatggcgcgcaggcgataaggcgcgccacggggacgcgacatgtggtggcggacgcgatcaggatagggccaggctggccgggcgcggccacgggagaacggtggccactcgtcccacatccgcttcgtcctgtcctgtactgcgtcctgcccccaacgagagccggagccggccatcccgtcgcacactctccccctctatatatgccgtcggtgtgggggagcctactacaggacgacccaagcaagcaagcaagcagcgagtacatacatactaggcagccaggcagccatggcgcccaccgtgatgatggcctcgtcggccaccgccgtcgctccgttccaggggctcaagtccaccgccagcctccccgtcgcccgccgctcctccagaagcctcggcaacgtcagcaacggcggaaggatccggtgcatgcaggtaacaaatgcatcctagctagtagttctttgcattgcagcagctgcagctagcgagttagtaataggaagggaactgatgatccatgcatggactgatgtgtgttgcccatcccatcccatttcccaaccccaaacgaaccaaaacacacgtactacgtgcaggtgtggccggcctacggcaacaagaagttcgagacgctgtcgtacctgccgccgctgtcgacggacgacctgctgaagcaggtggactacctgctgcgcaacggctggataccctgcctcgagttcagcaaggtcggcttcgtgtaccgcgagaactccacctccccgtgctactacgacggccgctactggaccatgtggaagctgcccatgttcggctgcaacgacgccacccaggtgtacaaggagctgcaggaggccatcaaatcctacccggacgccttccaccgcgtcatcggcttcgacaacatcaagcagacgcagtgcgtcagcttcatcgcctacaagcccccgggcagcgactagaccgcgcccgccggccgccccccgccggctagctagctagctagctcctgcgt

SEQ ID NO: 124249 - DNA, 1447 bp, Zea Mays
tgttggatgtggttcggttcttgtaagtaaattcttcagattagtttgaaggacctgtgttgtagtatttcgatatggtattaaatatgcaagcatatgtatcaattctgccagcactgattgtgaccacacattctgatattggattattctgtgcaaggttgttactatgtactagtaagaaagtggcttttccacttgtttatgatgatacatgtataatcactaacacaccttttgcatttctgcatcagaagtgtatattaatacacttgacgtggtctggttcctgaatatcaacttgtctcacttcaacttttaatagatcagttttacctttttattggcattcagaaaaatataggtgataatttagagagaacattcatacatatgcagtttccctctcttgatttacagcattatttcagtgcagttttgttaaccccttttttcctttagcatgtcttcatttagtttcttattatgctcatccttttatttttgactatgaagcaggctttctggaatcacatttcttgagaactatctgttggagaactaaactaggctcttgttcatattatggatcagcaagctaagattgatgctgattttcttgaaccaactgtactcttagatgagacacattaccaggaggggtacaaaaatggctataatgatggtttggcatctggaaaggaagaggggaggcaggttggtttaaagatgggtttccaggtcggtgaagaactgggtttctttcagggctgtctggatgtgtggacgtctgcaattctcattgatcagaatgccttcacagctcgggtcaggaagaatatcgagcaactggctgcactggtgggcagctatccgctgtctgatccggagaatgaacaaattcaagacgtgatggagaagataaggctgaaatttagggtcatcactgcaagcttaggggtgaagttagagtatgaagggcaccccaaatcatctaaacaggatgctgaggatctatgagcagtgattgaaattacattttagtttctccgcccttgctgtttaaagctcttcaactcattggcatcacgaggaactgccgtgagacatcaatggccagagtccgaccaaaaccacatatatagttttaacaatgtctcaagttttgtgttattacctgctatctgccatatgtaatagtttcctttcagaaggcaaaagcacttccttcccattttcttgaagtacttgttgacttgtattctacatgttgggagcatatagatctttcataaaaacacacgtcccatgtattgcaaatcttcatagatccaattatctcatgggtatgttcattatgttcatcccaagtgtagaaaatcagtgctagccccttgcattgcatggatttaatcccaaatcttggacagtgtgtttgttactctgc

SEQ ID NO: 124250 - DNA, 1053 bp, Zea Mays
ggccaccatccccttctctctcccttctttcatctcccctccccatctggatcctccgccatcggttccccattgctgcctccatcgcccccgctcctcgccggttccccattgctgcctccaccgcccccgctcctcgccggttccccattgctgcctccaccgcccccgctccgaggagggccacgacggccggatcctggactcgttgtcgcgcgccaaggcaaattctttcgctgcggagatggcagcggcggcggggccgtacaaagagatgctggaagtggtgaacgcgtgcgcggcccggatccggtgacgcctccgtccagcttccaagcgtcgcctcctcaacggtcagtgcccactcgcttgctgctttctcttagtagctgtagtcgttttttaacgggaaatacaacaggggaagccaccagcccaccactatataggattttattaattgaaaaatagtgttaatgcacgaccacgaagaaaaagtaaattcatgaacagatctacctaacttatgatttctgttggattttaactctagtatacctctttgaaattaaaaggctgtgatgtggttgttgatgaacaaacctagttgttgccagatatcctgtttctctgcactgggttgcggcctgtggtactggtcgactatggtggcacaatgcctcagctacaagaaaatctttgtggcctgctatatcttgcccgacagttcaagctctgcaaggtgaggtctgttcagtttggccagaaaggcatcccctacctgaacacctacgacggccgcaccatccgctaccccgaccctctcatcaaggccaacgacaccatcaagatcgatctggagaccaacaagatcatgtacttcatcaagttgtatttgccatttcatagacttcatcaagttatatacttagttaggctcaatgttagcacaaacagttgatgagcaagtttaaatttagagtacacttatgtatgagttatttgacaatgcttatttatgagatattgaatgttatttatttatattatatt

SEQ ID NO: 124251 - DNA, 1456 bp, Zea Mays
gtcatacatcatccacattccacacacttgcatagttgcattatatgcaagcaggcatgcaccacgcaccagggcagcgtgcaagcaattaccagcagacacatcacacagaagctagagcacatcacgggcgggcgccggcgatgtcgtcgtcaacaccgagagagcgaggcggcgggaggcagttcccggtggggcggcgccggtacgccccggtggccgacgcggggtgcggcgggtgccgcccgacgacgtcgaggctgctccgcctgccgtccttcctcaagccctgcagccagctgttgggtgggggtggtaatagcaaagctgccgcgacgacgacgacaaggaggaggagtggtggcggcgccgccgccgtcggtgagcattactcctgcgcctccacctctaccacggcttccttctcctcgtactcctcctcgtcgtcggccgccacgcgcagcacgggcggctacgcggcgtcgtcggcggcctactcctcctccgactgctgctactactaccactgccacccgtcgcgcgtcgtcgtgtacggagctggacccaccgcccccatgcaacagtaccaagacccagcgtcgtcgtcgctccacaagcagcagcagcaggagcaggcgtcaccagctcgcgcggcgccgtcggcagtcggccataataataagaagaagaagatgaggaggagggcggcggaggacggcgtgggcgtgggcgtggcggtggagaaggagtcgtcggacccgcgcgcggacttccgcgacagcatggtgcagatggtgctggagacggggctgtgcgactgggacggcctccgcggcatgctccgccgcctgctcgccctcaacgcgccgcgccaccacgccgccatcctcaccgccttcgccgaggtctgcgcgcagctcgccgccgctcctcctcctcctgcgccgtcgtgccagtaccggcgctgctgatggcacatggcagcgtccacccaccaccctaccccgctcgtgccgtctgctagctgtaacggacggacggacctgatggcgacaacagggctatgcgcttacaaagtgcagatttttaactgtggttattagtcaggagattaagctaaatcaaggacagataataaagtggcgtggcagcagcgttattaggctaccaccatgcatgcatgttcttgagatcccaggtagtagtagttgccccgatcttttggtttgttattttcagtcgatctcgcagttagaattgtgtgtgtgaggttgtgcagtgcagtgcagtgcacttgtgcttgcttgtgctgtgtgtatactatgggacgacatggcctttccaaaagcatgaagaggccacccatgtgtatcatccataatctgtacacgtatgcatgttgtgacttgttgaattgtacgtacgcttgtgtttatgtagtatgtttgcgttaaaa

SEQ ID NO: 124252 - DNA, 1836 bp, Zea Mays
cctgttgccgaggagagcgtggagctggatgatggtctgctcctcctgtagcgtgaacttgccccgcttgatgtccggccgcaggtagttggtccaccggagtcggcagctcttgccacaccgccgcagacctgcagagagacggacacgcgacagcatgcatgcatagatgatgagcattctgctggatggcaaatctatactactcctattaagtacctaaagaaggcgtccacatgcccccacccccgcccccgcgtgccatcgctcgacccctcacagcgcccctcgcctgcgcacggtcgcacgttacccgctgctcaaccctcgccccgcctcctgagccccaagatcgcgtcgatccaccattcccatgccctaagatcacgccgatccgccattctcgtgccctcgctgccccacacccccccacccccgcccctgcccccgtcctcagcgcttcttccccactgaatcgcaactgccgcttccccactgaatcgcaactgccggcgaggatcgacgccaccatgtcacggatccttcgtccccttcaccagggcgagccggcggcggtggcggaatggcgtcgagcgcccagcccacgcacgcccccctccaaatgcggatctgcgacccccgaccctccaccttggtgtgccggtcacagctccgtggaggcagcttgctcgcacctcccacgtcgccgctgccttcagcacgccgcccagcccacgcctgcccgccttcgaatccgagtctgccgccccagccctccaccttggtgtgctggtcgcgtctccgtgaaggcaggtcacattctcgaagcactgtcgtggcgtcttcaagaaggccacgatctcttcgtgctgtgttgtgggatgccgatgacacactcatttctttgtttcttgcaagatatgcttaatgttccattaaaaacaaacatgttcaaagttcaagcctacacctcctcggtcctcttcctccagcagctcaagctgcattatttagtaaaagacaaaggaagagttcgctctgctaagaaatatttccaggaaggcgataagaatgctgggtgtttgtgtgcgggcaataagaaggctgggggattggttccactccgcatgcaacgacacgggacgcgggtaacattggaagaccagcagaacatcaaccgcttcggttgcctcagcacccgcctccacgaattccaggaaaagatcaagcttgcgaagtttacaaacttttcaatcagtaaaatcggtgcctccttaagaccacttgggttatggctcgttgtcaagatgaaggcaccagtagtctttgatcccttttgttcatgtgtttatggactcaggaacgccttcaggaagggcaatggcgtgtccaactccattggcatcctcctgctcttcatctaccctgtctggaccggggtgctgcaaatcctgtaggcgcggttgcctccgtgttctctgctgtccaggcatccagctccgttgccgttcgtctcttgtgcaaatgtttcttctatggtgaattggtgatcgtggttctgtgctatcggggttggatgcgtaatgtatgcttgaggtaatcagttggacccgttgctatggtggtggacaattttgttatctcatttgttgtagttcgatgtctacatttggtttgttcgagtacataaacaccaataaaatcattcgagtacataaacgccgccaataaaatcaatagtggtggcttgatgtagatcgagatgttattttatcaggcgtgtaaacccttgtcgcttctgttaagttgtcgcaagtttgaggatggatgtttata

SEQ ID NO: 124253 - DNA, 709 bp, Zea Mays
ccctcgttgagctcctgctccacgcacagcctccggtccgccctgatcgcgccatggtgacggcggtagtggagtcgccgctgcggcagcggcagcgacagaggctccggtcgccgctcgccggcgctggcgccggcgtgggaagctccggcggcgacgggggcttggagctgcggcacgcgtgccctgcgaagcgcggctccgggtccggcggcatgcggggccggcggtgggtgccgccggagatcgagatccccgacgtccttcttcctggcggcggcggcgggcgcgggtacaccagcctccgcgacatcatgtcgtcgcccgagtacgccgccgccaaggccgccagctcccccgacgagccacccggtggcggtggcgcagcagccgccggggacgtgcacatgatccggcacccgctggtgaagcacgccgcgtacgcctacctccagctgacgccgtccgcgagggaggaggcccggaggcggatgctgcagcggcggcgcggcccgctctgccgcgtcctcttcggctgcctcggcttcctcggcgcgctcttcggccggtgaccgcgcgcggacgcacgggccggtccggtccggtccgtcccacagttttgcggccgcgtttctttttttttttcctccttactttcccgtgtaacttcgttcatcgtttcttcttcttcttttgtctgcgtatacag

SEQ ID NO: 124254 - DNA, 910 bp, Zea Mays
catttagtgtagattaagcctgcatgctgcaagaacccggccggcgaatgcagcaatagccacccagctggtggcggtccgtcgttgagcagcacgcacgcacgcacagtactgatcccttctccgaatcatcaaccaataatgggcggaggaagggagctcgccgccggccgttatttccccctgcaacggcggcggtcgtctagtcgtcgccgtcctcttctcgtcatcctactgctcgccgtcgtcgccagcggtcaagcatccgccgcctctggcagcatcttcggcggcgactcggcgtcatcggagtgcagccgagcgtgcgagtcccagcgctgcacggcgccgctgatgcgctacggcaagtactgcggcgtgtcctacacggggtgccccggcgaggccccctgcgacgccctcgacgcctgctgcatgctccacgacgcctgcgtccaggccacggacaacgactacctcaacatgtggtgcaaccagagcctgctggactgcgtggccgcagccaggcctacggcgatggcggacacgttcgaggggaaccggtgcaacgtcacggacgtcgccgacgagatcaccgccatcgtggaggccgccgtgtacgccaggggcatcctgcacaagccctagcagtagcctggaccagtaagctcgatggtggatggagcgaccggcggctggcctatacaagtttggtggggtggtggattctgtgttggatcttggatggtggttcatggcttgtcgcaggcgaagtccacgtctttgacgtacatatatatatattagttcctgagtttacacggcctggaaaagtgtacagacctcaataaagtactgtcaatatatgtccttgggagggtagttcagacacatttctatccaaaaaaaa

SEQ ID NO: 124255 - DNA, 111 bp, Zea Mays
gaaaaatctggtacacggtaccggaaatttaccgaattttatcgaccatttacatccttaatacaaactttatccataactatctgttcccccagaaaacggcaactagac

SEQ ID NO: 124256 - DNA, 3657 bp, Zea Mays
tcctcccgttttccagccagcaagccagactcctcccctctccgaagactccgatcgtccggattcatccagatccgggcgttctgagtcctgccgaggctctagatcgcgtcgcgcacgatgccacgcgacctgtcgcggtcgcggtctccgccgcgccgacgttggcggtcgccgtctcccgcgcggtaccgcggccggagggggcgcagggaccgaagccccagtcccatccgtagcaggtccccctatcgctcctcgtatagaaggaggagccctttgccttccccaagaaggcacaagagccgttctccgtctcctaggaggcgcaagagtccgtctccatcacaaaagcgttacagaagaaagagaagtccgagtgtcactagctctccagtcgctgcatctcagagttcccaccttgggttggcagagaataagaatgttattgatacacaaaggctagaagaagaaaagaaaaggtgggaagtatctgcttttctatgcagtctacattatttcttctacaaacccagctattcactgttgcaccctttctgtaactcttccgtgatgctaacaatgaaattctactaatctagttgctgtttgcaccggaatatatcacaaggtcagctctatttgataatctgttgaccatctgttttcctgagtacatacgtgcaatattatttttggattttgcaagtactacaaacataaatatgacttgagcatctgactgccggatgtgaatcacgtaggttatatgagacaattgtggcttaaggtgcaagtgcaaattcagtaggagtttctgtattccttgaaatcgcgacgttagttgtagctacctggaaaaaatcacctgcgattaacacagggcaacatgacttcaatgtaaaaaaaaaggtttgggatttaacaaaaaaaattgtaattttgtgtccacaaatttaaattgtttctgagcaagaagtttttttgttttccatgtggtatctactaagaaatgtaatgcctttctactgtacattgaacacttttcaaaggtactctttgtagtttgttttggacttgaattgtagttctggtgaactaatatctgtgatgtaacatatgttccagaagttgtgattcaaaacatttatattcttgttggaaattagtctgaaacccaccattttaacagggaacatgcctcagtagaattgatgaaagaaataaaagaagggtatgtgtgaaatattaccagtatcatttcataaattttacagcagtttgtattaactattgtgcacgtcaccttggaaaccattaattttttttaaaaaaaaatcatgaatgcttcttgagatgtttggtgtagttgtcagagctgtcttactgagtcatcaggtcatgggttcgaagcaacttctccacatttatgtgggaaggctcgcctcggcttatcccttcacagacgctactcatgtgggagcctccagcagtaagtctgcccaatgctccttgagatgtgccatcagaagagtttttttccacataaacacaaagttacagaaaaaattatgcatgatttttattgactattttttgagcaaagagataagctattgccaggattaaaaaaactagaccaacataggaggaaccaggtggcattttattatcaagaagaaaatagccatgcaaattttccttgacgaggactagaacctaggtggcctgggctagccacagaaccacatgctctaccaattgcgatagatcagcttccttaacagtgagcatacggtcaggattgtctgagcatacaaccaggattatgtcatatatgttgattggaattatatattgtgattgcaactgtttgtttgttttttccatgtaggctatctattttgacacagatgttgtcctcagttgtgtttcaggactaaaagttttttagtaattgttcattattgagttagcactcatgtttttcgcttgatttgttgtgtgttggacttctctgtaatatcactatcatatgaactaggcagtagtatgatagatggaggatttctgagttagtttgacctctgcgctgtaatgttatctttagaaggtaaggaaaccgaaaaggctgaatttcaattatcaattatgtaccatgttgtcattgaaattcacttttttgtgctctaaatatgtaatgtagttattttagttcgtttctgatcgcagttttcctgcatacttgagaaaaaagaagcttgtttctgatcctttttttagtcatgccatgtggtatgagataacctgtcaggataaattatccaaaaatcattcctggttatgcagttccactaattagcagtaggtagtttattctataattgtattgaggcttgaattatgattttggttgggcatgtagtaagtagcatccaagaaatatggtttagttggaatatcttaatgcctcatgattagctctaaacctgccacaaattacttgacattcttctctacaggctttaccgaagggagctactgctatagttccacttgttatatttgatgatgcaattggtgatcatttatctactcttgatcagttttgataattcgtttttggatctggaacgaactagaggtatgcctgaaatgcattagcttgtagtcaactatgctggaaaggcatagtagatcatagatactgtttagattttaaaccatgtgctttgctttttgctgcttttatggtcttgaagagtttgaacaaacaaatatcggctttggtcacgacttgccttaggtagtgcatttcgttaacttgctatatcaactgcaggcgccaaaaggaagttgaactgagactattagagaaggagacggcaaaaagagttgaacaagctattaggaggaaggttgaggagagtctaaattgtgatgaaatcaaacatgaaatacatcgtcgaattgaggaaggacgaaagaggatacatgaggaggtagcaatccagattgagaaggaaaaggatgcagctttaaatgaagccaagctgaaagtggaacaagaaaaaaagaagcgggaggagctagagaaaaaacttgaagaagaacgaaagaaagctgaagaggcgttgatgaaagaagcgttggaacagcagcagaaagagctagagcggtaccaggagttggagaggcttcagaaagaaagagaggaggccatgaaacggaaaaaaatggaggaagagcagcagaggcaaaaccagatgaagctgctgggcaagaacaagtcgcggcctaagctgtcgtttgcttttgggatgaagtagcgttcgattcaccgaacgaaattagtgctttagtatactgtaaccgtgtagtgtagtacctctgtatgaaactgcccatttctaactctggcagacaaattgcgatgtcataaatgctcctgatctgcttcgtaagttgccggctcttggtggatgtggtttcatctgcttcttgctgttcagttggcgttgccttgcgagaagactgccagagaagaatccggttggtttgatcttgcatgtcaccaagatactatctccgtttgtgttgccccctagttcagcctgttcatatttgaactaaaacgtgataaataaaaaaaacgga

SEQ ID NO: 124257 - DNA, 3459 bp, Zea Mays
tcctcccgttttccagccagcaagccagactcctcccctctccgaagactccgatcgtccggattcatccagatccgggcgttctgagtcctgccgaggctctagatcgcgtcgcgcacgatgccacgcgacctgtcgcggtcgcggtctccgccgcgccgacgttggcggtcgccgtctcccgcgcggtaccgcggccggagggggcgcagggaccgaagccccagtcccatccgtagcaggtccccctatcgctcctcgtatagaaggaggagccctttgccttccccaagaaggcacaagagccgttctccgtctcctaggaggcgcaagagtccgtctccatcacaaaagcgttacagaagaaagagaagtccgagtgtcactagctctccagtcgctgcatctcagagttcccaccttgggttggcagagaataagaatgttattgatacacaaaggctagaagaagaaaagaaaaggtgggaagtatctgcttttctatgcagtctacattatttcttctacaaacccagctattcactgttgcaccctttctgtaactcttccgtgatgctaacaatgaaattctactaatctagttgctgtttgcaccggaatatatcacaaggtcagctctatttgataatctgttgaccatctgttttcctgagtacatacgtgcaatattatttttggattttgcaagtactacaaacataaatatgacttgagcatctgactgccggatgtgaatcacgtaggttatatgagacaattgtggcttaaggtgcaagtgcaaattcagtaggagtttctgtattccttgaaatcgcgacgttagttgtagctacctggaaaaaatcacctgcgattaacacagggcaacatgacttcaatgtaaaaaaaaaggtttgggatttaacaaaaaaaattgtaattttgtgtccacaaatttaaattgtttctgagcaagaagtttttttgttttccatgtggtatctactaagaaatgtaatgcctttctactgtacattgaacacttttcaaaggtactctttgtagtttgttttggacttgaattgtagttctggtgaactaatatctgtgatgtaacatatgttccagaagttgtgattcaaaacatttatattcttgttggaaattagtctgaaacccaccattttaacagggaacatgcctcagtagaattgatgaaagaaataaaagaagggtatgtgtgaaatattaccagtatcatttcataaattttacagcagtttgtattaactattgtgcacgtcaccttggaaaccattaattttttttaaaaaaaaatcatgaatgcttcttgagatgtttggtgtagttgtcagagctgtcttactgagtcatcaggtcatgggttcgaagcaacttctccacatttatgtgggaaggctcgcctcggcttatcccttcacagacgctactcatgtgggagcctccagcagtaagtctgcccaatgctccttgagatgtgccatcagaagagtttttttccacataaacacaaagttacagaaaaaattatgcatgatttttattgactattttttgagcaaagagataagctattgccaggattaaaaaaactagaccaacataggaggaaccaggtggcattttattatcaagaagaaaatagccatgcaaattttccttgacgaggactagaacctaggtggcctgggctagccacagaaccacatgctctaccaattgcgatagatcagcttccttaacagtgagcatacggtcaggattgtctgagcatacaaccaggattatgtcatatatgttgattggaattatatattgtgattgcaactgtttgtttgttttttccatgtaggctatctattttgacacagatgttgtcctcagttgtgtttcaggactaaaagttttttagtaattgttcattattgagttagcactcatgtttttcgcttgatttgttgtgtgttggacttctctgtaatatcactatcatatgaactaggcagtagtatgatagatggaggatttctgagttagtttgacctctgcgctgtaatgttatctttagaaggtaaggaaaccgaaaaggctgaatttcaattatcaattatgtaccatgttgtcattgaaattcacttttttgtgctctaaatatgtaatgtagttattttagttcgtttctgatcgcagttttcctgcatacttgagaaaaaagaagcttgtttctgatcctttttttagtcatgccatgtggtatgagataacctgtcaggataaattatccaaaaatcattcctggttatgcagttccactaattagcagtaggtagtttattctataattgtattgaggcttgaattatgattttggttgggcatgtagtaagtagcatccaagaaatatggtttagttggaatatcttaatgcctcatgattagctctaaacctgccacaaattacttgacattcttctctacaggctttaccgaagggagctactgctatagttccacttgttatatttgatgatgcaattggtgatcatttatctactcttgatcagttttgataattcgtttttggatctggaacgaactagaggcgccaaaaggaagttgaactgagactattagagaaggagacggcaaaaagagttgaacaagctattaggaggaaggttgaggagagtctaaattgtgatgaaatcaaacatgaaatacatcgtcgaattgaggaaggacgaaagaggatacatgaggaggtagcaatccagattgagaaggaaaaggatgcagctttaaatgaagccaagctgaaagtggaacaagaaaaaaagaagcgggaggagctagagaaaaaacttgaagaagaacgaaagaaagctgaagaggcgttgatgaaagaagcgttggaacagcagcagaaagagctagagcggtaccaggagttggagaggcttcagaaagaaagagaggaggccatgaaacggaaaaaaatggaggaagagcagcagaggcaaaaccagatgaagctgctgggcaagaacaagtcgcggcctaagctgtcgtttgcttttgggatgaagtagcgttcgattcaccgaacgaaattagtgctttagtatactgtaaccgtgtagtgtagtacctctgtatgaaactgcccatttctaactctggcagacaaattgcgatgtcataaatgctcctgatctgcttcgtaagttgccggctcttggtggatgtggtttcatctgcttcttgctgttcagttggcgttgccttgcgagaagactgccagagaagaatccggttggtttgatcttgcatgtcaccaagatactatctccgtttgtgttgccccctagttcagcctgttcatatttgaactaaaacgtgataaataaaaaaaacgga

SEQ ID NO: 124258 - DNA, 1385 bp, Zea Mays
attacaatgagttgccactagatatacgcgaagcctctcccacctcatctgcctcgcgtgcggcggcggcgactccacctggcttgcgtcctcccgttttccagccagcaagccagactcctcccctctccgaagactccgatcgtccggattcatccagatccgggcgttctgagtcctgccgaggctctagatcgcgtcgcgcacgatgccacgcgacctgtcgcggtcgcggtctccgccgcgccgacgttggcggtcgccgtctcccgcgcggtaccgcggccggagggggcgcagggaccgaagccccagtcccatccgtagcaggtccccctatcgctcctcgtatagaaggaggagccctttgccttccccaagaaggcacaagagccgttctccgtctcctaggaggcgcaagagtccgtctccatcacaaaagcgttacagaagaaagagaagtccgagtgtcactagctctccagtcgctgcatctcagagttcccaccttgggttggcagagaataagaatgttattgatacacaaaggctagaagaagaaaagaaaaggcgccaaaaggaagttgaactgagactattagagaaggagacggcaaaaagagttgaacaagctattaggaggaaggttgaggagagtctaaattgtgatgaaatcaaacatgaaatacatcgtcgaattgaggaaggacgaaagaggatacatgaggaggtagcaatccagattgagaaggaaaaggatgcagctttaaatgaagccaagctgaaagtggaacaagaaaaaaagaagcgggaggagctagagaaaaaacttgaagaagaacgaaagaaagctgaagaggcgttgatgaaagaagcgttggaacagcagcagaaagagctagagcggtaccaggagttggagaggcttcagaaagaaagagaggaggccatgaaacggaaaaaaatggaggaagagcagcagaggcaaaaccagatgaagctgctgggcaagaacaagtcgcggcctaagctgtcgtttgcttttgggatgaagtagcgttcgattcaccgaacgaaattagtgctttagtatactgtaaccgtgtagtgtagtacctctgtatgaaactgcccatttctaactctggcagacaaattgcgatgtcataaatgctcctgatctgcttcgtaagttgccggctcttggtggatgtggtttcatctgcttcttgctgttcagttggcgttgccttgcgagaagactgccagagaagaatccggttggtttgatcttgcatgtcaccaagatactatctccgtttgtgttgccccctagttcagcctgttcatatttgaactaaaacgtgataaataaaaaaaacgga

SEQ ID NO: 124259 - DNA, 1966 bp, Zea Mays
attacaatgagttgccactagatatacgcgaagcctctcccacctcatctgcctcgcgtgcggcggcggcgactccacctggcttgcgtcctcccgttttccagccagcaagccagactcctcccctctccgaagactccgatcgtccggattcatccagatccgggcgttctgagtcctgccgaggctctagatcgcgtcgcgcacgatgccacgcgacctgtcgcggtcgcggtctccgccgcgccgacgttggcggtcgccgtctcccgcgcggtaccgcggccggagggggcgcagggaccgaagccccagtcccatccgtagcaggtccccctatcgctcctcgtataggtgaccacacctcccgttacacgcagaaatctggcgagtcttcgttttattttttgggggtttgtactgtaaaaaaaagaagtgaggcgatgctgaccgccttcattgaaattttgtactattgcttgcttgatggaaacggggcttggtgctcttatgattatttgatctatcaactgtttgttggtgttactgttagaggtagccagcgcggtagtatattgtgctatgtcatatctgcatgaactatggtttatgaatgtgcaaatttcataatacttcggagcgatcaagatttctgatttccaaaggaagaaaaatgcttcggattcttttgcattacagagttagaataaaaatacttcgatgcagcatggaatatatcagcagatgaagcttagatatagttatgccatgttttgcactacttgcctgtacagactaacaagagttgctttcgtaaaacgcatggaatctacaaagcttttactctgtgctgtattgctgtggaatgctccacccctgtaacagtgtctaaggtaactgcttttgcccatgttttagggcttcaggagctaatgaaggaggagccctttgccttccccaagaaggcacaagagccgttctccgtctcctaggaggcgcaagagtccgtctccatcacaaaagcgttacagaagaaagagaagtccgagtgtcactagctctccagtcgctgcatctcagagttcccaccttgggttggcagagaataagaatgttattgatacacaaaggctagaagaagaaaagaaaaggcgccaaaaggaagttgaactgagactattagagaaggagacggcaaaaagagttgaacaagctattaggaggaaggttgaggagagtctaaattgtgatgaaatcaaacatgaaatacatcgtcgaattgaggaaggacgaaagaggatacatgaggaggtagcaatccagattgagaaggaaaaggatgcagctttaaatgaagccaagctgaaagtggaacaagaaaaaaagaagcgggaggagctagagaaaaaacttgaagaagaacgaaagaaagctgaagaggcgttgatgaaagaagcgttggaacagcagcagaaagagctagagcggtaccaggagttggagaggcttcagaaagaaagagaggaggccatgaaacggaaaaaaatggaggaagagcagcagaggcaaaaccagatgaagctgctgggcaagaacaagtcgcggcctaagctgtcgtttgcttttgggatgaagtagcgttcgattcaccgaacgaaattagtgctttagtatactgtaaccgtgtagtgtagtacctctgtatgaaactgcccatttctaactctggcagacaaattgcgatgtcataaatgctcctgatctgcttcgtaagttgccggctcttggtggatgtggtttcatctgcttcttgctgttcagttggcgttgccttgcgagaagactgccagagaagaatccggttggtttgatcttgcatgtcaccaagatactatctccgtttgtgttgccccctagttcagcctgttcatatttgaactaaaacgtgataaataaaaaaaacgga

SEQ ID NO: 124260 - DNA, 1251 bp, Zea Mays
attacaatgagttgccactagatatacgcgaagcctctcccacctcatctgcctcgcgtgcggcggcggcgactccacctggcttgcgtcctcccgttttccagccagcaagccagactcctcccctctccgaagactccgatcgtccggattcatccagatccgggcgttctgagtcctgccgaggctctagatcgcgtcgcgcacgatgccacgcgacctgtcgcggtcgcggtctccgccgcgccgacgttggcggtcgccgtctcccgcgcggtaccgcggccggagggggcgcagggaccgaagccccagtcccatccgtagcaggtccccctatcgctcctcgtatagcttttactctgtgctgtattgctgtggaatgctccacccctgtaacagtgtctaaggtaactgcttttgcccatgttttagggcttcaggagctaatggtaattccttgtctattgttgtgatgactcattgactctaattttattcttacggtgctcatctttgtcttgcagaaggaggagccctttgccttccccaagaaggcacaagagccgttctccgtctcctaggaggcgcaagagtccgtctccatcacaaaagcgttacagaagaaagagaagtccgagtgtcactagctctccagtcgctgcatctcagagttcccaccttgggttggcagagaataagaatgttattgatacacaaaggctagaagaagaaaagaaaaggtgggaagtatctgcttttctatgcagtctacattatttcttctacaaacccagctattcactgttgcaccctttctgtaactcttccgtgatgctaacaatgaaattctactaatctagttgctgtttgcaccggaatatatcacaaggtcagctctatttgataatctgttgaccatctgttttcctgagtacatacgtgcaatattatttttggattttgcaagtactacaaacataaatatgacttgagcatctgactgccggatgtgaatcacgtaggttatatgagacaattgtggcttaaggtgcaagtgcaaattcagtaggagtttctgtattccttgaaatcgcgacgttagttgtagctacctggaaaaaatcacctgcgattaacacagggcaacatgacttcaatgtaaaaaaaaaggtttgggatttaacaaaaaaaattgtaattttgtgtccacaaatttaaattgtttctgagcaagaagtttttttgttt

SEQ ID NO: 124261 - DNA, 2366 bp, Zea Mays
acccaatccgtttctctcacccccgccactcgccagcaacgcggacacgccctccgccgctcttcctctgcaccccagtcctctcccacaaccacttccggcggccacgccctcggcttctccgtacttgctgctcgcccgtcccaccaccataattttccaccagcgattgtaaatttgtgggaggcacattcgccgaggatggctgtaaccctacttcgagggatgagaacgccgataccattcagatcgaactccggcttcttctccactgtcctacggcctcggttgtcccgcttcacgactagggcggagagtgcgcaggccacagaacccaaagcggcgcccaggtcaattcagctggcgaccaaggaggcggctgagcagaaaacacaaggcttcgaagccatcatcgggattgagacccatgtccagctctcgaccgtcacgaaggcgttctgctcctgcccttacagctatggttcccagcccaacagcactatctgccccacctgcatgggccacccggggacgctgccggttctgaatgagaaggtggtcgagtgcgccgtgaagctggggctcgccctcaactgcgagatctcaatgacgtccaagtttgatcgcaagcagtatttctacccggacctccccaaggggtaccagatttcccagtttgacatccccattgccaagaagggttgtgtcgatttggaccttccagtggagtttggtggtgggcataggaaatttggggtcacaagggttcacatggaagaagatgctggcaagctgcttcattctgaatccagcagctactctcaggttgacctaaacagggctggcgtacctttgctcgaaattgtctcagagccagacatgagaacagggatagaagctgctgagtatggtgctgaactgcaaaggattgttaggtacctgggagtgagtaatggtaatatgcaagaaggttcccttcgttgtgatgtgaacgtttctgttcgaccagttggacaatcagaatttggtacaaaggtggaaataaagaatatgaactcattttctgcgataaatagggcaatcgattatgagatctcccggcagattctgctccataaagaaggccaggctgatcaaattgtacaagaaacccgcctgtgggatgaatcttctcagaaaacttttacaatgcgaaaaaaggagggacttgccgactatagatattttccagaacctgatcttcctgaagtagttatcactagtgactatattaatgaaatcagcaagtcaatgccggagcttccagaagcaaagcgtaggcgttatgagaatatgggactcagcatgcaagatgttctgttccttgctaatgatgataatattggtcatttctttgattctactcttgagcatggtgctgatgcaaagctggctgccaactggatcatgggtgacatcgctgcttatctcaaagatgaaaaagtatccattgatgaaattaaattaacacctctagagctttctgaactgatagcatcaattaagaatggaactataagtgggaagatcggcaaggagatactggccgagctcattgccaaaggcggaacagttaaggctgtgatagaagagaaagatttggttcagatagcagatccagcagcaattgaggcaatggtagataaagtaattgctgataatccaaagcaacttgagcagtaccgtgctggaaaaactaagctacaaggattttttgctggccaggtgatgaaagcatcgaaggggaaggccaacccagttttgttgaataaaattcttggagagaagctaaatgccaaataattatttttacccccatactgaatctcaggcgtccatgaagaatgggacttcaaattcatagaatgagattaatgtgaacgacgtagaagttttgtccacaatacagatattattgtactaagctgatactttaaaagggcgtgttcattatattttatgcgatagcttgccctaatcatttgtgcagtttccatggattgtgtactgacttcgctgtttattttttttcgctctctgcaacccacaatatttataacaattttcattaaaccaaaaatgtattctctgttctaaactataattcgttttagactaaatatacattcattaattaatacaataatttgtatgaacgtctacattcattatcaattatggggaaaaaaaaactagaaaggactatattttggggaggaattattgaacagcagcaatgacctgacctataagaaagagtgtttggtttgaagaatttgaagaataagttagtctattatctacttatctcttactttttaatttcg

SEQ ID NO: 124262 - DNA, 992 bp, Zea Mays
cagcccaactctctcgcagccaatcccgccgctccgccgcccgcacccaatccgtttctctcacccccgccactcgccagcaacgcggacacgccctccgccgctcttcctctgcaccccagtcctctcccacaaccacttccggcggccacgccctcggcttctccgtacttgctgctcgcccgtcccaccaccataattttccaccagcgattgtaaatttgtgggaggcacattcgccgaggatggctgtaaccctacttcgagggatgagaacgccgataccattcagatcgaactccggcttcttctccactgtcctacggcctcggttgtcccgcttcacgactagggcggagagtgcgcaggccacagaacccaaagcggcgcccaggtcaattcagctggcgaccaaggaggcggctgagcagaaaacacaaggcttcgaagccatcatcgggattgagacccatgtccagctctcgaccgtcacgaaggcgttctgctcctgcccttacagctatggttcccagcccaacagcactatctgccccacctgcatgggccacccggggacgctgccggttctgaatgagaaggtggtcgagtgcgccgtgaagctggggctcgccctcaactgcgagatctcaatgacgtccaagtttgatcgcaagcagtatttctacccggacctccccaaggggtaccagatttcccagtttgacatccccattgccaagaagggttgtgtcgatttggaccttccagtggagtttggtggtgggcataggaaatttggggtcacaagggttcacatggaagaagatgctggcaagctgcttcattctgaatccagcagctactctcaggtcttccttgtctactaatgattgcttaatttctgtgtactactgtaagatattgtgatattcggatctgcttgtcatgtctttctggcataacagtttcgtaaccacaagatcagttttgac

SEQ ID NO: 124263 - DNA, 1654 bp, Zea Mays
ccgacccattgctatcctacctgccagcgaacctgtctcgtctccttgttgcccacgtggcctcgccgtcgccgcgagctccaccttcctcagctctgccccgagcgcgatgtggcgagcgacgaggcggtctccgccgttcctgcgatggctatcgtcggacgcagcctcctctaaggcgccgcggcagcgcgtagcggcgctgtgggggaacggtgactacgggcggctggggctgggctcgctggagtcgcggtggagccccacggtttgccccttcttcctcgcccgcgccgccgacccgcccgcctccctcgcctgcggcggcgcacataccctctttctcacccagaatgggcgagtgttcgctacagggctgaacgactttgggcagctggggataggaacctctgttacacatatgctggagcctgttgaaatttctggatttcacgaaagagttgtagaagtttcagctggcaaccatcattcttgtgcagtcaccgcggatggtaagctctttgtttggggcagaaactcaggtggccagcttggccttggtaaaggggcaggtaaagtagtttctaccccaacaaaggttgattgtttgactgacctcagagtaaaaacggttgctctgggatcagagcattcaattgctgttacagaggaaggtgaagtcttgagttggggagctgctggttctggtaggctcggacatggccgtcaatctagcatcctgggattttctctgacctcaactgaatatactccaagattgatcaaaaactttgatggtatcaagattaaaaagatagctgcaggaatgttgcactcagcttgcattgatgaaaaagggatttggaagaccgaacgaagaattcagaccaaatattgttgaagagataccattttcagaagaagttgcttgtggaggttaccatacttgtgttgtaacagatagcggtgatctgtattcttggggttcaaatgaaaatggctgccttggtctgggaggtacggatatggtccgctctccggaaattttgaaaagttctctatttaaacttcctgtatctaaggtatcttgtggttggaagcacacagctgtagtttcaggtgatgacatctacacatggggttggggaggcgccaatgggacttttttcgaagagggccattcttccggtggacagctgggacatggaaacgacgtagactattttgagcctatgatggttccctttggcacgaatgcaagagccgtccatgtatcgtgtggcttcaatcatactggtgcaatttacgagtgctccgaggactttgactgacgtgccacctgcagacagcagatccgcatgtcttggagacttaggttagttatcaaattatactcgctagaagtgcatataaacagcataaataagctctgatgttggacctgcatttatgtgaagagaaatatagaacaagtgataacacccctgagagggggatgtaaattaaacagaataagggatgaactggatgcattttgtgatgcatcagagttacttgccagtgtatagcatttcttcatttattggctggttctgtattattttgccaggtactaagaaatccattgcctgatgtctcagcaggctgtttgtgt

SEQ ID NO: 124264 - DNA, 1648 bp, Zea Mays
ccgacccattgctatcctacctgccagcgaacctgtctcgtctccttgttgcccacgtggcctcgccgtcgccgcgagctccaccttcctcagctctgccccgagcgcgatgtggcgagcgacgaggcggtctccgccgttcctgcgatggctatcgtcggacgcagcctcctctaaggcgccgcggcagcgcgtagcggcgctgtgggggaacggtgactacgggcggctggggctgggctcgctggagtcgcggtggagccccacggtttgccccttcttcctcgcccgcgccgccgacccgcccgcctccctcgcctgcggcggcgcacataccctctttctcacccagaatgggcgagtgttcgctacagggctgaacgactttgggcagctggggataggaacctctgttacacatatgctggagcctgttgaaatttctggatttcacgaaagagttgtagaagtttcagctggcaaccatcattcttgtgcagtcaccgcggatggtaagctctttgtttggggcagaaactcaggtggccagcttggccttggtaaaggggcaggtaaagtagtttctaccccaacaaaggttgattgtttgactgacctcagagtaaaaacggttgctctgggatcagagcattcaattgctgttacagaggaaggtgaagtcttgagttggggagctgctggttctggtaggctcggacatggccgtcaatctagcatcctgggattttctctgacctcaactgaatatactccaagattgatcaaaaactttgatggtatcaagattaaaaagatagctgcaggaatgttgcactcagcttgcattgatgggatttggaagaccgaacgaagaattcagaccaaatattgttgaagagataccattttcagaagaagttgcttgtggaggttaccatacttgtgttgtaacagatagcggtgatctgtattcttggggttcaaatgaaaatggctgccttggtctgggaggtacggatatggtccgctctccggaaattttgaaaagttctctatttaaacttcctgtatctaaggtatcttgtggttggaagcacacagctgtagtttcaggtgatgacatctacacatggggttggggaggcgccaatgggacttttttcgaagagggccattcttccggtggacagctgggacatggaaacgacgtagactattttgagcctatgatggttccctttggcacgaatgcaagagccgtccatgtatcgtgtggcttcaatcatactggtgcaatttacgagtgctccgaggactttgactgacgtgccacctgcagacagcagatccgcatgtcttggagacttaggttagttatcaaattatactcgctagaagtgcatataaacagcataaataagctctgatgttggacctgcatttatgtgaagagaaatatagaacaagtgataacacccctgagagggggatgtaaattaaacagaataagggatgaactggatgcattttgtgatgcatcagagttacttgccagtgtatagcatttcttcatttattggctggttctgtattattttgccaggtactaagaaatccattgcctgatgtctcagcaggctgtttgtgt

SEQ ID NO: 124265 - DNA, 1444 bp, Zea Mays
ccgacccattgctatcctacctgccagcgaacctgtctcgtctccttgttgcccacgtggcctcgccgtcgccgcgagctccaccttcctcagctctgccccgagcgcgatgtggcgagcgacgaggcggtctccgccgttcctgcgatggctatcgtcggacgcagcctcctctaaggcgccgcggcagcgcgtagcggcgctgtgggggaacggtgactacgggcggctggggctgggctcgctggagtcgcggtggagccccacggtttgccccttcttcctcgcccgcgccgccgacccgcccgcctccctcgcctgcggcggcgcacataccctctttctcacccagaatgggcgagtgttcgctacagggctgaacgactttgggcagctggggataggaacctctgttacacatatgctggagcctgttgaaatttctggatttcacgaaagagttgtagaagtttcagctggcaaccatcattcttgtgcagtcaccgcggatggtaagctctttgtttggggcagaaactcaggtggccagcttggccttggtaaaggggcaggtaaagtagtttctaccccaacaaaggttgattgtttgactgacctcagagtaaaaacggttgctctgggatcagagcattcaattgctgttacagaggaaggtgaagtcttgagttggggagctgctggttctggtaggctcggacatggccgtcaatctagcatcctgggattttctctgacctcaactgaatatactccaagattgatcaaaaactttgatggtatcaagattaaaaagatagctgcaggaatgttgcactcagcttgcattgatggtaaagggatttggaagaccgaacgaagaattcagaccaaatattgttgaagagataccattttcagaagaagttgcttgtggaggttaccatacttgtgttgtaacagatagcggtgatctgtattcttggggttcaaatgaaaatggctgccttggtctgggaggtacggatatggtccgctctccggaaattttgaaaagttctctatttaaacttcctgtatctaaggtatcttgtggttggaagcacacagctgtagtttcaggtgatgacatctacacatggggttggggaggcgccaatgggacttttttcgaagagggccattcttccggtggacagctgggacatggaaacgacgtagactattttgagcctatgatggttccctttggcacgaatgcaagagccgtccatgtatcgtgtggcttcaatcatactggtgcaatttacgagtgctccgaggactttgactgacgtgccacctgcagacagcagatccgcatgtcttggagacttaggttagttatcaaattatactcgctagaagtgcatataaacagcataaataagctctgatgttggacctg

SEQ ID NO: 124266 - DNA, 155 bp, Zea Mays
ctaggcacgacccgtttacctctaagcccgttaagcccgcttttttgcactgaaacgtgcttactggcccgcttagctcgcttttcggcccgctttttttgtgctaaacgggttggcccggcccgtttaggcccgttgcgggccgggctcggaca

SEQ ID NO: 124267 - DNA, 2372 bp, Zea Mays
gcagtactgggccgctgctgccgcgcactgcctgctttggccgagacgagccccccgtttcgctcccatctcgcgacactctgcccacagctcactcgcctccgtctctccccgtcaaaaaagccacccccgtcccccgcgccgcgccacccgcctttggcctctggctggcaccctttcccccgcctagaaacccgagctctccctctagccttctgccgcacacttccgagttccgagttccttccgccacaacatccacacgcaaacctcgcgatggccgcgtcggaatccgtgccgttctgcgtcaaagggggcgggggcggcggcggcggcgcgcccaggccgcacggccacctggtgctcccggcggggcgggtccgcgaggggcttgcgttcgcggcgggcgccgtggtggccgctctcgtgctcctctcctcggcctccgtcctcgcgccgccgcccgtgcccaacatcgtctccctccccctgtcgtcgtcgtcgcccgccaacgccaacgccaaagccgccatctcttcctcccctgccgtggccgtcggcgagggcccgcgcacgttctacgacgacagggagctgtcgtacgccgtcggggggcggcgcgtcacgggctgggacgcgaagcgcgcggcgtggctgcggacacggggcctggacggcgcggcggtcgcggggcgggtggtgatggtgaccgggtcgcagccggagccatgcaaggggccggggggcgaccacgcgctgctgcggttcctcaagaacaagctggactactgccgcctccacgggatcgagctcctgtacaacaccgcgctgctggagccgtccatggtggcgtactgggccaagatccccagcgtgcgcgccgcgatgctggcgcacccggacgccgagtgggtgtggtgggtggacgccgacgccgtgttcacggacatggacttctccctcccgctggagcggtaccgcgagagcagcctggtggtgtacgggtgggagcgggaggtgtacgaggagcggtcgtgggtggggctcaacgccggcgtcttcctcatccgcaactgccagtggtcgctggacctcatggacgcgtgggcgcgcatgggcccggcctcgccggagtacgcgcggtgggggaagacgctgcgcgaggagctggaggggaaacccaacgacgagtcggacgaccagtcggcgctcgtgtacctcctgtccaggcacctggagcgggagcggtgggcgaacgccacgttcctcgagtccgggtactacttccaggggtactgggcggagatcgtggacaggctcgacggcgtggccacgcggtacgaggccgtggagcgcggccgcgcagggggccgggccgggctccgccgccgccacgcggagcgggagcacctcctgtacgcggcggcgcggcgtcaggcggtgcggcagcagcgagggaccggcggaggcgtgcccgggccggacggcggcgggcagaagggctggcgccgccccttcgtgacgcacttcacggggtgccagccctgcggcggcgcgcccaaccggatgtacacgcggaggcggtgcgccgaggggatccgccgcgcgctggcgttcgcggacgatcaggtgctccgctcctacggcttccgacacgccgcgccgctcagcgacagcgtcacgccgctgccgttcgactaccccgccgcgcactgatgggcggccgcttcggtgggcggtgggttcggcaactggctatggctaggttaattaaatgagacaaaaccatgaatgcaatgcaatgtgtcaagtcacagtgtgtgtactatacattttggatttgggtgtcatccatattcgtccaaagactgaaacagtgaaaccactgtgtggtcttcgtgttcgtcggtacttttaggaaatgtacagcgtgtcttgtcttttccctacactctctcgctgttgttgtcgtcatgtatcaacccaacttgtcatctctatcttcgcctccctcaccaaggttatttctcaccatatagaggacatccacctttgctcctcggcgatcctcttgacccgctgttacaactctctgctggcatgcacctctgcagacaccagagcaaaacatccgagaaagaggagccactgccgccggtgatgtatgcagccatggagaagagaaagaggaggtgatctagaactcgagtttcgtttgcatatagtatgtgcttgtgtggctcggctttttcagataacctttttttgagaatttgggtgtgacgagaagaggagaatctaagtattctggagattacgtgtggagaaagttaaaagagtttatagaattctactatcgcaacgattcaacc

SEQ ID NO: 124268 - DNA, 1965 bp, Zea Mays
gatagggagcgagaggcggccgcgccacacaaaactatctccgccgcggctccgttgcatggtataccatgctgccggcggctgccaccgctgcagcgccggacccctcgtgctccaccttcccctcctcccgccgcgctccccctgtcgcttcgcgtcacagcttcgttgttgcaacaagagccaccggcagctcgggtctcttctctctccggtgtcacggtcgccttccctgccactctcgctgtcgctgccgctgccgcgcctggtggaacaatgagcgagcgcgccgggtatccggcgccagccgtggccgccattgccgggccgtcgcgtcggcgccggaccacatggacgagcagccggcgagggggaggtaccacccgttcgaggagatctccgaggcggtgcagctggacgacggcgagccggcccacctgaccgacgccgagtcagcccgaacaatcgtcgaggtgaacaacaaggcgacggtgatgatctccacgctcgtcggcgacggtgtgcacgagcggatcatcctgccggagttcccctacctcaccgacgagaacggagatatctacttcgaggtcgacaacgaggacgcgctgctggagagcatcatgggggaggacaagatcgcgcacgttatcatcggattggacaacacacaggtcttcgccgacttggatctcgtctcggcctccgccacagagtttgcgcaagaagacgacaacggcgatgaggacgatgacggctccgacgatgatgaggaaagcgactttgacgaggacttcaacgacgtggagggtgtgttttcggttgatgaggacgacgaagatgacagagaggaagaggaggaggaggacgacgacgacgatgacgaggacctaccaagctggtccaaccttgagaccgtgaattcctgccatccactgtactttgcaaggatgattgtagagactgcaaccaagtctagcatagactggctggaccggccacctgcaagccttgtcgtcgagggccagctgaggcctgcctttgctgaggagagcaccatggttgccaagcatatatcaagtgacgcgccaaagaaagatacaaaggagagtggtgccacctttttcaaggtcgaggtcctcagcatcgagttgatcactgcgtatggaactgagccaaaggtaaagattgaagaataccagaaggctaagccggacatcatcgcgcattctgcaccgaacgtaatatcgcgcctgagagctggtggagacaaggtcacccaggctctgaaatctctctgttggaggagcaaggccattcaagtagaggaggcagcggtgatcggagtggactgccttggttttgacctgagagtgtgctcaggaactcaagtgcagacattgagatttgctttccctacaaaggccacttcagagttctctgcagagaagcaaatacatgagcttctgtttcctaggaatacacatcaagaagggcaatcaccacaggcccgacagaagtcctgatgtaattcgatccatcgatgtggtaacttcattcagatggtaggaaattaatttagagaaataaataataaattcttggtcatgtccatgaaagttgtggtataaccttcaagcttgccattgatttcgtgtttggagacaatcacaagttccaaggttgttcttagacacgttctcaaagaaaaagggttgttcttagatcatggaccgggggatttggtttttttttttaattcagaggaagctcagtgcaactccaacagattgcctatccaagtagagatgaagtctcgacaagtgaaaaactacatcagcgcaagtcagaactcagttttacttgtccttgcatcaaatcaaacaacagaaactctcctgaaaaacgcagaaacaaaaaaaatctcaagttgcacctgtcactgcatcaattggttcttaaaca

SEQ ID NO: 124269 - DNA, 90 bp, Zea Mays
atgggcattggcggcaaggcgccaaccttcggcacgacggcgggcattggcgacagcgtcacttttggcatgatgattattgtgcaatag

SEQ ID NO: 124270 - DNA, 411 bp, Zea Mays
gcatgtaatctgtccctaaatgccatcagtggaactgatagagagggatgtatgagagttcgggcgctgattcaaaatcaggtgatggtgatgctggtagactcgggcagttccaccagttttgtcagtcagagaatagtggacaaactggctttgcagacagaacctgctgcacctgacagggttaaggtggctaatggggagttcatgctgagcacgaggagggtggcagcattggagtggtgggctgatggacatacttatatcagtgacatgagagttttggatttagaagcttatgacgccattttgggatatgattggttgaagggtcgtagtcccatgcaatgtgattgggataacaagattctgctgttcaaggatagaggtgtggaggtgcaattgaaggga

SEQ ID NO: 124271 - DNA, 719 bp, Zea Mays
ccataaaattatgatatctgataatatatttgattatgtacacttgttcaaagtttcgactgacatgatagaagtttgataaatgcctagcattactgcccatgtttaactccagattcgagcagtaacactgctgcatatgaatgttcgtacatcgcctgccccaaccagcaaagaatggtatgtacaggttgcattccatccccccattttgtcttcatatagcttaccggcacaatgaatttcacagtatgtctatcaaaacaaaattggatctcgaaccatgacatgcggcttcagactttgcattcaacccccaattagtcagcagaacaatggtgcgacttccttgctatacagagaagactctccaagtccgaaccagatgtccggaacaatcaaatagcctcttcctcttgctgaactatagatggaaccaacatgtagcatgccagcagagacgggacggacatcagttccacaaggaccccctctctagagtcagactccaagctactggagggactggacatcctcaaatcagtaaagagtgcaagactcgtgacacatccatatcatgtaggactggggattggaacattccggtggctttctgcgaaatctctgattatacgtttaagagttctaccacccttcccttgcatgtaaccttgatggcttcttatattatcaccagtcctgctgtgaagatagtctga

SEQ ID NO: 124272 - DNA, 1795 bp, Zea Mays
agcctaggttagtgtctaacatcgtcgatccctccatgaagatcctacaaatctagctacgcagctagcgatcgatcgaattccatatcattgtttactcagacacatcatcagctacgtaactgcgtcagcttctggttgatcggatcgcgtccatggctgcggcggccgggggcggcaggcggccgtgggtggtggacgtggagaagaagctgggcgaggcggacgcgtcggtggaggtgtcgcggtggcagcggcactgcatctaccgcgtcccggcgtgcatcaaggacctgaagcccaaggcgtacaagccgcaggtggtgtcgctgggccctttccaccacggcgacgcggagctggtccccatggaggagcacaagcggcgggcgctgcggcacctcctgcgccgcgccaagaggccgctggaggacttcgtggccgccgtggaggagatcgcggagccgctggagagcgcgtacctggacctcggcgccgagtggcgcggcggcgggagggagcggttcctggaggtgatgatcgtcgacggctgcttcctgctggaggtgatgagagccaccgtcctcgacgggaagaacaccgccgactacgcgcccaacgaccccatcttcagccaccacggggtgctgtacatggtgccgtacatccgccgcgacatgctcatgctcgagaaccagctcccgctcatcctgctcgagaagctcgtcgccgtcgagactggcaagcctacgaacggcgatgccatcaacaggatggtgctgaggttcctgtccccgacaccgcggctaccacccaccggcgtcggcatcgggctccacgcgctggacgtgcaccgccggaacatgctgtacgggcactaccagcaccgcccccggcgcgacgtgccggagacggacatcatccggtccgcggtggagctgtacgaggccgggatccggttcaggaagagcgtctcggacagcctgcacgacatccggttccggcacggcgtgctgagcatgccggcggtgacggtggacgactccaccgagtacatgttcctcaacatgatggcgttcgagcggctgcacgtcggcgccggcaacgacgtgacggcgtacgtcttcttcatggacaacatcatcgactcggccaaggacgtggcgctgctcagctccaggggcgtcatccagaacgccgtgggcagcgacaaggccgtggccaagctcttcaacagcatctccaaggacgtggtgctggagcccgagagcgcgctggacgccgtgcaccgggaggtgaacgcctactgccggaagccctggaacatgtggcgcgccaacctcatccacacctacttccgcagcccctgggcgttcctctccctcgccgccgccgtcttcctgctcgtcatgaccgtcatgcagaccgtctacaccgtcatgcaattctaccagggcggcggcagcggcagtgacggcggatcgtcggcggcgccggcgccggcgtgatgatcgatctctgcactgcagccttttgattgcattggtctgcatgcgtgatctgtttgagcttgttttgatcgcgttcctttttcttgaggtatatcgattggttgtgtacttgtgtgtgttgattcttgtcgtggattccagttgttgatttctcctttttcggtctctttccgagtttgtttctatatttgaattaacgggttttcaaattatggaaaaaggaccatatgtgaaacacaactgtaaacagagaagatgatctgtaaggctatgtttggtttctt

SEQ ID NO: 124273 - DNA, 236 bp, Zea Mays
gcctcatcaagtcatcatctccaggaacgatgttagcgaaagtcaatttaatctggtgctgaacattgagttgcaacaaatcatcgatggagaccgagtcaccgcagctagaaaccactgtctcaatttgaggagattttccatctatgtttgttagaaggcataatgcctatttatctcttgtattcgaacatttggcaattaagaaatagaagattacttctccaatatccctt

SEQ ID NO: 124274 - DNA, 1520 bp, Zea Mays
tccttcagtctactctcccatcccatcacatcacatcccaggaaacagaatacgagttggttggtggcgacatggccgtgcaagcgcagttcggcggcctcgccgccgggtgcctgcttccctacggcggcggcggcggattggccgaagagcagctgcacctgcaggcgctcctatcggccgccgcgggcagcaaggcggcgcagcagcagcgccactgcgcggccggcgtggccagcgccgcgcagagcgagctgacgtgcaacggcgtcgtcggcttgggaggcgtggtggcgtcgcggaagcgcggcagggacggcgagctcgaggagtaccagcagtacgtgccgccctcgtcgaccgcgctgctcccgatcccgggggcgcatcatcagaggccggcagcggggagcgtcccgatggctgcggcgacggcgacgaccagcgggcgcgcgctgctggtggtggtggcggaggcggagctgcggcggcagggcgcggaggtggacgcgctggtgcgcgccgggtgcgagcggctgcgcgcgggcctggagcgggcgcgggggcggcagcgcgaggcggtggcgcgcgccgccgcgcgcgcgctgcgggagaaggaggcggagctggcggcggcccgggcgcgcgcggcggagctggaggagcggctgcggctggcggccgccgaggcgcaggcgtggtgcggcctggcgcgcagcaacgaggccgccgcgtcgggcctgcgcgccacgctcgacgccctgctgctccgctgcgcgggcgccgccggtggtggtgccactggtggtgcggcgacgcggcccgccgccaccgcggccgaggaagtggaggagggcttcggcgagtccggcggcacggacaacgacgccgagtcgtgctgcttcggcggcgacgcggcctcccccgcgaggtgggcgtggtgccgggcgtgcggcgagcgggaggcgtcggtgctcctgctgccgtgccggcacctgtgcctgtgcaaggcgtgcgagccccgcacggacgcctgcccggtctgctccggcgccaagaacacggccatccacatcgcgcccaactgatggcgtcggctccggcgatctcgggcagcgccactaagtaaccgcaccagtttacgttacgcgagcacagtgattagtagttgtatatgtagtggtaggttacagtaggttataggggccgattaaccgcgttcgtttctccactggtctctggtgttcgtccaaacatgcccttggtgtttcgctcgtccatcatgcatggcttgccatggttctcggcggatcagtgtaaagatgccgtgtaccatcgacgaagcgatcagctagcctccgttttcccagcaggtggacacaaacacacacgtagtactactgtattcatcaatgtgcggttggatggcgtcgtggtggcaacgcaggtcatgaatggagcagtagtatgcttcctgcctgccactcgttgtctgtctgcaggtgtacaaaatgaaaagg

SEQ ID NO: 124275 - DNA, 258 bp, Zea Mays
atggaccgatggattcggaagctggcaccgaatctcgctgggattggatctaagaactcatcgccgcctgagcagttggatctaagaagagacgcaagaaccctaaacgccctagttgagacagggagcaagaagaataccggtgagaagcagcctccggaggagatcgacgccagcaggcgtgaggaatccggtctccgtgccacagttgccgtgcgcatgcggcgtgcccttcgtggctgttgccctaatccatga

SEQ ID NO: 124276 - DNA, 143 bp, Zea Mays
cccaaatatgtaattttattttgcatgagatccattaagtttcagcttaattatatgttatgttttccatgcaaacataaaagaatgaaaaacaaaagcaagtagagatatatgaattatatatgtaaaaacaagtataattc

SEQ ID NO: 124277 - DNA, 402 bp, Zea Mays
atggaggtaatcaagattggtttaacacccgaaacatggcccggtttgattggcttcccagttttagatgcagttaatattattcgtcaagagaggccagatataacagaagttcgggtactccctccaaatgaggccccgtcaccactcgtggaaggcaaatttaaattgaataatgcgacgacatttgttcttacctttggagaggtattcatccgatgtccaaaatttactatttgctcattgtgtggttttactaatagtgattgtgtgagcatctcctacttccccatgctcttcgtagggatcatgtctgggctcacaccagggctcatgtcgctcggcctcgtcgagttggagatcctccaatgtagcagcataagcatctcaggagaccattga

SEQ ID NO: 124278 - DNA, 203 bp, Zea Mays
caaaagaagaaaaatggatgcacagttatcatcgacgagatgggtgtcttctacgtaagtgtccataaaatacaaacattcttatcgacgcatgctatacaaatagtcaccgtgtatatatacatagacatacatagagcacgtaccccatctccgtatacagaggctttattcaactattatacaggctacttccttctttg

SEQ ID NO: 124279 - DNA, 294 bp, Zea Mays
atgacgatagttacgccccccaaccctgagaaggcggcgcaggacgtggattctggggagccaagcgtgcgaagacagatttgggggtacacactcacgacaacggatcaggagaggacacgctcgcggcggcggatccctgaggcgcgcacggcggctaggtgggagcagctgcgacatcggatcccgagggcacacacacgacggcggtcccatgaggtgcgcacgacggcgatgtggcagcggccgcggcggcggatcccgtggggctcgagcgcgacagcgtctccctga

SEQ ID NO: 124280 - DNA, 112 bp, Zea Mays
acttttctacactcacaactcccaagtgatcctctagaggactatacaaaaaaggttacatttttatccaggcattatccaacatatacattaaaaattgagaagtttttta

SEQ ID NO: 124281 - DNA, 153 bp, Zea Mays
gcagcaatgtatgcacaaggtacaccataacagcaggcaccaatgccaccgggttcacacccatacagttcttatcctatgcagtcaccaaacgggacagttcaaactccagtaagttaatgggcgccttttatttgatctattgattgttgc

SEQ ID NO: 124282 - DNA, 1211 bp, Zea Mays
atggggcgtggaaaagtagagttgaagaagattgagaatccaacaaaccgccaagttaccttctccaagaggtggatggggttgttcaagaaggcaaacgaggtagccattctttgtgatgcgcaaatcagagtcatcatattctctggcagtggcaggatgtacgagtactccagccctccatggagtttgaagccttcagtaaaaaaagaagagatgatgattaggtgtgtgagttttgaagctttgaaccccagagccattgctgttgtgatagaccccatccagagtgtgaaggggaaggtggttattgatgcattccgcctcattaatcctcagaccatgatgcttggccaggagccacgtcagacaacatcaaatgttgggcacctaaataagccatctattcaggctcttatccatgggctgaatagacactactactcaattgcaatcaattaccggaaaaatgagcttgaggagaaaatgctgttgaacttgcacaaaaagaaatggaccgatggtctaattttgaagaggtttgacactcactcgaaaaccaacgagcagactgtccaggaaatgctaaacctagccatcaagtacaacaaggcagtgcaggaggaggacgaactgccacctgagaaacttgcaatagcaaatgtgggtcggcaagatgcaaaaaagcatttggaagagcatgtgtcgaatttgatgtcatcaaacaatgttgatacaaccattggttggaatgcattaatcaatagtttttcccactaagctactggtatttacaggctatacatccatgtttactcatccttttccctcccaattaaggatcatatgtttacaggttacacatccatgtttactcatcattctctaatgttttttcttattgactttattaatttaatttccaaagttttttccgtttcagatgtatttcactgcctaaactaatgaataagctcatcggaaattctaagcgctatcagtacaagaaactactcctgaagcattgttctatcaattccatggtacatatgaacatatttaactgttttcattgtttacagcacctaacacagaagtttttttatttttagtgtagtgtgagtgcatgattcatttcattgagtttcataaaataggaaactttcaagtttttgtaagtggcttttggcattaaggacgtatacgtcatc

SEQ ID NO: 124283 - DNA, 1857 bp, Zea Mays
tttcgatacttaatcgcaattcatttcggtgtgaggagatacgagcgtacagtacaacacaagcatgtacgtatgcatgtgcccacgcgggcacacgtacgcgccggatcggactctctctgtgtctctgcagacccacgacgacgaacctgacacacaacaataccataccatacatacattacaggctgctctcgatcaagcagcttgccggcccaacgcatcatcatcagacgtcgcggtcgcgggcgcactcgggcggcacggcggcgccgtagcggtcgcgatcggtgcagtagttgtagatggtgtagcggcgcctgacctcggccaggcggcggtactgcgcggcgtcgaggtccctgaactccggctggtcccaccagcgcgcgccctgggtggcgcagaagcgcgcctccgcggaggcctcgcagccgtcgacgtggaagccgcggtaggaggcgacgaagggcgcgttggaccagtccgtcttctcgcgcccgccgcgggtcgcccagtcgtcggcgttccacaggctggagtagagcttcatcggctggctgaacgggtaccgcacgcccaggtcggcgctcgtgttcttgaacacccggatcggcacgtcgtccacgaagaacctggcggagcggcggggagatagatcctcagattagttagtgccgttgccgtgggctggagtggaggccggaattaaagtgtagtgtaggatacgcgcgcgatggtgctgcacggtgtacgaggaggaagagattattgggcgggccctcccgtggccggccatggtggtggtgtgcagggttcagacaagcgtgtacgtagtgtactgtgcaggggcaggcggcagggcataggctggctctgctgcacatggacatggaggcacgcgctgtctgcctttacgactgcatgcatggattcattcaaaccatcgtcccactttttcagtactggactgtagtgccgctgccgttgtaccctccccggcgccggtgagcagagcagtgagcttttaccgcggtaaattttagggaatcctacctggttcatgtgaggttccagaggacggagcagcggggggattgcattgcattgcagatgcagagtgatgatgtgtgtgtgacggacgcaaaagcaatgcgatggatatatgatgcgggtgcttacgcgatcatgtagaggttccagaggacggagtaggagtggtactccttggtggggtcgaaccagaggtagatccgctgctcgcggtcgcccttgccgccggtgaacacgttggtctgcaggatgtagggctgccccgtccggttgcccaggaactcgaagtcgatctcgtcgtgctccgagttctgcgacgacagctgcagatagagcgagccggccggccaccagtcagatacgttgttacatacaagccggcaagagcgaggtggtagagataggaggcaggagaggagctcgtatgtaacgtacgtagaaggccgtgacggtgcccgcggagtcgccgccgacgagcttcatgtgcatgctgaagtggccgaagaggtaggagccccgcgtctggaagcccgtgccggtggacttgtccaggtacagctgcacctcccgcccgccgtcgatgtagtggatgtggtcctgcgcccacgtcggcacgtagttcttctggaacggcacgtccacgggcttccgaggcgccgccgccgtcgcccactccgccagcagcgccaccgccatggcggcaacctgcagccaccgcgccgtcgccatcttcgtctccactggatagctagtgctagtgccggaccaagggtggtgtggtgtggctccgctggatgctttgct

SEQ ID NO: 124284 - DNA, 165 bp, Zea Mays
atggttgttgcccaccgtacgtgtatcagggatgatgatgagagtaggagaatgtgtggcctagagcacctcagctatggcagccacacaagatgcgtgcgctttctttgcgtgatgcacgcactgctggctgtggctgagaacgaccagagacatgcattttga

SEQ ID NO: 124285 - DNA, 704 bp, Zea Mays
aaaaattccaagagatgaacaccttgttgagtcacttgtgttgctgcattcttattctatgcatctacgctccgacatccgccacatcagacaatcctcctctgcaggatgtatgccccatggctccccagggcgagcggcgagagttgtccatgaacgggttcctctgcaagcatcccagcaccatcctggcgtccgacttcaagaccctgctgctaaaccacgccggagacctggacagcatagctcggtcgtcggtgagcatggtgaccgctgccgagttcccaggcctgaacaccctgggcctgtcgatggcgcgcaccgacatcgccccctacggggtggtgctcccgcactcccacccgcgggcgtcggagatgatgttcgtacacggtggcagcgtggtggtcggcttcctggacaccgagggcaggctgttccagaagcgtctcggtgagggagaggtgttcgtcttcccccgcggcttgcttcactacgtcatgaactacggtttcggcctcgcgacggcgttctccgtgctgaacagccagaaccccggcgtggtcggtgtcgcccacgctatgttttttgcgagtgattcggacgtagtcgaaggtctaatggccaggatgctcaagtttggagagatggaggtgactggtgacaacaacatcactgctggtttcccatgggcattctgatct

SEQ ID NO: 124286 - DNA, 1598 bp, Zea Mays
aaccaaactcaccctgtattccttttccgccgcacggcgtcgccgtgggctcggtctcgctcgccgctcgccgcatacggccgcagccagacagccaacgtactcggggcggttgccgggccggggtccgcgatcgatggctgcgcggcggagcaggggctgggcgcgcggcgcggcggcgttcgcggccgtggcgctggcggtgggcgcggggcggaggtacgggtgggacggtgcctccgcggtggcggcgttccgcgaggcccagggcgcgctggggcactgggcggcgccggcctacgtggccgcgcacgcgctcacgcttgcgctctgtccgccttacgccatcttcttcgagggcggcgccgcgctcatcttcggcttcctgccaggcgtcgcatgcgtcttctccgccaaggtcctcggggcctcgctctccttctggatcggcagggcaattttcagatacttcacttcagcaatggaatggctacagaggaacaagtacttccatgttgtggttaagggggttgagcgtgacggctggaaatttgtattgcttgctagattctctcctttgccttcctacatcatcaactacgcgctatcagccacggacgttggttttttcagagattttctctttcccacagttatcggctgcttaccaatgatactacagaatgtttccatcgtaagccttgctggtgcagcagtggcgtcgaccacaggatcaaataagtcccatatatactcttacctgtttccagcaataggcattgtgtccagtgttctcatttcatggaggattaagcagtattcctcagcccttgctgttcctgaagagctgcaaagttcacctactaatggagatcacaatggtgacgctaagctggcttccgcgccatctaaaaataccggatctgggaaaactaggaagagaaggtaactgacagtatccccctgtattcactatttattacattgtgataccaagtaccaagcagctacagccaatgctagtcaaacatttggatttccacattggtttaccactacagtaagctgtcttgtctgttccatgccatgatcttttgggggggtatttaacagatgcgcaggcagctaccttcttgtttgtcaattgtcaatgagcttctgttcttgtggcagataatatcataaaatgttgtaacagatgcgcaggctcacatagtcacatgttgtacacccgaataacctggtggtttagatttggatcgtcctgagttcaattgtattctggggatcaatattggttttccctccctaattattgaacttgacatgtgcacggtgtagtccaaccagtttatgttctttggtgtaacaatttaattcagaactgtgtttgcttttgtgtggttgtagatagagatggcaatgggtaaaaatccgctgggtattacttgcccaaactcatacccgcgaaagaaaaatacgcccgctaaaaaactcatacccatgacgggtataaagttttgtccaaacccatacccatgcgggtttcggatatccaacgggtttcccatacccactaacatcaacataaaaaataa

SEQ ID NO: 124287 - DNA, 205 bp, Zea Mays
cttttttgtatttatgttttatgctaaattgtggaataacactatattagttgttagcaaagaatttgtgagatattaaggttgatgataatatatgttgttatttcatttaatcattgtgtattaatattttatcgaataatttgtgtaccgtcgcaacgcacgggcactatactagtagagtcctaaaatccatccacctgcc

SEQ ID NO: 124288 - DNA, 1115 bp, Zea Mays
cttgttctagccgtcacggcgctaccagttctctgccgcatctctctgttcctctgtttcttcctcttctctaatacattccactagtaatctgttaacacttcgtcatgaagttcggcggctcgtcgctcgcgtcagccgagcggatgcaggaggtggccgacctcatccttagcttcctcggcgagatgcccgtcgtcgtcctctccgccatggggaagaccaccaataacctcctcctaggaccctccatttctagctctcagcgcctgggccggagagaaggcagtgagctgcggtggaggaggggcgtccgaaatccctgagctcgctgtcatcagggagctgaatcttaggacaattgatgagctcggtttagataagtcgatagtttcaggtatgttgttgtttgctccactctgctcttggaacgcctcagctgttcctcttgctctatcatgaatgcttctgttatacaatgggatgtcgttctcttggatgtgccaaagttttctctccccttagtctgaataacaattcctggtggatgtatgtatgtatgtattctcttggatgtgcgaaagttttccccttggatgtgcgaaacacatttactcctcactgcaatccacgcctccactctcgacccctcctccttcctcctctccctagggaccgttctccccaacacgcaggggtagcgtaggaggtgttgtggcggcattatctaggaagcggtctgtggacgtgaggcggatcaacccgaaggtgcctaaggaggaggctgtcaccatctccggtcgactcgtccagatcctctccgaccatgggcccctcaccatcggcaacacctggaacaacaccaaggtacccaatcaaccagtcagtcaagcagagtggcaaaagccggggagcgatgcaggcgtcggagcagcaacaacggaggactctgctggtgtagatgagaaggaaacacacaaagagcatcaaaagcaagttcaacgatcttatgtcaacccatccacctctgaatgaggcatattcagatgtgtgtgtattcaggttggaaccaactatgcattagatttttatgctcattctggataatgtacaac

SEQ ID NO: 124289 - DNA, 1188 bp, Zea Mays
ctaaaacttccacttgttctagccgtcacggcgctaccagttctctgccgcatctctctgttcctctgtttcttcctcttctctaatacattccactagtaatctgttaacacttcgtcatgaagttcggcggctcgtcgctcgcgtcagccgagcggatgcaggaggtggccgacctcatccttagcttcctcggcgagatgcccgtcgtcgtcctctccgccatggggaagaccaccaataacctcctcctaggaccctccatttctagctctcagcgcctgggtcggggtgctcgattctttcgcttactagctaacaaggctagatgtgcgtgtgcctgattcgttgtctgtgtaggccggagagaaggcagtgagctgcggtggaggaggggcgtccgaaatccctgagctcgctgtcatcagggagctgaatcttaggacaattgatgagctcggtttagataagtcgatagtttcaggtatgttgttgtttgctccactctgctcttggaacgcctcagctgttcctcttgctctatcatgaatgcttctgttatacaatgggatgtcgttctcttggatgtgccaaagttttctctccccttagtctgaataacaattcctggtggatgtatgtatgtatgtattctcttggatgtgcgaaagttttccccttggatgtgcgaaacacatttactcctcactgcaatccacgcctccactctcgacccctcctccttcctcctctccctagggaccgttctccccaacacgcaggggtagcgtaggaggtgttgtggcggcattatctaggaagcggtctgtggacgtgaggcggatcaacccgaaggtgcctaaggaggaggctgtcaccatctccggtcgactcgtccagatcctctccgaccatgggcccctcaccatcggcaacacctggaacaacaccaaggtacccaatcaaccagtcagtcaagcagagtggcaaaagccggggagcgatgcaggcgtcggagcagcaacaacggaggaatgagaaggaaacacacaaagagcatcaaaagcaagttcaacgatcttatgtcaacccatccacctctgaatgaggcatattcagatgtgtgtgtattcaggttggaaccaactatgcattagatttttatgctcattctggataatgtacaac

SEQ ID NO: 124290 - DNA, 913 bp, Zea Mays
ctaaaacttccacttgttctagccgtcacggcgctaccagttctctgccgcatctctctgttcctctgtttcttcctcttctctaatacattccactagtaatctgttaacacttcgtcatgaagttcggcggctcgtcgctcgcgtcagccgagcggatgcaggaggtggccgacctcatccttagcttcctcggcgagatgcccgtcgtcgtcctctccgccatggggaagaccaccaataacctcctcctaggaccctccatttctagctctcagcgcctgggtcggggtgctcgattctttcgcttactagctaacaaggctagatgtgcgtgtgcctgattcgttgtctgtgtaggccggagagaaggcagtgagctgcggtggaggaggggcgtccgaaatccctgagctcgctgtcatcagggagctgaatcttaggacaattgatgagctcggtttagataagtcgatagtttcagggaccgttctccccaacacgcaggggtagcgtaggaggtgttgtggcggcattatctaggaagcggtctgtggacgtgaggcggatcaacccgaaggtgcctaaggaggaggctgtcaccatctccggtcgactcgtccagatcctctccgaccatgggcccctcaccatcggcaacacctggaacaacaccaaggtacccaatcaaccagtcagtcaagcagagtggcaaaagccggggagcgatgcaggcgtcggagcagcaacaacggaggaatgagaaggaaacacacaaagagcatcaaaagcaagttcaacgatcttatgtcaacccatccacctctgaatgaggcatattcagatgtgtgtgtattcaggttggaaccaactatgcattagatttttatgctcattctggataatgtacaac

SEQ ID NO: 124291 - DNA, 506 bp, Zea Mays
acagattttttcagccgcctgcattatcttctacgcgctaccacccagcctctgtcctcgtcgcgatgcccagtccccagctcggcgtcctcctcttccgcggcctcccactcctccagtccgagctcccttctcttcttcccatggcggctgtcgtcgagttccctgcgcaagcgtcgcacgcagccgtgtcttcaagcccgggtcttcttcctcccttttctatggacgctgcccctctctggtttctggtggccggccacctctgctgctcccatgtaaaatccctggagaaattggtggagaagaaggttaagttcaacgctccttaggtgttcgatgatatgcaagaactggtggccgtcttcgctcttgctgaaatcgagtcggggcatgatgtgatatcgatagatgtgtatgtcaagtgtaattgagttggaaagcatgtacgtgaagtgtttagatagacgaattggtgaggtatgattaaattaataatgtaaaga

SEQ ID NO: 124292 - DNA, 131 bp, Zea Mays
aagaattcagttgtacattttgattgtacaatttcatttcagatgcaaagtagttttgttttgttcattttcgatgcacattacttgtaagctcaaattgatagtagttccaatggtaatttcattttcag

SEQ ID NO: 124293 - DNA, 531 bp, Zea Mays
ccaagatattttccttgtgccagcaagtcatctgcctccttggcttgtttgtatgctaaatcttcagtatatgtaataacagcttctagaacaggattgtacctctttaatctcctcagaaatatatctgtaagttcacgtgatgttatttgctttgtcctaataagctctccaagctcgattaccgacataaatgcaatatcttcatcattagttggacgatgtacagaagacgcacgagggtactcgaaacttctagtctcacttgtcatactgccactactccatgatgatttgaagagtaaaacagaagggttgtgcaacccaccattctccgtcgcaaccaatttccgattttctctgaatgcgggtacattgaattcctttgcaccatcttccatctcacgtagttttgaatcattgaagaactcagcatcaaagtacttcatggaatcctttaaagcaatcacatcgctaattggttctttcttcagggcatcttttgcagaaataaatggcttcgtgtcctaa

SEQ ID NO: 124294 - DNA, 1554 bp, Zea Mays
gcttcccctctactcaccaccctctctctcttccggcatcccgtcccagccttcgccgcagctcgcgggcaggcaggcagccagccaggcagccatgaggcagtggaagtccctagtcccggcgctgcacctgcacggccccgccgcgtcctgcttcccgcacccgccgtcgccgtcgccgcccaggggggacgacgaggaggagacggacctgctgccggcggcaccgccgcagctggccggcgcggctctggcggtgcggctggtggggtgcgacgggcgcgtgcgcgcgtacgccccgcccgtgacggcgcgggagttgatgcaggagcacccgcggcacctggtgtgccgcgccgacgcgctgctcatcggggagaggatcccggccgtggcgccggccgaggagctgcagcccggagaggcctacttcctgctgcccgcgcacctgttccgctccgtcctctccttcgtctccctcgcgtcctcgctgctgctgctgctctccaccaccgcctccgcctccggcaagaaagcccgccgccgcccgcccgttcgagctccaccgcacggcgtcgggcacgctgcagatcaagttctccgacgacttcctcctgccggacgccgccaaggtcgccgcgccgccgcagcagcagcagcccgccgtgctgctccgcggggacgaacgcctcgccaaggactacgaggagctggtcgggtacggcaagtcccgccgctgggcgcccaagctggagaccatccaggagctggcggcgcccgccgccgccgccgatcccgcgccgcccagcgctgggcgcggcaggagcagccgcgcgctgccgttcctcgcccgcctcggccgccgccgccgccgccgcgacgcctgcagcgccgtcgcctgctccggctagggagcaagggtcgggtcgtagcgctctcgatccctccggtaggggtagtttttcaggtagccggcgcccgccggcggcgttgccggccgggcccgtcgtcctggtttagtggctggttttgtaattagggaaacgaaattttggtgctaatctaatctgtaaatggtgatggtggccgacagattttcctccgccgtttcttttctcgtgcctcgatcagtcacccactcactaatttcttagacgcctagactactgttagtagtagaatagaataccattagactgtctccagagaatcgagagaacccattagactgtctcgacagaattcgaaatgacactgtttaggggtgtttgggaacaaagtttttctgcagttttggaaaaatactgcagtattttcaaatactgcagtattatatatagaatggtgtttggcaagctggctaaaatctctgttttcaaaactgaagtattgcaaatactatagttgttttaaggtattctaaacttaggtctggacctcagttttcaaaactgtagtattataaactgcggtattgtcatgactaaagtatactatagtatttcaaaaactgtggttttcaaaaactttgttcccaaacagggccttataaat

SEQ ID NO: 124295 - DNA, 343 bp, Zea Mays
gttaaacatgcatatagaggagtgtggtgatcagggcgccatgagaactcattatgggcatgaacaatatttgaacagctacagaactttatagctggggcaaccactaccatatgatcaagatctggggcaacaactgccatatgaacaagttttgaagagagaaacatcaagtaagtgccgacatcacaacccctacaagcttgtgccttaaaacaagaggatacaagaagttggagtgcttttgtgaaggcttttgtgaatcacttgaagcgtttgaagcgttggtacttttgtgaatgattttgtaaagtgtttgtaaatatgtgcaaaacataataac

SEQ ID NO: 124296 - DNA, 369 bp, Zea Mays
atgacgctggaagctttgtgccgcgacgtactcatctacgacaccttcaacgccgccgacgcgtctgccgcttctgcggggatgggggagctttttcggcaatgcaccaccggcggaggtggcacctcagcgggggcgtcccaagcgaacagcgtgcagcaggggcagatgaagcggcggcggcggcagaggagcaccaaaaacgccgacagccaacagataacccacatcgccgtcgagcgcaaccgccgccgccaggtgaacgagtacctcgctgcgctccgttcgctcatgctggactcctacgtccaccgggtacgtaatcctacgctaatactcggacgacctcgatcacaatggcattcgtag

SEQ ID NO: 124297 - DNA, 209 bp, Zea Mays
ccaaaatctctactacttattaaggctgcaatagtagtcggccattccctgttctgtccatttcgtgttctgccaccattcctgttctgcctttccgattccctcctccccgcgcatagtccattcctatgttctgccaccattctatatctatcattctcattccccctccccgcaaagttcattcccattcccattcccccgtacag

SEQ ID NO: 124298 - DNA, 1628 bp, Zea Mays
gaaaagagagaggccggtacttcgtgtaatgatccctatcggctcatgaatttccaaatctctagctggtatctaggtatatagattaaggtctagtaggcagcggatagatggaatagaatagattccaggagaattgggttccgcgggtcatcagactcttcttgcagacatatcatcgatctctctccccaatctagactagagcctggctccatccagtccaattgcatcagagccagtagtggactgatgcaaagcaaagggagagattctttgggtcgtcggtggcatgcaactgggtgaagcttagctctctctggctctggctctgatgagggagaagctgaatcgctcttggatttctcttcttgagttgtgtgcgtaggttcctgttcagctaacaaggagattgttccagtggagaagggagaagatggcgcttcctgcgtcaccgtcgcccgtcgccatggtttgggcaaggcagggacgcctccagcagcgctacgatggttgctaccgccttgtatcaggatgcattccttacacgctcaaagaggatgctgtggaggagggtgctggaaagcaaagctgccagcaggacgtggtagggaggctgcaagtgctcatgatctcgacgcccaagcggagcgatctcatcttcccaaagggtggatgggaggacgacgagagcatcgacgaagctgccagcagggaggccttcgaggaagcaggcgtcaagggcattatcagcgcgacaccgctgggtgaatggatcttcaagagcaagagcaagcaaaatagttgcggtctgcaaggggcatgcaagggcttcatgttcggactacaggtcacggagctgttggaaacctggcccgagcaggtcacccatggcaggagatgggtacccgtggaggaggcgtatggtctctgccggtacgactggatgcgggaagctctggacagactcaaggaccagctgctgctgttggagagcagcgagttcagacctctgctgtcgtcggagccggtgggctcgccgagcctctacatggtggtgccgccggctgccgctggaggagcgacgacactatgcagatgttgatcgcatgccaatggtagtggccaacggctttgctcgtcgtctcaactctcaatttccatatctcacatgcggaaggagttgcagtgtcagaaccttccggaatcacctggacagattctagtatatttaactaataaatgtttcatgtcgttggaaagtaattggaagaaacaagctaacaaatttaaagttctattcgtggaattttttgtccttatgattgaaaagcaattttgaaaaatgtaccgtgttcgtgttatcttgagaacacaactgaatggtgcagaaaacaaaatcgaatgctcttgatgcacagggcagtgcaaaatagcaacggtgccagcagaaaggtgtgcctagtggatggtgttcttcaactcagccatgtttgtgatgacaatgaattgaatggcccaggctatggaaatatggaatcatagttccattactattttgttataattagaacatttgtaagggatctttgtgcatatagccaatataaagtggatttgtgtgtgct

SEQ ID NO: 124299 - DNA, 1616 bp, Zea Mays
gaaaagagagaggccggtacttcgtgtaatgatccctatcggctcatgaatttccaaatctctagctggtatctaggtatatagattaaggtctagtaggcagcggatagatggaatagaatagattccaggagaattgggttccgcgggtcatcagactcttcttgcagacatatcatcgatctctctccccaatctagactagagcctggctccatccagtccaattgcatcagagccagtagtggactgatgcaaagcaaagggagagattctttgggtcgtcggtggcatgcaactgggtgaagcttagctctctctggctctggctctgatgagggagaagctgaatcgctcttggatttctcttcttgaggttcctgttcagctaacaaggagattgttccagtggagaagggagaagatggcgcttcctgcgtcaccgtcgcccgtcgccatggtttgggcaaggcagggacgcctccagcagcgctacgatggttgctaccgccttgtatcaggatgcattccttacacgctcaaagaggatgctgtggaggagggtgctggaaagcaaagctgccagcaggacgtggtagggaggctgcaagtgctcatgatctcgacgcccaagcggagcgatctcatcttcccaaagggtggatgggaggacgacgagagcatcgacgaagctgccagcagggaggccttcgaggaagcaggcgtcaagggcattatcagcgcgacaccgctgggtgaatggatcttcaagagcaagagcaagcaaaatagttgcggtctgcaaggggcatgcaagggcttcatgttcggactacaggtcacggagctgttggaaacctggcccgagcaggtcacccatggcaggagatgggtacccgtggaggaggcgtatggtctctgccggtacgactggatgcgggaagctctggacagactcaaggaccagctgctgctgttggagagcagcgagttcagacctctgctgtcgtcggagccggtgggctcgccgagcctctacatggtggtgccgccggctgccgctggaggagcgacgacactatgcagatgttgatcgcatgccaatggtagtggccaacggctttgctcgtcgtctcaactctcaatttccatatctcacatgcggaaggagttgcagtgtcagaaccttccggaatcacctggacagattctagtatatttaactaataaatgtttcatgtcgttggaaagtaattggaagaaacaagctaacaaatttaaagttctattcgtggaattttttgtccttatgattgaaaagcaattttgaaaaatgtaccgtgttcgtgttatcttgagaacacaactgaatggtgcagaaaacaaaatcgaatgctcttgatgcacagggcagtgcaaaatagcaacggtgccagcagaaaggtgtgcctagtggatggtgttcttcaactcagccatgtttgtgatgacaatgaattgaatggcccaggctatggaaatatggaatcatagttccattactattttgttataattagaacatttgtaagggatctttgtgcatatagccaatataaagtggatttgtgtgtgct

SEQ ID NO: 124300 - DNA, 120 bp, Zea Mays
tttttatttttttattttgtcactcgaaacttggaaaaccgtgtatgcaaaaatgatattcatgttacttagcataagttacgtccgattccaggagcggaccggaaacttcgagcaaca

SEQ ID NO: 124301 - DNA, 1969 bp, Zea Mays
gttagcgggagcgggtgccgttggaggaggtctgatctcgtctgcggcgggggcgagagagcaaggccacggcgtcgcggcaatgagcagcaccaccgccgacacatccccggagagcgtcggctcctgccgccctcccactcctcctacttcccttccccctcattcagcgccggcggcggccctccgcggcgctccagtgaggcggcaactggacttcgcggacgcggacgccgactcctgtgccggcgccggtggcgacctggacgactacgacgacttccttatccgcgccgtggatgacattgagcggggctataacgaggccaagcgacgcgctccgccgtgcgtctgcgggcgcggctattgcgcggtgcaacgggacgaccagagcggcgggtggatgtacgtctgctcatcgcagccgaagtgtaaacatgttgccatgtgtaaggaagttgatcagaatccacaatcaccgcctgttgttagaagtgatcctaaaacaagcaatcgttgtgcattcaacgttccaaggactcctgtaaatgatgctagaacacaaattaataatgttactctcgaaggtgctggtgctacaactccaattaatgtcagtccccaggctgctgttgctgcaactccatttagttacacttcgaaaggtgttggcgctatgactccagttcatgttagtccccaaggtgctggtgctacaactccaattaatgtcagtccccaggctgctgttgctgcaactccatttagttacactttgaaaggtgttggcgctatgactccagttcatgttagtccccaaggtgctggtgctacaattccaattaatatcagtccccaggctgctattgctacaactccatttaattacactttgaaaggtgttggcgctaggactccagttcatgttagtccacaaggtgcacacgctacagcagcagttaaagttagtccccaatggaatagatctaatgatggacgatggaatagatctaatgatggacggccaatttgccagtgtactgcagggaagtgtaaaatattgagagtgggcaatgaagactggtatgtttgccctatacccaagggacaaggtgcatgcagttacaaggtgccagtaacagatgctgttggagctggagacaacgacgacgcaaatggatcagccaatcccgcccaacctaatgacgacgagtggccattcgacgtcatcaacgatgaaatcgtgccgacgccgcgtgctgtagcccagcagaagtcaccgagcacaccgcaccaccagcggagtggcacggcgagaacacctgcgccatcgcccgtgacgccgttcggtagccgcggcgctatgaccgggcgcccaaacgacacctgcttcgggtgcggcgagaaggggcactggatcagcgcctgccctaaaccgtctccgcgaagtaggtgtttccgttgcggcgtggtcggtcacaggccggccaattgtccccagccgagagggtcttagaatagaaggttgtgggtgaactggtggtctgatgctgcttttgggctgtgcctcgtaggcaatcagggctcaggagcagtgctaatgtttctgcttaggaatcttaagagcttgttcgatttgaggtggatcagaggggaatccacctcaaacccaacaagtcttaatcgggtttggcattgtagctacgagagagagagagagagaataatgtgtttgttgagaggtagggtggacaacggtgtaaaggtccgcaattgggccccattgtctgcctagtttagttaatttagttaataactaaattaatgtagttaattcagttaatgtagttcggtacatctatagtacatacatctgcgtcctctgtattggacctttgaagaacgggatgaacatgaaccgaggacggacatattgtaaggtgcatccttgaaacccctgcttgttctt

SEQ ID NO: 124302 - DNA, 114 bp, Zea Mays
gagctgctctagctgggcttctttctccgcttgcgtgctctccctgtatgtatctagcggtatactacctatatcgcctctagatgtccatgtcttcgtcgtgtccttctccgg

SEQ ID NO: 124303 - DNA, 115 bp, Zea Mays
ggagagtgcgccgaagcttctatttataggcgagcctattctttagcggaagaatttcttattagaagtccttttttttaatagactgtaacatagataatttgcccggcaccca

SEQ ID NO: 124304 - DNA, 230 bp, Zea Mays
tatatatatatactacttattaaggcggtaaggggtaggttgtcattccgtgttctgccattcccattaccccctccccgcaaagctcattcccattcccggctgccattccgtgttctgccagtgttctgccattcccattaccccctccccgcactttctcattcccccctccacgcaaatctcattcccattcccacgtgcatcccacgcctagctaaaattaaatt

SEQ ID NO: 124305 - DNA, 255 bp, Zea Mays
atgaagcagccggttggtgctataaacacaatacacctctgttttctaatccgtctgcttctcatagttgtagataaccttgtcatttcagcttatatcgggctagctagtggtattaatggagaaagatcagaaatagctgaaattgaagtagcatcaacaggtgaagttgcccgacttagagctgctctggaggagatgaaaggggagcttgctcatataaaggatgaacatgcttacacatacctgttttga

SEQ ID NO: 124306 - DNA, 1036 bp, Zea Mays
gaattccccattcacatctgtagccgcgcctctccgtatcactccgcgcctctctcccgccaggccgccgcccaagcaaccatggtggccgcgctgctccgccgcgcgctccacctccgccgtgtgctcccctcgcccgccgtcaccgccgccgcctcccagcgcctcatccccgccttctcgaccacccccacgccgaccccgaccacctcccagcagaacgccgccaccactacgatcgacctctcctccgacgagagccgccgccgcctcctcaataggttggtgtaccggagcaagcagcgaggttttctggaactggacctggtgctggggacctgggtcgagcagcacgtgcacgccatggacgaggccaacatccgcgccctcctgcaagtgctcgacctcgaaaacccagatttgtggaaatggttgactagccaggagcagccaccagaggatctgaattctaatccggtgtttgctgccatcaaatcaaaggtcacagataacctgaccaagcatgcttctcctgagacccgatctacaccaggtcaaccatgggttagaggatgggacgacataaagaaaggcaaagatggacccaagtatggaaatcagtgataagctgcttgaaatggggatgacggctttccatcctaaataatagctgtccgcccaccccaccccccaatatgcttgttttgtgattgtgtagaataaagtgaactgccaccggcatgtgtgaagtttgttaaattgtagaatcagcttgtaactatggatggtactcctgatgtttgcctggcaattccagccttccaggtatcgtctactacttggaaatatgttatattatgcattgcagtctgttagtgatggcaatcgttgaagcatttggactgagacttaaacattgaaaatgtggacaacaaacgcagtcagtgtagttttctactgtgatagtccaggatatatggtagaaaataaagaaaccatttcccatatcataaggagaaagctttcttttgttttc

SEQ ID NO: 124307 - DNA, 255 bp, Zea Mays
ccagcagaaccctctacttatgtacatcatccaactccctatgatgctccttcggatgctcatttgatgacacctgaagcctattcacctcccatgtcctttacctgcctcgactgctccaggtacggtaacaacaactcaatatggttatggaagtggatatgaaccatatcatccacatccttctgcatgtcggtatgtgcaagtgccactttcatgttctctctatgtttaataccctatgccaaggcatgt

SEQ ID NO: 124308 - DNA, 919 bp, Zea Mays
gagagatccgccaccgccatagttcatcgcgcgtcgacagagcacgaccacgcgatagccgagggtgtaaaccaaggcctgcgggacctattggcggggtttcggggcacagtgatcgaccaagacctgtcgaatagctcgccggtgatggaaggccgccgtggttccgtcttggccgtggattgctgtgctcaccgcgcctaactccggtaagtcgctacccatatggttcgttgtgtcattctcttcgtgtagcaccagtcggggtagaaaataggcctctgtagcgcctggtggccgtactccggtgggctcgccatcgttggcgcaggcggcgctaccccgaggtgtatgttaggcaggggaaagtcccctggtcgttcgtccatgaacggacggcggtgattgattgtgacgcgacacttttccggttagatcgggatcgttggatcgcgatcttgtggctcgggttaggccaaacttcataaaatccgaggcgttcaagggagaacctatggtggacgcatggtactggtttccttgcgatgggaactaatcgtggccctcagcgttgggtcggacggttaggattgaatagcccccccccttcattgatgcacttttgcttaaaagcccctgctgttttcaggaaacaacccgtcttccataactatgcgaagaacatcacggttaagtcctagaatttacagcaaaaccctggcatttgtgtaatatccaatttgtaaattgtaagagataatataaaaggggaacacaatttcacttcatctatatgtgatttctccatttatcatcacatgtgaacacttcatttaaaaacaaataattaataaatgcatgccaccaaattatgtatcatgctggattttattgttgtgtgcattttgtgataatataa

SEQ ID NO: 124309 - DNA, 3676 bp, Zea Mays
taaaagtccgtgcgagccgctgggatccgaaaatattttttggcgcgcatcccaacagccgccgccgcttcccgtccaccggcaccgccgccgcaaccctgttagagcttcccttccggtcgctggagtgcctggttccggccccagcagcggtttcgggcactgggttgggagtgcttggaaggggagaaacatggacggagtcgccaagccgtccacgagctcggggtcgggggtcacggatagtgcctccgccgccgcggcctccatagatgagaggttcgccgatctgtgcgagagcaagctgggactagacgacagcatgacgaggcaggcaatgcagcttttcaatgagaccaagaacatcaagtccagcatgtcttccttgggcggtggatcgcccgaggaggtcgagaggttctggtctgcctgtgttatgtactgtgtgtcaaggctcagcaaagcgcggaggtcgaaggaaagtggcagtgtctcactttgccagattttgagggcatctaagctgaacattgtggattttttcaaggagatgccgcaattctgcataaaggttgcacacattttgactggcctatatggttcagattgggaaaagaggcttgagttgaaggaactgcaagcgaatgttgtccatttaagcttgctaagcaggcactacaagcgtgcatatcaggagctattcttgccaaatgatggaaagtgttcagacagctcttcagaatcaaacaaccaagaggtttctgattattatcgctttggatggttgctctttttagtcctaagaatccaaacattcagcagattcaaggatcttgtgacatctacgaatgaactagtttctgtgttggctgtacttatcattcatattcctgtgcggctaaggaatttcgatataaaggattcatcctactttggtaagaaatcagataggggagtcagtcttattgcttctctgtgtgaaaaatatcatacctcagaagatgagttgagcaaagcactggagaagacaaatactctcatactggatattttgaaaaagaagccatggacagctacttcagcatgccaacaggataatttgactttcattgatccagaagggttgacagtttttaaggatttgcttcagggaggctcattgaaatcaagtcttctaatcctggaaaaagaatatgaaaatgcaattaacacaagaggcgagctagatgagcgcatgtttgctaatgatgaggacagtttacttggcagtggaagcctttcaggtggagccattaatttaccaggcacaaagagaaagtatgatgttatggcctcacctgcaaaatcaatatcaagcccaaatccaatgtctcctccacgtttttgtctatctcctaaaggaaacagcttttgcaactcaaagatggctcctatcactccagtgagcacagccatgacaactgccaagtggcttcggagtacagtatctccgcttccatcaaaaccttctggggaactattgcgcttcttctcagcatgtgataaggatgtaacagatgacattgtacacagagctgggattatacttggagccatattcacgagcagttcttttggtgaacagatctgtactaatatgcgaagcgctaataggatggatgctatttggacagagcaaagaaaaatggaagcccttaagctatattatagggttctggaatctatgtgtagggcagagtcacagatcttgagtgggaacaatcttacattacttttgtctaatgaacgtttccatcggtgtatgattgcatgttctgcggagttagttcttgcaactcacaagactgtcactttgatgttcccagctgtgttggagaagactggcattacagcctttgacttgagtaaagtcatagagggttttgttcggcatgaagatacactccccagagagttaaagcgtcatctgaattctcttgaggaacggcttctggaaagcatgtcatgggagaaagggtcatcaatgtacaattctttgattgttgctaggccagtactatctatcgaaataaatcggttaggtttactggctgaaccgatgccatcacttgatgcaattgcagcacatcataatatctcaatgggtggcctgccgcctcttcccttccagaaacaggagcgtttgcaagataaagatgaaatcaggtctcccaaaagggcgtgcactgagaggagacatgtgccggtggacagcaattcatttcgatcacaagtgaaggacagtattaaattgaagctaccacctcctcttcaatcagcttttgcaagtccaacaagaccgaatcctgcagcaggaggtgaaacatgcgcagagacaggaatagctgtgttctttagcaagatatcaaaacttgcagccattagaatcagaagtctctgtgaaagactgcaactttctcagcaagttctggagcgagtatattcccttgtccagcaaatccttagccaacagactggtctcttcttcaacaggcacattgatcagatcatactatgcagcatatatggagttgccaagatctctcaactgcaactttcattcaaggagattgtttttgggtataggaaacaacctcaatgcaagccacaagtttttcgaagtgtttatgttcattggcccccaacaagccataatgggaaaacaggagaagatcatgttgatattatcactttctacaatgaagtatttattcctgctgtcaagcctttgttagtggaggttggacctggtgctagtccaaagaggaaagaagagggaaaaggtccatacccagaatcccctcggctagctcggtttccgaaccttcctgacatgtctccaaagaaggtttctgctactcataatgtatatgtctcgccactacgatcatcaaagatggatactttactctcaccaagcccaaagagctattatgcatgtgtcggcgagagtacctatgcgttccaaagcccctccaaggacctgaaggctatcaacaaccgcctaaatagttggaagaaagttagcggacgattgaacttcgacattgtcagcgatctggtcgttgccagtagcctcaacggcgttcaaaatgccaagcccgcagccacggaagtggttcccaccaagacaccggtgaagtgcgagccatctgaatcgtgatctactctgatgctgcatcaccaatccagtgtaacatattataaatggttaggtgtcagatgttctgatttaggagtgtttgaatgcactagagataatagttagttagctaaaaattgttagtggaattagctagctaactattacctaatttgctaaaagtagttgatagctaaaatattagctagactgtttagatgtctcaattttagcagctaactattagttctagtgcattcaaacattcccttagatattaggtggccttatttctgtttgtatttttgacatgtaaacatctttgtgagcagctctaccatctgtaaaatataagaaagctgctctaagagctcccataacccaactctctttgtaagagatagataagtacgatagtcatgtaactttataagttttgaaaaggtctgtaaatacaaatgatcattgtcaattccgtacagttgtgaattgctt

SEQ ID NO: 124310 - DNA, 1779 bp, Zea Mays
atgtactcgtcttgtagctatccaacaactgcaagacaagttctcgattctgctccccaaggagcttgtgacacagtttcttggaacacaataatttctggatacctacgatgtgggatgcctaataaggctctgcaggcttttggccagatggtcaaggagccagttagactggatgatgtcacattgctgaacgcactcgttgcttctgccaaggcaggcaaagcgaaggtcgggaggctgtgtcacagtttagttgtggtgaacggggctggaattaattgttatatgggatcctctctgattagtatgtatgccaagtgtggattggttgaggatgcccgcaaggtatttcacggaatgcatgagagaaacgtcgtttgctggacatcaatgatttctgggtacacacagttgggtaagtttaaaaaggctgtcgatcttttcagggatatgcaaattactggaatgaaggctgatgatgggacgattgctactgttgtgtcttcatgtgcccaaatgggagcacttgacttgggacgatatgttcatgcttactgtgatgttcatggtttagggaaggagctttctgttaagaattcactgattgatatgtactcgaaatgtggggatataactaaggctcatgagatattctgtggattgaccaagagagatgtgttttcttggacggcaatgataatgggctttactgttaatggcttatgtaatgaagcacttgatttgtttgctcagatggaaggagagggtaaggttatgccaaatgaggtcacttttttgggtgtccttacttcttgtagccatggagggttagtggaacaagggttccatcacttccagcgtatgtccatggtctacaatcttgcaccgaggattgaacactatggatgcatggttgatctcttgggacgtgcaaagctattgacagaggcagaacaatttattaacgggatgcctattgccccagatgttgtagtatggcggtctttattgtttgcctgcagagcttgtggagaggtgggacttgcagaatttgtagcagaaaggatcctagaactggagccaaaaaagtgtgcaggacatgttttactttctaatgtctatgctgccacatcaaggtgggttgatgtgaataaattgcggacatctatggacagttgtaggatgagtcaaatagcacaggtggttgtggaatttcttgaggtagcaatcagctgcatcgtcttcctcaaaggcttctatcctcctcgtgcctttgagaggagaaggtacatgaatgtggtggtccagaaagcactgcatcctgagcttactagctatattcactctgtgactttcggtcttctacctttcattcagaagggattggtagagagggtcgtggtcatcttctatgacaaagggcatgtaccgaccgagaagttcgtcttcaagcttgcagtcaaccagtcataccgttccaagttagaggaggcgaacctggagttcgctctgcgagcattcttgatcaagctgactgttgctgagcctgttaccagaccccttccaccagatggtagctgggaggtgaccgcctacttccggtccctccccggcgacggtgaccgagaagctcagctgtggattcctacggacgccgagctgtggatgcagcctccgcagatcacccccatcaagtcagtcagctgtgaccctctgacgatgcagctctacttggagcaccctagcgtcacggaaccgaaggagccaccggcataa

SEQ ID NO: 124311 - DNA, 2033 bp, Zea Mays
aagattattcctttcttctcagcgacaccgctcgataccttgcgatcccaagatggcatcgccgccgatacccacacagtaatcctctcctcgctcccctgtcccctctctccccgccgccgacgccgagcctactctgtccatttccggactcgccgtccctcgcgggccggttcggtccgagcctgcgccccagccgcgccgggatccgcgagagaaccgcttgccctccgtgctttgcgggcggtccggtgactggctttgggattcctatgccggggggctcgtgagcgcaatggggctgtttgggtgaactagggcttgcttctgtgaattctgtgagggtgagcggagctgtgggagggaggatgcaggggaaggcacagctctctgattccaaccggcggatcatggagctcgacgcgccgccacggcgggtgtaccaggcgtggaagggcagcaacttatttttccttggtgggagacttatctttggcccagatgtgaggtcactcgtgctcacagtatgtttgattgtagtcccagtgatcttctttgctgccaccgtttgtccacaacttggtcatgagttccacagccaaattggaggttgggtggcatctgtggctgtcatctttacagcatatattcttattgttctacttatcacatctggccgtgatcctggaattgttcctcgaaacactcatcccccagagcctgaagacatcgatgaatcctccaacttaccagattgcccgggtggtcaacaaggttcgacaggtttaccacctacccgggatgttcttgtcaatggtgtttcagtcaaggtcaaatattgccatacatgcatgctttatcgtccgccaaggtgctcccattgctcaatctgcaacaactgtgtagaacgttttgatcaccactgtccttgggtaggccagtgcattggcaagaggaattaccgattcttcttcatgtttgtgtcttcaactactgtactatgcatatacgtgtttgcattctgctgggtcaatctcaggagaattatggacacgcatcaatgcaaaattggtagagctcttttgaagtctcctatctccggtcttctcatcctatacacatttattgctgtgtggtttgtaggaggattgacctcattccacatctatttgatttctacaaatcagactacttatgagaacttcagataccgctatgaccggagaacaaatccttacaaccttggagtgggtcagaatttcatcgacgtcttgttttcaaggatacccagctcaaaacacgatttcagagcaaaagttaaggccgattcttcgaccttcgcgtcatccctcagtatgggacgggttctaagcccacccaagacgagcgtggaccttgagatgggcatgaaaaggcaagcggtggccgcagaggactttgaagacttgcacagccagatcggcagtgctatggggctggagagatgtggcaccgagccgccgcattttgtcggccggaagggctgctctgagatgtcacctgacatagaggcgttcgcagaagagtttggcatggaaggtgggctcagtgagaggaaaaagattgagcggcggacaaatgatgattcgtaggaagtttcccacgtcacaaaccacctcttcggccttcctccaggccccaaacttggtaaaagcttgcaaagaagaaagtgaagtaggacaaaacggacggtagagtgaatcaggcattggttagtttgttttgggtgtcatttctagccaagacttgagttagaagtgaaagatgttccttgacgatatagaaatgatgaatccacatctggtttggacttcttagtctatgtgatgtattggatgtgtggtgtggcagtgttgcttctgattttgttgaaggtgtaatctgttgatttaacttggctatgcattcatttaagcgatcaaatttctgcacttttgcgctaaatctttagatattgttcagataagggtggattgaagggaattaaatcattt

SEQ ID NO: 124312 - DNA, 708 bp, Zea Mays
atgggtctagagatgccctcagcgtcagagacgctcctgttcatggcggctccaggagcggagaatccatgggggcctccgatctcacctgaggacgtcgctgcgatgaacgatgtgatcgtcaaggctctcggcctcacccttctagtggtggtaggagggaacgggctgccatgcacggacgagcgttggtacatgtggctgcctcttgcggtctccgccgccgccaccacagctggaaccgaccccaatggtggtgccaccaaattgctcccactgcgaggtgctggcctgcagtttttacacatcgactacaaagttggaggcaatagtggtagcacgcagaaaataaaggacaggttggatcggatcctagagcacatggatcgccagtacgtccacttgggatcaattggcaccacgtatcaacagatgactgcagctcaactcagtaaacaagcttggtctagacaaagtgtacaaagttggtgcaccaattgtgatggctcctccgtcttcctagaacatggcatggatgtaacagaacaaatgtttgtggaaatcaaaatacttggtcaactcttccgttctaaggcccagggttttagtgctgaggaggtatacaacattcttgaccaagtgggtgaaatattgctgctcccagagtacagagtgggtcatgcagacaagaagccaggtagaccatga

SEQ ID NO: 124313 - DNA, 134 bp, Zea Mays
ttatatgcacaagcaacaaaactacaacatgatgcacctttttattgagatatcatttattttaaacatgtctcctactaattcttataaaggagaaggaagtgcccataattttttattcctctctttcattt

SEQ ID NO: 124314 - DNA, 1774 bp, Zea Mays
atggaatcaggccgtgctaggctcagaccgaccccagacagcaggcttcatgtcgtggttctcgtgcttgttggccatctctagtcttgtcacaagcgacggcagcagaaacgccccgcagcaacaaggccgcgcccaatccaatctgcgctgcgctgcgaaaggccagaagagcacacacaacacaggtacagctagcgcgcgcgggcggtgcggggctgtctggcaattacgcagccttggcagcttgcaccaccgcgcaagctagcgctgacggagggaacaagggcttgcgcgcgcacacagggaggggaggggacgcctgccgccgatcgcctggtggatctcccggcggcgggcgaggcagcagagaggggaccaatggcgccgccggacgcgggtgcggcagcagcgtgcggcgcgcggtgggtgaggcgggacacgctgctgggcctcgcgctgggccagttcgtctcgctgctcatcaccgccaccggcttcgcctcctccgaactcgcccgccgagggatcaacgcgcccacctcgcagtcgctcctgaactacgtcctcctcgccgtggcctacggcggcgtcctcctctaccggcggcagccactcacgataaaatggtactactacttaatacttggaattatcgacgtggaagccaactacatcgtggtcaagtcgtaccagtacacgtcgttgacgagcgtgatgctgctggactgctggtcgatcccgtgcgtcatcctgctcacctgggtgttcctcaagaccaagtacggggcgaggaagttcctgggcgtcggggtctgcgtgcttggcctcatcctggtcgtgttctcggacgtccacgcctccgaccgagccaaagggcctaacccgctgaagggcgacctgttcgtgatccttggttcgatgctctacgcctgcagcaatgtcaccgaggagttcgtcatcaagaaaagcaacagggtggagctgatggcgatgctggggcttttcggagcgcttatcagcgccatacaaattagtgtacttgagcgagaagagcttcactccattacatggactagtggtgctgtgctcccttttctcgggttcgcggtagcaatgttcctgttctactcggctgtgccagtaatattgaagttatgcggcgcgaccatgctgaacctctcgctcctgacctcggacatgtgggctgtcctcatccgcatcttcgcttaccatgagaaggtcgactggatctacttcgttgctttcgccgccactgcgggcggcatcgtcttgtactcgtacagtggctctaatgaagtggaggagacggcacaggtggccggggccagcgacgagcacggcaagggccgggacgaggaggctgggacgcggaacccagcgtgaagctctggcgccagccagcaatggaggtgggttgccccctgccaggcatccaggagtgacgagttgttgttgcatgccttgacggcgagtgtagcagagaactttgtcaagtgtcgcaggagactgcttcaagatttgacgacggagatagtattggttttcatgtaaaacaagaacagttggtaacataccgacaccgaaccgtcgtcagaaatgattagatctaagaatcgaagattttacaggtgtttttggtaggtgtgtttggttgagaaatagagcggtttcatttttattttctgatgcttgatttccaataaaagataagcagagcacagttttcgtacgaagctttatcataaataat

SEQ ID NO: 124315 - DNA, 808 bp, Zea Mays
ctccccccccgctctggtggccgtagcccgtgggatcgaattcgacggaccacgcctcacctaatactatagcggggcttatttaaagcaagaatttcggaggattgggaaaccctagccatttggctcctgatttctttggtcggtcaccacttggtcttctcctctcggccgtcgactaagccgacttcgtcatcacgatggagttccttgccgatttccttctctcctctgagtccacttgtttcggatgtcctccctacctatctgtgttggttggctccgaccactctctattctatggtcggctctatgctctaccttagaatgttggcaatggtcagtgcaagctcagccctgcagaccctcccgatggcaagcacgtccccacgggcaggcgcgtcgccgtcgggagggttcgtgcggaggtcttcagccatcggcgagataagtcacaggtgggcgtaagataaaaacccgacggccactttgccatttgcacaaactgtcagcctcttggtcgtttctctatgacttctatacacccggatctagtcctctttactcgcttcccatactgtgtgtatgattgtatgaaatgtatctgatgtattattcgggatcgagttttgagttgataaaaagcgtagatctgatccccacgttatttctgtgctgtttgtgcgcttaaactgagatttgggcctgatatttattcatcccgaaccccatgtgtctttttcttgaacactgttagtgcatctgtgcacttcggtccagtcgaattttggggaaaaacctaacctgt

SEQ ID NO: 124316 - DNA, 101 bp, Zea Mays
tagagagcacacctcaaattggcacattaaaacagatgaaggtgtggttaacaataggttctttagtaacctcttttatgtgcaaagcactaagaatgcac

SEQ ID NO: 124317 - DNA, 1795 bp, Zea Mays
atggggggctgctactccgccttcgcctgctcgcggaagctgcgcggccgcatctccttcatcctcccagtcaccgagcgcgaccgcgacgaccgctccagcgacggcggcgccagctccgtcgcctcccattcgccgtccccgtccccgtccccgcgcaaggacgacgccgggccgctcgtggtgcggaccaccgcggccgagtttgcgcgccgctacgtgctgggccgggagctggggcgcggcgagttcggggtgacgcgccgctgccgggacgccgccacgggggaggcgctcgcgtgcaagaccatccggaggaaccgccggcctcgcggacccgccgcccgccgcctgggggccggtccgccccaccacggacccggagcgcccccagcagcagccgggcaggacccggcagcggcggcgcacgcggcggacgtccagagggaggtggccatcatgcggcgcatgtcgtcccgcggcggcggcgccgtggtgcggctccgcgaggcctgctgcgaggactccgccggcgccgtgcacctcgtcatggagctctgcgagggcggcgagctcttcgaccgcatcgtcgcgcgcgggcactactcggagcgcgccgcggcggccgtcttcggcaccatcgtcgatgtcgtgcgcctgtgccactccaacggggtcatccacagggacctcaagcccgagaacttcctcttcgccaacaagtcggaggactcgcagctcaaggtcatcgacttcggtctctccgtcttcttcagccccggcgatcggttcacggaggtggtggggagcgcgtactacatggcgccggaggtgctgaagcgcaactacgggccggaggtggacgtctggagcgctggcgtcatcctctacatcctcctctgcggcgtcccgccattctggggagacaacgacgagaagatcgcgcaggcggtactccgcggcaacatcgacttcaaccgggagccatggccgagagtgtccgccaacgccaaggacctcatccggcggatgctcgacccaaacccctccacgcgcctcacggcgaggcaggtgcttgagcacccgtggttgaagaacgcggacacggcgccgaacgtgtcgctgggcgaggccgtgcgcgcccggctgcagcagttctccgccatgaacaagttcaagaagaaggcgctgggcgtggtggcgcggaacctgccggtggaggagctggacaagtacgtgcagatgttccacctcatggacaaggaccacaacggcaacctcacgctggaggagctcatggacggcctccacatcaacggccagcccgtgccggagtcggagatcaggatgctgctcgaggccgccgacacggacggcaacggcaccctggactgcgacgagttcgtgacggtgtccctgcacctcaagaagatgagcaacgacgagtacctggcgtcggcgttcaggtacttcgacaaggacggcagcggcttcatcgagcccgaggagctgcgggatgagctgggccccaacgaccaggccatcctcgacatcatccgcgacgtcgacaccgatcgggacggccgcatcagctaccaggagttcgagctcatgatgaagtccggcaccgactggaggaacggctcccgccagtactccagggccaacttcagcagcctcagccgcaggctctgcaaggacatgtgatcgggccccgcgcttggcactgactagtgtcggcaaaagggagaaacgcttgcttgtacgcctgctgcggacagaaaatcgtttcgaa

SEQ ID NO: 124318 - DNA, 1215 bp, Zea Mays
atgaaatcaatcgatattctatccctgcaatgcgtttcctttgagattcttgctggcaataacatgaacatggataagacaccaatcgcaggcgacggcggcggcgatgcaggaggcggcggcggcggctccggcaatggtccggagatgcaatcctcgttggacgcggtggcgccttcgccgactcctcatacggagttggacatcagcagcatgccggacacccccctacgcaagcccggccaccggcgcgcgctctcagagatcatcggcctccccgacgacctggacctcggcggccccggcgccggcgacgcgcccgcgctgtcggacgagaacgaggaggagctcttctccatgttcctcgacgtggataagctgaactcgcggtgcggggcgtcggagtcggagccatcgtgcgccatggccggcggtccgggagaggcaacggagacgtctgcggcggcgtctggggcagcgcaggggcagatgcatcatcacaaccggcactcgatggacgcctcgagctccatcgacgcagagcatctgtttgggacaacggtgacggagggggtgtcgccggcagaggcgaagaaggcgatgtctgccgcaaatcttgccgagcttgccctaatcgatccaaagaaagcaaagaggattataaataatagacagtcggcggcaagatcaaaagaaaggaagatgaggtacattgctgagcttgagcggaaggtgcagttcatgcagagagaagccacagcactggcaacccagctggcattgctacagagagacacggctgggctgactgttgagaacggcgacctgaagatacgtctggagagcacagagcagcagatccacctacaagacgcactgaacggggccctgaaatcggagatgcagcggctgaagatggcgacagggcaggcgggcaaccagatgatgaacttcgccgaaccgccgcacacgttcggcggtgcgaaccagcaggtcttccaccacccgggccaagcagtgccgccattcctggtggcgatgcaacagcagcagcagttgctgctgccgcacatgaaccagccgttgcaccctctgcagagccagcagctgcatcaggcggcgacgctcagcatcgacatggaagggctgccggcggctccacctggccagtggcaatggggtggtgacacgtggtcggagagcagcagtagctga

SEQ ID NO: 124319 - DNA, 632 bp, Zea Mays
gtgggcatttctggaatcgccccagtctagggtttcacctgcgtgccctatataattctctccatccacacccgccgtcgtctccgcatttccatcctgtcgtgggatcccagccaccgccgctagaagaagagctcggcgattcccaggtcccgcgagaagatgccgaagcagatctatgagattaaggacttcctcctcaccgcgaggaggaaggatgcccgctcagtgaagatcaagaggagcaaggatgttgtcaagttcaaggtgcgctgctccaagtacttgtacacgctctgcgtcttcgatgctgagaaggcaaacaagttgaagcaatctcttcccccaggtttgaccgtcgaggaggtctgattggatacatggcaacgccgggttgaactacccaagcttctttatcagtagcagagcatgctactcatgtacttttggaacctaagctattagacctgtcagtgttggatgtgtggatcttgcatttttgtggagaaataccaatttacctcgttcaaggatgcacctttcagtatatttcttgtttaactgcacattactttatatttatgcctgtttcatacctttcctctacaaacatagttactagatttttgtgc

SEQ ID NO: 124320 - DNA, 2085 bp, Zea Mays
ggaataaggaggagccatgattggaagtccccccaataggccaaaacaagcatgacgcgattggccgtccccaacggccaacgagttgtccgccccgcccctcgctttcgtccccgttttccggtgccttgcttccccctcctcactcaaatgcctcacaggccgaggctccgaggccgcggggaggaggaggagcggcagccagcaggggaggaggacacgaatcgtagtcggcctcccgcccgccccggcaattgttgttgctgctgcgcgcagggcggttctggattgcggtctgccccacccacgaacaatccatggctccatctccgcctcggcgtgctgcgctcctcctcgccacggtgcttctgctggcggcggccgggtccacccccggcgccacggctgctggcatcttccaggtgcgccgcaagttcaccgccggggtgggagggggtgctggcgccaacatcagcgcccttcgcgcccacgatggcacccgtcacggccgcctcctcgcagccgccgacctccctcttggcggcctcggcctccccactgacactggcctctattacacggagatcaagctcgggacgccacccaagcactactacgtccaggtcgacaccggcagcgacatcctctgggtcaactgcatcacctgcgagcaatgcccccacaagagcgggctcgggttagacttgacgctttacgaccccaaggcatcctcgaccgggagcatggtgatgtgcgatcaggcattctgtgcagccacctttggcggaaagctgccgaagtgcggcgccaatgtgccctgcgaatatagtgtcacctacggtgatggtagctcgacgataggttcctttgtcaccgatgcgctgcagtttgatcaggtgactagggatgggcagacacagccggctaatgccagcgtcattttcgggtgcggtgctcaacaaggtggggatttgggaagttcaaaccaagcccttgacggaattcttggttttggtgaggcaaatacatcaatgctatcacaactaactaccgctggtaaagtgaagaagatatttgcccattgtttggataccataaaaggaggtggaattttttctattggggatgtggtgcagccaaaagtaaaaacaacgccattggtagccgacaagccacactacaatgtgaaccttaagacaatcgatgttggtggcactactctacaactcccagctcatatttttgaaccaggagaaaaaaagggtaccataatcgacagtggtaccaccttgacataccttccagaattggttttcaaagaagtaatgctcgcggtatttaacaagcatcaggatataaccttccatgatgttcaaggttttttgtgtttccaatatcctggaagtgtagatgatggattcccaaccatcacattccattttgaggatgatcttgcactacatgtgtatccccatgagtactttttcgcaaatgggaatgacgtatactgcgtgggattccaaaatggtgcatcacagtcaaaggatggaaaggacattgtgcttatgggagatcttgtcctttccaacaagttggttatctatgacttggaaaatcgagtcattgggtggactgactacaactgttcgtcgagcattaaaattaaggacgacaaaacgggcgcaacatctactgttaattcacatgacttgtcctcaggatggaagttccactggcacatgtccccggttctattgttggtaacaacggtgtgcagttatttaatatgctaactccactgtacaggaaatccatctggttcgtatatcctttccacgaaaaggatcggagagatgtagggctatctttaggttgtgttctccgaccacggaaaacaatggaaatagaaaaatactgtaatgctatactgagccattgtttgactagggtaatgccgaggtgaccgcacgtgagttcagtttcccgtttaaaaaatatgcatgtacagcagcaatgtatatggccaaataagaatttcttttgtttgcagtacagcaatgttctgtcatttctttgggaaaacaa

SEQ ID NO: 124321 - DNA, 849 bp, Zea Mays
ctccctgacgcccttaccctcacaagtcgcagccaggtctctctgtccgccgaagtcctccctcgtcgcgagagacgagtcgcgttcctgttcgccgcccccgccgcccatctcccaatccggactcaggagatcgactcctcctctcggttgaggttgaaggggaaggaactagaaggctactcaagggatggctgaggatgcttctcacggggccagcagctcgactgtgatacctgctgatggtccagagtctaccatcgagatcaacatcaagaccctggattcacaagtccacaaacttcgcgtggataagaatgcgcctgtttccgttctaaaagagaaggttgttgaagcgactggagttccattggatcagcagcgcttgatttttcgaggaagagtcttgaaggatgaccacctcctatcagaataccatttggaggatgggtatacattgcatctggttgctcggcgtgcagcagaggcccagacttcttctggggcttctgaaggaaacacaaatgctaatgtaaacgttactggaaatggaggattgttggatgatatttccaggagtgttcgggatcttctgggttccttaggtgttgcaatgtctggtggtgtcactaacacggcattttcggttcctttgactagcacaccagaagggcccaataatgtgcctggaagaactcagccaatgaacccagcacaacctggattctcagttctaaatcatcaaatacaagtaacacaacttcatccgccaggagctattcctcgcaatatgattattccagattctttgacaactctttcggagtacatggatcgcattgacagagt

SEQ ID NO: 124322 - DNA, 673 bp, Zea Mays
ctgagggaccattctgtggtgtagtggctggtgttgatgaactcagaacatcagctctgttgtctgtagtcaggtgaaatccctgatctgctgcactttgtgtagataaagaaacctggcttggtgcatttgccaatgcattggctacctgtgccgctataagaggaacaccagaaacaccaccaacagaagcttgtggaatagcagatgttgaatttccttgagctccattgcccactgctgtttgagaaccttgagaggactgattaggcactacaacttgacccctcacttgaacaggtaggataacactaaagatatggtttggagcctcgcctgaggaccgtgctggaacagcagcaacaactgttctggttggcaatccacgtgttgcagccaggaaacctggtgggttacctccttgagttcttgccgcatcttggcggttcccgtggatagctccttcagaaccggtggtagtaccagcagctgaaccacttgttgcagatgcacctaagttagggaatgagaaaagaaatatcagttacaggaaaccagctaaacacaaaggatcaacaataccaaaagcaccagaaattccacccagaactggtatattagatacaccaaaaggaggggtgttttgaaaagatggctgcacaaaaaaatgtgt

SEQ ID NO: 124323 - DNA, 294 bp, Zea Mays
catacaagtggcattgttttggcctccaaacggccgatgctgaagatgacctggattaaagttattctagattttttttgttgcaccattgctattcacagcgcctgtatgagggccttgttgtggcgaagcctgctgaaattttgcgactatgtaactcgtctgtgcttgtattgtggtgcacttggaatgatgtgaatgttatagcaaatctgggaaatgtggtcacattttgagctggcgagctgtggcatggtcaatccgaagctgggtatcagcattggcgtttttcac

SEQ ID NO: 124324 - DNA, 2740 bp, Zea Mays
acgcacatccactatccccggaccccgggccagtctcacctccttccctcgatcgcacgccactcccgtaggaatcccgaatccccccacccaaattcccgtctagccgtctacccgatcgccgtccttctcgctgcccgtaaaccctagcccagccctctacccccgccgtcgttgcccgtgcgctgtcgtgctcgggctgcccccgcggcgccgcgagccaaaccctagctgcctcctccagatcccgattccgcagggaagccggagaggtgagggccgccccgccgcagatggagcccgcgggggcgcgcaaggagtggcgcgccgtccccgactcctcgctccgctccaatggcgccgaggatgccgcggagcatgggaagctggggcagtcggaggaacgagctatctacgaggaaggggcgggtggactgggcgacttctgtaccatcactattgatgggagcggagggctcagcgaggacatcctgcagcagcgcctgcaaagtgtcgcacggcagcgggaggagctgcagcaagtcgagatcgagttgcgtgcgcaggccattgcacacccgcagatcatcgaggcgcaacaaagcttccaggctgctgccaaggagcatgctgcagctgtggcaaagatcaaggagcaattgcatgagcgggagcagtacattcttgaattagaaatgaaactcaatgacaaggatagagaactaaatgctctgaagattgatcatcaaacggtgtgggcaaatcaagatcttctcagagaacagaccaaagagctggcaagtgtcagaagggaacgtgacaactctgaagctgaaagagcccaacatcttaaacaaatccacgatctccaggaacttttgcgagaaaaagaaagccagttcattgcaatagaggaacagcatagggctgctcaagagaacattctttacaaagatgagcagttgagggaagcccatgcttgggtttctcaagttcgagaaatggatgcattgcagtctcagtccctacaagttgagttacgtgagcgcatggagcaatttaatcaatattggattagttctcaacaacagtatgctgaaatgcagcggagccttctccatacaatacaacaactccagcaagaattagctgaggcaagggaacggtctggtgcacaaaaggatggcccacatgtttctagggagggatcagctgaatcatcacttgttcaaagcatagcgaacagcgtgacttcaaatggtagtgcaactgcagatgggagccagcaactgttgaaaaacaatggaagtgtggatgtctctcttaagggcaataatgcctcagctgtacctgttccatctttattgggaataggtggtccggctgcgcatattgctgcaatgcattcttttatgattcatcctcaaggcattcctcaacctttagcatcacccaactctggcattcctcagtttggcagttttcagacacagcctatgattcaaccaaactcacattggccaaatcagcaggaagtacaaattgtctcacaaccacaagatgaaacaaactatcagacatcccaatcaggtcagactgcattgcaacaagacactattaatactgatgagctgtcccccaaggcaagtgagggtggccatccagaccatcttaatgcccaggggaaacaacagcagagccctgcaagtgcacctactgaatcaactcatgaacttactgttgttgaaacaaacatagctgaacatgtaccttatgatgaacaacaaaaaaccttaaaagaacaggattcactatcaaatataaaaagccatgttggaagagttgagcctcaagagcaaaatgctgaatccaaggttgaaagagctgcatctgacaagcaatctgaacctcaatctagacagcataaaccttcaaacttccctccaactacccagcttaacttgaaaaacagtgcaacagagaatcctaatgttgtaaatcaggttgatacaatgaaatcagttacaggtggttttggttcacagttacctcgtgtacctaaggaacctgctctcctagatgagagatctctattggcttgtattgtacgtgcagttcctgctggacctgagggtggaatcaggattagctcaactctgccaaataggcttgggaaaatgttggctcctcttcactggcatgattataagaagcaatatgggaagcttgatgattttgtggctagtcgtccagagctgtttgtgattgagggagacttcattcaccttcgtgaaggagcacagcagatcatttctgctactacagctgctgcaaaaatagctgctgctacagcatcttctgccccttactcatccttactgccttctgttgctgttactcctgtggcacaaagcactcggcaaaagaggggccctgcagttgattccagatcatcaaatgcaattctttctggaaatggcttcacagatcaatttaacatcattcagggggttagtgacgtacctgtttcaggcaaagtaagaaacaccctagataatggcttcttaggtgaagttcgaactgggcagccatctgtgctcacagctgctgcgaatggagcaagacatgacaaaggtacaaataatgtcatacagggttatggtggaaagcaacaagggaggtcaactgggatggcttacctttccagaagatgaagtagttttcactcggtacatttgat

SEQ ID NO: 124325 - DNA, 2703 bp, Zea Mays
acgcacatccactatccccggaccccgggccagtctcacctccttccctcgatcgcacgccactcccgtaggaatcccgaatccccccacccaaattcccgtctagccgtctacccgatcgccgtccttctcgctgcccgtaaaccctagcccagccctctacccccgccgtcgttgcccgtgcgctgtcgtgctcgggctgcccccgcggcgccgcgagccaaaccctagctgcctcctccagatcccgattccgcagggaagccggagaggtgagggccgccccgccgcagatggagcccgcgggggcgcgcaaggagtggcgcgccgtccccgactcctcgctccgctccaatggcgccgaggatgccgcggagcatgggaagctggggcagtcggaggaacgagctatctacgaggaaggggcgggtggactgggcgacttctgtaccatcactattgatgggagcggagggctcagcgaggacatcctgcagcagcgcctgcaaagtgtcgcacggcagcgggaggagctgcagcaagtcgagatcgagttgcgtgcgcaggccattgcacacccgcagatcatcgaggcgcaacaaagcttccaggctgctgccaaggagcatgctgcagctgtggcaaagatcaaggagcaattgcatgagcgggagcagtacattcttgaattagaaatgaaactcaatgacaaggatagagaactaaatgctctgaagattgatcatcaaacggtgtgggcaaatcaagatcttctcagagaacagaccaaagagctggcaagtgtcagaagggaacgtgacaactctgaagctgaaagagcccaacatcttaaacaaatccacgatctccaggaacttttgcgagaaaaagaaagccagttcattgcaatagaggaacagcatagggctgctcaagagaacattctttacaaagatgagcagttgagggaagcccatgcttgggtttctcaagttcgagaaatggatgcattgcagtctcagtccctacaagttgagttacgtgagcgcatggagcaatttaatcaatattggattagttctcaacaacagtatgctgaaatgcagcggagccttctccatacaatacaacaactccagcaagaattagctgaggcaagggaacggtctggtgcacaaaaggatggcccacatgtttctagggagggatcagctgaatcatcacttgttcaaagcatagcgaacagcgtgacttcaaatggtagtgcaactgcagatgggagccagcaactgttgaaaaacaatggaagtgtggatgtctctcttaagggcaataatgcctcagctgtacctgttccatctttattgggaataggtggtccggctgcgcatattgctgcaatgcattcttttatgattcatcctcaaggcattcctcaacctttagcatcacccaactctggcattcctcagtttggcagttttcagacacagcctatgattcaaccaaactcacattggccaaatcagcaggaagtacaaattgtctcacaaccacaagatgaaacaaactatcagacatcccaatcaggtcagactgcattgcaacaagacactattaatactgatgagctgtcccccaaggcaagtgagggtggccatccagaccatcttaatgcccaggggaaacaacagcagagccctgcaagtgcacctactgaatcaactcatgaacttactgttgttgaaacaaacatagctgaacatgtaccttatgatgaacaacaaaaaaccttaaaagaacaggattcactatcaaatataaaaagccatgttggaagagttgagcctcaagagcaaaatgctgaatccaaggttgaaagagctgcatctgacaagcaatctgaacctcaatctagacagcataaaccttcaaacttccctccaactacccagcttaacttgaaaaacagtgcaacagagaatcctaatgttgtaaatcaggttgatacaatgaaatcagttacaggtggttttggttcacagttacctcgtgtacctaaggaacctgctctcctagatgagagatctctattggcttgtattgtacgtgcagttcctgctggacctgagggtggaatcaggattagctcaactctgccaaataggcttgggaaaatgttggctcctcttcactggcatgattataagaagcaatatgggaagcttgatgattttgtggctagtcgtccagaggtttacttaaacttagtgatttagtcaatctgtagatactagatcttttgtgttacttgacatgctaattgctgtgcagctgtttgtgattgagggagacttcattcaccttcgtgaaggagcacagcagatcatttctgctactacagctgctgcaaaaatagctgctgctacagcatcttctgccccttactcatccttactgccttctgttgctgttactcctgtggcacaaagcactcggcaaaagaggggccctgcagttgattccagatcatcaaatgcaattctttctggaaatggcttcacagatcaatttaacatcattcagggggttagtgacgtacctgtttcaggcaaagtaagaaacaccctagataatggcttcttaggtgaagttcgaactgggcagccatctgtgctcacagctgctgcgaatggagcaaga

SEQ ID NO: 124326 - DNA, 447 bp, Zea Mays
gagccaaggaacacgaagcagcaacacacatcgcggcggcgtagcaattgaaggaacacgacggaatgtaatccagccggcgggctcgttacctgggcggcgttgatggcggcgttgagcagcgtcgggacggcgcggcggccgacgcggacgtccgcctccacgcatccgaaggaagctgcggttgtcgtcgtgggtgagcggcggcggcggctgctgcgtccttccggccgtcgcggccgcgtgccagtcctcgtcttcgctgccggtgagctccacggtagccggcgtcgtcggctgccccatcgtctcctccatcatcagcggcgccgcgcggaccggttgatgagcgcgcgtacaaacaaactagttgctagcactacgatcgacctggtgctagctgtcctaatggaggacggtcggcacggcatatatgtatatatgtca

SEQ ID NO: 124327 - DNA, 1030 bp, Zea Mays
gctgtcaagattcaaaaactgaaacaatgacaaacaacacagttccattttctgaatcttaataattacactgtttgcgctccccttggatctactcgtattcctttacatgattagttactactaattcatttctctcctagaaatttatgcacacttttgcaacaagacctttcttcccagcccttttctacagttttgttaggaagtggttgctgcctgaccctagtcgtgtattgcagccatcgcacggcaaattggccagcggcggcggcaggtggtggtgtgagcctgcgaggcttcctacctgcgctggaagtttaggtgcttgatggcgaggaagaagagaaagacgaagaggccaatgatggcaagatggaggcaggtcaccagcacaaagtagcgatcctgcaggcccaggtacccctctaggaactcacgcaccgtctgctccccgagccccggcaccaggatctgctccgtcctgtctgcgagctgtgagaacattagcccataaaccgtccatgccgccggatccgcccagtacacccaccgccaccacacaggcatcatctgcagcaaatttactcaactcgtcagccgattcagatggggggttacctctctcacgattatgaagccagagaagacgttccaaaagataaagatgaggaacgacagccccatggcgatctcgatgttgggggtcagggccaccgtcatcatcccgtatagagtgtagtacatgaagctcatcacctggtataggaagaaccagaagaatttgctcgctgtcacctggaacccaatcattgggtacacgattgatgagaagatcatcacttgcaccaacatgtaaggtgaacggggacgtccaatatccccagcgcaaccatggttggagatcatctgtttcagtttgcagaattggttaacaacttgttgcacaaacttttagtaaagattgtatgtcttgtactcatgcatgtttcatggtgtatgctaagctacattcatctaaccttttgat

SEQ ID NO: 124328 - DNA, 1034 bp, Zea Mays
gctgtcaagattcaaaaactgaaacaatgacaaacaacacagttccattttctgaatcttaataattacactgtttgcgctccccttggatctactcgtattcctttacatgattagttactactaattcatttctctcctagaaatttatgcacacttttgcaacaagacctttcttcccagcccttttctacagttttgttaggaagtggttgctgcctgaccctagtcgtgtattgcagccatcgcacggcaaattggccagcggcggcggcaggtggtggtgtgagcctgcgaggcttcctacctgcgctggaagtttaggtgcttgatggcgaggaagaagagaaagacgaagaggccaatgatggcaagatggaggcaggtcaccagcacaaagtagcgatcctgcaggcccaggtacccctctaggaactcacgcaccgtctgctccccgagccccggcaccaggatctgctccgtcctgtctgcgagctgtgagaacattagcccataaaccgtccatgccgccggatccgcccagtacacccaccgccaccacacaggcatcatctgcagcaaatttactcaactcgtcagccgattcagatggggggttacctctctcacgattatgaagccagagaagacgttccaaaagataaagatgaggaacgacagccccatggcgatctcgatgttgggggtcagggccaccgtcatcatcccgtatagagtgtagtacatgaagctcatcacctggtataggaagaaccagaagaatttgctcgctgtcacctggaacccaatcattgggtacacgattgatgagaagatcatcacttgcaccaacatgtaaggtaattccaccgacacctgcaacacgtaaaccttcggttcataatctgtgccaagcctgttctggtgatcagaacaactggattttcttaggacaggttgattgttgatgtgttatgttacctgagcgatagcgtatgccatggtggagtacatgcctgccgccttttcacggt

SEQ ID NO: 124329 - DNA, 1788 bp, Zea Mays
cccttagttgtatcctctcctcctccttggacctcccatcttccttcctcttcgttcgtttctccaaccgaagcttaccggcattcgctcctggttttccggccaagaaccgatttttttccggttccggcgtagcagcaggcagctagcttgccaccagctgattcattgcctctactagtgtttttcctgagctcggtggggtgatcggtcgatcggccgccgctcgagacacgtacgtacgtacgtacccgatcgagggtcgctccaagatgatgatgagcgggaaccggaagcagagggtggcattgtcgccggtgaaggaggccgccgcggtgcccaaggaggaggtgtgggaggtccggcccggcgggatgctggtgcagaagcggagccccgacgcggacccgccgcctgtgcccaccatccgcgtcaaggtcaagttcaacggcgtctaccacgagatctacatcaattcccaggcatccttcggcgagctgaagaagctggtgtcggagaagacgggcctgcacccggacgaccagaaggtggtgtacaaggacaaggagagggactccaaggcgttcctggacatggccggcgtcaaggaccggtccaagatggtgatgctggaggaccccgccgccaaggccaagcgcctcctggaggagcgccggaccagcaaggccgagcgcgccgccaaggccatcgcccgcgtcgccctcgacgtcgacaagctcgccaccaaggtgcgtgttcatccgtccgtcgtcgccaccagatcgaccagcaggccgcgttggctgatgggtcggttggtcactctgtctggtctgtctctcgatcggcaggtgtcggcgctggagacggtcgcgagcaagggcggcaaggtcgtggacgcggacgtggcgacgctgacggaggcgctgatgcgcgagctggtggagctggactccatcgccgccgacggggacgccaaggcgcagcggcgggcgcaggagaggcgtgtgcagaggcacgtggagacgctggacgccatccgcgccaagaacaaggcggcggcgcccagcagcaacaggacacggcggccagcgcacctcccgccgcgcccgcagaaccagcagcggcggcagttccagccgccggcgcccaccacggcgacggcgccggcgccgcagacccagacggcggcgagctgggactcgttcgacctcctgtcgtcggtgccgccgtcgacgtcggcggcggccccagtgacgagcaccaccacgccgtccccgcggttggagtgggagctcttctagagggctccaggcgccagcctgcctgtctgggccgtgggcccctggccccctctcctcccgccacatgtgtgcttgtccatcggctcggctcggctgggccggtaccttggccatggtgtgcatgtttgtcaatcgccattctttgctttcccgtcccttttgttctttcgttctttcttttttttcctcatgtcctttttattaagtatattgtgcatgatctccatgcatccactaaaaaaggggcaacaactgcagtagctagctagtagtagtgaacacaacagaagcgtgcgtccatggtgtctgtcgtcgtctgcaaataagtggtgtggccttgttgcaaccgtaccgatgatgatgaaggatttttttttttggccatgaccgtccgtccataatacgtgtatgtatagtagttgcagaaagtcgatcagtcagtgtatatatagtgtacatgaatcaaacaaacaaagctctcaac

SEQ ID NO: 124330 - DNA, 1586 bp, Zea Mays
cccttagttgtatcctctcctcctccttggacctcccatcttccttcctcttcgttcgtttctccaaccgaagcttaccggcattcgctcctggttttccggccaagaaccgatttttttccggttccggcgtagcagcaggcagctagcttgccaccagctgattcattgcctctactagtgtttttcctgagctcggtggggtgatcggtcgatcggccgccgctcgagacacgtacgtacgtacgtacccgatcgagggtcgctccaagatgatgatgagcgggaaccggaagcagagggtggcattgtcgccggtgaaggaggccgccgcggtgcccaaggaggaggtgtgggaggtccggcccggcgggatgctggtgcagaagcggagccccgacgcggacccgccgcctgtgcccaccatccgcgtcaaggtcaagttcaacggcgtctaccacgagatctacatcaattcccaggcatccttcggcgagctgaagaagctggtgtcggagaagacgggcctgcacccggacgaccagaaggtggtgtacaaggacaaggagagggactccaaggcgttcctggacatggccggcgtcaaggaccggtccaagatggtgatgctggaggaccccgccgccaaggccaagcgcctcctggaggagcgccggaccagcaaggccgagcgcgccgccaaggccatcgcccgcgtcgccctcgacgtcgacaagctcgccaccaaggtgtcggcgctggagacggtcgcgagcaagggcggcaaggtcgtggacgcggacgtggcgacgctgacggaggcgctgatgcgcgagctggtggagctggactccatcgccgccgacggggacgccaaggcgcagcggcgggcgcaggagaggcgtgtgcagaggcacgtggagacgctggacgccatccgcgccaagaacaaggcggcggcgcccagcagcaacaggacacggcggccagcgcacctcccgccgcgcccgcagaaccagcagcggcggcagttccagccgccggcgcccaccacggcgacggcgccggcgccgcagacccagacggcggcgagctgggactcgttcgacctcctgtcgtcggtgccgccgtcgacgtcggcggcggccccagtgacgagcaccaccacgccgtccccgcggttggagtgggagctcttctagagggctccaggcgccagcctgcctgtctgggccgtgggcccctggccccctctcctcccgccacatgtgtgcttgtccatcggctcggctcggctgggccggtaccttggccatggtgtgcatgtttgtcaatcgccattctttgctttcccgtcccttttgttctttcgttctttcttttttttcctcatgtcctttttattaagtatattgtgcatgatctccatgcatccactaaaaaaggggcaacaactgcagtagctagctagtagtagtgaacacaacagaagcgtgcgtccatggtgtctgtcgtcgtctgcaaataagtggtgtggccttgttgcaaccgtaccgatgatgatgaaggatttttttttttggcca

SEQ ID NO: 124331 - DNA, 4274 bp, Zea Mays
cgattttaggcagagaaatatatcgaacaactacttcccctccctatcagatctccttcttcctctagaatctcccttctcctactctcgtcattcctagattatgttgcttggagcggacgctcacaaattgatatcggagacactgatctaagcgctagcacacacctactacacgcgtcgcgcgaaggaatccggatccatggagcccaacctgaagatggcgatcgaggaacaatccaagcttcttcgcgacatctgtgaccacctctttgctcaggagacgcgttggtgcacgctcgagacaaccgtcgcgtggaacaccgcgtcaccgcaacatctggaagccaacatcgccatcgagagtctgacatcgatccacgtggaactcgacgcccaggtcaccgcagcgatcgagcgcctcgatgaagtcgaggccgctttcgtaatgcgcctcggtgccctcgtgtcggcttacgcggccttcgagtcgtggcggcccgacgtggaggcttcggtcgacgagatccacacctccgtgcatcttctgcgtgacgaggtgtccaagtgggctgcccaagcgccgccgccacagctcgataccgccgcgggtattctcggcccgtaccagtcggtggcggagcgctcgcctgctgccgcgtacaacaccgacagcccagatgggaattgcttcgacaaaaatcgctgggggcatggttttgggcatctccttgcccaaaaccatctcccgatcaatgccagcaagactccatctcgtggtccttttccgctacctccaccgcccaagtctgctcctggcaagctagtggactctaaagccctagaacatcttgatgcaccagttatggcggattgtctctactccgtctatgctttttgtaaggcctagggcctctgctacaaatgtggattgtcatatttccgaggccatcaatgtccggatactgttccgcttcacttggtagaagaattatggcatcagtttcaacctccatctaaagataatcaatcagtgttggggatcaaagccgagctcagggtgctccatctatgtcagtcggttgtaaccactggagcaaacctgaaaaccatgagatttgtcagctagctagcaagattttcattgctcatttttattagaatcgggtggttcagtttcctttgtcagctccaccataacaaggcactgtccaaatattgttccactctcgactcctttatggatccaagtagcgaatggtgctagtgtgtcttgtgtttcagaggtgctcacagctgattagtctattcaaggataccatttcacctctgacctcaagatattggatctcccaacctatgatatgattgtggggatggattggttgtctacacatagtcctatggtcgtgcattgggcagataagtggctatctctatcaactagtggcatttcagttaagctttttggcgtgcaggcatcacaaacacacggtgctctggtgtagctatgtagcctggataccttgcccgcatctgaacaagaactagtcaaagagcttcccacagatcttcaactgttattggacaagtactcatcagtgttttagttacctactagtcttcctcctgtcagggactgtgatcaccagatccctctgctacccggagctaatcctatgcaaatgtgtccgtatagatatgctccttctttcaaatctgagattgagaaataggtgaatgagatgttggattctgacataatccagcatagcaaaagtcccttcgcatcatcggtaattttggtaaaaaagaaggatgggactcatcggttttgtgtggattatcgccatctaaatgccatcatggctaaggccaagtttcatgtacccataattgatgagtttcttgatgaactccatggggcagcatggttctccactttggatctccgcgctaggtttcatcagatcagaatggcacctcctgatctgtacaaaacaacgttccaaacgtaccatgggcattttgagtttcgttttatggcatttggtctcacgggggcactggctacatttcaaggagcaatgaactgcaccctgaagccattattgcggcagcgcgccctggtattctttgatgacatcctgatatacactgacacttggaaacatcatctaaaacatttggaacatgtgttgcagttattgcttcaagaccactggcaagtcaagcttactaagtgcacatttgcaaaacaagaaatagcttacttggaccatattattagtaaagttggcgtggccactggtccggccaaagtggaggcagttgtatcctggcctacaccaactaactctaaggagttgcgaggttttcttgggttgacaggttattaccgcaaattcgttcaaaacttcggtgtcattgccaagccccttactgctctcctgaagaagcatgttgtgtttttttatgaacatcggatcatgctactgcttttgccttgttgaaatcagcctttgtcttcagcacccgtgttgggcctcctagattttaccaaacaatttgccattgaaacaaatgcttctagagcaggtgtgggggcagtcctgctacaaaacaaccatcctctcgcttacgtaagcaagcctttgggtgtcaagaatatgggtctttctgcttatgaaaaggagaacctcgccatcttgcttgcagtgaatcactggagatcatacttgcagcatggaacattcctcatcttcacgaatcagtgaagcttaactcatctcaatgaacagcgtctgaagactccttggcagtagtgtgtcttcactaaattgttgggactccaataccaggtggtatacaagcagggatcggccaacagggctgtggatgccctctctcggtgtcctcattcgcctctttcactcaatgcaatatcagtgggcactcttcaatggctatcgaatgtggtggtaggatatcatcaagattctcacgccttaaactgttggcagatctgtctaattcctctacaacagatggtccttacaagttgtaggaaggcattattcggtacaaaggccgcatttggattgtccacaatcccacactacaacaacagataatcttctcattgcacgacagttcggttggccactctggttttccagtaacgtacagtcgcctgaaacatctgtttgcctagccagcaatgaagtatgttgtccgacaatacgtctactcctgtgacatctgctcgcgtgccaaatcggatagatctcagtaccctaggttgttacagctgttgcaagttccttcacatgcttggcaggtgttgtctttggatttcatcgaaggcctccccaaatctggcaagtttgactgcattgtcatcgtggtggataaattttcgaaatttgcccatttcattgtcctcgctcatccttttactgcctacaagatagctcaggtgttcttggacagtatctaccgcttacatggtatgcactcggctattatctcggatcgcgatcggatattcacaagtgccttttggcaaggcttgttcaagctttcaggaactgagttacgcatgagcacatcttaccattcgcaaacagatggccagatggccagacagagcgagtaaatcaatgccttgaaaccttcttgcgttgttttgtcagttctcaaccgagccaatggagcaagtggctgcctcttgcagagtattggtacaactcctcattcaattcctccttgggtaaatctccgtttgaggtgttgtatggctatcatccacaccacctgggtatatctacagtagatgcaattcccttgtcagacttgcaatcatggttatagcagagggagcttatgacccatgatgtccgtcatcatctgctatgtgcacagcaacgtatgaagcctcaagcggacaaacgcctatcggaacgtgtctttgctgtcggcgacatggtgtatcttaagcttcagccttatatccagaattcagtggctactcgcgccaaccataagctctcctacatatattttggtccttacaaggtactccaacgtgtcggcagtgtggcatacaggctgcagttaccatcatctccgtcaatccatcccgtattccatgtgtcccagctgaagcccagtgtcaaatcttctattctggtcagcacttctttaccttatacatgtgctcgaccgacgatccttttcttggggcggccacaacgtcgaccaataagttcgag

SEQ ID NO: 124332 - DNA, 708 bp, Zea Mays
atggagcccaacctgaagatggcgatcgaggaacaatccaagcttcttcgcgacatctgtgaccacctctttgctcaggagacgcgttggtgcacgctcgagacaaccgtcgcgtggaacaccgcgtcaccgcaacatctggaagccaacatcgccatcgagagtctgacatcgatccacgtggaactcgacgcccaggtcaccgcagcgatcgagcgcctcgatgaagtcgaggccgctttcgtaatgcgcctcggtgccctcgtgtcggcttacgcggccttcgagtcgtggcggcccgacgtggaggcttcggtcgacgagatccacacctccgtgcatcttctgcgtgacgaggtgtccaagtgggctgcccaagcgccgccgccacagctcgataccgccgcgggtattctcggcccgtaccagtcggtggcggagcgctcgcctgctgccgcgtacaacaccgacagcccagatgggaattgcttcgacaaaaatcgctgggggcatggttttgggcatctccttgcccaaaaccatctcccgatcaatgccagcaagactccatctcgtggtccttttccgctacctccaccgcccaagtctgctcctggcaagctagtggactctaaagccctagaacatcttgatgcaccagttatggcggattgtctctactccgtctatgctttttgtaaggcctag

SEQ ID NO: 124333 - DNA, 5493 bp, Zea Mays
aaaatcgctcttttgtcccacatcaaagcacaagtctaaggcttaaccccggtcgcgatcgttctcacatgggcttcgatgccactgtgtatgggtggagcagtggttcaggggttttctcgacctatgtgagaaggtcttcttaatacaatactcgggggctctcttaccctcacaggtcgagttttttaagccaactaaactttggctcctattttttattttactgtagtatattgaaaaggtaaaaatatatctgatgtatctttcgaaacaaatctacttgtatcatttccaaacattcaaacccaacacgactgtttgtaatcaaggtttgtaaatgactacttaagacagccacaaaacttcacttatctatgactggagaggcctccactcactaaaagatgatggtttagacagtagagcgaaacttgtactatgcttgttttacttatctgaaacgacatcgtttaatgaatggaggtagtagttgtttggtatactctctccttacgttttggcttttctagattcatagcaattgctaagcacttagatatactctgtctagatatatagtaaaggcaatgtatctaaaaaagataaaatgtcttgtaatttgaaacaaaacggagtagtttgcaacaacgcataggtcgaggctactatggtccgtggataccacgttacctagtacagactgcagagtgagatgtaagctttagtgtagttgtcctttatgattgaaacttacccaactaccagcaagaggagtgcagcaacccacaagacatactggtacgatttgtactttggaggttgattagtctgaggtagctcgctgcgttccatccaaccaaattgaggtcttgccagcagcacagatccaataagaaatccagaagcaaatccaccaaggtgagcaaaattatcagcatgaggtaatatcccaatggccagattaattacaattataaaaagtagagttatgattgccgctgcctgcaggaacgaattgactgaaacttagccaaaaaaacagagagaaaaactagagcaaaacagtacacacataatacgctttctgctgaccttgttggaatagatagtccagttcataataagctctgaaagcatagatccaaggaggccaaacaaagccccagaggcaccaacagagatgtagttactgtgtaagaaaagtgcagacaacacactgcccccaaagccagatatcaagtagatgacaccagtgcgcacttgcaagtcagaaaactgaagtgagttgacagacacagactactgccaaaaccagatgccagagcccagaggcattgacgaaggtaaacatagcatacttccaaatccatgatggaataaaaagaaagtgaggccccaaataacatgtgaaacatgattacgccatagatgaataccaaccagcaaattcatacttagattgatgaaggaaatggtttttctttgcaatcctaacaaaatggtgcatatagaaaactaagtagttgcaacacaaaggcaaagcctgaaaagaaacctaaatgactagttaattcagatttacttcagctttccataagctccaagacataaccggctcataatatttcaatgcttatgacatgaagtacatcttccaggcagagattgatgttgataacaatggatagtcaagtatccaatcaaggtaggtgcaaaactgggaaacataaataatgtggtgatggcagagtgaaccaacaagcccatgtaagaagcttaccaaacccaaattgttgctcaaggcggattccaatgaagagcaagcttagcatgttgacaaccaagtgaactaggccagcatggagccagatacagctaatgaggcgccacccttggtgctcatgaactactttggcccagttgagagctcccatcttctccaagctgcacaaatattggaacttaagcagaacatcggtgtgctttagtataggacaatgtgaagcgaatgttgaatgcggacccggtttgatactggtatctaaaaactgtcccacgtaatggaacaacaagaacagacaaattcgtctattcagccagatttttaaaatccacgagtaagggcataatgggtaccttgcatgattttggcaccttgcatgatgggagtcatgaggtaacagtaggaatacaaatccacgaggaatttggcaaaatgggtcgctctaggttgccgctctgcaaaacacaccgcttctagatgtactcgtaaaaacgggtcgctcaagtctgctcgcttgccagaaggggtcacagatacttttgggtcacctggcaagtgggcccgcgaaggcttgttcccattatgcccttacgccgttctcaagtctgtttcccttcctcttcttctctggacgctgaggactccttctctgtcttcgcacgcagcttcctcctcctcctctatccaagcggcggtcgtcggagacgaacctgggaacggcgattaggcacgtcgtccactagtcccctcgcatggatgtcgaagagcactgaaatcgcagataaagcaatcatcttgatgcaggatcatgccaagcatatctatcatatatgcaatgagaagctaatattgggtaaagggttgacttcatttgaggttaaagaacttcgtgaagcacttgaattcgccgccgaaggattggaccaggactcccttttttgccaagaggaattggatgcaactgttaaagaggaacaattggagcatgacgagaaggtggctttacagaggattgaaagcccactaccttctcctgattcggactgcttcctatcccttgaagagcacattgagaagttttggggcgttgattatcaactcagaccagatgcctagctactccgactaggttgagtttatggtgttgtgaaattctggatgtttgggtgtaatggtatgtttggatgtgtatgtgaactgaaattctggatgtaatggtgaactgactgaatggtgtcttgtgtaatggtatgtttggatgtctatgtgaactctagttctgggtttaatggtgaactgaaattcagtgttcattgttcagtatacatccaaacgcaaccgggtacatccaattgtgtccatctaacgctgttgcagctgctaggtgaccatttcatctaccattgagtgcagttgaatccacactaaggtaaggcctacacgcagcacgaaacccttctatacaaggctcaagtgcacagaaaaatctatggaagtagaccttttcatctaccacttgggtgtctatctccaccacactatgaggggcttttatcaagacttctttcttccacctgtacaacatactgaaactatcatcccaattgccatacatctcttttagagcttcttgcattcctttccatgtcacatcataactgaccctacaattgtaagtgtcttgtaacctcttttgcaaagccttagcaccaagtgaaggctcatttcttagtaaaggcaaggccttctgtgctacccatgcttgattggcattcccataactaatccggctgcttgaagcatatttatgctcatgcactaggacggtaacgtacaaaacaaaataaagatgtaagtaaaaccaacttttgtgaacaaaattatacaattggagagaaacagaagaaaggttagtaccataacactagaatccggccttgtagaaccattcagtttccaagggcatgtgcaatcattccctttgcagtacactctatatctatttctatctgactttgttatgccaagctcaaactcctcatttatagcatattgcctcacagctagcctaaactctttcatcgatggatagagagtacccaacttcatatcagggtggtcaatatcgtgcaatatattgaccatttctgcattttcatcatcaactggcatggcagcatctagatcacttggatcaaaactattactttctgatgtaaaatgagatgcaaagttgcttggttccgggtgggttcaattcatctcgtcatcctcatctccaagtcccaagaacgcatacatctcatcctcgtcacagattctaaacatatcactcgtctccccattatccttattttcagcattctcaataataaagctactccagtcaatggacatggtgtcatcatcattaccatccatgatgcgagcacggaattgtcaccacctatttctattgttagcacaaattattacacacaattatcaaacatatcctcactgaaaatatggtgttgccgcggcggtgatagaccttgggcgccgccataattgaggggcaccgcgacgccgcaacagaggggaggggaaaggttacctgaaaagtggagggagtggtagacgtcgtcgtcaccggatatcacaggattggacgaccactggatccacccgctcgcgtccgtcgcacatccgcctgtgaaggaaaatgttacagagggttgggggaagttaggggaaagcttacagaggaggggactggtggacgtcgtcaccgtcgccgttcccaggttcgtctccgacgaccgccgcttggacagaggaggaggaagctgcgtgcgaagacagagaaggagtcctcggcgtccagagaagaggaagggaaacagacggcatgcgattataccgtaagggcataatcgggacaagccttcgcgggcccacttgccaggtgccccaaaagtatccgtgaccccttctgacgagcgatcagacttgagcgacccgtttttacgagtacagctagaagcggtgtgttttacagagcggcaagctagagcgacccattttgccaaatttctctccatcgattcattcttgaattgcacttgcgtaggtggcacttgaaaagcctctatctacgagtacgagtacagactacagacaccacacccacacggccacacccagaccaccgtgcgctgcggggaagagagcaaaattgtctctccatctctcttatttcctttttagctttataaaataatgaaacggcattacaacatttatgtcaagtttcgtaatggtattcaagcgaaacccgttcgattaatggtaaagtgttgaaacccagttttaataatagcataattccagatttctattcattcgagcagtaagaaaacatggacaattagcttaacagcatagtagaggaaatctaaaatttagcacagaaattttattggttgtcagcaaaaaaaccttcatgcccgtgttgatgccccggcggcgcgcctcggcctcgagcaacgggcagcggatgaggttacttccgcgtccatttttaagaaacacttcgatccgagagtgcatgcgactgatgagcatgatctcccgtcgtagcttgtcatctgtcattctcgccatctcctcctccaaatccgtcctgttgggcattaccacgtcgggtattaccacgcctacatatc

SEQ ID NO: 124334 - DNA, 767 bp, Zea Mays
ggcccgcgaaggcttgttcccattatgcccttacgccgttctcaagtctgtttcccttcctcttcttctctggacgctgaggactccttctctgtcttcgcacgcagcttcctcctcctcctctatccaagcggcggtcgtcggagacgaacctgggaacggcgattaggcacgtcgtccactagtcccctcgcatggatgtcgaagagcactgaaatcgcagataaagcaatcatcttgatgcaggatcatgccaagcatatctatcatatatgcaatgagaagctaatattgggtaaagggttgacttcatttgaggttaaagaacttcgtgaagcacttgaattcgccgccgaaggattggaccaggactcccttttttgccaagaggaattggatgcaactgttaaagaggaacaattggagcatgacgagaaggtggctttacagaggattgaaagcccactaccttctcctgattcggactgcttcctatcccttgaagagcacattgagaagttttggggcgttgattatcaactcagaccagatgcctagctactccgactaggttgagtttatggtgttgtgaaattctggatgtttgggtgtaatggtatgtttggatgtgtatgtgaactgaaattctggatgtaatggtgaactgactgaatggtgtcttgtgtaatggtatgtttggatgtctatgtgaactctagttctgggtttaatggtgaactgaaattcagtgttcattgttcagtata

SEQ ID NO: 124335 - DNA, 736 bp, Zea Mays
atggataggtaccacgaaaattgccaggtgaagttaccaaaataaaaggtcctgcaatggtattctgaaacaatagtattttttttctttcttgttagcacaaagtgtgaataaccagctggtgctcataccatatctccagtataataagctatggactctaactgtacatcttttatcagtaaatattgctttgcaaaaacacattgaaggaggtagatgagaattaccagtctataagttcctggtttgaaagtccggctgatgtctatgaaatcaaaaagatactgcaacaattccaggaagattataagcataatcttcagcaatcagcaggattctggcaacttaaataatctcacctgaagcctgtcagatttgagaaagcgccgtcctcgacgactaccatcaggcatgcggactaccactgtgacagccccctcgtcattttgtagtggctccttaggtagtgatgcttgtttggctgcaagcttggattccaactcctaagaatcactcccaaaaataaaggtacgttagtagtggtaaaataacgaaaaccttggagaatatatatctagcatgagctcagaaggaaatcaatctgctgcattactgctcaattgctaaatgatagacatcttatactaaagcaacaatagtttaccaagactttcctgataatgactgacaaatgtactacagttctttcaaaataagtggaacattgaacaca

SEQ ID NO: 124336 - DNA, 714 bp, Zea Mays
atcctggccacacccacacagcaagccagcagagcagaaagcagccgcagccccagcccccacaagacgaggcaacaatggcgctagaagcagccaccgccccccgcgcactcctcgccgcgtgcctcgtcctgctggtcctcggcggcggcaccggcccgtcgtcggtgctgcgcggcgccggggcgcaggccggcgggcagtgcctgccgcagctgaaccgcctcctggcgtgccgcgcgtacctggtgcccggcgcgccggaccccagcgcggactgctgcagcgcgctgagcgccgtgtcgcacgagtgcgcctgcagcaccatgggcatcatcaacagcctgcccggccggtgccacctcgcccaagccaactgctccgcttgaagcagggacctggcacgcgtgctgcaatggatggcaggaggggagaggaataagaagtgtttccatttcacagtgagagcagtcgagctccaacgttgtcgtcgtcgtcgtcttcttcttttgatattcagactctgtcttgcggtctatatcatcagcataataataataaaataagtaaaaccaaaccatgcatgaccatgctatacatgttgcgagttccagcgagacggttaactataatgactgcaacaaaggattctgttcgttttgacacgtgatcacgtaagaataccgctcaggagaccaacacggatggtctaaa

SEQ ID NO: 124337 - DNA, 1601 bp, Zea Mays
gcacgagtggctggcgaggcgggtcgccctcgccatattagcgcctccctcctcctcctcctgctcctgcgcgcccctgctcgtaatcctaaccgccctggtttctctacacgctacgggaccggtaacttctagaacccaccaccttccatccttccttcctttcctctctctctctctctctcctcgcgcccacggtgcccgccagccagatccgcgcgttcaccggcgccatggccgccgagcatgccaccgccgcggtgggtgagccgcctcccgccacgtcgcagccggcggagggcgtgacggcggcggcgggccagaggtccgtgcccacgccgttcctcagcaagacgtaccagctggtggacgacccggcggtggacgacatcatctcgtggaacgacgacgggtctgccttcatcgtgtggcgcccggcggagttcgcgcgcgatctgttgcccaagtacttcaagcacaacaacttctccagcttcgtgcgccagctcaacacctacgggttcaggaagatcgtgccggacaggtgggagttcgcgaacgactgcttccgccgaggggagaagcggctgctctgcgacatacaccgccggaaggtgtcgccggccacgggggcggtcacggtggccgccgccgctgcggccatcccgatggcgctgcccgtgggctctccggtgtactccggcgaggagcaggtgctgtcaagctcgtccccggagcccccgtcgctgcagcagcacccgccggcgccgtccgggtcgggctccggcggggtggtctcgggcgacgtgggcgaggagaacgagcggttgcggcgggagaacgcgcggctggcgcgcgagctcggacagatgaagaagctctgcaacaacatcctcctcctcatgtccaagtacgccgccactcagcagccggacgccgccaaggaggcggccgccgggaactgcaccggcgagtcgtcggatgccgccgcggcgcctccgctcccttcgatcctggagctcctaccctcgtgccgcgccgaccccgcgcccgctgcagccggaacggatcacgaggatgacgaaaaggcgggcgctaggctgttcggcgtctccatcgggcggaaacgaatgcgggacgagagcgaccaccacgccggcgtctgcgcagcggaggtgaaagccgagccggtggacgcgcgtcccgaccagcagcggcagcgcaacgccacggagccgcagtcgtggcccatttaccggcccaggcctgtgtaccacccgctccgggcctgcaacggctcgggcagcgctgggagcgaccacgacgggtccaacgactcgaggtgacgggagcaatcgtcgatctgccctcagtaaattagtattacacttactaatggtactaggtaactatattacaggttaaactaggatgtgagctctaaatctctaattatgtggggatttactgaccgatcctatgtaaaaatctccagtgtttatgtagttgatctcatattactgcaagtaccgagtatcctttctgtaccataaaactagaggttaacttatgcacagtagactaatattttctttaagcca

SEQ ID NO: 124338 - DNA, 1542 bp, Zea Mays
gcacgagtggctggcgaggcgggtcgccctcgccatattagcgcctccctcctcctcctcctgctcctgcgcgcccctgctcgtaatcctaaccgccctggtttctctacacgctacgggaccggtaacttctagaacccaccaccttccatccttccttcctttcctctctctctctctctctcctcgcgcccacggtgcccgccagccagatccgcgcgttcaccggcgccatggccgccgagcatgccaccgccgcggtgggtgagccgcctcccgccacgtcgcagccggcggagggcgtgacggcggcggcgggccagaggtccgtgcccacgccgttcctcagcaagacgtaccagctggtggacgacccggcggtggacgacatcatctcgtggaacgacgacgggtctgccttcatcgtgtggcgcccggcggagttcgcgcgcgatctgttgcccaagtacttcaagcacaacaacttctccagcttcgtgcgccagctcaacacctacgtgagcgccccgtcccgttgcatccatcgtttcgtctcggggttcaggaagatcgtgccggacaggtgggagttcgcgaacgactgcttccgccgaggggagaagcggctgctctgcgacatacaccgccggaaggtgtcgccggccacgggggcggtcacggtggccgccgccgctgcggccatcccgatggcgctgcccgtgggctctccggtgtactccggcgaggagcaggtgctgtcaagctcgtccccggagcccccgtcgctgcagcagcacccgccggcgccgtccgggtcgggctccggcggggtggtctcgggcgacgtgggcgaggagaacgagcggttgcggcgggagaacgcgcggctggcgcgcgagctcggacagatgaagaagctctgcaacaacatcctcctcctcatgtccaagtacgccgccactcagcagccggacgccgccaaggaggcggccgccgggaactgcaccggcgagtcgtcggatgccgccgcggcgcctccgctcccttcgatcctggagctcctaccctcgtgccgcgccgaccccgcgcccgctgcagccggaacggatcacgaggatgacgaaaaggcgggcgctaggctgttcggcgtctccatcgggcggaaacgaatgcgggacgagagcgaccaccacgccggcgtctgcgcagcggaggtgaaagccgagccggtggacgcgcgtcccgaccagcagcggcagcgcaacgccacggagccgcagtcgtggcccatttaccggcccaggcctgtgtaccacccgctccgggcctgcaacggctcgggcagcgctgggagcgaccacgacgggtccaacgactcgaggtgacgggagcaatcgtcgatctgccctcagtaaattagtattacacttactaatggtactaggtaactatattacaggttaaactaggatgtgagctctaaatctctaattatgtggggatttactgaccgatcctatgtaaaaatctccagtgtttatg

SEQ ID NO: 124339 - DNA, 1399 bp, Zea Mays
ataagggcaggccctcgcgactgaccggaccacgacaccctcgcttcacctcctcactcgcgtcgcgcctccgcttccatgtcatttgacagcgcaacacggcgctgcagggtaaagctctcccccgctcgccggtctctgtgcccaggccagcaggacgaagaagaagccggctgggaagacccaggcctgaccgcctgagctaggggagaggaggacgacgacgacgacgatggggctgctgtctcagcgggtggagcggtcggagatggagcccggcgaccacatctacacctggcgcgccggctacacctattcccaccacgggatttacgtcggcggcagcaaggtggtgcacttcacgcggaagagggaggcgggcggcgcgggtctggactcggccatcgccgtgtccagcctcctcctctcgcggggctcggacgagtgccccaccttcccggactgcggcttccagctccccgacagcggcgtggtgctgacctgcgtggactgcttcctcggcggcggcgcgctgcaccggttcgagtacggcgtgccggccgcggcgttcctggccaaggtccgcgggggcacgtccaccacggcgcgcgccgacccgggcgacgccgccgtgcgccgcgccatgcacctcctccggcacggcttcggcgactacgacgtgttcgagaacaactgcgaggacttcgcgctctactgcaagacggggctcctgctcctccccgccgccgcggctggcggcggggtcgggatcgggaggagcgggcaggccgcggccgccctcggcgtgccgctggccgcgctcttctccaccccgttcaagctcgtggccgccggcccgctcggcatggccgccgtcaccgcgggcgtgtactgcgccggcaggtacgtcaccgacatcggggtgaggacggacgtggtgaaggtggaggtgaaggacctgtcggcgcacctcggctggcgccgcgccagggctcaggagaagaagaagaagcagcagcaggaggaggcgccggcggcggccaagagcttgcttccgctcaagcggaaacgggagacctgcgtttgattggcgtgcggttgcaaatagatttgatttcttcgtctttagttactgcatagaaattaataagcccgatatagatagatatatgtcctagcgttcttgcccgatgccccgatcgatattgttcgttgttctttgtacgtactctgtatcattctaagagtttcagttactcctacatacattcttcattactgcaacaagatagttgagaacacagttgttaattgagctgagctgtatgtctcgtactgttccacaatagaatgcgaaggcatgcatgaggtccacgacatttggtccatttctgaatta

SEQ ID NO: 124340 - DNA, 1853 bp, Zea Mays
ctcctcactcgcgtcgcgcctccgcttccatgtcatttgacagcgcaacacggcgctgcagggtaaagctctcccccgctcgccggtctctgtgcccaggccagcaggacgaagaagaagccggctgggaagacccaggcctgaccgcctgagctaggggagaggaggacgacgacgacgacgatggggctgctgtctcagcgggtggagcggtcggagatggagcccggcgaccacatctacacctggcgcgccggctacacctattcccaccacggtacggcgcactagccgctctggtcttcagtatccctcccgccccgatctcctcctcctcggcttcccaatccggccctggagttgtccattctcttgcttttaacctgtgcagtggccattgcacctgtgaatccaagagcattgcaaatgctcttgacgccggagtaataatgctgtgcccatccagccggcgtccggacagaaaccacgctgcccgtggtcacctctctcgccagctcatagtcatagctctgccctttcttatttcgttttcgttgtatgaaattgcttggactttggacatttctgcaaccgctgcttgttcatcagagtagagtactgacaatgaacttcctcacgggatcagatatcaattagaaacccattttgtttaccaaagaatccttaccgccgccgtctttactaacttggtcagctcgtcgtcactagatccggtgaccagcaaagatatgcacatgcatgcattcctcaccttttgctttgcatctccttatcagctacagcactggcctaatgacagccagcggctgcagttataaaaacaaaattactgtagaagtcgtagcagtagccgaattaaaaccgcagtgcatcccaaagcgcgtaaaagatgcatctcttccacatcatgtcactctacgcgcgctgctacaggcaccgacattttgtgcccgcacgttatggacgtccttcctccctacacacccagatcaccactgcatgacatatgtgtggggaatggcatgccggctagcacgcatgtgggagtggtagcatggatagcacttctccgcatggatggacagtgttttctcttacaccttttgtcacgatcttgccagtaaatcttctgatttggcaataataatgtcgatctgtaatcgtttcattcgtcgtttgagatccaatccaactttgtatctcaacatgcatggtcattacagcttgagtaattaagccatgacgaatgtattcattagggcctatttggaaggtgataggataaggtagcgtgccatgttcttatctgacgcgccaggtgttgcattgcatggatgatatggatccatccatgacccagggatttacgtcggcggcagcaaggtggtgcacttcacgcggaagagggaggcgggcggcgcgggtctggactcggccatcgccgtgtccagcctcctcctctcgcggggctcggacgagtgccccaccttcccggactgcggcttccagctccccgacagcggcgtggtgctgacctgcgtggactgcttcctcggcggcggcgcgctgcaccggttcgagtacggcgtgccggccgcggcgttcctggccaaggtccgcgggggcacgtccaccacggcgcgcgccgacccgggcgacgccgccgtgcgccgcgccatgcacctcctccggcacggcttcggcgactacgacgtgttcgagaacaactgcgaggacttcgcgctctactgcaagacggggctcctgctcctccccgccgccgcggctggcggcggggtcgggatcgggaggagcgggcaggccgcggccgc

SEQ ID NO: 124341 - DNA, 986 bp, Zea Mays
atccgaatccctgccccttcgcccttcccctccggccgcagccccttccctgccgctccggcctcctccgtcgggaccgccgacgacgcgccgcgcggaagcctgcggggatattgggtaagcagttgtgatcctgttctcttgctcggatgccgggttactatgacatcgatgacatcctcatggaggatgagcctatttcagttgttttccaagtaactgcaaatggtgttggcctgctagatcctggtgctgaaagtaactgtgtagagaagggcgccaaggtggacctcccattttggcttgcgcatgggctgctgtctctggaacaagctgtgtcaataaacccacctccatgcttcacacagaaaacttggaaggagatccaagctgatgcggcctgtgtggatttgagggttcgttgcccgtacttttatgagctaggatgcaagattgttcctttggtgagtgacaagagcattggcctgttcttgcgatatgcattcaccagtaggtacaaagaggttctaagtaagtcccacagttcttccatgatgacagtgcccaagttcgttccacgccttacaaaagaagaaactcgggtgtttgaatctgccagagaatcgatgactggtttcaagaaatggcgagcaggtgggatgagactgcaaaaggcttccattcttggccggaagaggaagacaaagctgcctgaatgagttttaaggtgatgtgcgctgctttgatttgctagcaccgtgagcaaagagaaaagtgaatggcagattaaatctggatgtactatgatctgctgtacattgtgcacttgtgtacagcagctctgatcagtccgtcctttgtaaggaaaatgaacaccgtcttaaatcatgatatcctgtttggagcaggtgtcatgattttcagcagggtatcttgaatgagtttgaatcatgatatcctgtcttaaatttcacatgttctcaaaa

SEQ ID NO: 124342 - DNA, 1644 bp, Zea Mays
atccgaatccctgccccttcgcccttcccctccggccgcagccccttccctgccgctccggcctcctccgtcgggaccgccgacgacgcgccgcgcggaagcctgcgggtgagcgtccagatccacccgcccccttcggcattccccgccgctccggcctcctctgccctaatccccttaatgcgtcgcctaatgagcgccttaccgccgcctgaggcgatagggcgacgccttacgcataacttaaggcgggtcgttggacgccttggttttttccggcgccttaccgcctaagcgtcgacgcttaggcgacgcctttatgttcttcttactcattgacaagacacaaattgctgctgtacaattagggatattgggtaagcagttgtgatcctgttctcttgctcggatgccgggttactatgacatcgatgacatcctcatggaggatgagcctatttcagttgttttccaagtaactgcaaatggtgttggcctgctagatcctggtgctgaaagtaactgtgtagagaagggcgccaaggtggacctcccattttggcttgcgcatgggctgctgtctctggaacaagctgtgtcaataaacccacctccatgcttcacacagaagtagtttttttcagtgtttgttattgcattacaccatacacagaaattcttggatcaacagcaaagcatgggagagcaaggagtattcttatttggaaaaacatatatggaattccctatcaacaacttaataaaaggatctgatctttttgacaccattgtggcctactgtagcttttcatagtaaatagtagcattttgcagatctttctcttataacttgatgatagaacttattaaagacatgaatctattcaaacggttctccagaatttgacttttgctgcatggcttgggttttggttctgactatgaactaaagcgtgaaatacagattctgcagtattattctcctaacaaatctgtattctgttatctccatatcatatatactgcagaacttggaaggagatccaagctgatgcggcctgtgtggatttgagggttcgttgcccgtacttttatgagctaggatgcaagattgttcctttggtgagtgacaagagcattggcctgttcttgcgatatgcattcaccagtaggtacaaagaggttctaagtaagtcccacagttcttccatgatgacagtgcccaagttcgttccacgccttacaaaagaagaaactcgggtgtttgaatctgccagagaatcgatgactggtttcaagaaatggcgagcaggtgggatgagactgcaaaaggcttccattcttggccggaagaggaagacaaagctgcctgaatgagttttaaggtgatgtgcgctgctttgatttgctagcaccgtgagcaaagagaaaagtgaatggcagattaaatctggatgtactatgatctgctgtacattgtgcacttgtgtacagcagctctgatcagtccgtcctttgtaaggaaaatgaacaccgtcttaaatcatgatatcctgtttggagcaggtgtcatgattttcagcagggtatcttgaatgagtttgaatcatgatatcctgtcttaaatttcacatgttctcaaaa

SEQ ID NO: 124343 - DNA, 1280 bp, Zea Mays
atttaacatccgaatccctgccccttcgcccttcccctccggccgcagccccttccctgccgctccggcctcctccgtcgggaccgccgacgacgcgccgcgcggaagcctgcgggtgagcgtccagatccacccgcccccttcggcattccccgccgctccagcctcctccgccgggaccgccgctccggcctcctctgccctaatccccttaatgcgtcgcctaatgagcgccttaccgccgcctgaggcgatagggcgacgccttacgcataacttaaggcgggtcgttggacgccttggttttttccggcgccttaccgcctaagcgtcgacgcttaggcgacgcctttatgttcttcttactcattgacaagacacaaattgctgctgtacaattagggatattgggtaagcagttgtgatcctgttctcttgctcggatgccgggttactatgacatcgatgacatcctcatggaggatgagcctatttcagttgttttccaagtaactgcaaatggtgttggcctgctagatcctggtgctgaaagtaactgtgtagagaagggcgccaaggtggacctcccattttggcttgcgcatgggctgctgtctctggaacaagctgtgtcaataaacccacctccatgcttcacacagaaaacttggaaggagatccaagctgatgcggcctgtgtggatttgagggttcgttgcccgtacttttatgagctaggatgcaagattgttcctttggtgagtgacaagagcattggcctgttcttgcgatatgcattcaccagtaggtacaaagaggttctaagtaagtcccacagttcttccatgatgacagtgcccaagttcgttccacgccttacaaaagaagaaactcgggtgtttgaatctgccagagaatcgatgactggtttcaagaaatggcgagcaggtgggatgagactgcaaaaggcttccattcttggccggaagaggaagacaaagctgcctgaatgagttttaaggtgatgtgcgctgctttgatttgctagcaccgtgagcaaagagaaaagtgaatggcagattaaatctggatgtactatgatctgctgtacattgtgcacttgtgtacagcagctctgatcagtccgtcctttgtaaggaaaatgaacaccgtcttaaatcatgatatcctgtttggagcaggtgtcatgattttcagcagggtatcttgaatgagtttgaatcatgatatcctgtcttaaatttcacatgttctcaaaa

SEQ ID NO: 124344 - DNA, 1090 bp, Zea Mays
atttaacatccgaatccctgccccttcgcccttcccctccggccgcagccccttccctgccgctccggcctcctccgtcgggaccgccgacgacgcgccgcgcggaagcctgcgggtgagcgtccagatccacccgcccccttcggcattccccgccgctccagcctcctccgccgggaccgccgccgacgcgccacggggaaggcctgcggggatattgggtaagcagttgtgatcctgttctcttgctcggatgccgggttactatgacatcgatgacatcctcatggaggatgagcctatttcagttgttttccaagtaactgcaaatggtgttggcctgctagatcctggtgctgaaagtaactgtgtagagaagggcgccaaggtggacctcccattttggcttgcgcatgggctgctgtctctggaacaagctgtgtcaataaacccacctccatgcttcacacagaaaacttggaaggagatccaagctgatgcggcctgtgtggatttgagggttcgttgcccgtacttttatgagctaggatgcaagattgttcctttggtgagtgacaagagcattggcctgttcttgcgatatgcattcaccagtaggtacaaagaggttctaagtaagtcccacagttcttccatgatgacagtgcccaagttcgttccacgccttacaaaagaagaaactcgggtgtttgaatctgccagagaatcgatgactggtttcaagaaatggcgagcaggtgggatgagactgcaaaaggcttccattcttggccggaagaggaagacaaagctgcctgaatgagttttaaggtgatgtgcgctgctttgatttgctagcaccgtgagcaaagagaaaagtgaatggcagattaaatctggatgtactatgatctgctgtacattgtgcacttgtgtacagcagctctgatcagtccgtcctttgtaaggaaaatgaacaccgtcttaaatcatgatatcctgtttggagcaggtgtcatgattttcagcagggtatcttgaatgagtttgaatcatgatatcctgtcttaaatttcacatgttctcaaaa

SEQ ID NO: 124345 - DNA, 1747 bp, Zea Mays
atttaacatccgaatccctgccccttcgcccttcccctccggccgcagccccttccctgccgctccggcctcctccgtcgggaccgccgacgacgcgccgcgcggaagcctgcgggtgagcgtccagatccacccgcccccttcggcattccccgccgctccagcctcctccgccgggaccgccgccgacgcgccacggggaaggcctgcgggtgagcgcccagatacagccgcccctttggccttccccgccgctccggcctcctctgccctaatccccttaatgcgtcgcctaatgagcgccttaccgccgcctgaggcgatagggcgacgccttacgcataacttaaggcgggtcgttggacgccttggttttttccggcgccttaccgcctaagcgtcgacgcttaggcgacgcctttatgttcttcttactcattgacaagacacaaattgctgctgtacaattagggatattgggtaagcagttgtgatcctgttctcttgctcggatgccgggttactatgacatcgatgacatcctcatggaggatgagcctatttcagttgttttccaagtaactgcaaatggtgttggcctgctagatcctggtgctgaaagtaactgtgtagagaagggcgccaaggtggacctcccattttggcttgcgcatgggctgctgtctctggaacaagctgtgtcaataaacccacctccatgcttcacacagaagtagtttttttcagtgtttgttattgcattacaccatacacagaaattcttggatcaacagcaaagcatgggagagcaaggagtattcttatttggaaaaacatatatggaattccctatcaacaacttaataaaaggatctgatctttttgacaccattgtggcctactgtagcttttcatagtaaatagtagcattttgcagatctttctcttataacttgatgatagaacttattaaagacatgaatctattcaaacggttctccagaatttgacttttgctgcatggcttgggttttggttctgactatgaactaaagcgtgaaatacagattctgcagtattattctcctaacaaatctgtattctgttatctccatatcatatatactgcagaacttggaaggagatccaagctgatgcggcctgtgtggatttgagggttcgttgcccgtacttttatgagctaggatgcaagattgttcctttggtgagtgacaagagcattggcctgttcttgcgatatgcattcaccagtaggtacaaagaggttctaagtaagtcccacagttcttccatgatgacagtgcccaagttcgttccacgccttacaaaagaagaaactcgggtgtttgaatctgccagagaatcgatgactggtttcaagaaatggcgagcaggtgggatgagactgcaaaaggcttccattcttggccggaagaggaagacaaagctgcctgaatgagttttaaggtgatgtgcgctgctttgatttgctagcaccgtgagcaaagagaaaagtgaatggcagattaaatctggatgtactatgatctgctgtacattgtgcacttgtgtacagcagctctgatcagtccgtcctttgtaaggaaaatgaacaccgtcttaaatcatgatatcctgtttggagcaggtgtcatgattttcagcagggtatcttgaatgagtttgaatcatgatatcctgtcttaaatttcacatgttctcaaaa

SEQ ID NO: 124346 - DNA, 1488 bp, Zea Mays
atttaacatccgaatccctgccccttcgcccttcccctccggccgcagccccttccctgccgctccggcctcctccgtcgggaccgccgacgacgcgccgcgcggaagcctgcgggtgagcgtccagatccacccgcccccttcggcattccccgccgctccagcctcctccgccgggaccgccgccgacgcgccacggggaaggcctgcggggatattgggtaagcagttgtgatcctgttctcttgctcggatgccgggttactatgacatcgatgacatcctcatggaggatgagcctatttcagttgttttccaagtaactgcaaatggtgttggcctgctagatcctggtgctgaaagtaactgtgtagagaagggcgccaaggtggacctcccattttggcttgcgcatgggctgctgtctctggaacaagctgtgtcaataaacccacctccatgcttcacacagaagtagtttttttcagtgtttgttattgcattacaccatacacagaaattcttggatcaacagcaaagcatgggagagcaaggagtattcttatttggaaaaacatatatggaattccctatcaacaacttaataaaaggatctgatctttttgacaccattgtggcctactgtagcttttcatagtaaatagtagcattttgcagatctttctcttataacttgatgatagaacttattaaagacatgaatctattcaaacggttctccagaatttgacttttgctgcatggcttgggttttggttctgactatgaactaaagcgtgaaatacagattctgcagtattattctcctaacaaatctgtattctgttatctccatatcatatatactgcagaacttggaaggagatccaagctgatgcggcctgtgtggatttgagggttcgttgcccgtacttttatgagctaggatgcaagattgttcctttggtgagtgacaagagcattggcctgttcttgcgatatgcattcaccagtaggtacaaagaggttctaagtaagtcccacagttcttccatgatgacagtgcccaagttcgttccacgccttacaaaagaagaaactcgggtgtttgaatctgccagagaatcgatgactggtttcaagaaatggcgagcaggtgggatgagactgcaaaaggcttccattcttggccggaagaggaagacaaagctgcctgaatgagttttaaggtgatgtgcgctgctttgatttgctagcaccgtgagcaaagagaaaagtgaatggcagattaaatctggatgtactatgatctgctgtacattgtgcacttgtgtacagcagctctgatcagtccgtcctttgtaaggaaaatgaacaccgtcttaaatcatgatatcctgtttggagcaggtgtcatgattttcagcagggtatcttgaatgagtttgaatcatgatatcctgtcttaaatttcacatgttctcaaaa

SEQ ID NO: 124347 - DNA, 2013 bp, Zea Mays
tgactctctattagaatagccaggggcctcgctcctctccaccacgtactccactccatccatccatcatcgtctatccatgaagagcttgcaggaggagagggcggcgttggtgccgtcgccgtggccccagcaacagagaaaggacggcggcgagcatgatccggagcagctgatggatgaggatgacggtgacgatgaggaggatctgcaggatgagcagcacacaagaacaattaggacgtcgaccaagacggcggaagcatcgtcatcagcggagcggcgggtgccggcgtggtggaggctgcggcgggcgcagaagctgctggtgcccaccagaggtgttggcctggtcatcgccggtctcctcgtgctggtcttgctcctcgtcgtcggcggcggcggcggcgccaacaccagtcgtcgtcgctggatccacctcgactatgcatcgtcgtttctgcgcggcggcggcttgaggcagcatcaatggcctcctcaccacgtcccttcacccgcagccgacctcgtgcccatacccttcagctgcggcggcaacggctcggcatgtccccgtcgtcaaaccgcaacatcacccccctctccgtcgccatcatcgtcatcgccaccagcaggcaccaagtcatcatcgtccaagaataaacaaccccctcctcagtgcccggattacttccgcttcatccactccgacctgtcgccgtggcgcgagacggggatcacgcgcgaggcggtggagcgggggcgccaccgggcggcgttccggctggtggtcgtggacggccgcgcgtacgtggagacgtaccaccgcgtgttccagacgcgtgacaccttcacgcagtggggcatcgcgcagctgctggcgcgctaccccggacgcgtcccggacctggacctcatgttcaactgcgaggacatgcccgaggtcaaggtcaagccgtcggaggagtcgtccgcgccgccgctgttccgctactgcaaggacgactccacggtggacatcgtgttcccggactggtccttctggggctggcccgaggtcaacatccgtccctgggcgccgctgctggaggagatggccgccgagatgggtcgcctgccgtgggcggaccgggagccgtacgcgtactggaagggcaaccccaccgtgtccgccgagcgcgccgacctccgccgctgcaacgactcctcgtcgtccggcggcacgcgcgtgttctggcaggactggggcgccgccatccgggacggcttccgggactccaacctggccaagcagtgccgctaccgctacaagatctacgtgcgtggccggtcctggtcggtcagcctcaagtacatcctcgcctgcgactcgccggtgctgctcatcgccacgcccttcaaggacttcttctcccggggcctcgtcgccggcaggcactactggcccatcgaccccggagcccgcaagtgcgccgacatcaacttcgccgtccacgactggggcaacgcgcacccggagcaggcgcgccggatggcggaggaaggcagcggcttcgcgcgccaccagctcagcatggactacgtctacgactacatgctgcacctgctcacccagtacgccggcctgctccgctacaagcccaccgtgccggagaacgccgtagagctgtgcgccgagaccgtcgcctgccccgctgcgcaccacagcaacaggagggagttcgacttcatgatgcagtccagggagaggtacatcgccgactaccagccctgcacgctgccgccgccctttaccgaccgtcacatcagggagatgacgcgaagagaccaggaggtgcgcgccaacgtgcacaagatgatgaccaccgtcactccatgacgtcaccaattaagggattctcttgttctctatctatctatctatcttgaatatccacttcgttatactacgtcctggtctctgtctctataatattaaaatatcagttttcatggtcttattttttgaaaaaa

SEQ ID NO: 124348 - DNA, 754 bp, Zea Mays
atggcgttgcagacgccttgtgcttctagaaacattctcacctctgctccggtcagacaccgccgcctccatgaggtgctagggttccctggccgacgccacgaccgtcgcacccggccgcctccgtccctgcgggccttcgccaccgccctcgccaaacgtccctgccagggttcctcacagcttctcccaagcgccctccagtctcaccaacccttctgcggttctgcccttggtgccgcgctcatgagcctcaccgaggcgccgtccccgtccccgtcgtcgtcaagcgggagcgatgacttcgcggccttcctcgcctccgagctcgagctcgcctccggtgctgactccgccttccctggtgacccctcctccattttccccgacaccgacgacgagggcgaggacgaggatctggaggagctagagggtttagaagttattgaagcacattatttatttggtgctgaatatgatgacattgagattgtgattcacccacagtctatcatacactctatggttgaaacccaggattcatctgtcctagctcagttgggatggccagatatgccgttaccaatcttatacaccttatcatggccagatagaatctattgctctgaggtcacctggccccatctggatctttgcaagtatgacatcttcaaactcctgcgatagttgtgcagtacaattgatgcttttatttggaaatgaccttcaagaattcaagtcttatttttcttga

SEQ ID NO: 124349 - DNA, 2736 bp, Zea Mays
cctccctccctctcatcgatccataccatcctctatcccccccatccgcatctactgacctggtttcatctgttaaattcctaggtgggcctcgtcgtcggcaagctcagctcttcctccgaccgtgccctcgtctacgcgttgctccccacgccgctcaccgacgccgccgcccccgcatgctctctccgcgccgcccccaagtccaagccttccaagggcggcggcaaagctccttcctcctcggacgcctctctcgacttcgatgtcgaatggatctccgagcacgcgcggcaggtgtctaggatgctgctcggtggtatgagtgtcatgggtgcttacgtatgggcttccgaggcatcattcaaggccacatcccctgctgtcctgtcgcaggtcattcgagcgatttgccaagcttgctatggcagtgcatccggtgtgaggctgctcgtccacatttcttacagtcctcgaagatgggcctgccgtatatgcgaggttgcatcaggaagtctgcgtccgtgcgattttaagtacagcaaactattagcttctcttcaaactttcagatgcacatataattttgagataaggttgacatctgttcaagctgagccgtttaagaaaattattttgaaggcaatcagtcatctcacagaggaagtgcagaatgccagagctttggtagatgggcaactgttttcagaagagatgaacataagtacagaggacccacaccaagttgattttcttgtgccattcaagaatgctgtgcctgttgaagaatgcagtttagagggagttgctgggctcattcgctttattggatctgtcagcgccttggcatatttaggccctaaagaatctatttcagaagctatatctgatctaaaggcggacatcgttacaagtctaaaaagccggttggatatcatccttgatgaggcagatgatggccctgccactgctgaagtggagaaatcaccatctcagaaggccactcaagttatatttcatgagttgagagaaccttacagtttttcattcccgagaagggtcctgataccttggctgagcggcacctatgtttgtgattacttgcaacaaccagagacagcagaggatgcagtggatcgcttcaaggaagtgataggcgcactggaaacagccgtggagaggtcttcaatcctggaaccagaaagcgcagcagcagcttgtagcgtactagaatccttttgggatatggtgcctggatctggcagcggaggacaaggtggatccagcaagctgaaggacagtcattctatacagaaggatgattcaagcaaaggacaaggcggtttgcatttcagtatcgtagccgctctgattgtgctactggttgctctgatagctggactgttcttcactggttccgccggatacccagtaacgtaactaactgcgctgtaccccaccagtagatgcgaaaagcaaagatgttagaaactgttgaagtggagagttgaatttgtttaatgttagaagctgttgttcacatctctgttggctatttttgatgagctattggggctcccatggacgagagaatccatacgtcattcctcccttgaacttgaaattatttagggcaaaatatacatatgcctcctcagagatctaaacccatgcacgccatgcaaagaacttataatatttttttatgatatttagtttagtcacacagaaacacgggacaaacatataaatctgtactgtacaccacaggcaacatcgatccctgatatagtagcatgcagcagcttgacgctgagtcagatgatggtgttgtaccgggtcccgtcaatatcgacgatggcaagcacgacggcgacgccgaggaggagcacggtgacggaggtgaagttgacgagcagcgcctctgcgccgtacttgggcaggcgcagtggcgggccctgcatgaaggtgagcttctcgaggaagcccagctgcgcggtgccgacggcgagcacgaagacgaggaggccgaagacggcgtgccacggcagcgttctgcgcctggtggcgggggaggcgcccgggaagaagtaggcgaggaacccggcggtccactggaggccgtagagggtgatggcggcgatgccgacccaggagtgcagcgagtagaggtttgggatgccgctctcgacgtggaacttgaagacggcgtagacgccgaggacgcccgcagcgaggcccgcggcgtgcagcgccaggtgcaccttcttcctggcgtcgcgggcgagcgggagagagcggtagctgaggatggcttctccgccgaggacgatggggccgaggaccatgagcacggggtggacgttgaagatgagcggcttgtcctgggagcggagggcgaggccgccgcggaagtggatgcaccacaggagcaccagcacgacggcgctcgctgccaggacgtgcgccaccagcgtgcgcgcgtccaccgaaccacccttcgacttggtcattgatcggatcggatcggagcaaaaaggaaaggagagatggaaatcaggaggagagatgacagttaaatggccgtggacgtggttgctctctcggccgctattaccggtgtggtatccagccagccagccagccacaaaccaaacccagctactataatcccttttcgatctgtctttatttttttctcttccaaacaattaacaatctctctctcttcagcct

SEQ ID NO: 124350 - DNA, 1727 bp, Zea Mays
gacgattggaacccacacccaactcccaagttgcttgcttgatttcgccgagcagacaaagatcgggtcgagtcctacgccgacgccggcgacgaacaaggatggtgaaggcggtgctcggcgacgaggagcacctcaaggcctttgaggaaacgctcgcctcgccctcctctcctccatgtcaagcccaggtgggcctcgtcgtcggcaagctcagctcttcctccgaccgtgccctcgtctacgcgttgctccccacgccgctcaccgacgccgccgcccccgcatgctctctccgcgccgcccccaagtccaagccttccaagggcggcggcaaagctccttcctcctcggacgcctctctcgacttcgatgtcgaatggatctccgagcacgcgcggcaggtgtctaggatgctgctcggtggtatgagtgtcatgggtgcttacgtatgggcttccgaggcatcattcaaggccacatcccctgctgtcctgtcgcaggtcattcgagcgatttgccaagcttgctatggcagtgcatccggtgtgaggctgctcgtccacatttcttacagtcctcgaagatgggcctgccgtatatgcgaggttgcatcaggaagtctgcgtccgtgcgattttaagtacagcaaactattagcttctcttcaaactttcagatgcacatataattttgagataaggttgacatctgttcaagctgagccgtttaagaaaattattttgaaggcaatcagtcatctcacagaggaagtgcagaatgccagagctttggtagatgggcaactgttttcagaagagatgaacataagtacagaggacccacaccaagttgattttcttgtgccattcaagaatgctgtgcctgttgaagaatgcagtttagagggagttgctgggctcattcgctttattggatctgtcagcgccttggcatatttaggccctaaagaatctatttcagaagctatatctgatctaaaggcggacatcgttacaagtctaaaaagccggttggatatcatccttgatgaggcagatgatggccctgccactgctgaagtggagaaatcaccatctcagaaggccactcaagttatatttcatgagttgagagaaccttacagtttttcattcccgagaagggtcctgataccttggctgagcggcacctatgtttgtgattacttgcaacaaccagagacagcagaggatgcagtggatcgcttcaaggaagtgataggcgcactggaaacagccgtggagaggtcttcaatcctggaaccagaaagcgcagcagcagcttgtagcgtactagaatccttttgggatatggtgcctggatctggcagcggaggacaaggtggatccagcaagctgaaggacagtcattctatacagaaggatgattcaagcaaaggacaaggcggtttgcatttcagtatcgtagccgctctgattgtgctactggttgctctgatagctggactgttcttcactggttccgccggatacccagtaacgtaactaactgcgctgtaccccaccagtagatgcgaaaagcaaagatgttagaaactgttgaagtggagagttgaatttgtttaatgttagaagctgttgttcacatctctgttggctatttttgatgagctattggggctcccatggacgagagaatccatacgtcattcctcccttgaactt

SEQ ID NO: 124351 - DNA, 91 bp, Zea Mays
ggtccgcacgtacgcagggacggcagaagatcgccgacggcgcctggatctcgctcccgggagggaccccgtcggggagtagagatcctag

SEQ ID NO: 124352 - DNA, 1374 bp, Zea Mays
gcatcatagaatagttcattcatgtagcaacgataacgggggatattcactactgactatcttcctcttccctctagcttgaaacaagtgacatttctaactagacgctcacatctgccatccatttacagagatgggagagtggcctctgccatctacatgtcgtcatccaactcgttcttctcatcctcgtcttcctggtcaccatcgtcatcctcgtcctcgtgaagagccttgcactttctgagcttctttgctggctgatccacctcctggtcatctgtcttggctttcttagtggcaacattgttctcctgcatcacagccaccgaattgccatcagggaaatacacaggtagcagcagtagcagactagctggcagagacagattacacatgacagtgcccacaaaaggagaggagaaggcagagaaaagaagatggacttacaccactgccctcgccattctcggcctcagccttgagctccgcggccttttcaatgtaaggcttcttctcctggtccagaaaaatgaacagcatagcgtgaatgaatgaatgaagagcaagagttggaaactcgacagattcagattcaggacttacctcgtctgtcatggacttccacctctcccctccttcctttgcaaccttcaatcaacagaaaaaaaaaagattagcagaataaattgggtgggatgaagcaaaagatggaatggaatggaatgcaggcgaggcgtagagaaaagcccatacggtggcgacactcttgttgtcaggatgggtggccttgaactccttcctgaagtcgtccctggaagaaataaatcgacgatgtaacgaaacgcgtatacatcaggagggcgaggaacaaaggagaatgcgcgaatgtgcgtgtcgcgctgcgtctgcagcatacatgaagaggaagaaggcggtgggcgagcgcttgcgcttggcgtccttgttaccacctcccttggcggaggacttcttgcggtccgcactggcgacctcgacggtcttctcgacgacctgcgcctcgagcgtcatcctgatcttctcgtcgaggctgcagctgtgcatgtcgatgaggacgacggggacatccttgttgcaggcctcgctgcatgcatgatgggattcgctcgcatcagaatcatcagatagcggtccggtcgagcagggagaggaggaagggagagttggagaggcaggcaggccaggtggttaccatctggtgaaggcgctcccgtccctggagcgcttgaggacggttgcctcgacgcgcttcctgctgcgcgcggcattgccggtggacttgcctcccgccatggatggatggatgctcaacttgcttggggactcggcggg

SEQ ID NO: 124353 - DNA, 659 bp, Zea Mays
atggtggatgtcttgtcgacaaggagcgagatgcgatcgcctctgtcaagaattttctctatgttgtcgaccatgacggtgtgtatctgcagtacggagttagagttggatatcgtaccagagagacggaacagacatttactcggtttgatgggaagggaaggtgcttgcctcgctgacttctccacggagacggttgagtgtgtcggcgcttgggttgctggagaagaactccatttgctgatggagcactctggagaactcatcgttcatggcgtaagccagcgcagagtgggcgactctgccgtagtttttcatgaacctcatttggatgtcctccaggtagagaaaggggatccttcttccgaaggtgtcgttggccatacagaggaaggtgatgccggcggcgtcggatcggaggacgtggaagatgtaccggtcctgcgcgaagcacagcctggactcggcgtcgggcggcagcttctcgaggatccgacgggccacggcgccggcgttgcccgagacggcggcgaactcggccagcaccaccgtgccccgcgcgaccagggcgtacacgatcgccatggatgggctgggggtggagagatctgatttgatttgatcttgcctttttggggatttcgagcggagcggcgccg

SEQ ID NO: 124354 - DNA, 3216 bp, Zea Mays
gggtcatttcgacctcaacaccaacaatattttaaagcaaactatgagagccaagacaatatatatttgaaaattttaactataagactaaaagtttacgtattcgattatttaaagactaaaataaaataaaaaactaaaaactagtccctaaaaatcaaaatattttgagagtatgcaatgcaaagccaacagttttggtaattggtagagtaaatgggtttggggagtttaattaaaatcaatcgtatcgggcaggggctgcaacccaggctgtgcgggcgcggcagggcagcggcggcgacatctgcatctgcatctcccacctcgtctccctcccgcatctgccctgcctcgatcccgccgccagccatctaagggagccgggagccatgtctccctccggcgagctgctggcgtccatctcctccgctctcgccgtggccttcgtcttcctcgcctgcgtcgagctcggcgacgccgccgccgccgtcagcgtctaccgcctcatccagtacgacctcgccggcgccccgctcggctcccgcgccgcggtcctcaatcaccacgccgcggtgctcccgctccctgccggcgcagacctctcccgctccgccctcgtcgcgccgctcctcgaccttccgctctccttcctcagagagtacctggtggagaaaaaacagctggggggattgctcattttgctcccgacaaaccagggtgataaggatagtgcggatgacaagggtcaagtcaaaggtgtactgactgagctggagaagttgcttgtgcacgaacaagttccatatccagtgtactttgctttggatgacgacaattttggtaacctgctggcagatatccataaaattgcctcttcaggccaaccagcctctgcaacaacaggaggttacaaacttgtggtgtcctcagcagagcctagaaaagtgtcatctccgaccatttctaatatccagggatggttacctggattgaaaggagagggtgatagtgaacagcttccgactattgccatagttgcaaactatgacaccttcggtgctgcacctgcactttctctgggaagcgacagcaatggaagtggagttgtggctcttctagagattgcaagactattttcacgtttgtattcaaatcctaagacaaggggcaagtacaatattctctttgggttaacatctggtggaccctacaattacaatggaactagcaagtggctaagaggttttgatcagcgtgtacgcgagagcattgactatgcaatttgcttgaacagtgttggttcctggagcaatgacctctggatgcatgtatcaaagcctccagaaaatccctatatcaagcaaatctttgaagaattttcggatgtctctaaagaaatgggtgtttcagttggaatcaagcacaagaagattaatgtctcaaatcctagagtagcatgggaacacgaacagttctcgaggtttagagtgaccgcacttactctttcagaaatgtctacccctcctgaatttttggaaagcactggtggtcttcatgacactagagaatctacagatgttgagtcagtaatccgaactgtcagattagtttctgagagtcttgcgagacacatctatggattgagagggaggaatatcgatgtttttgcagagaatagcagcttagccatcaatcctcgctacgtccggtcctggttggatcttttgtcacggacaccacgagtcgcaccttttctacagaagaatgatcccttcatagcagcgctgaaaaaggaactgtccgagcacacgtctgatgtgcatgttcaaagtgatgcgcttgaaggcatgttcactttctatgatacaactaaagcgactctaaatgtgtaccaggttgcaagtgttacctttgatctgctgttccttctggtgctgggttcctacctgatcgttctcttctgtttcctagtaatcagtacacggggtgtcgacgacctcattaacatattccggcggcctccgtcacgcaaactcaagggggcataggctaggttgtgttttgtgttctagaagaagagatagacatgaggatgacaggcaagctagcttcccacagcacatagacttgtacttgcaaaattttactgttccttcccccgctccgtccaaatgtgagtggccttcaatttgttcccattttttttatgtgcgaggaacttcgaatgtaatttagctgtattttggttacagttttggcttaattattcgggtggactggtgaaattcttttctcgtgtgtgtggacttgcttttagtcgtctttgcagtccatttggtgcagcggatgaacaggcatttggttcagcaagcaggtggacatgcttttggttcagcaacaagcaggaagcaatgtaatgaaacactaacacgtctagtgtagtgtagtgtaggacagagcgatgctctgatggaaattacggatggttcctagctgggcctgcgtctgatggcgcatgcggccatgaggacgagcacgacgaagatgagcacggcgaggaaggtggcgacgacggagccgctggtgcgctggcagaagccgtggaactgcatgcagatgggcacccagttggcgcgccggttgcctgagtgcgccacgtacacgatggccgcggcagcggcgccggacgccgtgagcagcgccatgaccaccacgtcgcagacaagcagcagcagcagccccacgcccgtcgccgccttactgggccggacgatgcccaccacggagaagggcagcgacagcaccaagtaccccgcggcgacggcgttggccaccaggagggaggtgaaggccgggaagtcgtcgaacctcgcgtggaactggaaggtggtggtgaacacggacagcctctcgtcggcggtgcccgtggagatggcagccgccagcgtggtgcccaaggcggccaacctcagcagcaagtccaccacggccaggcagcaccggaaccccttggcgcccgagcgcagcaggaacgggagaccggtggtcgtcttgcgcggcgccgctcccagtgcttgtgctggtgccggcgctgcaacaaccggggccctgccgtcgtccatctggatcacggtggcggtggcggattcgcttgtcatgctcgtctcttttgtggcttggggaaatgggtgcctcagtcagatcaagtactgc

SEQ ID NO: 124355 - DNA, 1943 bp, Zea Mays
gggtcatttcgacctcaacaccaacaatattttaaagcaaactatgagagccaagacaatatatatttgaaaattttaactataagactaaaagtttacgtattcgattatttaaagactaaaataaaataaaaaactaaaaactagtccctaaaaatcaaaatattttgagagtatgcaatgcaaagccaacagttttggtaattggtagagtaaatgggtttggggagtttaattaaaatcaatcgtatcgggcaggggctgcaacccaggctgtgcgggcgcggcagggcagcggcggcgacatctgcatctgcatctcccacctcgtctccctcccgcatctgccctgcctcgatcccgccgccagccatctaagggagccgggagccatgtctccctccggcgagctgctggcgtccatctcctccgctctcgccgtggccttcgtcttcctcgcctgcgtcgagctcggcgacgccgccgccgccgtcagcgtctaccgcctcatccagtacgacctcgccggcgccccgctcggctcccgcgccgcggtcctcaatcaccacgccgcggtgctcccgctccctgccggcgcagacctctcccgctccgccctcgtcgcgccgctcctcgaccttccgctctccttcctcagagagtacctggtggagaaaaaacagctggggggattgctcattttgctcccgacaaaccagggtgataaggatagtgcggatgacaagggtcaagtcaaaggtgtactgactgagctggagaagttgcttgtgcacgaacaagttccatatccagtgtactttgctttggatgacgacaattttggtaacctgctggcagatatccataaaattgcctcttcaggccaaccagcctctgcaacaacaggaggttacaaacttgtggtgtcctcagcagagcctagaaaagtgtcatctccgaccatttctaatatccagggatggttacctggattgaaaggagagggtgatagtgaacagcttccgactattgccatagttgcaaactatgacaccttcggtgctgcacctgcactttctctgggaagcgacagcaatggaagtggagttgtggctcttctagagattgcaagactattttcacgtttgtattcaaatcctaagacaaggggcaagtacaatattctctttgggttaacatctggtggaccctacaattacaatggaactagcaagtggctaagaggttttgatcagcgtgtacgcgagagcattgactatgcaatttgcttgaacagtgttggttcctggagcaatgacctctggatgcatgtatcaaagcctccagaaaatccctatatcaagcaaatctttgaagaattttcggatgtctctaaagaaatgggtgtttcagttggaatcaagcacaagaagattaatgtctcaaatcctagagtagcatgggaacacgaacagttctcgaggtttagagtgaccgcacttactctttcagaaatgtctacccctcctgaatttttggaaagcactggtggtcttcatgacactagagaatctacagatgttgagtcagtaatccgaactgtcagattagtttctgagagtcttgcgagacacatctatggattgagagggaggaatatcgatgtttttgcagagaatagcagcttagccatcaatcctcgctacgtccggtcctggttggatcttttgtcacggacaccacgagtcgcaccttttctacagaagaatgatcccttcatagcagcgctgaaaaaggaactgtccgagcacacgtctgatgtgcatgttcaaagtgatgcgcttgaaggcatgttcactttctatgatacaactaaagcgactctaaatgtgtaccaggtacgtctgggtgaccacaagcctatgggcattttgttcatgttt

SEQ ID NO: 124356 - DNA, 581 bp, Zea Mays
atattaaataatccactgttgcaataatatagaagggagtgaagcgtgtacacgtacggccctataatatatatagatagcaagacagagcattcccttgcaccaccacaaccagtcctcacataatcatcttcattcactcactctcttcgatcactgtactgaagataccatggccaagtcgaccgcgatgtttgtagccgccctggccctggtggtggtgatggcgacgacgagcacaggcggtggcagggcggcagcggcgtgcgatcccaagccgctggtggtgtgcgatccggcgttcatggacggagcgaaacccgcggcagcatgctgctccaccctgcgtgcgcaggaggcatgcttgtgcgtgtacgccaaagaccccaagtttgcaaaatacatcaacaaccccaacaccgccaaaacctttacctcgtgcggcatagccatccccaaatgctaagcaagcgctctgcgtcgtcgcttcgcttgctcttgctcttgtgtgtaacatatccagcttatgaataaattatgtggatcagttaattagtgggatgaagatgcatgtttattaa

SEQ ID NO: 124357 - DNA, 1888 bp, Zea Mays
ccatggttgtcctccttgccctgctcgtcacccagttgccctgcagcctgactcaagaaacaaaaggaaaggagaggagagggaatcgaatacgataccttctcttctccctccattcctttcctttgccccaaccatgccatattggagaggcgtcgagatcttatccctcgatccaattccaaacagaaaccgccggagctggaacaagagccgctcgcagcttgctggactctcccgctcctggccccggagccgccggccatggccaagcacaagcagcgcagggtgtaccaagtctggaaaggcaaaaacataatactatgtggtggaaggttgatctttggaccagatgccaaggccaccctgatttccttcgccctaatcgccatccctgtccttgtcttctgcgtctttgtggccagacatctcatacacatcttccctgcatataacgcaggatacgcaattcttgctgccaccataggccttaccatttatgtactgttactgctcttccttacatcatctcaagatccaggtattgtaccacgaaattcacatccacctgtggaagagttctcttatgatgcttcggctccacatgctcttcagttccctcgagtaaaagaggtcatggtcaatggagttcatgtgaaaatgaaatactgtgaaacttgcatgatataccggcctcctcggtgctcgcactgctccaaatgtgataactgtgtcgagcgctttgatcatcactgcccttgggttgggcaatgtattggagagcgaaattaccggtacttcttctgttttgttgcttcagcggcagtgctttgtatctatgtatgtgcaatgtgtggattgtacatcaggcttctcatgaataggggtcattattcggtggggaaagccattaaagaatctccagcttcattggcagtcatggcatattgtttcatttgcttctggttcgtcggtggtctcactgggttccactcttatcttattgtgacaaacaagacaacatatgagaatatcaagtacaagtacagcaaccaaccaaatgtgtatgaccatggttgtgtgctcaactgccatgaggttttgtgcaaaaaaaggaaaccttctaagatcaacctaagagctattgtccaagaagaacaagaggtagcacggccacagaccagctcttccaatatacgagaagatgaggcaccccaccgtccacgagccaaggttgaggatgatctagaaatgggtcttgacatcctcaagaccacagggcgcaggacggataaattcagcgatgaggaattggagcctgcaactggaagcaatggtattgaatatcgcatgccagattcagagactgagattcctgttaccagaactaagacagagatctttaatgaagttagggatctggacttatcggttagtaatggtgcacaatcttcatctcctgaacaagaacagcacccagacaaactttgctgatggaacaaatggtctctctgcatttccgtagtgcagacaccaaattattcaccagggctgtgaatggttggatttgaaggcagatttcctcctttgccgtctgctttcaggatttaagcctttgcttggccaatcatagattcataggtgtgtaaggatcctccagtttgtgcggtttatggaggttctaaaagattctaggaactgtttgagattcttctggtgtgtgaaggctaattgtacataattttcatagctatatgatcactgaaatgcaaaatgcgtcctctcggcatgggaatgggaataggctgtacctggtcttttctagaaccatacacatcatttggtgaatgctcgatctaaaaccttggttgtcgaaagaattgcaaat

SEQ ID NO: 124358 - DNA, 1848 bp, Zea Mays
ccatggttgtcctccttgccctgctcgtcacccagttgccctgcagcctgactcaagaaacaaaaggaaaggagaggagagggaatcgaatacgataccttctcttctccctccattcctttcctttgccccaaccatgccatattggagaggcgtcgagatcttatccctcgatccaattccaaacagaaaccgccggagctggaacaagagccgctcgcagcttgctggactctcccgctcctggccccggagccgccggccatggccaagcacaagcagcgcagggtgtaccaagtctggaaaggcaaaaacataatactatgtggtggaaggttgatctttggaccagatgccaaggccaccctgatttccttcgccctaatcgccatccctgtccttgtcttctgcgtctttgtggccagacatctcatacacatcttccctgcatataacgcaggatacgcaattcttgctgccaccataggccttaccatttatgtattgtaccacgaaattcacatccacctgtggaagagttctcttatgatgcttcggctccacatgctcttcagttccctcgagtaaaagaggtcatggtcaatggagttcatgtgaaaatgaaatactgtgaaacttgcatgatataccggcctcctcggtgctcgcactgctccaaatgtgataactgtgtcgagcgctttgatcatcactgcccttgggttgggcaatgtattggagagcgaaattaccggtacttcttctgttttgttgcttcagcggcagtgctttgtatctatgtatgtgcaatgtgtggattgtacatcaggcttctcatgaataggggtcattattcggtggggaaagccattaaagaatctccagcttcattggcagtcatggcatattgtttcatttgcttctggttcgtcggtggtctcactgggttccactcttatcttattgtgacaaacaagacaacatatgagaatatcaagtacaagtacagcaaccaaccaaatgtgtatgaccatggttgtgtgctcaactgccatgaggttttgtgcaaaaaaaggaaaccttctaagatcaacctaagagctattgtccaagaagaacaagaggtagcacggccacagaccagctcttccaatatacgagaagatgaggcaccccaccgtccacgagccaaggttgaggatgatctagaaatgggtcttgacatcctcaagaccacagggcgcaggacggataaattcagcgatgaggaattggagcctgcaactggaagcaatggtattgaatatcgcatgccagattcagagactgagattcctgttaccagaactaagacagagatctttaatgaagttagggatctggacttatcggttagtaatggtgcacaatcttcatctcctgaacaagaacagcacccagacaaactttgctgatggaacaaatggtctctctgcatttccgtagtgcagacaccaaattattcaccagggctgtgaatggttggatttgaaggcagatttcctcctttgccgtctgctttcaggatttaagcctttgcttggccaatcatagattcataggtgtgtaaggatcctccagtttgtgcggtttatggaggttctaaaagattctaggaactgtttgagattcttctggtgtgtgaaggctaattgtacataattttcatagctatatgatcactgaaatgcaaaatgcgtcctctcggcatgggaatgggaataggctgtacctggtcttttctagaaccatacacatcatttggtgaatgctcgatctaaaaccttggttgtcgaaagaattgcaaat

SEQ ID NO: 124359 - DNA, 2389 bp, Zea Mays
aatgcaacgcttggtccgctgacagtaggtagctcacaaaggctgacagatttcaaccacaataactcaatcgtaatcatatgcgatgcaatgatcctcgacaaaaaaaatgatgccatgtcccgtttgcaaattcatagcacattacttgaaggccccactgggattagataacgcaaagttgttcaggaagagaatgcagtggactctcctcagtaggcccatggttgtcctccttgccctgctcgtcacccagttgccctgcagcctgactcaagaaacaaaaggaaaggagaggagagggaatcgaatacgataccttctcttctccctccattcctttcctttgccccaaccatgccatattggagaggcgtcgagatcttatccctcgatccaattccaaacagaaaccgccggagctggaacaagagccgctcgcagcttgctggactctcccgctcctggccccggagccgccggccatggccaagcacaagcagcgcagggtgtaccaagtctggaaaggcaaaaacgtgagtttgattttgccgtccctcgtaccgacaagaaaaggtcgcgcctttcttcgttttggggattgcctaccgtgctaatttcatcttgctttgttgcttgcatccggcggcctagctagctagcatggtcatgtgatggcctagcatggacgggactcataatagttgtaaatatagtctgatttctcatgcctcaacaagctaacatactcctattcagcaacttggttggtgtgagatttttcagtaccttccattctgccgctgctcatctgtgtacgtttctgtttctctttgttcagataatactatgtggtggaaggttgatctttggaccagatgccaaggccaccctgatttccttcgccctaatcgccatccctgtccttgtcttctgcgtctttgtggccagacatctcatacacatcttccctgcatataacgcaggatacgcaattcttgctgccaccataggccttaccatttatgtactgttactgctcttccttacatcatctcaagatccaggtattgtaccacgaaattcacatccacctgtggaagagttctcttatgatgcttcggctccacatgctcttcagttccctcgagtaaaagaggtcatggtcaatggagttcatgtgaaaatgaaatactgtgaaacttgcatgatataccggcctcctcggtgctcgcactgctccaaatgtgataactgtgtcgagcgctttgatcatcactgcccttgggttgggcaatgtattggagagcgaaattaccggtacttcttctgttttgttgcttcagcggcagtgctttgtatctatgtatgtgcaatgtgtggattgtacatcaggcttctcatgaataggggtcattattcggtggggaaagccattaaagaatctccagcttcattggcagtcatggcatattgtttcatttgcttctggttcgtcggtggtctcactgggttccactcttatcttattgtgacaaacaagacaacatatgagaatatcaagtacaagtacagcaaccaaccaaatgtgtatgaccatggttgtgtgctcaactgccatgaggttttgtgcaaaaaaaggaaaccttctaagatcaacctaagagctattgtccaagaagaacaagaggtagcacggccacagaccagctcttccaatatacgagaagatgaggcaccccaccgtccacgagccaaggttgaggatgatctagaaatgggtcttgacatcctcaagaccacagggcgcaggacggataaattcagcgatgaggaattggagcctgcaactggaagcaatggtattgaatatcgcatgccagattcagagactgagattcctgttaccagaactaagacagagatctttaatgaagttagggatctggacttatcggttagtaatggtgcacaatcttcatctcctgaacaagaacagcacccagacaaactttgctgatggaacaaatggtctctctgcatttccgtagtgcagacaccaaattattcaccagggctgtgaatggttggatttgaaggcagatttcctcctttgccgtctgctttcaggatttaagcctttgcttggccaatcatagattcataggtgtgtaaggatcctccagtttgtgcggtttatggaggttctaaaagattctaggaactgtttgagattcttctggtgtgtgaaggctaattgtacataattttcatagctatatgatcactgaaatgcaaaatgcgtcctctcggcatgggaatgggaataggctgtacctggtcttttctagaaccatacacatcatttggtgaatgctcgatctaaaac

SEQ ID NO: 124360 - DNA, 2073 bp, Zea Mays
aaaaagaaaataaaaatatggttcccaaattagcccttgattagtaaggtcaatcaacggatagttttatgcggccgccatgttaataactgttagtaaatagtgtatctaaagttttattctactctcttttatttttcatagaactctcttatatctctttattaaattacatctcataagaatggtgtagctgtgctgttgcaataaaaaaaaggttgtaggccgagtcctctgtcctcctcagtcctcaccaaaccaccacgagagcgcttcgccgcttcctcctgctcgtcctcctcggccctcgccgttgccgtccatcccaatcaatcaatggcgcctgcccgtctcctgccacggctgccgctcttctgggccgccctgctcttgttgccgtttgcgcacccggcagcggcggcgcaggtgggcgacgcgtgctcctcctcctccggcggcggctgcggctccggcctgcactgcagcccctgcggcgccggcgggggcagcatctgcacgcgcgccagccccgtggacccggccacccacggcacgggcctccccttcaacaactactcgtggctcaccacccacaactcctacgccctcgccggcgccgcctccgccaccggctccgcgctcatcaccgagaccaaccaggaggacgccgtcaccgcgcagctcaagaacggtgttaggggcctgatgctcgacacgtacgacttcgacaacgatgtctggttgtgccactcgttccaaggaaaatgctacaacttcactgccttccaacctgccatcaatgtgttcaaagagatccagacattcctcgacgcgaacccgtcgcaagtggtcacgatcttcctagaagactacaccgcggtagggtccttgccgagagtgttcaacgcctccggcctcacgaagtactggttcccggtggcaaagatgccgaagagcggcggcgactggcctctgctcaaggacatgatcagccagaaccagcgcctgctagtcttcacctcaaagagagccaaggaggcgagcgaggggatcgcgtatgagtggaactacgtcgtggagaaccaatacggagatgagggcatggtagcaggcaaatgcccccaaccgcgcagagtctccggccatggattccaaaggccagtcgcttgtcctgatgaacttcttcacgactaacccgagccagaccggtgcctgcgggaacaattcggcgccactcgacagcatgctgaagacgtgccatgacgcttcaggcaaccggtggccgaactacatcgctgttgatttttacatgagaagtgacggtggaggagctcccttggctacggacattgcgaacggtcatatggtgtgcggatgcgacaacatcgcgtattgcaaggcgaattcgacattcgggacctgcgtgatacccccaccgccgccgccgtcaccgcccaaggcatccacccccggcagcagaggctcaacagcaggcggcgatgctagcgctggaacgatggccctgtcctcgcaatggagcttcttgctgggactggcttctctgcttcttttgtcgcgctcgtgagagccgagcggcattggtgactggttttgctgctcttgctacatgctctgcgagctgataggagcatcgtcccatgagatgagctgaggctgagctgaactgagctgtatatttgggtttactgcgcaacgtagttagttggatacgggaatcagttaaattcatcattcatttttattgattggcgtcgttatcgtgaatgttctaataagttccttaaaaaaatgtctcatggccctactgtcagtgacgtagccatgtgaaccgggagagagaaattacagcgtgtttatcttgttcgaagtgctttcaggtccggactatcgattttttttttctattgtctcctttagctcggcatcgctgcagtgcataggcttatctcagaaccacggcagttttagctcggtatacccaaaagcatgaaattgttactaagtgtttttgaagaactttcagtctaaagataaatttccataaaaacaaaa

SEQ ID NO: 124361 - DNA, 1362 bp, Zea Mays
cacgagagcgcttcgccgcttcctcctgctcgtcctcctcggccctcgccgttgccgtccatcccaatcaatcaatggcgcctgcccgtctcctgccacggctgccgctcttctgggccgccctgctcttgttgccgtttgcgcacccggcagcggcggcgcaggtgggcgacgcgtgctcctcctcctccggcgccgcctccgccaccggctccgcgctcatcaccgagaccaaccaggaggacgccgtcaccgcgcagctcaagaacggtgttaggggcctgatgctcgacacgtacgacttcgacaacgatgtctggttgtgccactcgttccaaggaaaatgctacaacttcactgccttccaacctgccatcaatgtgttcaaagagatccagacattcctcgacgcgaacccgtcgcaagtggtcacgatcttcctagaagactacaccgcggtagggtccttgccgagagtgttcaacgcctccggcctcacgaagtactggttcccggtggcaaagatgccgaagagcggcggcgactggcctctgctcaaggacatgatcagccagaaccagcgcctgctagtcttcacctcaaagagagccaaggaggcgagcgaggggatcgcgtatgagtggaactacgtcgtggagaaccaatacggagatgagggcatggtagcaggcaaatgcccccaaccgcgcagagtctccggccatggattccaaaggccagtcgcttgtcctgatgaacttcttcacgactaacccgagccagaccggtgcctgcgggaacaattcggcgccactcgacagcatgctgaagacgtgccatgacgcttcaggcaaccggtggccgaactacatcgctgttgatttttacatgagaagtgacggtggaggagctcccttggctacggacattgcgaacggtcatatggtgtgcggatgcgacaacatcgcgtattgcaaggcgaattcgacattcgggacctgcgtgatacccccaccgccgccgccgtcaccgcccaaggcatccacccccggcagcagaggctcaacagcaggcggcgatgctagcgctggaacgatggccctgtcctcgcaatggagcttcttgctgggactggcttctctgcttcttttgtcgcgctcgtgagagccgagcggcattggtgactggttttgctgctcttgctacatgctctgcgagctgataggagcatcgtcccatgagatgagctgaggctgagctgaactgagctgtatatttgggtttactgcgcaacgtagttagttggatacgggaatcagttaaattcatcattcatttttattgattggcgtcgttatcgtg

SEQ ID NO: 124362 - DNA, 1268 bp, Zea Mays
atggcgcctgcccgtctcctgccacggctgccgctcttctgggccgccctgctcttgttgccgtttgcgcacccggcagcggcggcgcaggtgggcgacgcgtgctcctcctcctccggcgccgcctccgccaccggctccgcgctcatcaccgagaccaaccaggaggacgccgtcaccgcgcagctcaagaacggtgttaggggcctgatgctcgacacgtacgacttcgacaacgatgtctggttgtgccactcgttccaaggaaaatgctacaacttcactgccttccaacctgccatcaatgtgttcaaagagatccagacattcctcgacgcgaacccgtcgcaagtggtcacgatcttcctagaagactacaccgcggtagggtccttgccgagagtgttcaacgcctccggcctcacgaagtactggttcccggtggcaaagatgccgaagagcggcggcgactggcctctgctcaaggacatgatcagccagaaccagcgcctgctagtcttcacctcaaagagagccaaggaggcgagcgaggggatcgcgtatgagtggaactacgtcgtggagaaccaatacggagatgagggcatggtagcaggcaaatgcccccaaccgcgcagagtctccggccatggattccaaaggccagtcgcttgtcctgatgaacttcttcacgactaacccgagccagaccggtgcctgcgggaacaattcggcgccactcgacagcatgctgaagacgtgccatgacgcttcaggcaaccggtggccgaactacatcgctgttgatttttacatgagaagtgacggtggaggagctcccttggctacggacattgcgaacggtcatatggtgtgcggatgcgacaacatcgcgtattgcaaggcgaattcgacattcgggacctgcgtgatacccccaccgccgccgccgtcaccgcccaaggcatccacccccggcagcagaggctcaacagcaggcggcgatgctagcgctggaacgatggccctgtcctcgcaatggagcttcttgctgggactggcttctctgcttcttttgtcgcgctcgtgagagccgagcggcattggtgactggttttgctgctcttgctacatgctctgcgagctgataggagcatcgtcccatgagatgagctgaggctgagctgaactgagctgtatatttgggtttactgcgcaacgtagttagttggatacgggaatcagttaaattcatcattcatttttat

SEQ ID NO: 124363 - DNA, 1535 bp, Zea Mays
agtcctctgtcctcctcagtcctcaccaaaccaccacgagagcgcttcgccgcttcctcctgctcgtcctcctcggccctcgccgttgccgtccatcccaatcaatcaatggcgcctgcccgtctcctgccacggctgccgctcttctgggccgccctgctcttgttgccgtttgcgcacccggcagcggcggcgcaggtgggcgacgcgtgctcctcctcctccggcggcggctgcggctccggcctgcactgcagcccctgcggcgccggcgggggcagcatctgcacgcgcgccagccccgtggacccggccacccacggcacgggcctccccttcaacaactactcgtggctcaccacccacaactcctacgccctcgccggcgccgcctccgccaccggctccgcgctcatcaccgagaccaaccaggaggacgccgtcaccgcgcagctcaagaacggtgttaggggcctgatgctcgacacgtacgacttcgacaacgatgtctggttgtgccactcgttccaaggaaaatgctacaacttcactgccttccaacctgccatcaatgtgttcaaagagatccagacattcctcgacgcgaacccgtcgcaagtggtcacgatcttcctagaagactacaccgcggtagggtccttgccgagagtgttcaacgcctccggcctcacgaagtactggttcccggtggcaaagatgccgaagagcggcggcgactggcctctgctcaaggacatgatcagccagaaccagcgcctgctagtcttcacctcaaagagagccaaggaggcgagcgaggggatcgcgtatgagtggaactacgtcgtggagaaccaatacggagatgagggcatggtagcaggcaaatgcccccaaccgcgcagagtctccggccatggattccaaaggccagtcgcttgtcctgatgaacttcttcacgactaacccgagccagaccggtgcctgcgggaacaattcggcgccactcgacagcatgctgaagacgtgccatgacgcttcaggcaaccggtggccgaactacatcgctgttgatttttacatgagaagtgacggtggaggagctcccttggctacggacattgcgaacggtcatatggtgtgcggatgcgacaacatcgcgtattgcaaggcgaattcgacattcgggacctgcgtgatacccccaccgccgccgccgtcaccgcccaaggcatccacccccggcagcagaggctcaacagcaggcggcgatgctagcgctggaacgatggccctgtcctcgcaatggagcttcttgctgggactggcttctctgcttcttttgtcgcgctcgtgagagccgagcggcattggtgactggttttgctgctcttgctacatgctctgcgagctgataggagcatcgtcccatgagatgagctgaggctgagctgaactgagctgtatatttgggtttactgcgcaacgtagttagttggatacgggaatcagttaaattcatcattcatttttat

SEQ ID NO: 124364 - DNA, 1588 bp, Zea Mays
aatcaagtgacggttacattcttatcgtaaatagtttttgcacaaacagagcggaaaaaaggaacagtttttgtggaggtgactcctcgcctgtgtcgtcaaatcctccacaccctggactggagtggctgctgctcgtggccggcgatgagcggcggcgggcccggaggtgcgtgcgggccggactcccgcgtggagaccatctcccggctggcgcagtggcgcatcgataccttcggcccctgctcctaccgccggtcggacccctttaagctcggcatctggaactggtacctgtcggtggagaagagccgctccatcgttgtgcgcctcttcccggagcccggccgggtggccaaggagcagccccctctcgcgcgcttcctgctccgcgtctcctgggccggcccgccgcgacgctcctgcgtctcccctgtgcacgagcatcttctgcgtaccagcgatgattttgtatggcaagtcgatgcgatgtcccatgggcgttttacgattgatgttgagtttctagacctgaggatagccacgaacaatgctacggaatcgtcatcggtgtggccaaacgaaggcatggtgcagaagatcgcgagcaagagcgccctgggctgcctgtcgcgcatgctggcggactccatccacgcggacgtgaccatcaacacgacggacggggtgctgaaggcgcacaaggcggtgctggcggcgtgctcccccgtgttcaagagcatgttcgtgcacgacctgagggagaaggagtcgtcgacggtggacatcggcgacatgtgcgtggagtcgtgctcggcgctgctgggcttcgtgtacgggacgatcgagcagggacagttctggaagcaccggctgccgctgctggcggcggcggacaagtacgggatcggcgacatcaaggactgctgcgaggagagcctgctggaggacataggctcgggcaacgtgctggagcggctccacgtggcgtggctgtaccggctggagcggctgaagaaagggtgcctcacctacctgttcgtgttcgggaagatctatgacgtgagggacgagatgcacggcttcttccaccacgcggaccgcgagctcatgcacgacatgttccaggaggtgctcagcgtgtggaagcccatgtgaatggaagtgtccctttccacgcgagctgtgtgtgtgtgtgtgtgtcgtgcttgttcagtcagcagtgtgtggagagcatgctggttatgcatatttgaaacgaaaaggatgctcagaatttgaatggaagctaaattatacatgatgagacagacagtgaggtagtcaatccagatgtgttcaagtctaatagatcttgtgtgggtacgaatggaagcagccaacttgggcttgaatgctccctagttggctgagaaatgttgacattgtttgttctagatgagggttacctggcctgggaaatgttgtagctaggctagatgttgaattggtagcaaggtatgtatgtatattgaatttgtcgtgtgtcatggacagtgggcgtttgctgatgatgacaggcagcaggagaagacggagttgtgatttg

SEQ ID NO: 124365 - DNA, 926 bp, Zea Mays
atgcgacattcagtagtcctcatttttagtgctaatcgttttgacagcagttaatgacttgggagattcctcactcttgctgttagctaatgatatgctaatgctgcccagtgtgctgctaactgttgttataggctacggaatcgtcatcggtgtggccaaacgaaggcatggtgcagaagatcgcgagcaagagcgccctgggctgcctgtcgcgcatgctggcggactccatccacgcggacgtgaccatcaacacgacggacggggtgctgaaggcgcacaaggcggtgctggcggcgtgctcccccgtgttcaagagcatgttcgtgcacgacctgagggagaaggagtcgtcgacggtggacatcggcgacatgtgcgtggagtcgtgctcggcgctgctgggcttcgtgtacgggacgatcgagcagggacagttctggaagcaccggctgccgctgctggcggcggcggacaagtacgggatcggcgacatcaaggactgctgcgaggagagcctgctggaggacataggctcgggcaacgtgctggagcggctccacgtggcgtggctgtaccggctggagcggctgaagaaagggtgcctcacctacctgttcgtgttcgggaagatctatgacgtgagggacgagatgcacggcttcttccaccacgcggaccgcgagctcatgcacgacatgttccaggaggtgctcagcgtgtggaagcccatgtgaatggaagtgtccctttccacgcgagctgtgtgtgtgtgtgtgtgtcgtgcttgttcagtcagcagtgtgtggagagcatgctggttatgcatatttgaaacgaaaaggatgctcagaatttgaatggaagctaaattatacatgatgagacagacagtgaggtagtcaatccagatgtgttcaagt

SEQ ID NO: 124366 - DNA, 1195 bp, Zea Mays
aatcaagtgacggttacattcttatcgtaaatagtttttgcacaaacagagcggaaaaaaggaacagtttttgtggaggtgactcctcgcctgtgtcgtcaaatcctccacaccctggactggagtggctgctgctcgtggccggcgatgagcggcggcgggcccggaggtgcgtgcgggccggactcccgcgtggagaccatctcccggctggcgcagtggcgcatcgataccttcggcccctgctcctaccgccggtcggacccctttaagctcggcatctggaactggtacctgtcggtggagaagagccgctccatcgttgtgcgcctcttcccggagcccggccgggtggccaaggagcagccccctctcgcgcgcttcctgctccgcgtctcctgggccggcccgccgcgacgctcctgcgtctcccctggctacggaatcgtcatcggtgtggccaaacgaaggcatggtgcagaagatcgcgagcaagagcgccctgggctgcctgtcgcgcatgctggcggactccatccacgcggacgtgaccatcaacacgacggacggggtgctgaaggcgcacaaggcggtgctggcggcgtgctcccccgtgttcaagagcatgttcgtgcacgacctgagggagaaggagtcgtcgacggtggacatcggcgacatgtgcgtggagtcgtgctcggcgctgctgggcttcgtgtacgggacgatcgagcagggacagttctggaagcaccggctgccgctgctggcggcggcggacaagtacgggatcggcgacatcaaggactgctgcgaggagagcctgctggaggacataggctcgggcaacgtgctggagcggctccacgtggcgtggctgtaccggctggagcggctgaagaaagggtgcctcacctacctgttcgtgttcgggaagatctatgacgtgagggacgagatgcacggcttcttccaccacgcggaccgcgagctcatgcacgacatgttccaggaggtgctcagcgtgtggaagcccatgtgaatggaagtgtccctttccacgcgagctgtgtgtgtgtgtgtgtgtcgtgcttgttcagtcagcagtgtgtggagagcatgctggttatgcatatttgaaacgaaaaggatgctcagaatttgaatggaagctaaattatacatgatgagacag

SEQ ID NO: 124367 - DNA, 144 bp, Zea Mays
ttttatacctaccacatgtattatttacgctaaaaactgtatgattttatgcttgaacacggagtccgtatattagtttattgcatgcatattttttgcatgtacattggaaatacaattccttgatttatgttgttcgtaatt

SEQ ID NO: 124368 - DNA, 1549 bp, Zea Mays
atcataaatagatggcttgcattgcaacacaagagagatgcttggtcgttgtagccaagttcgaattggcactcgtagcatctattctttccggtccggcggatgatcgatgttgatatgtgcggtcgtcggcataatatataatactcgacatcaaacagctagcactagtagggctgcatatgtcccgtgggctcattgcgtgcctcctgccgtgttcgatcgatcggatccccatacgatctactagcctaggctaagctacacgactcgaccgaggaggaggagcgcgctcaggcccgtatagaaaacttggagcatgtcgttaaccacccaagtgtttgggcctccccggctacagggcggtggtggatctattacatcgtcaacgatactgatcaattgagtaaagctctgaaccgacatgatcacctggtggtgttcatgttctcggcggagtggaacgaaccctgcaaggcgatgaagaaaccgttcagggacatggccagggctagaaagatgcaggccgtattctgcttggtggacatcgacaagcttaaagatgctgtggcgcagcagttccaagtggaggcgctgccgacgttcgtgctgtacaagaacggcatacagaaggagagggtcgttggcgccaaggtggacgacctcagagccgccatcgacaggaacatatgattccatctccgatcgatcgatccattcatgctgcatgcatatacggtcgactaataacaacatgaggctagcaaaagacgacggacgatcggatcgtccaacaataaacaaataacattattattaatcttcatttctcatccgtttgctctctctctgtctcctatcgatgggacttgggacgtcatactagctaattaccaccgctacatatttcatttgatttgcagcgaccccttctattcttaatttgagacgctcggtaaacagtcgactctagaaagaacaaataaataggtctcagagctgagccacccctctactctctaaatacatacatctgtagaggtagatattattctcagcaatctctacctacctttatagacggccgcatcaagtcagaaatagacacaacagcaacagtaagcattttcggcggccaacctaaggctgccaaaaattatcagtttaaaacttatgtttttgcctttatgtctctgctccacatgcccctctaccctcttctcgaccgcgcgctcctctgccccgcgtcaaccgatgccgccctcgtcccgaccgtgcggcgctcgccacccgtccgcacgtccctgtctgtccaggtgtataaaaagaatctcccttaaaaaagaatctcgcgtttgtaataccctgaatttgggatataaaatttcttctctaatatccacaaaattcaggtgttaccttttttcttccctctatagatttttttctcttccttttagtagagttttgattatttatttggagatgtattatgactttagtagattaaacccaagggaagacatgaattgttgcatcattctgagcc

SEQ ID NO: 124369 - DNA, 1980 bp, Zea Mays
caggagatgtttgacatatggagcattgtgcaatggtgggacgattggcagcttcgtgtactggtgctgggcagccttagcctgcagtggttcctgctgctggcggcccccatgcgcaagtacagcgtgccatactgcttcagaatgtgcatctggctggcgtacatctccagcgacgccctggcgatctacgcgctggccaccctcttcaaccgccacgcgaggacggtcccggccagctactgccctgctccggcgccggccggcaaggagcagtcgcgcattctggaggtgctatgggcgccgatcctgctcatccacctgggcgggcagaaggagatgacggcgtacgagatcgaggacaacgagctgtggacgcggcacaccgtgaccctggtgagccaggtctcggtggccctgtacgccttctacaagtcgtggcaccccagctccagcgacaggaagctgacggcggccgcggtgctcctgttcgtcatcggcgtcgtcagcttcagcgagaagccggtggccctgaacaaagccaagatcaagcagctggcggacgtgtcggcctggatacaagggacgaagcagcggtcggtgtggagggaggacctgatccacttctccctgttcgaggagagcaacctcttcaccgtcgtgccacgacgtctctggacggtgtgctgcggccacaacaggagggagaaagaggtggccctgcctccggaggacaaggtcctgatggtgctctcggacatgtccttgctagctgccgccaaggagctggtggagcggggtaaagccgagaagctggaggacgtgctcccgcctctggtgctcgtcgccgagaaaggcttgaagcagtggctgcgcggcgcgttcgccttcatctacaccagggcctcggtggtggtcacccgtccctacctcatctaccacctggcgcttgtcccagtgctgcacgtcggcgccctggtgctgttcgcgacgagcgacaagcgcagatacaagcgcgccgacgtgaagataacgtacatcatcctgtgcctcactgccgcgctggacttcctggcggtgttcgtccgcctgctggtgtaccggctcatgtccatgacgtcggtgtcggcgctgtgcgagacgctgcccggctacaacctcatcgacgagtctgtccgggaagctgaccagggcagttgcgccaggtacatctcaagctggtgcaggcggcgaccggatggcgagctgtacaagaaagtcgagccacatctgctcgcggacctggtagagggctcacaggaccgagacctcgccagctacaggatcttcgactcaaccacagagaactgggctctaagcaaggagctgcaggataaatgtggcaaagagataaaagatagcctgcagggcatatcatttgaccggagcgtcctcatatggcacatcgccaccgatctttgcttccgctgctctgacgtcgtcgattatggccaagaagaggtagaagatggaggaggagcagaagggccagaagaagaagaaggaggaggaggagtcggaggagctggacagggaacggaggacaactacgccgtccgagcattacggctccaaatcaattgcacagaggccatatccaactacatggtgcacctgctcaactccaaccccgagatgctgctgaccggaagcaggaaccacattttatctgaagccagggaaggcctcaaatccatcattctgtcggacaaggccattacagaagagctcgccccagagtcagagggctgcacctgcacctgcaggcgctgctgcgctagcatcggtcgctggggatacctgcacgccaagagcctgggtgaaggcggagagttcctttccttcgtctggcttgtgctctcgctcaagggggccaagactttggccgacaagcttcagatgccacccgagacgacgaagccgcacactctcgatcggtga

SEQ ID NO: 124370 - DNA, 1036 bp, Zea Mays
ttttcgcccgtgcgtatgttatgttttccatatataaagaatggcaagacggagaattcctaacatgacgaggcacaattttataaggcatttcctatataaagggagccatgcacaggtcgaggaatcatacacagcaaagcctcaaaacctgatcatcagagaaacgaaaaggaagaggtgagcgtgggagaaaaaacaaaagaaaggaaaagagatatagccctgagaagaatggcccttacaactgatgaactcaagaccaaggccgaggtatactacggtgacgagatctgccagctgtgtacccagctcctgctcagggaagcaggcctccccaatggtctgcttccattgaaggacctaatcgagtgcggctatgtccaggaaactggattcgtgtggctgaagcaaagcaagagggttgaccacatcttccatagtctaggaaggctggtctcttacggcacggagatcaccggctatgccgagaagggcaggatcaggaaggtcaaagggataaagaccagggagctcatgctgtgggtcccggtggaggagattgctcttgatgatgatccagcgactgggaagcttgtctgcaagagcattgctgggattaccaaaaccttccctgcatcggctttccatatcccggagaaggagaacaatgtgaaggcgaactgtgctgcactcaagccggtggtcctcatggagagagctccacgagttgttaaaaacagctgatccgccttcaattctgcatccactggtatttggagttgacgtacggccgccatatcagcccttaatcctacgtatttaaataatggttgaactagtgctttactgttttccgttcatgtacttgggaaatgataacacaaagttcttccgcctatatatatactgcggttgtacgattgccctggcatctatataatattgtcctgtaaggcaaccacccaacttcctttcatgtactacgtagctctatattactaatacaaatcatgttgtggacttctatgagata

SEQ ID NO: 124371 - DNA, 1154 bp, Zea Mays
accacaagctacacagctcagcccagcctccctttcccttgaagcctctccaccaacccagagtcagagagagagagaggaccaaggcaggcagccgtcagcgagccaggcagccatgggcaaggactgcggcaaccacggggacgatgacttccggcagtcatgccggcgcctgctggccatcctgctgaccatggcgctgctggtgggcgtcgtggcgctgatcgtgtacctggtgctccgccccacgcacccgcgcttctacctgcaggacgcggcgctgcggcagctggacctgagcaacggctcggccccgctgctgtccacggcggcgcaggtcaccgtggcgtcccgcaaccccaacggccgcgtcggcgtctactacgaccgcctcgacgtctacgccacgtacaagtaccagcaggtgacgctggcgtccaggctgcccgcggtgtaccagggccacggcgacgtcgacgtctggtcgcccgtgctggccggccccgccgtccccttcgcgcccttcctcgccgacgcgctcgccaaggacctcgccgcggggtacctcgtcctgcagctcaggatcgacgggagggtccgctggaaggtcggcagctgggtgtcgggccactaccacatgttcgtcacctgcccggcttacttcatcagctccggcgccggctccggctaccgcggcgctgtcggcgcgcacgggctcaggttccagaccaccacgtactgccgcgtcgaggtctagactctagcgagcgagaggtcgatcaccgccgagaccgcccgacctccacgtgctctgctcctgccgcgccgccgaggtaggccacaccttgtcatgtcgcatactgcaaagcggaaacaaatgaagtgatacagaggttggaaaaaaagaaaaagaacaagtgtgaggtgatttagtgagggttaagcagtgtatcggtgtgattacatatatgttttttgttttgtgtcgcgatctttgttcagttcagcgttcagttgttcataatataaattctaaaaagttcattcagttcaggtgagacgcttctgtctttcttgtgccgctgccgcattctgcttttagttaggctgttgggattagtgtagctcacggtaccggggattagagagctttt

SEQ ID NO: 124372 - DNA, 1529 bp, Zea Mays
acaacaccaccgctcgcctgctctcaccgaccagcgccgcgccactcctccgccggatctccagcatgcagccctcctcctcgtcctcctccgctcacccgcccgaccatcccaactccaagcccccggccccgccggcccccgccatgggctaccccgcccccaacgggaaccccagcgcctacttcgccgccgcgccgcccgccgccgccgccgccaacggctccgctccggcgaccttcggcgtcgcgtacccctaccccgcccctcctcaccaccatcacccgccgccgcaccaccactacccgtatcccccgcccccgccgacgcaccaccactacgcggcccacccgccgccgccgcccacctgcctgcgccgcctcctcgccgccgtcgttggcgccttccttctcctcggcgccgccaccttcatagtctggctcctcctccgcccgcgcgccccggccttctccctcacctccctggccctctcccgcgtcgcttactcccccgccaactcctcactctccgcctccttcgacgctgccctcctcgccgccaaccccaacgccaagctctccgtcgcctacttctcacccctcgcatccgtctccttcgcgccctcctccccgctcgccgtcgcctcgctcgcgcccttcggccagggccccggcaacaccaccacgatcgccttccgcctcgtcgtagaggatgcctacgtcgggcccgacgacgccgcagcgctcaagaccggcgccgggggcgctgtcgacgtcgaggtcaggctcatggccgtcgccgtcttcgacagaggtggctggcgcacgcgccggagggtcatgagggttatgtgcgatggcgtcaaggtggttttccgcgggaagaattccactgaggcggccttcgatgggccgccaagaaggtgcgatgtcgtgttgtgaaggagttaaggatcatcataacaggtttgctgactactctggatgctgatcggggggtacaagaagctaactggcacaatgggggtgcgtttatctgcatttgatttgatgagcaatactcaagctgggtaaccatgcttttatctggctgtaataggagtagcgagtgagagaagtctggaatgatccatatgcttggtgggtaatgagtggtctgtgtagcttcaacagaaatgtttgtgaaagttacggtaagaattactgtgcacgcgtggtggttaactggtttatgtgggcgtgtgctatggagcctctcatgagtcatgaaacgaatcggtgtacattgaactagcgcttggaatgaagccctgccattcttggagatggatggctggatcctgtaaccgtcctgtccacttagggcttgtactgttgcacatggatcgaagggtactgagggggattaaaactcgttttagcctactggatgtatgtgtgcatagcacatatatcaactaaaaaaaactcctctatgtggtggggagagagagagagtatgattatgtctaataaaaaagatcaaaataa

SEQ ID NO: 124373 - DNA, 2663 bp, Zea Mays
cgcacgcacgaatcttacgcggcgttcgaacgaatctccccttcctccgtgtagacgtgtagtatacccgttgccctccctccttccttcgttcctcccacggcgacacaccacgcgtcgccgaccaccgccaccgaatcgccgcttcccatcatcatagactatcgaggcgtcgtcacacggcccgctcttccatcagggcgcgtccaccggccaagccgccctgacccccggcgcattctcctctcggtgccgactgccgagatctccccggccctctcccgagaggagtgcccgctcttgacccgacgtccgcgatgacggtggcggcgctgcaggcgatggacgcgctgtcgcggcgggcgaccatgctgcgggactctctgcggcgaagccaggggaacacggacggcatggtcaccatcctcggctccttcgaccaccgcctctccgcgctcgaggccgcaatgcgccccacccaggtgaggacgcacgcgatccggacggcgcatgagaatatcgaccggaccatcaaggccgccgacggcatcctctcccagttcgatctcgctcgccgggctgaggcaacaatattgaggggtccccatgaggatttggagagctacctggaggcagtggatgtgctgaaaggcatttctcgcttcttttcctcaaacaagaacttcaagagtagtgaaggagttctgaatcatgtcaacaatctgttagctaaatctactctgaagattgaagaggaatttaagcagctgatgagtacatacagcaaacctatcgagccagatcgcctgtttgactgtctacccaagtctcttcgtccaacaaaaggtgaccacgagaccgatggaggcagccatcatccatccaaaggcttggaggctgccgtatacaggaccccaacattaattcctcccagaatattgcctctcatgaatgacatagctcagcagttggttcaggctggaaatcagcaaacttgctataaaatctacagagattatcgtgcttcagcactagaggtgagccttcggaagttaggagtggaaaaacttactaaagatgatgtacaaaaaatgcaatgggaggctttggaggctaaaattggaaactggatacattttatgcgaatcgcggtcaaattattactagcaggagaaagaaaaatctgtgatcagatttttgatggtgtgaattttaacaaaggccattgttttgctgaactcacagcaaatagtattataactcttttcagctttggagatgctgttgctaaaagcaaaaggtctcctgaaaagctgtttgtgttgcttgacatgtatgaagtaatgcgtgaacttcaaccagagatcgatgaaatatttgaaggcaaaccttgcactgagatgcgggaagctgcatcaagcttaacaaagcgcttggcgcagactgcccaggaaacatttgcagattttgaggaggcagttgaaaaagatgcttcaaaaactattgttcaggatggaacagtccatcctttgactagctatgtgatcaattatgtcaaattcctattcgattaccagtcaacattgaagctactgtttcaggaatttgatagtggcactgaggcagaatctcagcttgctgcagttaccacaaggataatgcaggccctacagaataacctagatgggaaatctaaacaatataaggatcctgcattgacacacttgtttcttatgaacaacatccactatatggttagatctgttcgcagatcagaagcaaaagatatacttggtgatgactggattcagaggcatcgcaggattgtgcagcaaaatgccaatcaatataaacgtgttgcttgggcaaagattcttcagacactttctgttcaaggtgcgggcagcgggggtgaccttaccagcagtagtgtttcaagagccacaatcaaagaacggtttaagtctttcaatacacaattcgaagagcttcacgcgaagcaatcacaatggatcgtacctgatcaagaactacgagaatccttgaggctcgctgtagccgaagtcctgttgccagcctaccgatcttttatcaaacgctttggcaatcttgtggacaacaacaagaacccgcagaagtacgtgcggtacagcccagaagcagtggaccaacttctaggccagttcttcgaagggcagcaatgggcggagcaaaagcgctgagcaacatagagtgagagtgacggcatgagtacagccagatgccagcactacctagttttcttttctcagaaaaagcgcgcctaagtttcttttctcgccatttgggtggctggaacggaaagctaacggcaaaaaagtgttggtggaactttcttgctggaggttcctaaacttattagtgttgatctataaaaggtaaaagaacgagacctctacggttgtggccttgtgggttcacaatcagcagttccaacaccaaggactagtttgataattccatttttccaaaggattttcatttttcaagggaaattcattcatttttccttaggaaaacgggaatcccttagaaaaatatagtaacttttttttgggtgccgtagaagtattgttttcatcagtatagaaccatatgttgcaataaaattgttccttaaagat

SEQ ID NO: 124374 - DNA, 2179 bp, Zea Mays
tctccccggccctctcccgagaggagtgcccgctcttgacccgacgtccgcgatgacggtggcggcgctgcaggcgatggacgcgctgtcgcggcgggcgaccatgctgcgggactctctgcggcgaagccaggggaacacggacggcatggtcaccatcctcggctccttcgaccaccgcctctccgcgctcgaggccgcaatgcgccccacccaggtgaggacgcacgcgatccggacggcgcatgagaatatcgaccggaccatcaaggccgccgacggcatcctctcccagttcgatctcgctcgccgggctgaggcaacaatattgaggggtccccatgaggatttggagagctacctggaggcagtggatgtgctgaaaggcatttctcgcttcttttcctcaaacaagaacttcaagagtagtgaaggagttctgaatcatgtcaacaatctgttagctaaatctactctgaagattgaagaggaatttaagcagctgatgagtacatacagcaaacctatcgagccagatcgcctgtttgactgtctacccaagtctcttcgtccaacaaaaggtgaccacgagaccgatggaggcagccatcatccatccaaaggcttggaggctgccgtatacaggaccccaacattaattcctcccagaatattgcctctcatgaatgacatagctcagcagttggttcaggctggaaatcagcaaacttgctataaaatctacagagattatcgtgcttcagcactagaggtgagccttcggaagttaggagtggaaaaacttactaaagatgatgtacaaaaaatgcaatgggaggctttggaggctaaaattggaaactggatacattttatgcgaatcgcggtcaaattattactagcaggagaaagaaaaatctgtgatcagatttttgatggtgtgaattttaacaaaggccattgttttgctgaactcacagcaaatagtattataactcttttcagctttggagatgctgttgctaaaagcaaaaggtctcctgaaaagctgtttgtgttgcttgacatgtatgaagtaatgcgtgaacttcaaccagagatcgatgaaatatttgaaggcaaaccttgcactgagatgcgggaagctgcatcaagcttaacaaagcgcttggcgcagactgcccaggaaacatttgcagattttgaggaggcagttgaaaaagatgcttcaaaaactattgttcaggatggaacagtccatcctttgactagctatgtgatcaattatgtcaaattcctattcgattaccagtcaacattgaagctactgtttcaggaatttgatagtggcactgaggcagaatctcagcttgctgcagttaccacaaggataatgcaggccctacagaataacctagatgggaaatctaaacaatataaggatcctgcattgacacacttgtttcttatgaacaacatccactatatggttagatctgttcgcagatcagaagcaaaagatatacttggtgatgactggattcagaggcatcgcaggattgtgcagcaaaatgccaatcaatataaacgtgttgcttgggcaaagattcttcagacactttctgttcaaggtgcgggcagcgggggtgaccttaccagcagtagtgtttcaagagccacaatcaaagaacggtttaagtctttcaatacacaattcgaagagcttcacgcgaagcaatcacaatggatcgtacctgatcaagaactacgagaatccttgaggctcgctgtagccgaagtcctgttgccagcctaccgatcttttatcaaacgctttggcaatcttgtggacaacaacaagaacccgcagaagtacgtgcggtacagcccagaagcagtggaccaacttctaggccagttcttcgaagggcagcaatgggcggagcaaaagcgctgagcaacatagagtgagagtgacggcatgagtacagccagatgccaaaaaagcgcgcctaagtttcttttctcgccatttgggtggctggaacggaaagctaacggcaaaaaagtgttggtggaactttcttgctggaggttcctaaacttattagtgttgatctataaaaggtaaaagaacgagacctctacggttgtggccttgtgggttcacaatcagcag

SEQ ID NO: 124375 - DNA, 770 bp, Zea Mays
gcgaaagggcctctagcgtaatggttaaggcttcagagtagcacctccaggtcccgggttcgatccccatcgggggcgaatttcgggctcgattaaaaaaaatccccttgttgtgccccgcccgctccagggttacgtcctgcacgccaccctccggctcggccgttgcagagtggccggtgacggcccgctagtgatgggggtcagggttcggggattttctcggccgggaccatggtttttaaagcggcaaggcggtctaaggcgttggaccaccgcctggacgcctagacgacgcctaggcgaggtaggcgggcaaggcgcctaggcgttagaccaccgcccggacgcctaggcgacgccttaagaacagtggccgggaccatgttttggtctcttcttaatataataccgggaggacggtctttccctccccagccgagtttttttaaaagtttctagaaaagggtagccatgatggaataagtcttgagcatctagaggacagcaggcgcttttgactgtcctctgtaatcctttagcatctagaggacagcttgactgtcctctgtagtctctttagcatctataggacagcagtcgctttttcactgtcctctgtagtcgctttagcatctagaggacaacagtcgcttttgactgtcctctgtagtctctttagcatctagaggacaatcctgttgtgtagtgtgtgtgagaaggtgtggtagtgcagcctctagggctataaatatgggtctccaaccctt

SEQ ID NO: 124376 - DNA, 1014 bp, Zea Mays
atgggatctccctcacatgacgtgcggcatcgtgccgtagggtttgctcttgatccccatcatcctgcgcgtcctcgtgatgaagaggtcccgtggcttgacggcaccggggatgtgcccgatgagcgtcatgaacggcagctccgccagcgcgtcgcgctggccgagcgtcacggtcatggacgtcctcggggacggcttgtaccggtgcagcttctcctcccggggggcacccttgaccagcaggcggaggttccgggacaccaccatcgcctgccgctgcgccaggttgccctgcttggcctccggcacgtccgtgatgtcgccgacggcgaacacgttccgcagcccgccgacgcgcaggtggtcgtccacccggaggtggccctcctcgtccacgtgctccccgaggatcgtcccgccgagccagccggacgccacgggccggcccgtgcacacgaagtggcagtcggcctccagcgtctcccccgccgacgtggtgaacgtccgggtgtccggggtggccgacgccaggtccaccgtctggtccagcagcacggtgacgttcttggaccgcagccactcgagcgccttggccgacgcccgggcgcccatgaccttgagcagccgcggcgcgccgtggacgatggtgacgcgcttctcggggctcttcatcacgatctccgccgccagctccacgccgatgggcccgccgccgacgatcagcaccgactccgccgcgtcgatccggtccttgtcgcgctggaacatctccagccggtccgaccgcttctgcggccggttgcacgtgcgccccgtcgcgaccacgaggaagtcgtacgccacggcgcggccgatggaggtgagcaccacggagtcgtccaggccgacggcggaggcggtgaccaccttggcgtgcgtcaggtagtcggagtgcgcgatcaccgtgcgctccaccgccgccgggtccaccttggcgcgcaggttggcccacgggatctcgaagtactcctt

SEQ ID NO: 124377 - DNA, 2044 bp, Zea Mays
gccattcctacctgttgccacatctagtggttcggcctttccatctgccgttcgcccagcgtgttctccctctagtgcggcaactgggcgaccgccgccgccgctctactccgggtgcccaggcgttcgtccgtaccttctcaggccttcatcgcgtccttcgccggcgacgatcaccgacaaggatggaaagaacaattaattccttgatgtacaaaggatctattcctgatgcaattaatcaatcaagaagggagaagaagctctttgtagtctacatatcaggtgaagatgaggcttccagtagtttggaacagtcatcactgattgatgaaaacgtggttgaagtgatcggtagatgttgcatcttattgcatctcaagcaaggcaatgttgatgcatcacagttttcagctatctatccccagaagtctgtaccaagtatatcagtgattggactgaatggagttctgctgtggaatcatgatggatatatcaactctgaaaatctgaaagaaagcattgagaaagcgtgggctgctcttcatctacaggagacagcagcgaccttgttgacagcatcacttgctacaagaaattctgaacctgtgaattctgctactactgttttgccagctcaagggggctcttctactttagaaaatccttctgatttatccagtcaatcaccagatgtttctggtgccagtgaagttgctcattcaactgatctggtatcacaaattcctaatagcactgccctttatgaacctcttgagataaatgaaaaagaagggtcaaaatcaaactcggatgataaaactgttgagaagctaggttcaacaagtactgaatttgattgtgatttgcttgatagttcaaggaagtcaaatacggtcagttctgcagattcgaagggagaagacattacaccatcagcaaaaagaaagaacaaagatgatggaagtcacacttctattcccttggaggatactcctagtacactcactaataaaggagtttcttcccagtcacgcgtggaacaagacaaggcaacttcttttgtttctgtgaagtcagatgatattcagcttagtattcgtatgcccagtggaaatagactggagatcaaactaacaaaacaagatgttttaaggaaagtgaagaatttcgtggatgaaaaccaaggcaatgggcttggctcatatgacctttctctggtttatcctaaaagagttttctttgaacaagatatggaagcaacactatccgagctgggtattcaaaaccgtcatgcaatgattgttgttccacatcggcagtctggtcaggtatcaaggcgtcactcctcggcatcttatgatatgggtgtcaattcaggtgcggatgatgttggtggcaattcaggtgcggggggatactttggttacctgagaaccgtcctgtcttatgtgaatccactctcctacctgaggggaaataccaactcatcaaatacagagctacagtcaaatgaaggcctgcggcagcttagacatggatctggtccatggagtgagccacggcctcttggcaataggggccatgaagtgactgatgcagactctgcaaacacgctgcgaaggcggcctagaccatttggtgccaatatccacactctggggagcgaggatcatggtccgtctgatgaaagaaatgttttctggaacgggaactcgacagagtttggaggcgacgacagaaaataggttgtggcgtggctggcagggcctgggacgacactatcagacagaatcaaagttgcgaatagacagctgaaacaaatgcctcgacaggcttattgaggaataagtattgagattatagtgctgaaataatcgctgaattgtgatgtttacatttgtggaaacatacggtcgctggatccgtatactcgttgtatagtacatagccacagatatattaaatccgaactgcttggttctactgtctgatcgaacgacatttgttttggcgttggctacgaagaaaatttgccgctacc

SEQ ID NO: 124378 - DNA, 411 bp, Zea Mays
atgcggagccagaggtcgtcgtcgaaggcggcggccgtgagcaacacctgcgggaagctggtggcggcgcggacggcggcgtcgaagtggagccccttgcccgaggtggccagaccatgcagcgcctcgttccaccacttgtacccggggacgccaagccgcgggacccccggcgcctggtcgcccagctgcgcgatcttctccgcggccgtcagccgggacaccaggtccgccgcgcgctgcgccggggccagcgtcacgtcgcagaacgcgaggccctccgacgcctccgcggacgacgggccgcacgagaacggcgggtccccggccacggccagtactggcgccgcgccgtgcagcgccgccagcgtcactagtagtagtgctagcgtcgctgccgccatgctatag

SEQ ID NO: 124379 - DNA, 786 bp, Zea Mays
ccgctggtcgggtcggcgcgcatcctcatgtccgtcatgggcaccttggtgaactcctccgggtaccacgtcactggcagcctcccgctggggttgtggtcgccgaatagcactttggcgatggcgagcccgccggcctgtccggggtacccagcccacaagatggcaccgatctttgggttcgactgcgcgaacgtgatgtccaccgttggcgataagggccatgccgtcgttggcattggggccgatgacggcggcggaggtcaccgtggaccggtcgagtgggagtatgccgccgtcgttcttgagcagcacgatgccgtcctgcgctgcctcgagcgcaagattcctatgctccggcgtgcagatatccgcggcgccgaggacgccgtacatgttcttcctcgggtcgccgtcgaagtgtcccagccgcatccgaaccgcgtacaggttggtgagggctttgtcgatgtcctgctccgtcctggaaatagagaaattagagtgaaaaaaaaacagagaagaggagcagcagagcaggaacattggccaagaaggagaaatgtaccagccttgagcgagacggcgacggcgtcctccggcgtgggcgcgtaccgctgcgcgtcgcgcatgatcgccacggcgtcgcagtccgaggcgacgtacccatcgaggccccagtcccccctgacggtcccggccgtggcgtgcttgcagcacgcggatgtctgcaggagcgaggacgagctgtttccctggatgccccggacgaaggcgacggcgtag

SEQ ID NO: 124380 - DNA, 2602 bp, Zea Mays
atagtgcatcacacgcaaacaccagtgagcgacatgaggctcagctctgtccggcctgttgacccagatgcatggtgtatttaacaagcacacaatcccgccacccactgcacccatggcctctcactcacgttggacatggatcatgctgcatgcatcttcttaaccacctgactaatactgcctctttgtgctttatttctccacatactactaccggcgcaaacgctgtcatggcagcgcttctggcgatactaatgcacctcctggtcccggcgctgctgctgatgagagtcgtggcagtggtggcggccggggcaccgccgttctcgtgcggcggcggcccgtcgctggggttgccgttctgcaacacgaagctccccgctgctcagcgcgcggcggacctagtgtcgcggatgacacccgcggagaaggcgtcgcagctcggggatgtcgccaacggggtgccgcggctgggcgtcccctcgtacaagtggtggaacgaggccctgcacggggtggccatctcgggcaaggggatccacatggaccggggcgccgtccgctccgccaccagcttcccgcaggtgctgctcaccgccgcgtccttcaacgacaacctctggttccgcatcggccaggccacaggcaaggaggctcgcgcattctacaacatcgggcaggcggaggggctgaccatgtggtccccgaatgtgaacatcttccgggacccgcggtggggccgcggccaggagacgcccggcgaggaccccgcggtggccagccggtacgccgccgcctttgtccgcggtctgcagggcagcagcagcaacacaaaatcagtgccgccggtgctgctgacctcggcgtgctgcaagcacgccacggcgtacgacctggaggactggaagggcgtgacgcggtacagcttcagggccaccgtgacggttcaggacctggcggacaccttcaacccgccgttccggagctgcgtggtcgatggaaaggccagctgcgtcatgtgtgcctacacgtccgtcaatggcgtgccgtcctgcgccaacgccgatctgctcaccaagaccttcaggggaagctggggactcgacgggtatgtcgccgcggactgcgacgcggtgtccatcatgcgcaattcacagttctatcgcccgacggcggaggacaccgtcgcgaccacgctcaaagccggattggacatagattgcggtccctacgtccagcaacacgccatggccgccatccagaaggggaagctgacgcagcaggacgttgacaaggccgtcaagaacctcttcactacccgcatgcggctgggccacttcgatggcgaccccaaggcccacgtgtacggtaacctcggagccgcccacatctgcacgcaggagcacaagaacctagcgctcgaggcggcgttggacggcattgtcttactcaagaacagcgccggcgtcctcccgctcaagcgagggtcggtcgcctctgccgccgtcatcggccacaacgccaacgacgttctcgccctcctcggcaactactggggcccaccgtgcgcgccgaccacgcctctccaagggatccaggggtacgtcaagaacgtcaggttcctggccggctgccacaaggcggcctgcaacgtcgccgcgacgccccaggcggccgcgctggcgagcacgtcggattccgtgatcctgttcatgggactgagccaggagcaggagagcgaagggaaagacaggacgacacttctccttccgggtaaccagcagagcttgatcaccgccgtagccaatgccgcgaagcggcctgtcatcttggtactcctcactggcggcccggtagacatcacgttcgcccaggcgaatcccaagatcggcgccatcctgtgggccggctaccctggccaggctggcggccttgccattgccaaagtcctcttcggtgagaagaaccccagtgggaggctgccggtgacgtggtacccggaggagttcaccaaggtccccatgacggacatgcggatgcgcagcgcgggcagctaccccggccggagctaccgcttctacaaaggcaagaccatctataagttcggctacggcctcagctactccaagttctctcaccgggtagtcaccgcccgcaacaacccggcgcacaacacgaccctactactcgccgccggccacgcggcgacgaccgaggacaacttaagctaccacgtcgaccacatcggcgacgagctgtgccgtcagctcaagttcttggcagtggtcaaggtgcagaatcacggcccaatggacgggaagcacacggcgctcatgttcctccggtggccgaacgcgaccgacggccgaccagcgaggcagctcgtcgggttccagagccagcacatcaaggcaggggagaaggcgcacctgaggtttgaggtaagcccgtgtgaggatttcagcagggtgagggacgatggcagaaaagtcattgataaagggtcacattttctcaaggttggcaagcatgagctggagattagtttcggggcatgagatttttttcctttgtggaaaacaaaagcatatatatagga

SEQ ID NO: 124381 - DNA, 1888 bp, Zea Mays
atgctcccgctccgtcgccccgcctccctcgccgcccgccgcctcctccgcgacaaccagcgcatcagcgccctcgcccgcgcgggcgatgtcgccgcggcgcgccgagtgttcgacgccatgactcaccgcgatgttgtctcctggaacgcgctcctcaccgcgctctggcgcgccggccgccaccacctcccagccgctcgccgcctcttcgacgaggccatgccttcccgcgacgtcgtctcctggaactcaatcatcgccggctgcctcgctcacggggacttggacgccgcctccgcctacttcgccggcgccccggagcgcaacgtggccacgtggaacgccatgctcgcggggctcgtccggctcggccgagtggttgacgcccagaggctgttcgacgaaatgcccgagaggaacgtggtgtcgtatacaaccatggtggactggctcgcgcggcgcggtgaggtggagagggcgcgggaggtgtttgactccatgccagacaggaatttggtgtcgtgggccgcgatgatcagtgggtgtgttgagaatggcatgtttgtcgaggcgagggaattgtttgaagcgatgcccgagaagaatgttgtggcatgcactgcgatgatcactggacactgcaaacagggggatgtggatagcgctaggaggctgtttgatgggattcgtgccaaggatgtcatctcctggaatgccatgattgctggatatgttcacaatggacacggggaagaagccatgagattgcatgctttaatgttcagagaaggtgtaaaaccggatcatgcgactcttattgcagtcctgacagcttgttctgcccttgctttgctcaggcaaggaaaatccacacatgctattgccatcaaagcaatgctagaatctggcatctctttttctaatgccttgatgacaatgtacagtaaatgcggcaatgtgggtgagtcagagttagtcttcatcaatcttagaaccaaggatattgtttcttggaacacaataattgctgcatatgcacaacatggcaaatatcagaaagttatagcacttttccatgagatggaagtgactggacttattcctgatgatatcaccttccttagtgtgttatcggcatgcgggcatgttggcatggtggatgccagcttgaaattgttcgatctgatgtcatctaaatacgccatatccccaagagctgaacactatgcttgtattgtggatatattgagccgagcaggacaattggagaaagcttctagttatataaaacatatgccattaaaagctgagaaaaatgtatggggctctttgcttggagcatgtcagatacatggtaacgtgcaactcggtgaacttgctgctaagatgcttgttcaatcagactctcaaagttcaggtccttatgtgattctttcgaatatatatgctgctgctggcatgtggggtcaagtcaatcaaataagaggtcagatgaaagaaagaggtgtgaagaaacaacctggatacagttggactgagattggaaatgaagttcatatgtttgtgggtggagatgcatctcatccagagatgagaaagatcatatctgagctgagaaaaatcagcttccatatgcgaatggtcaccaatgaagctcatataatggtagagctggcacaagaatgtggtcacttttcataatctcaagtgctcatgccatttggaacatccactctgctcagtatcttatgagttcaaggatcattttttttggagtatgggcatgtttggattctttacaggttactgtgtcacctagctgggcaaggggttggtgtggaatcagagtttggttctctggttagcatcgccttggtgcctgtgc

SEQ ID NO: 124382 - DNA, 459 bp, Zea Mays
atggaggccgccgcgttcgacttccgcaccacctacgtcaccaccggggacttcatgacatccaccggcgggaaggtgcagctgctgctgctggactgggtggtcagtagagagacgtgccgggaggcggcacggaacgccacggcgtacatgtgcgtcagcggcagctgcgagcgcgtcgactcgtggaacggaccgggctacctgcctacctctgcaactgctccgcggcccctacgtccctgccggatcctaacaacaagtacccttgctctgttcctggaacttgcaccaacactcctggaagcttcatctgctcctgccccgacaatcatccacggcgacgtcaagtcgcccaacttcctcattgaggagggctacgccgccaaggtgtccgacttcgtgccagtggcggacccaggatttagagtgtgggtattcgaaaattttctaggatga

SEQ ID NO: 124383 - DNA, 537 bp, Zea Mays
tatcaatgagcagccaaagggtgaggtgcgtgcgttctttgatgtccacgaacaagaagggagccaccctggaggagtgcatctagagatgactggacaaaatgttacagagtgcatcggcggttcacgtacggtgaccttcgatgatctggggtcacgctaccacacgcactgcgacccaaggctcaatgcctcacagtctctggagatggcatttatcatcgccgagcgccttaggaaaaggaggatggcctcgtcgcctttgtacacgaaccagctgggttccattccatcaatgggtctgtgaacaacactaggttcactgtcaaggactagtccttgggttttgtttcagctgctgtgtcaaactttgctggcatgcactggtaaactagatagcctgctgtactgctcattcccggcactgggtctgccctcaaagtataatagatactcatcactttttgaccactctatttatcttgttcattattcctggaatgttttcccgaaatgtctgtctaccatgtactgctg

SEQ ID NO: 124384 - DNA, 1777 bp, Zea Mays
tccaccccaaaatggcactcgcgccatcacccccagcgctgccgcccaacccggcgctccctttgccgtggtgggggcgggccggccgcggtgcgctcctcggcgcccgcgcccgcgtccgcgccgtccgcgcggcgctacggcccccgagccagtggtccgtcgggagctggcggggccgcccggcgcagcagcagcccgagtacccggacaaggcggacctggaagacgtgctgcggacggtgggaacgttcccgcccatcgtcttcgccggcgaggcgcgcaccctcgaggagcgcctcgcggaggccgccgtcggccgggccttcctcctccagggcggcgactgcgccgagagcttcaaggagttcaacgccaacaacatcagggacaccttccgcgtcctcctgcaaatgtccgttgtgctcatgttcggaggccagatgcctgtcgtcaaggtgggaagaatggcagggcagtttgcgaagccaaggtcagatggttttgaggagcggaatggattgaagttgccaagctatagaggggacaatatcaatggggatgcattcaatggggagtcaaggttgccagatccacaccgcatgataagggcgtactcacagtctgcagcaacactgaatctgctgcgggcattcgcaactggaggttatgctgcaatgcagagggtagcacaatggaaccttgatttcacagagaacagcgaacaaggtgataggtacatggagttggctcaccgagttgacgaagctttggggttcatgtcagctgctgggctccctttagatcaccctataatgacaacagcagaattctggacgtcacatgagtgccttcttctaccttatgagcaagcgctcactcgtgaggattccaccacgggcctctattatgactgctctgcccacttcctatgggtcggagagcgcactcgccagcttgatggtgctcacgttgagttccttcgaggcattgccaaccctcttggtatcaaggttagtgacaagatggacccagcagaacttgtgcggttgattgatatattgaatcccgaaaacagggctgggagaataaccatcatcacaagaatgggacctgaaaacatgagggtgaaacttccacacctgatacgcgctgtccgtggggccggtcagatagtaacatgggttactgacccaatgcatgggaacactatgaaggccccttgcggactcaaaacccgctcgttcgacaggattttgggtgaggtgcgtgcgttctttgatgtccacgaacaagaagggagccaccctggaggagtgcatctagagatgactggacaaaatgttacagagtgcatcggcggttcacgtacggtgaccttcgatgatctggggtcacgctaccacacgcactgcgacccaaggctcaatgcctcacagtctctggagatggcatttatcatcgccgagcgccttaggaaaaggaggatggcctcgtcgcctttgtacacgaaccagctgggttccattccatcaatgggtctgtgaacaacactaggttcactgtcaaggactagtccttgggttttgtttcagctgctgtgtcaaactttgctggcatgcactggtaaactagatagcctgctgtactgctcattcccggcactgggtctgccctcaaagtataatagatactcatcactttttgaccactctatttatcttgttcattattcctggaatgttttcccgaaatgtctgtctaccatgtactgctg

SEQ ID NO: 124385 - DNA, 1572 bp, Zea Mays
aagaatcaattttttgaattcaaaccaagaagggaatagttgtgaaaatctttcacaaaaggacaaaaggcaaaaaaaagcccgtcgaatgctggatgaacgctcaaattattcaaaacccacgcgcacgtctcttctcacgcaaggagccccttacgacgctgggccccacccgccacaaggaccaaaaaatgctttgtctgtgtgtccggcccagtacgtatacgtacattgctgcaggaggccccctctcaaaaaaaaatcatgaaaagtcgtgccctgctcagtggtctaccccgtctttccgcttcgtcccggcccgggcacacgcgacggaagcgaaaccctctccctataaaacctctcgactagtcacgtccgcttggcagggaccagtccatctcgtctcgtcccagcaaagcaaaggcagccatgccccacagtctcttcctgctcgtcgtcctcctcgccgccgcgcaagccagcgcggccacgccgcggcagctgttcctcgtgagccggccgcccatcacgctcaccaaccaccacggccagctgctgacgggcaactactccgtcaacctgctctggtacgggcgtttcacgccggcgcagcgcgccgtggtggccgacttcatcctctccctctcggggacggggccggggtccgtggcggcgtggtgggccacgacgtcgcggtaccatcctggcgcagcacggctgtcgctggggcgacaggtgctggacccgtcgcgctccctaggccgccgcctctcggagtcgtcgctagcgtccctggcgacgcgcctggccccgcaccgcggctccgtggcggtcgtggtgacggcgccggacgtgctcgtggacgggttctgcctctcccgctgcggcctccacgcgtcgtccccgaccccgaacgccacccgcgggcgtggccgcgggcggtacgtgtacgcgtgggtggggaaccccgcggagcagtgcccgggggagtgcgcatggcccttccaccagccgctctacggcccgcagccggcggcggcgccgctggtggccccgaacgcggacgtcgggatggacggcgcggtgatcacgctggccacgctgctggcgggcgcggtgaccaacccgtacggcggcggcttcttccagggccccgcggaggcgccgatggaggccgtcacggcgtgcgcgggcgtgttcggggccggcgcctaccaggggtacccggggcagctgcgcgtggacgccgccacgggcgccagctacaacgccgtggggatcgccggccgacgcttcctgctgccggccatgtgggaccccgaaacagcgcagtgctccacgccgctggactagatagatagatagatgcccgtgccgccgtgcatgactgtggtggagtcgagtgtcggtgctgctgtttcttactttctttctcgtgtcccctccctcgcattgtggatataccactcaccaaccatttcgtttgtggcttactactactactccggagggttggtggttaacgttttggaagagcaacagcaatggagcagccagcagagcctctgc

SEQ ID NO: 124386 - DNA, 1550 bp, Zea Mays
ggcctcggcgcaacggcccttcccgcgcgactgcacttgcacacgcggcggagaaatgaaagcgccagcggctagtggataagctaagctctccctctcgctgagccggctgttgctctccccacaaccccgcgcgcgggggagcgataaaccctagtcttcgccgtcgtcgcaggaggacccgcgatgtcgcacttcgggaggtcaggcccgccggacatccgcgacaccttctcgctcctcgtcctcaacatcagcttccgcaccacggccgacgacctcttcccgctcttcgagcgctacggcaaggtcgtcgacgtcttcatcccgagggaccggaggaccggggactcgaggggtttcgcgttcgtgcggtacaagtacgccgacgaggcgcagaaggctatagatcggctcgatggccgtgatgtggatgggagaaacatcatggtgcagtttgcaaagtacggccccaatgctgagccaatccgcaaaggaagggttaaagagggggttgagaaatcacaagacagatcaagaagccgcagtccaaggccaaggcacagagatagagatcatagaagccaaagtcgcagcaggagcagagaaaggcatgtccgtgatagagacaggggctatcgtcgtcggagcagaagtagaagccgaagtcttagttcaagccctgacaacagaagtcatcatagagcaagagatgatgataagcgcaagagcatgagtaagagcaggagcaggagcaggagcacaagtagaagccgctcatactatagtgcttcacctgcccggcacagtgctagccctcgcaagagcccaccgccacagaggagccccactcctgcaaagcatgccaatggaaaagtagcacctctgtcacgctgtgtttctccattaccgaagcgtgcaacctcccgcagcccaggcagtgatggcaaggcaattcacgtcaggagtaaagcttgctgatttggtgatgcctagaaaacagccttctcacggagtcacgggattgcagaaccttgagaaggttgattgagcacaatggaagtagcagtctgcaatcaaccgcgatccaagttatctgttcgtgagatgggttgctgtttactggtagaacggtattgcacgggaccaactatggtggatgatgtcttgctgtcattggtgttgatatggcaatggtgcagctgatgtgacgatgcagatgccgatgctgctgacagtgaccatcttgtttgcacaatgatcccttacaagttatgttggttcttatccccccttctcgcagatgcttttgcatcagtgctagttggaacatggtgttgaggggttaattatgacgggcatgggtcctgtttatcatgtggtggtgttgagtgactccttttgctatctgtggccctagctttattcattatttgaagcaaccattaataaaatccatgaactcaattattaatttgttagccgaaacgctatatacaggtgacgttgtagtcgtaagcatgtagcaatgtattgactttttggtgatt

SEQ ID NO: 124387 - DNA, 1536 bp, Zea Mays
ggcctcggcgcaacggcccttcccgcgcgactgcacttgcacacgcggcggagaaatgaaagcgccagcggctagtggataagctaagctctccctctcgctgagccggctgttgctctccccacaaccccgcgcgcgggggagcgataaaccctagtcttcgccgtcgtcgcaggaggacccgcgatgtcgcacttcgggaggtcaggcccgccggacatccgcgacaccttctcgctcctcgtcctcaacatcagcttccgcaccacggccgacgacctcttcccgctcttcgagcgctacggcaaggtcgtcgacgtcttcatcccgagggaccggaggaccggggactcgaggggtttcgcgttcgtgcggtacaagtacgccgacgaggcgcagaaggctatagatcggctcgatggccgtgatgtggatgggagaaacatcatggtgcagtttgcaaagtacggccccaatgctgagccaatccgcaaaggaagggttaaagagggggttgagaaatcacaagacagatcaagaagccgcagtccaaggccaaggcacagagatagagatcatagaagccaaagtcgcagcaggagcagagaaaggcatgtccgtgatagagacaggggctatcgtcgtcggagcagaagtagaagccgaagtcttagttcaagccctgacaacagaagtcatcatagagcaagagatgatgataagcgcaagagcatgagtaagagcaggagcaggagcaggagcacaagtagaagccgctcatactatagtgcttcacctgcccggcacagtgctagccctcgcaagagcccaccgccacagaggagccccactcctgcaaagcatgccaatggaaaagtagcacctctgtcacgctgtgtttctccattaccgaagcgtgcaacctcccgcagcccaggcagtgatggcaaggagtaaagcttgctgatttggtgatgcctagaaaacagccttctcacggagtcacgggattgcagaaccttgagaaggttgattgagcacaatggaagtagcagtctgcaatcaaccgcgatccaagttatctgttcgtgagatgggttgctgtttactggtagaacggtattgcacgggaccaactatggtggatgatgtcttgctgtcattggtgttgatatggcaatggtgcagctgatgtgacgatgcagatgccgatgctgctgacagtgaccatcttgtttgcacaatgatcccttacaagttatgttggttcttatccccccttctcgcagatgcttttgcatcagtgctagttggaacatggtgttgaggggttaattatgacgggcatgggtcctgtttatcatgtggtggtgttgagtgactccttttgctatctgtggccctagctttattcattatttgaagcaaccattaataaaatccatgaactcaattattaatttgttagccgaaacgctatatacaggtgacgttgtagtcgtaagcatgtagcaatgtattgactttttggtgatt

SEQ ID NO: 124388 - DNA, 1289 bp, Zea Mays
ggcctcggcgcaacggcccttcccgcgcgactgcacttgcacacgcggcggagaaatgaaagcgccagcggctagtggataagctaagctctccctctcgctgagccggctgttgctctccccacaaccccgcgcgcgggggagcgataaaccctagtcttcgccgtcgtcgcaggaggacccgcgatgtcgcacttcgggaggtcaggcccgccggacatccgcgacaccttctcgctcctcgtcctcaacatcagcttccgcaccacggccgacgacctcttcccgctcttcgagcgctacggcaaggtcgtcgacgtcttcatcccgagggaccggaggaccggggactcgaggggtttcgcgttcgtgcggtacaagtacgccgacgaggcgcagaaggctatagatcggctcgatggccgtgatgtggatgggagaaacatcatggtgcagtttgcaaagtacggccccaatgctgagccaatccgcaaaggaagggttaaagagggggttgagaaatcacaagacagatcaagaagccgcagtccaaggccaaggcacagagatagagatcatagaagccaaagtcgcagcaggagcagagaaaggcatgtccgtgatagagacaggggctatcgtcgtcggagcagaagtagaagccgaagtcttagttcaagccctgacaacagaagtcatcatagagcaagagatgatgataagcgcaagagcatgagtaagagcaggagcaggagcaggagcacaagtagaagccgctcatactatagtgcttcacctgcccggcacagtgctagccctcgcaagagcccaccgccacagaggagccccactcctgcaaagcatgccaatggaaaagtagcacctctgtcacgctgtgtttctccattaccgaagcgtgcaacctcccgcagcccaggcagtgatggcaaggcaattcacgtcaggagtaaagcttgctgatttggtgatgcctagaaaacagccttctcacggagtcacgggattgcagaaccttgagaaggttgattgagcacaatggaagtagcagtctgcaatcaaccgcgatccaaggttgctagttcttttaatggcttatagaattgtgttttccagttgtcaaaaatatgctgctggtttgtatttttggcatatactgtgtttttatacccttgcactgcatcatctactttatatatgcatcagtttctcgaaaccatcatattaatttgttaaaacatttgtgcatattctagttatctgttcgtgag

SEQ ID NO: 124389 - DNA, 1275 bp, Zea Mays
ggcctcggcgcaacggcccttcccgcgcgactgcacttgcacacgcggcggagaaatgaaagcgccagcggctagtggataagctaagctctccctctcgctgagccggctgttgctctccccacaaccccgcgcgcgggggagcgataaaccctagtcttcgccgtcgtcgcaggaggacccgcgatgtcgcacttcgggaggtcaggcccgccggacatccgcgacaccttctcgctcctcgtcctcaacatcagcttccgcaccacggccgacgacctcttcccgctcttcgagcgctacggcaaggtcgtcgacgtcttcatcccgagggaccggaggaccggggactcgaggggtttcgcgttcgtgcggtacaagtacgccgacgaggcgcagaaggctatagatcggctcgatggccgtgatgtggatgggagaaacatcatggtgcagtttgcaaagtacggccccaatgctgagccaatccgcaaaggaagggttaaagagggggttgagaaatcacaagacagatcaagaagccgcagtccaaggccaaggcacagagatagagatcatagaagccaaagtcgcagcaggagcagagaaaggcatgtccgtgatagagacaggggctatcgtcgtcggagcagaagtagaagccgaagtcttagttcaagccctgacaacagaagtcatcatagagcaagagatgatgataagcgcaagagcatgagtaagagcaggagcaggagcaggagcacaagtagaagccgctcatactatagtgcttcacctgcccggcacagtgctagccctcgcaagagcccaccgccacagaggagccccactcctgcaaagcatgccaatggaaaagtagcacctctgtcacgctgtgtttctccattaccgaagcgtgcaacctcccgcagcccaggcagtgatggcaaggagtaaagcttgctgatttggtgatgcctagaaaacagccttctcacggagtcacgggattgcagaaccttgagaaggttgattgagcacaatggaagtagcagtctgcaatcaaccgcgatccaaggttgctagttcttttaatggcttatagaattgtgttttccagttgtcaaaaatatgctgctggtttgtatttttggcatatactgtgtttttatacccttgcactgcatcatctactttatatatgcatcagtttctcgaaaccatcatattaatttgttaaaacatttgtgcatattctagttatctgttcgtgag

SEQ ID NO: 124390 - DNA, 1242 bp, Zea Mays
ggcctcggcgcaacggcccttcccgcgcgactgcacttgcacacgcggcggagaaatgaaagcgccagcggctagtggataagctaagctctccctctcgctgagccggctgttgctctccccacaaccccgcgcgcgggggagcgataaaccctagtcttcgccgtcgtcgcaggaggacccgcgatgtcgcacttcgggaggtcaggcccgccggacatccgcgacaccttctcgctcctcgtcctcaacatcagcttccgcaccacggccgacgacctcttcccgctcttcgagcgctacggcaaggtcgtcgacgtcttcatcccgagggaccggaggaccggggactcgaggggtttcgcgttcgtgcggtacaagtacgccgacgaggcgcagaaggctatagatcggctcgatggccgtgatgtggatgggagaaacatcatggtgcagtttgcaaagtacggccccaatgctgagccaatccgcaaaggaagggttaaagagggggttgagaaatcacaagacagatcaagaagccgcagtccaaggccaaggcacagagatagagatcatagaagccaaagtcgcagcaggagcagagaaaggcatgtccgtgatagagacaggggctatcgtcgtcggagcagaagtagaagccgaagtcttagttcaagccctgacaacagaagtcatcatagagcaagagatgatgataagcgcaagagcatgagtaagagcaggagcaggagcaggagcacaagtagaagccgctcatactatagtgcttcacctgcccggcacagtgctagccctcgcaagagcccaccgccacagaggagccccactcctgcaaagcatgccaatggaaaagtagcacctctgtcacgctgtgtttctccattaccgaagcgtgcaacctcccgcagcccaggcagtgatggcaagaaaacagccttctcacggagtcacgggattgcagaaccttgagaaggttgattgagcacaatggaagtagcagtctgcaatcaaccgcgatccaaggttgctagttcttttaatggcttatagaattgtgttttccagttgtcaaaaatatgctgctggtttgtatttttggcatatactgtgtttttatacccttgcactgcatcatctactttatatatgcatcagtttctcgaaaccatcatattaatttgttaaaacatttgtgcatattctagttatctgttcgtg

SEQ ID NO: 124391 - DNA, 1340 bp, Zea Mays
ggcctcggcgcaacggcccttcccgcgcgactgcacttgcacacgcggcggagaaatgaaagcgccagcggctagtggataagctaagctctccctctcgctgagccggctgttgctctccccacaaccccgcgcgcgggggagcgataaaccctagtcttcgccgtcgtcgcaggaggacccgcgatgtcgcacttcgggaggtcaggcccgccggacatccgcgacaccttctcgctcctcgtcctcaacatcagcttccgcaccacggccgacgacctcttcccgctcttcgagcgctacggcaaggtcgtcgacgtcttcatcccgagggaccggaggaccggggactcgaggggtttcgcgttcgtgcggtacaagtacgccgacgaggcgcagaaggctatagatcggctcgatggccgtgatgtggatgggagaaacatcatggtgcagtttgcaaagtacggccccaatgctgagccaatccgcaaaggaagggttaaagagggggttgagaaatcacaagacagatcaagaagccgcagtccaaggccaaggcacagagatagagatcatagaagccaaagtcgcagcaggagcagagaaaggcatgtccgtgatagagacaggggctatcgtcgtcggagcagaagtagaagccgaagtcttagttcaagccctgacaacagaagtcatcatagagcaagagatgatgataagcgcaagagcatgagtaagagcaggagcaggagcaggagcacaagtagaagccgctcatactatagtgcttcacctgcccggcacagtgctagccctcgcaagagcccaccgccacagaggagccccactcctgcaaagcatgccaatggaaaagtagcacctctgtcacgctgtgtttctccattaccgaagcgtgcaacctcccgcagcccaggcagtgatggcaaggttagattgatgtctaactgcttgctatgtagtttgttgcccatgcatttgtttatgtagcttactcttgaaggcaattcacgtcaggagtaaagcttgctgatttggtgatgcctagaaaacagccttctcacggagtcacgggattgcagaaccttgagaaggttgattgagcacaatggaagtagcagtctgcaatcaaccgcgatccaaggttgctagttcttttaatggcttatagaattgtgttttccagttgtcaaaaatatgctgctggtttgtatttttggcatatactgtgtttttatacccttgcactgcatcatctactttatatatgcatcagtttctcgaaaccatcatattaatttgttaaaacatttgtgcat

SEQ ID NO: 124392 - DNA, 1149 bp, Zea Mays
agggaacagaacaaaggtcgcaccatgcaggcgctagcagtatatatataagcagcaggggctgccccgtacgtagtagccaccattccgggtttggtgctggccggtgtcgtacgactccggtcgtccatggggaggtctccttgctgcgacgagaatggcctgaagaagggcccctggactcaggaggaagacgagaagctgctgcactacatccagaagaacggacatggtagctggaggaccctgccgaggctggccggtctgaaccgatgcggcaagagctgccggctgcgctggaccaactacctgcggcccgacatcaagcggggcaagttctcgcaggaggaggagcagaccatcctccacctccactccgtcctcggcaacaagtggtccgccatcgccacgcacctccccggccgcaccgacaacgagatcaagaacttctggaacacgcacctcaagaagcgcctcatccagatgggcttcgaccccatgacgcaccgcccgcgcaccgacttgttcgccgcgctgccgcagctcatcgcgctcgcagccctccgcgagcagctgtccgccctctgctcgccgcaactgactgctgctacgactgccccgtccgcggacgacggcgaccgccagtcgtcgtacctaccgtgcacgttccccgtcagtagtgacggtcaagaagctgccaaccagcaacagcaaacaggcctcatcagctatgacggcggccgcgccgccggtgatgatgctgacgtgttcgcgtgccacggtggtggcagctcgctgccgcccctgaccgacctctccgacgcggccgccagcatgcgcagcggcagcgccactgcgtcgtcgtccggcttcagctgcagcccgctcccttggccggagttcttccccaacgatgatccattcatcactgatttcctatgacatcatatcatcataatgtacttgtatacttgtaagcttaaattgcgtatatatatagcgtgtcatgcacattcaaacatgagaatagaatatatagtacacactgaaatttctgaatatatgctagctcagagatgagtggcaagtgagtcgttcatgaaatagaataatacgcgtgttgtattgctgatactgatgatatgaaac

SEQ ID NO: 124393 - DNA, 838 bp, Zea Mays
agggaacagaacaaaggtcgcaccatgcaggcgctagcagtatatatataagcagcaggggctgccccgtacgtagtagccaccattccgggtttggtgctggccggtgtcgtacgactccggtcgtccatggggaggtctccttgctgcgacgagaatggcctgaagaagggcccctggactcaggaggaagacgagaagctgctgcactacatccagaagaacggacatggtagctggaggaccctgccgaggctggccggtctgaaccgatgcggcaagagctgccggctgcgctggaccaactacctgcggcccgacatcaagcggggcaagttctcgcaggaggaggagcagaccatcctccacctccactccgtcctcggcaacaagtggtccgccatcgccacgcacctccccggccgcaccgacaacgagatcaagaacttctggaacacgcacctcaagaagcgcctcatccagatgggcttcgaccccatgacgcaccgcccgcgcaccgacttgttcgccgcgctgccgcagctcatcgcgctcgcagccctccgcgagcagcttgacggtcaagaagctgccaaccagcaacagcaaacaggcctcatcagctatgacggcggccgcgccgccggtgatgatgctgacgtgttcgcgtgccacggtggtggcagctcgctgccgcccctgaccgacctctccgacgcggccgccagcatgcgcagcggcagcgccactgcgtcgtcgtccggcttcagctgcagcccgctcccttggccggagttcttccccaacgatgatccattcatcactgatttcctatgac

SEQ ID NO: 124394 - DNA, 693 bp, Zea Mays
atgggatgggatggaatggaatggaatgcgatgaccgatagatcaaaatgcaaaacagaacaccaagggatgataataggattatgtgttggaaaacggaaccaggctggagcagagagggaacgtgggaatgagcagccagcagcagctaggtggatgatggaatatagagctgtcttgtcttgtgtctggcgccccatgaagaagccattgctgcggtgcttcctggagctggacacccggccacgagctgctgaatggaacattgcaggctctgagtctctgacacccggccaccatctatgtcctgctgttggccttgcttgttcagtcttcacgagaggagacgagacggaggagcgggtagggcatgatgaggcaggcaggctacagctacagtatcgctggcgttggggagacagaggaagaggtggagagtgggcggcactgcaggcacagcacagtgtccttaaatggggaagacagacagacacacagacaggcaggctatcccttcccgtcccaactgtctttcattttgttctgtgtcttgtcaccaagcccagagagcagagcaacagcccatctatggctcctctctctgtgcaggcactaggcttccgttgccctgcccatgtggggcgtccagtgtctcctgcctctgttcgtccgtcgacatggacgcttgaatga

SEQ ID NO: 124395 - DNA, 773 bp, Zea Mays
cccatacttgcatgcaatccaagctacccaactctactcgatcgacaagattctcaaaacactaaaaagatatataaaaggaaaaataatggtgaaacaaaataatatatataatatggtggaccaaaccaaagtcttctcctctagctgtgtgcctgtgtgtctgtgtccactataaaaggacctcaccaacccaggccgccttctccagaggccagagcaagcatctagctaccattcacaacacaagtaatatgtaccaccatcatttccatggcgaggtggacagcctccgcttcctgtcccctccgacgaccgcttccttcgccgccgcgcaccaccagcacatgaacatgcccttgccgcctccggcatactacttagccatcgacggcgacgcggcttgctttgatgagcttgacaccatcgtgcgggaagccgcagcccacctcggcggcaacagcaacaatgagtcgcccagcctgtcgggctcgggctccgacagcgcagcggcggccgaccaggagcgccggcgccgccggatggtgtccaaccgcgagtcggcgcggcggtcgcgcgtgcgcaagcagcggcagctcagcgagctgtgggcgcaggtgtcgcacctccgcggcgccaaccgccgcctcctcgacgacctcaaccgcgctctcaggagctgcgccgacgcccgccgcgagaacgcgcgcctcagggacgagaaggcccagctggccaacaggctccaccagctgctcatcatcgccggctga

SEQ ID NO: 124396 - DNA, 2773 bp, Zea Mays
ccacagcttactacgaaaaccctaaccccttcccttatcctctgctccctctccacgtttccacgaacgttggcgcgcaagctcgtggtgtgagcggtcactgtctcccatcccatggctccggcgctgagcgggactctgggcgcgtcgtcggtggcggcgctgcggccctgcgcggggaggagggcgccgtccgccgcgagctcggttgcgccgcgcgggagcggggtggtgaggtgctccagagggctcaggtgggacgcccacagaagcagggggaggttgctcagggtgaggtgcgatgcggccgtcgtggagaagcccgccggggaggaggcggctggggagaagttcgagtaccaggcggaggtgagccgcttaatggacttgatcgtccatagtctgtacagtcataaggaggtatttctccgggagcttgttagcaatgcgagtgatgcgctggataagctgaggttcctcggcgtcactgattcttctttgcttgctgatggcggcgagctagaaataagaattaagcctgaccttgatgctggaacgattactatcactgacactggtgttggtatgactaaagatgagctcaaggactgccttggtaccattgctcagagtggtacctcaaaatttctgaaggccctcaaggaaaacaaagaccttggggcggacaatggtctaattggtcagtttggtgttggattttactcagcttttcttgttgcagagaaggttgtggtgtccaccaagagcccaaaatcagataaacagtatgtgtgggaagctgtggctgacagtagctcttatgtcataaaggaagagactgatcctgagaaaatgcttacacgtggaactcagattaccctgtttctaagacctgatgataagtacgagtttgcggacccttcaaggattcaaggcttagtaaaaaattactctcagtttgtgtctttccccatatacacatggcaggagaaatcaagaactgttgaggttgaagaggatgaagagccgaaagaagttgaagaggcaacaaaggcatactttgacatacagggtgagaaaaagaagaagactattacagagaaatattgggattgggaactagccaatgagacaaaacccatatggatgagaaatccaaaggaaattgagaacaccgaatacaatgagttctataagaagacattcaatgagtttttggaccctcttgctcacactcacttcacaactgagggtgaggtggaattcaggagtgttctttatgttccgggcatggcgcctcttagtaatgaggagataatgaaccccaagaccaaaaatatccggctatatgttaaaagagtattcatctctgatgactttgatggtgaactgtttccaagatacttgagctttgtgaaaggtgtggtggattcaaatgaccttcccctcaacgtttctcgggagattcttcaagaaagtcgaattgtaagaattatgcgcaagcgacttgtcagaaagacctttgatatgattgaagagattgcggaaaaggaagataaggaggactataagaagttttgggagagctttggcaagtttatcaagcttggttgcatcgaggacacagggaatcacaagcgccttgctccattgttgcgcttccactcttctaaaaacgagggagatttgataagtcttgatcaatatgtagagagcatgcctgaaagtcaaaaggcaatctactacatcgctacagatagtctccagagtgcaaagactgctcctttcctggaaaagctggtccagaaagatattgaagttctctaccttattgagccgatagatgaggttgccattcagaacttgcagacctacaaagagaagaaatttgtggatatcagcaaagaggatctggaattgggtgatgaagaagaagagactaaagaaaccaaacaggagttcactctcctatgtgattgggttaaacaacagcttggcgacaaggttgcgaaggtccaaatatcaaagcgtttaagttcatctccatgtgttctcgtatctggcaagttcggttggtccgccaatatggaaaggctcatgaaggctcaaacacttggtgacacatcaagtttggaattcatgaggggaagaaggatcttcgaaatcaaccctgaccacccaattatcaaggatttgagcgctgcttgcaaaaatgagcccgaaagcacagaagccaggagggctgttgagctcctatacgaggctgctttaatctcgagtggatatactccggagagtccagcggagttgggtggcaagatctatgagatgatggcgattgccctcggcgggagatggggaaggtccgacatggaggaggccgaagcgtcgacgggtgaggccagcgcagaggcagactcatctgaaggcaccgtagcagaggtgattgagccctcggaagttagacccgagagcgatccgtggagggaccagtgagttctcccacgggcatcctttgttagaactccatatttagcagtgccggggaaaaaaactaagccatgggcaagaacatatttggtcacagttgcttctatatgggttcttgccgtggcaattttttgtaggcttagactttgccggccactaaaatcttattgaggaggtagtggccttagaaaagaataataaagcatgaagactgatgattacatagcaaaattgtgctgtccctctcaataatatttataatgaaaagaacttatttctgcaa

SEQ ID NO: 124397 - DNA, 1580 bp, Zea Mays
cccggacctctctctctctctctctccctcccttccatccaggctgccacgccgcctccaccttaccggccggccggagataagaagaccctgatgcggctgcggccgcagcggccggaggcctgaggttgcttggttggatatgggtggagtgacttcgtccgtggcctctaagatggccttcttccctcccgacccgccgtcttacggcgtggtggacgaggaggacgaggacgcggcgtgcaacaaggtggcaacaacgaggagggtggcgatgacgggcgtgcggtggagcgtgggcgtggaggcgaggcgggtgcgcacgcggcggggctccgacatcatcgccgtctacgtgcggcaccccggggctagcctcaccctcctcttctcccacggcaacgccgccgacctcggcaagatgtacggcatcttcgtcgagctcagcgaacgactccacgtcaacctcatggggtatgattactctggttatgggcagtcatcaggcaagccaagtgaagctaatacctttgctgacatagaggctgcatacaagtgcctcgtggacgtctatggaactagggaagaagacattgttctgtatggccagtctgttggcagcggaccaacccttgatctagctgttcgtttcgatggcgtaagagctgtggttctgcacagtccgatactgtctggattgcgtgtcatgtattctgtgaagaaaacgtactggtttgacatatacaagaacatcgacaaaatcccgcatgttaaatgcccggttttggtaatccatggcaccaaagatgacgtggtggactgctcccatggcaagcggctctacgagctgtgccagcacaagtacgaacccctgtggatcgagggaggtgaccatggcaacctggagaaattcccagtgttcattcgacatctgaagaagttcttactgtccataaagaagctgccatctgaaaaagacgccgcggccgagcacgagccacgggcagctgagaacagaacgcagcatggcggcgaagccatctccgaggctcctcctcgcatgatctcgcggaggctagagtcatcgaagaagagcacgatccatgaagcaaagcctaggccgagcagcgagcacacggataagcgcaggcgaagcacgggccacagggagaaggcgaggtccagcacagacaggagagagagatcgaggagaagcgtcgactgcttcgacagcatcctcgaacacgagcagccggaaaagccaaggaaaagcttcgacaggatcggagagaagattagagcaatgggtttgtgcaatgtcgactgcttcaaagagcctcctgatagcactgagctttccagaggtagttgagtggaaaaggaattctggttgctgtcagagtcagtatttttcttttcccttgctgctttagatacaaagaaaactacagctgcgtgatggcaatgttaatcataagatgttcacgaacagagcaaagagaaatatatgtcagcttctgattctgttacacatgtatatgttatgttgcttgtaaacacacgtacacagcgttgtggtc

SEQ ID NO: 124398 - DNA, 1428 bp, Zea Mays
atggccacgcacacgccgcaaccgcaggacctcgcgagcaatggcggcgacccgcacgtgcttcttgtgccgtacccggcgcagggacacatgctcccgctcctcgacctggccacgctgctcgccgagcgaggcctcgcggtcaccgtcgccgtcacgtccggcaacgccgcgctgctggcgccgctgctccgcgcctgcccgtccgcggccgtgctcgcgctgcccttcccgccgtcctcgccgctgctcccgccggggagcggcgagaacaccaaggacctcccgcgccacctcttccgccccttcatggcctcgctcgcggcgctcgggccgccgctgctcgcctggtgccacgcgcagagccggcacggacgccgcgtgacggccgtcgtctccgacttcttcacgggctggacgcagccgctggccagggacctgcgcgtgccgcacgtcaccttctccccctcctccgcgctccacctcgccatgtcgcacgcgctctggcgcagcccgccgacgaggcacctcgacgacgaggcggtcacgttcccggaggtccccggctcgcctaccttcccgtggcgccacctctcgggcctgttccggcagtacgcggcgggggacgaggtgtccgaggcgatccggcagctcttcctctggaacctgggcagcgactgcttcgtcgccaacacgttcgcggcgctggaggcggactgcgtgacgcggccgctccccgacctggcgtccaagcgggtgttcgcggtgggcccgctgtcggacgccagcgcgtcggccgaccgcggcggggagcccgcggtggcggcggcgcgggtgtccgcgtggctggacgcgttcccggacggctccgtcgtgtacgtcagcttcgggacgcaggcggcgctgtcggcggcgcaggcggcgtccgtggcggacgcgctggcgcggagctcggcggcgttcgtgtgggcggcgagggcgggcaccgcggtgccggaggggttcgaggcgcgcacggcgccgcgggggctggtgatccgcggctgggcgccgcaggtggaggtgctgcgccaccgcgccgtgggctggttcctcacgcactgcggctggaactccgtgctggaggcggccgccgccggggtggccatgctggcgtggcccatgggcgccgaccagttcacggacgcgcggctgctcgcggaggccggcgtggccgtgcccgtggcggagggcgccgacgccgtgcccgacgccggggcgatggcggccgcgatcgcaaaggccgtcgggaatgagtggggggccgtgagggagcgcgcggacgagctcgggcgcatggcggcggcggcggtggcggagggcgggagctcgcacagggacctggaggagtttgtgcagatgctgctgaccgccagctttcactgctga

SEQ ID NO: 124399 - DNA, 1060 bp, Zea Mays
gcaacttccacttccctcgtcgcccagcctccccgatcgatcaatccttggtggttcgccatggccactccggtccggcctgccgcggctgctcctgctcgtcgtcctccgcagccactgccgctgccggcggcgccccaccacgacacgatgctcacgctgtctctcgcgcttccgcttccgcttccgcctcccgtgttcgtcgtccgcgcgctctcccccgacggcggcggcgtcgctcgggtgcggtcgtcgcccacgggggacgacacgccgccgtgcaccgagtgcggcaagcggttcccgtcgtggaaggcgctgttcggccacatgcggtgccacccggagcgtcagtggcgcgggatgacgccaccgcacttccgccaacaccggaccgtcgtggccgccgcggacctgcagttcaccgagcaggagcgcgagaccgccacgagcctgctcatgctcggcggcggacgccccgccggcgctggcaagggcaagaagagtgtccttggcgcctcgcctagcgccaagaaggtgacctgcggcgccagcaagtcggcttcttcgccgccgcccaccgttccaaggtgtgacgacgaccacaagtgtagcgtctgcgctcgggggttcgcgaccgggcaggctctcggcgggcacaaacggtgccactgggagaggacgacggcatgcgcggaggggacgacgacggtggctgcgatcgcaacacctggcgcctgcagcccgtcggcaacgtcgtcgtcacaagcggcgccggccaccacgctggacctcaacctgccgccgccattgccacaaaagagcgatggatatggcagcttggacgcgacgttagatctgaagcttgggatatagagagctagctttgctggctagctaggttcgtctttgtctgtgtcttctcttgacaccctgaatcggcggcttgttttatctggactgaaactgaagtctccagtggtgtactactaagtctgtacatatccgtgtatatgttgatatatatataatggaatctatctaccaagagacgaagaca

SEQ ID NO: 124400 - DNA, 2465 bp, Zea Mays
tgcccgcgccaagagtgtccacttcaaccctagctccacctgcatctcccctcccgcccgcctccctccgtccactcggatccggaaaaccctaaccctagacgtcgcccggccgccgccatggaccccgacggcgacccggccttccaccgcaacgaggccatctccgcggtccaggatgtcgaccagtactatggcgacgacgacgacttcgacgacctctacaacgacgtcaacgtcggggacggcttcctccacgcctcccaccaggcgccgccgccgctgccgccgccacctccgactcagcaggccccaccgccgcagaagcaccagctccctccgccgtcccagcagctgccgccgccccagcagcatccacctgcccacgtcctcccgccaccgccgccgcaggccccaccgccgcagcagcaggtaagcatcccgggggtggccgtccctgctcctggcagacctcccgcccagaccaacctccctccgcctcctcagccaccggccgctcccgcgccgccgccgccgcctcagcaccaccatattcagcaagacgggatcaaccgccctggagggaacatcgccggtggccccatcgtggtcgggaacggtggccctgctggcgggggtgacggccctggcggcacgacgctgttcgtgggggaactccactggtggacaacggacgcggatctggaatctgagctcagcaagtatgggccggtcaaggaggttaggttcttcgacgagaaggccagtggcaagtcaaagggctactgccaggtcgatttctatgaccctggtgcagctgctgcctgcaaggagggcatgaacggccacacgtttaacggccgtccatgtgttgtggcattcgccacaccgaacagcgtgcgtcgcatgggcgaggcacaggtgaagaatcagcaggctatggctgcacagacatcaaatatgcagccaaaggttggtagagggagcggtggtgccgcagggccacaggcgggtggtaattatggcggtggccgtggaggacctgttggacctggtgccggtggtggagctggtggaggcggtggaaattggggaagaggtggtggaggcatggggaatagaggccctattggtaatatgaggaacaggatgggcccagctggtggtggtcgtgggataatgggaaatggggggatggttgcgccgccgccaccaatgatgcctccaggtggaatgctggggcagggttttgatcctactggttacggcgctatgggaaggatgggtggtggatttggtggttttcctggtggaccaggggctatgccattccctgggctgatgcagccattcccgccagttgttgctccacatgttaacccagctttctttggtcgtggcggaatgggtgccggtggaatgtggcctgatcccaacatgggagcctggggtggggaggaacaatcgagttacggtgatgacgcagcttctgatcagcagtatggtgaaggagggagccatgggaaagagaggccaccagagagggagtggtctggtgcaccagagaggaggcgtgaaagggagaaggatgcgccccctgcacaggagtggccagagaggaggcaacgtgatgagcgtgacatggaccgtgagaggaatcgtgactatgacagagacagggaaaaagaccgtgacagggaaagagaccgagaccgagatagggagagggacagagatagggagagggagagggagagggagagggagagggagaggcatagggatgacagagatcgctatggcgattatcacaggcacagggatcgcgattcggaacgtaatgaagactgggacaggggtagatcatctgggatacgcggcaggtcaagggaggctgaccactctaagcgcaggcggatgacacctcagtagtcgtagctgggtgagctactaatgtagaggcaaacgatgatccagagccgagtcttgcttgcacactggcatggttaacagctagcatcttcttgctgcctctggctgtggtggttctaatatcttgtgtctccggcaatgtgttgtagcaagaacgagagatgaatgtctggttgggacctgttgagctgtgcgaagatggacttccctggatgatagttgctgcctcttattgtacgccatgttaaatgtctgagttttcacaaagacaaaaaaagatctctgttttgtgtgtaattcaggaccgatgctgttgctgttgaaaactgtactatttctgctgtaatcttatgataaaccagtctgtattatgacactgtccttttgttcatcctttctcctttgttcctggttgaagttgtctcatgttttgatggctgcagcgctagttgtgttgccagttggaatattcagaacgcgagacctctaaatatactggcttgtttctttgaaaaaacattgtatttgccatt

SEQ ID NO: 124401 - DNA, 2353 bp, Zea Mays
tgcccgcgccaagagtgtccacttcaaccctagctccacctgcatctcccctcccgcccgcctccctccgtccactcggatccggaaaaccctaaccctagacgtcgcccggccgccgccatggaccccgacggcgacccggccttccaccgcaacgaggccatctccgcggtccaggatgtcgaccagtactatggcgacgacgacgacttcgacgacctctacaacgacgtcaacgtcggggacggcttcctccacgcctcccaccaggcgccgccgccgctgccgccgccacctccgactcagcaggccccaccgccgcagaagcaccagctccctccgccgtcccagcagctgccgccgccccagcagcatccacctgcccacgtcctcccgccaccgccgccgcaggccccaccgccgcagcagcaggtaagcatcccgggggtggccgtccctgctcctggcagacctcccgcccagaccaacctccctccgcctcctcagccaccggccgctcccgcgccgccgccgccgcctcagcaccaccatattcagcaagacgggatcaaccgccctggagggaacatcgccggtggccccatcgtggtcgggaacggtggccctgctggcgggggtgacggccctggcggcacgacgctgttcgtgggggaactccactggtggacaacggacgcggatctggaatctgagctcagcaagtatgggccggtcaaggaggttaggttcttcgacgagaaggccagtggcaagtcaaagggctactgccaggtcgatttctatgaccctggtgcagctgctgcctgcaaggagggcatgaacggccacacgtttaacggccgtccatgtgttgtggcattcgccacaccgaacagcgtgcgtcgcatgggcgaggcacaggtgaagaatcagcaggctatggctgcacagacatcaaatatgcagccaaaggttggtagagggagcggtggtgccgcagggccacaggcgggtggtaattatggcggtggccgtggaggacctgttggacctggtgccggtggtggagctggtggaggcggtggaaattggggaagaggtggtggaggcatggggaatagaggccctattggtaatatgaggaacaggatgggcccagctggtggtggtcgtgggataatgggaaatggggggatggttgcgccgccgccaccaatgatgcctccaggtggaatgctggggcagggttttgatcctactggttacggcgctatgggaaggatgggtggtggatttggtggttttcctggtggaccaggggctatgccattccctgggctgatgcagccattcccgccagttgttgctccacatgttaacccagctttctttggtcgtggcggaatgggtgccggtggaatgtggcctgatcccaacatgggagcctggggtggggaggaacaatcgagttacggtgatgacgcagcttctgatcagcagtatggtgaaggagggagccatgggaaagagaggccaccagagagggagtggtctggtgcaccagagaggaggcgtgaaagggagaaggatgcgccccctgcacaggagtggccagagaggaggcaacgtgatgagcgtgacatggaccgtgagaggaatcgtgactatgacagagacagggaaaaagaccgtgacagggaaagagaccgagaccgagatagggagagggacagagatagggagagggagagggagagggagagggagagggagaggcatagggatgacagagatcgctatggcgattatcacaggcacagggatcgcgattcggaacgtaatgaagactgggacaggggtagatcatctgggatacgcggcaggtcaagggaggctgaccactctaagcgcaggcggatgacacctcagtagtcgtagctgggtgagctactaatgtagaggcaaacgatgatccagagccgagtcttgcttgcacactggcatggttaacagctagcatcttcttgctgcctctggctgtggtggttctaatatcttgtgtctccggcaatgtgttgtagcaagaacgagagatgtaagtgaagcttaatctgatcccctgtttgttttacaactgtaaccctcttctttaattgtactgtttggtagtcatatgctgataacatcatgtaacagtatttttgtaccattacacttgtaacttgttatgtacacgaaattgtttgttttctccctcctgtgatcttttgtagctacaaggcattctgtaaggcaagaattgtaatatagagtccttgcctaataccatggaatgtacaattttgttgctata

SEQ ID NO: 124402 - DNA, 1135 bp, Zea Mays
gcagctagaagaatgaactgctcgctctctctgagtcagcataaccaaacctggccacgcccttacgaatcaacaagatttgagttttgatgtacaccaccaggtcacatatcgaccttgttcatacttcatactaacaacggcagtaatcgatgaagtaataagcaaccgagcatgaccaagaaccaaaaaggcatggcgtctccatccaaagacaacagctgggtggccgagcaatctttaaaccaccccgccctaagcagccaaggcggcggccacggcgatagcggcggcggcggtcgcgagccaccgcgtgcggcacggggccgccgcgttcttcttgtagtccttcctctggtcggccggcgaggcgtcggcggcggccgggccaggcgcgtccgctccgcgccgccgctggtgccgcgtccgcttggcggacctaggcgccagcgccggcgccggcgcgggcgcaggggtcggcgcgtccgccacggggtcgaacagctccacgggctccagcaccgcgtccacggcgtagatggcgacggggtccctgtcgtagacggtggagcgcacgcgggccggcgcgtcggccgccggcgtccgcagcgtcacctggtcgcccgcgttctgcaccgtcaggttgtagttgctggcggcgccgtcggtggccagcgtgttcatgggcccgttgctggatttcaggccccgcagcgtgtagtacacgggcaccgcgtggaacagcagcagcgacgccttgccgtccgcgctcaggttccggtagctgggcatgaacccgcgcacggcctcgtccgtcgggcagaacgccgtcacgccgccgctcaccgccgactcgaacgccgacagagcgtcgggggacttgtccagcagcgacgcgaacgccttgcacccgcccttggacatgagcgccgtgatgttgggcgtcgccttcgccgcggtgccgccgccggcggcggcggccgaggctagcggcaggaggaagaggagcgctagcgcccccgcggtggtggtggcggcgccgagtggggagtggcacattgcggcgcgtgggagtgagcggcaggcagatggcagcggccgacactccagcagccgagagtgaaatgtcagtgtg

SEQ ID NO: 124403 - DNA, 2075 bp, Zea Mays
acacatcattgagcgcaacgcggtcgtgattgcgagtgaatccgtggtgtccaactcccaagcccctaccggcaaccctagcgaggcgatggggaaggcggaggcgaggtcaagggggcgcggcggcggcggcggcggcggaggcgccagcggcaatccggggaagatcttcgtcggagggctcccgcgggacaccacggatgctacatttgtgaggcattttggacagtatggagaaatagttgattcggtgataatgaaggataggcacacatctcagccacggggttttggcttcattacatactctgaccctgctgttgttgataaagtgatagaggacaatcatgttatcaatggaaagcaagttgaaattaagagaaccataccaaaaggttcggtgcaatctagctctaaggatttcaagactaaaaagatatttgttggtgggcttccgtcaacactaacagaagacgaattcaagagtttctttgcaagatatgggactgtggtggaccaccagattatgtttgatcatgaaaccaaacgttcccgaggctttggatttatagtttttgcttctgagcaagttgtagatgatttgttagcaaatggaaatatggttgaccttgctggttcaaaggtgagtctgaagttcattatagaaatgacaccaatggttgtctcctccattgtggatctatggtgtaaaatatgtaaagtagtgttttgcattcttctattccaagtcatctgttgtgctaatttcatggagcatcatgcttaattaataggaaggccccataggttatttgacagggcttaggtcatttgctttgtttgttgtaggtggagatcaagaaagcagaaccaaagaaatcctccaatgcaccgccaccaccagtgcatgttagaaatgctaggtcagcatatgatagcggctctagagaccacccttcagctgacaactatggtggaatggccagtgcttatggaaactacaggggtggtggatttggtccttataggagcgatacaggatttggtgctaggctcagcagctatggtggggtaggtgattttggtggtgcatatggtcgttactatgcaggattaggagggggatatggagccgcgtcttcgtttggttatcctggtcgctttgggttatatggaggaggttttggtggatcttatgctggtgctgacttaagtggctatagacgcggtggaggtgatgagagcttcggtgcccctggtggtaatcctgggtttggtggtgatgctgaagagagctttggtggccctagtagttctggctttagtggcaccgcctatggtggggcatatgatcctacgctaggtggttatggatctgctagcacacctgacatgaataggggaagcttcactggaggatatggacgatatcacccatatggataacaagaagagcccttgaaggcttaacacttgcatgcacgtttgctgcccgtcattggagaacacccaccatttctggacaatatccagctgcctgaagcttcaagaacaacttaatgtcatgtgtacatgttttctcgttcccgtgagctttaacttatatatcctatagcatgtagtgtgatccagagtagacgttgtatcgaaggttattgtgtttggcataatatagaattctggtatactttgtagtagtttttaagcttctatgtaagcatactccatctgggagcagattagctgtgtgaacgctaggagggccggtctctaccacttagcattgtacctgatcaagttattcactcttttggtttacccattgagagcattgtccgtgatgtcctccttggttcacctagtattagctgcccttagctggggttgagtagattatgagataatggcatttgtgctctagcttaagtttatcttcattagctggtctgtttggttttaagatagctagagtttagcagataatcattatctaggtgaaactaaaccaaagagcaccttagcttcatctgtgatcactagcaattgatgcctgaaccgcgctgatgattctcgta

SEQ ID NO: 124404 - DNA, 1869 bp, Zea Mays
acacatcattgagcgcaacgcggtcgtgattgcgagtgaatccgtggtgtccaactcccaagcccctaccggcaaccctagcgaggcgatggggaaggcggaggcgaggtcaagggggcgcggcggcggcggcggcggcggaggcgccagcggcaatccggggaagatcttcgtcggagggctcccgcgggacaccacggatgctacatttgtgaggcattttggacagtatggagaaatagttgattcggtgataatgaaggataggcacacatctcagccacggggttttggcttcattacatactctgaccctgctgttgttgataaagtgatagaggacaatcatgttatcaatggaaagcaagttgaaattaagagaaccataccaaaaggttcggtgcaatctagctctaaggatttcaagactaaaaagatatttgttggtgggcttccgtcaacactaacagaagacgaattcaagagtttctttgcaagatatgggactgtggtggaccaccagattatgtttgatcatgaaaccaaacgttcccgaggctttggatttatagtttttgcttctgagcaagttgtagatgatttgttagcaaatggaaatatggttgaccttgctggttcaaaggtggagatcaagaaagcagaaccaaagaaatcctccaatgcaccgccaccaccagtgcatgttagaaatgctaggtcagcatatgatagcggctctagagaccacccttcagctgacaactatggtggaatggccagtgcttatggaaactacaggggtggtggatttggtccttataggagcgatacaggatttggtgctaggctcagcagctatggtggggtaggtgattttggtggtgcatatggtcgttactatgcaggattaggagggggatatggagccgcgtcttcgtttggttatcctggtcgctttgggttatatggaggaggttttggtggatcttatgctggtgctgacttaagtggctatagacgcggtggaggtgatgagagcttcggtgcccctggtggtaatcctgggtttggtggtgatgctgaagagagctttggtggccctagtagttctggctttagtggcaccgcctatggtggggcatatgatcctacgctaggtggttatggatctgctagcacacctgacatgaataggggaagcttcactggaggatatggacgatatcacccatatggataacaagaagagcccttgaaggcttaacacttgcatgcacgtttgctgcccgtcattggagaacacccaccatttctggacaatatccagctgcctgaagcttcaagaacaacttaatgtcatgtgtacatgttttctcgttcccgtgagctttaacttatatatcctatagcatgtagtgtgatccagagtagacgttgtatcgaaggttattgtgtttggcataatatagaattctggtatactttgtagtagtttttaagcttctatgtaagcatactccatctgggagcagattagctgtgtgaacgctaggagggccggtctctaccacttagcattgtacctgatcaagttattcactcttttggtttacccattgagagcattgtccgtgatgtcctccttggttcacctagtattagctgcccttagctggggttgagtagattatgagataatggcatttgtgctctagcttaagtttatcttcattagctggtctgtttggttttaagatagctagagtttagcagataatcattatctaggtgaaactaaaccaaagagcaccttagcttcatctgtgatcactagcaattgatgcctgaaccgcgctgatgattctcgta

SEQ ID NO: 124405 - DNA, 752 bp, Zea Mays
acacatcattgagcgcaacgcggtcgtgattgcgagtgaatccgtggtgtccaactcccaagcccctaccggcaaccctagcgaggcgatggggaaggcggaggcgaggtcaagggggcgcggcggcggcggcggcggcggaggcgccagcggcaatccggggaagatcttcgtcggagggctcccgcgggacaccacggatgctacatttgtgaggcattttggacagtatggagaaatagttgattcggtgataatgaaggataggcacacatctcagccacggggttttggcttcattacatactctgaccctgctgttgttgataaagtgatagaggacaatcatgttatcaatggaaagcaagttgaaattaagagaaccataccaaaaggttcggtgcaatctagctctaaggatttcaagactaaaaagatatttgttggtgggcttccgtcaacactaacagaagacgaattcaagagtttctttgcaagatatgggactgtggtggaccaccagattatgtttgatcatgaaaccaaacgttcccgaggctttggatttatagtttttgcttctgagcaagttgtagatgatttgttagcaaatggaaatatggttgaccttgctggttcaaaggtgagtctgaagttcattatagaaatgacaccaatggttgtctcctccattgtggatctatggtgtaaaatatgtaaagtagtgttttgcattcttctattccaagtca

SEQ ID NO: 124406 - DNA, 443 bp, Zea Mays
acacaataatcaaaagtcatggctacaatgaatggatcagaaagtgtatttgcaacgtgcaagggtgacaaaaatatgagcactctaatgcaccacccttttggtaactggaatgatacagtgagtcgctatttcgcaagatcgtcgtggccctatcgggaacggagatgctcttagcgaagctggaggaccgaccaatccaactagcagcagcaggcggggagtggatgcgcctgctagaagagtgctagctccgcgcatacgctcgctcgacaaacgtgtgttgttaactattgtatatagtgttataattactgtcctttattcctgatgtttgttttgtagttgaaactcacattgttttttcatttccatcttgattttgtatgccgtgatcacgaaagaccaaatgttttcttgcggtttctaaaaatatagctctc

SEQ ID NO: 124407 - DNA, 1159 bp, Zea Mays
gacggcgaggtgcagagctcctacgggctccgccatcaacaccatggatacactccaagaggccccttcaactccattggaggctacagctgccctctacactatacagtttgcagtatatttcttcttctcggaggaggatgaacggatttccagcaccctattttcaacatcgaggaggatgaacattctacgaaatcaaaaggaccccttaagttctacaactcagaggctgcacttggggaatcaaagaaaagtgaaagtgccatgtcaaagttgatgaccagaagcttgctattggaaccctctctattgaaaaatacccctagatagaaattgatttggttttcaataaagagtgtgagttgtcacacacatcgaaaactacccgtgtatttttctttggttacaaggttgaggaagatgaatatcctttttaacattgattttttattagttttatttcatgtaagactgatctaaacaatttctttgtggagtattttgtttccttgacctcatttttgcttcttgcctcttacataatggatcttgattctgaagatgaagagaaggagctaaacattccagtaatcaaggaaaatggctgtggctgtttacaaaagcagtccgtagtgatttactccacaaaatttgcgagagttcaagctggaccagtggacttcgacttcactggcaggcctctggttcttggacgcttgtacaagaggcgagtgattacacatagatgcattttccccatgttctgggtcatcaaattattattcattagcttgtgatcagagcagttttgacgcatgccactattgaagaaatcgaagcagagaagtccctcatggaagaccaagttgtatgtttaatgtatctacattggaaggcccagttgcagttcctagcagactgtttcttaacaggggcctttccagcagctcttaattgagggaaaagaaagggtgcatgtttggacaaaatccagcagcaaaagcactcggccattctagcagcaacacttatttagtaagtggaaaatattcttgaagcaaatgggtaaggctattgtttgaattgcagctgtaaaacttgccagaagttcagcaaaactgccacatatatgtgaggtttcggttcctgtccaaaa

SEQ ID NO: 124408 - DNA, 620 bp, Zea Mays
gggtttgtttggtgctcgactgctcggcctccgtctccgtctccgggtttgtttaggcggttcgacctcacttgttcttgcgagtcggtttccagaattccaggtactttacctaccgacgaaattctgttgttcccggtctcgctcccatcctccaagcatcgccttctccaaagatcgattctttcctgttgttcccggtcccgccggttatttgtatctgctgtgattcgatcttcagggagttgggaggagagacgctctcctcgtcgatcagggaggagtggtcatggggtcgtggagaaccctcgcacgatttaacgaggacaacctcataccatgcgttggatttggcgacagtcagttcttaacctgcctacccggcctctgactgtctggctactacggtttttcttttggattttccaggtcacgcgcagcctccaaagaggcagtggcatcctcttctgagcccacaggaaagggagaccgtagatgcaatggatgccaaatattccagtgattaaagactgctcttgacttgccatgaaccgagtgttttggtcatgcatactgaggtcttctgtgtgtctgaagtctgaacactgaatccatcgatt

SEQ ID NO: 124409 - DNA, 2134 bp, Zea Mays
atgtgcaacacctgcagcagagcggcagtgccatggcatgcgcccggcttaccgcccgctccacgcggcaagaacgccatggaacacctcggccacgagttccctgtcggccgtctgcaggaacgcgttgaggtcgtcgtcgtgcatctcgtacaccttcctgaagtccacaaggaacctcaggcagccgcccttgagcctcggcagccggtacaggtgcgccgtctgcagccgctccagcacgttgcgcgcgtcgatgtcttccagcaggctctcgtggcaggcctccctgaggtcgccgatgtcgtacttgtcggcggcgcggaggagcgccagccggttcgccaggaactcctcgccgccgcgcacgtcgccgtagatgtagctgaggaaggcgcggcacgcgtccagggacatgtcggtgatgtccacggtggagagctccttctccctcaggtcgtgcgagaacatgctccggaacaccggcgaccgcgtcgccaggaccgcgcggtgcgcgcccacgctgccgtccgccgcgttgatggtgatgtcggtgaggacgtcctcgtgcagcatccgagccagggacgacagggccgtgctgtccgagcactgcttgacctggcgggaggcccaaatcgaggccggctccccgccctacggatcagcgaccttcaggtcaagaaactctatctcaatcacaaacctcccagtgacggtgctatcgattgtccacacaaaaccgtcgtatttcagctgtttgtcaaaaattcctgcatacgtgtaaaccacctgttagatagaaattagtcgttcactcccacttgcagacttgctctgtgcctacgggtcattcatatattcagagctataacattttgtttcgtaacctaatttttactactaaaattctgcatgtattcttgtagccagatcaaataaactacaggtttcctttcatttttcatgatgtctaacgtacacaccgagaattcaaacatgtccccattttctgtacttgccaaaataatgttcgttgagattacaagaagacagtagtttttcgtagaagacaattttttttgtcgaacaagttaattagtagaagtaacttacctgggtggactatggtctgctgattaggtggaagagatacaataagtttggcgataaaggaagctattggggctgaggaaccgttcttgagagaacttgtattctctgcaaagagcttaacacaggtttgcttgttatttctctccacagatatgcaccttcacatttcagaaaaaaaaaaacttaggttagcccatggcaacatgacatcagttctctcttgcactgatgctaaaaagaactgctgatggtttcaattgcgtcaatgagatttttcttggtaatagcaggggggacaaaatatcagaagtgaaggtgtgaaggttcaagaaagtgaagctttgtctgaaacatctttgtttcaaagcaaagcattcacgtttccctcctcacacaccaaatttggttgagagaaaatcctgactacatatatagtttggtgaggaaaggtatccacctataactaacgagaagctagatatagtttaggttgaaattataaatttagctacataggaggatacaaccaaaattagtgaagtaggtagcaaaccagaatgtattacactggttgccaaagggatcaaaattcagacatgacgctgtactgccaaatttcttttttttcccgcaacctcggacaaagaaccatattctgatggaagttcagtacagtacagctaccacgcatcaaaacagaattaatatctgaaatgaaaaggaaaaaaaagaaacaacaaccgagactaactagcgatacatgaacttgagcaaactacctccacaaacctcaaactgatgaaacaacatccatccaggattcagaagcacatggttcattcacacacaaacaaaccaggagcacttgtaacaaatcactactaccaaagtcgaagttttttcaccctgcccggcatgagaatcaagtagcaaagtagagactttctgaacaggaagttactaatactactactaataatctgcagagatggagagagggaggggagcaatcagggac

SEQ ID NO: 124410 - DNA, 810 bp, Zea Mays
atgtgcaacacctgcagcagagcggcagtgccatggcatgcgcccggcttaccgcccgctccacgcggcaagaacgccatggaacacctcggccacgagttccctgtcggccgtctgcaggaacgcgttgaggtcgtcgtcgtgcatctcgtacaccttcctgaagtccacaaggaacctcaggcagccgcccttgagcctcggcagccggtacaggtgcgccgtctgcagccgctccagcacgttgcgcgcgtcgatgtcttccagcaggctctcgtggcaggcctccctgaggtcgccgatgtcgtacttgtcggcggcgcggaggagcgccagccggttcgccaggaactcctcgccgccgcgcacgtcgccgtagatgtagctgaggaaggcgcggcacgcgtccagggacatgtcggtgatgtccacggtggagagctccttctccctcaggtcgtgcgagaacatgctccggaacaccggcgaccgcgtcgccaggaccgcgcggtgcgcgcccacgctgccgtccgccgcgttgatggtgatgtcggtgaggacgtcctcgtgcagcatccgagccagggacgacagggccgtgctgtccgagcactgcttgacctggcgggaggcccaaatcgaggccggctccccgccctacggatcagcgaccttcaggtcaagaaactctatctcaatcacaaacctcccagtgacggtgctatcgattgtccacacaaaaccgtcgtatttcagctgtttgtcaaaaattcctgcatacgtgtaaaccacctgttagatagaaattag

SEQ ID NO: 124411 - DNA, 387 bp, Zea Mays
aagcgcggccgccgtctccacgacgtcttgtacgacctcccgggcgacgtcttcagtgtcggcaatcggaccagcaatcactaccaccgcccgtgggcatcctccctcaacgccatcgtagcgcagctgccgccgcaaccgctgggcgcaggcctaccgctcactctgaacacggtggcggccactgggaacagcggcgctggcggcatcccggtgctgcagcttgccaatggcagcggtttcctcgaggcgtgcgtcaaggcgaaggtgccctcatcattggaggcgacatcgaggccattaaagccaaagagatggaggcgcggcagcacacgacgctcggcggcctggctgctgagacggagaaggagctagaccagttcatgg

SEQ ID NO: 124412 - DNA, 1745 bp, Zea Mays
gcaaaatcgcaagaaattaaaaagacaacgccgcgagccacagctagcaccaccaccttgcaccgcacccgcaccgagacgaacagatcgaccatggctgccggcggcgacgacaccaccatcgcgcaggtccacagcggcatcgacagcagcaacaagacgctgctcaagagcgaggccctctacaagtacgtgctggacacgtcggtgctgccgcacgagccggagagcatgcgtgagctgcggctggtgaccgacaagcacgagtgggggttcatgcagtcgtccccggacgaggcgtcgctgctgcggatgctgatcaagctgagcggcgcgcggcggacgctggaggtgggcgtgttcacgggctactcgctgctggcgacggctctggcgctgcccgccgacggcaaggtcatcgcattcgacgtgagccgcgagtactacgacatcggccgccccttcatcgagcgcgccggggtggcgggcaaggtggacttccgggagggcccggcgctggagcagctggacgagctcctcgccgacccggccaaccacggcgccttcgacttcgccttcgtcgacgccgacaagcctaactacgtccggtaccacgagcagctgctccgcctggtgcgcgtcgggggtaccgtcgtgtacgacaacacgctgtgggccggtactgtggcgcttccccccgacgcgccgctcagcgacctcgaccgcaggttctccgccgccatcagggaactcaacgtccggctttctcaggatccccgcgtcgaggtctgccagctcgccatcgccgacggcgtcaccatctgccgccgcgtcgtctgatgtgatgatgatccgacgaccaagatcatatatcattcgctcgtcgtctctgtcatctttcaactgcctgcccgccgctgtccgctgccgtcgtcaattaataatgcatggttcttgttctttttttttttgtacttgcactgtgtgtgttgagttgaacatccggcgatgtactgcaacaactggaatgcaatgcaacatcatgcgtgcagctgtaactaaaattgacgacgacagcgtcgtccatgcatggaccgaggcggttatattaggtgtcgatcatccatgagtgaccgaggcggttaggtgtcgatccatgagtgacggagagtggcggccggcggcgaggccatgattggcgcgtcgtcgggtaggggaagggatgggcttgcactgtagtctgcggggagataagcctcctcggtcggtcgggatggcgggcgtgtcgttgtcgtctcgtccgccagcccggcacggagggcaggaggtggaagcaaagaatcacagtcgtcgtcgcccgtaccctacccatggagacatgcatgcatatcctcagagagaccacctcaggaggataacataaacataatagtagtagcgcattacgtgccactcactcgatcggggcccgagatgataatataacctactcctccttcctgacactaacctctgctgcctgctccgatccggatggtgatgcagcgtgcaagcatggtgtgccgagacgacgtcagtcggacgcgtgcgtgtcatcgcccagccgctaacatcccatcgatcaaaaccacctgcactagaaccagcctcccctaagagcttctactagtactagtaaacgaacactagaataagtccaccaaaaatttgagtaattcctcaagctaggcagtcgtaggcaccag

SEQ ID NO: 124413 - DNA, 1064 bp, Zea Mays
gcaaaatcgcaagaaattaaaaagacaacgccgcgagccacagctagcaccaccaccttgcaccgcacccgcaccgagacgaacagatcgaccatggctgccggcggcgacgacaccaccatcgcgcaggtccacagcggcatcgacagcagcaacaagacgctgctcaagagcgaggccctctacaagtacgtgctggacacgtcggtgctgccgcacgagccggagagcatgcgtgagctgcggctggtgaccgacaagcacgagtgggggttcatgcagtcgtccccggacgaggcgtcgctgctgcggatgctgatcaagctgagcggcgcgcggcggacgctggaggtgggcgtgttcacgggctactcgctgctggcgacggctctggcgctgcccgccgacggcaaggtcatcgcattcgacgtgagccgcgagtactacgacatcggccgccccttcatcgagcgcgccggggtggcgggcaaggtggacttccgggagggcccggcgctggagcagctggacgagctcctcgccgacccggccaaccacggcgccttcgacttcgccttcgtcgacgccgacaagcctaactacgtccggtaccacgagcagctgctccgcctggtgcgcgtcgggggtaccgtcgtgtacgacaacacgctgtgggccggtactgtggcgcttccccccgacgcgccgctcagcgacctcgaccgcaggttctccgccgccatcagggaactcaacgtccggctttctcaggatccccgcgtcgaggtctgccagctcgccatcgccgacggcgtcaccatctgccgccgcgtcgtctgatgtgatgatgatccgacgaccaagatcatatatcattcgctcgtcgtctctgtcatctttcaactgcctgcccgccgctgtccgctgccgtcgtcaattaataatgcatggttcttgttctttttttttttgtacttgcactgtgtgtgttgagttgaacatccggcgatgtactgcaacaactggaatgcaatgcaacatcatgcgtgcagctgtaactaaaa

SEQ ID NO: 124414 - DNA, 1224 bp, Zea Mays
tttccgtcccaggggggttaagttggtgagtgcctccggcgcgtaaagtctacggcagtttgctttgctttattaaaaacgaaaaaaaataaataaaagagcaatcaagcaaacgctagtgccgctgtcacctaccctctgctcgtcatatttaaatacagcagcagcagatggccgaacgaacgaagccacaagcagcgccgcgagccacagctagcaccaccaccttgcaccgcacccgcaccgagacgaacagatcgaccatggctgccggcggcgacgacaccaccatcgcgcaggtccacagcggcatcgacagcagcaacaagacgctgctcaagagcgaggccctctacaagtacgtgctggacacgtcggtgctgccgcacgagccggagagcatgcgtgagctgcggctggtgaccgacaagcacgagtgggggttcatgcagtcgtccccggacgaggcgtcgctgctgcggatgctgatcaagctgagcggcgcgcggcggacgctggaggtgggcgtgttcacgggctactcgctgctggcgacggctctggcgctgcccgccgacggcaaggtcatcgcattcgacgtgagccgcgagtactacgacatcggccgccccttcatcgagcgcgccggggtggcgggcaaggtggacttccgggagggcccggcgctggagcagctggacgagctcctcgccgacccggccaaccacggcgccttcgacttcgccttcgtcgacgccgacaagcctaactacgtccggtaccacgagcagctgctccgcctggtgcgcgtcgggggtaccgtcgtgtacgacaacacgctgtgggccggtactgtggcgcttccccccgacgcgccgctcagcgacctcgaccgcaggttctccgccgccatcagggaactcaacgtccggctttctcaggatccccgcgtcgaggtctgccagctcgccatcgccgacggcgtcaccatctgccgccgcgtcgtctgatgtgatgatgatccgacgaccaagatcatatatcattcgctcgtcgtctctgtcatctttcaactgcctgcccgccgctgtccgctgccgtcgtcaattaataatgcatggttcttgttctttttttttttgtacttgcactgtgtgtgttgagttgaacatccggcgatgtactgcaacaactggaatgcaatgcaacatcatgcgtgcagct

SEQ ID NO: 124415 - DNA, 1039 bp, Zea Mays
ctccccgtctctctccggcctccgaccggctcataaatagacggtgtcaccgcttccaggccggacgaaggaccttagcagagctcaagtacctgcgccggccagctatagacaagaggcggcttggagaggcaggcaccatcatccatggcgccctccggtgacaccattgccctcgtccacagcggcatggacagcagcaacaagacgctgctcaagagcgaggccctctacaagtatgtcctcgacacgtcggtgctgccgcacgagccagagtgcatgcgtgagctgcgcctcgtgaccgacaagcacgagtgggggttcatgcagtcgtcgcccgacgaggcgcagctgctgcggatgctgatcaagctcaccggcgcccgccgcaccctggaggtgggcgtgtacacgggctactcgctgctggccacggcgctggcgctccccgacgacggcaaggtcatcgccttcgacgtgaaccgcgactactacgacatcggccgccccttcatcgagcgcgccggcgtggcgggcaaggtcgacttccgcgagggccccgcgctgggcaacctggacgagctcctcgccgacgaggccaacctcggcgccttcgacttcgccttcgtcgacgccgacaagcccaactacgtcaattaccacgagcagctgctccgcctggtgcgcgtcggcggcaccatcgtgtacgacaacacgctctggtgcgggaccgtggccatgccaccggagacgcccatgtcggacatcgacaggaggttctcggccgccatcagggacctcaacgttcgcctctccgcggacgagcgcgttgaggtctgtcagctcgccatcgccgacggcgtcaccatttgccgccgcctcgtctgatggagtcagtgcgtgcccagggcatgcatgcatggctcgcgtgtggatgttccgtcgaccagttctccatccgatccgtttgttgttgcatgatgctttcaataaagatctgttttcctttccttcgttctgttttcttttttcacttttg

SEQ ID NO: 124416 - DNA, 1160 bp, Zea Mays
gaatatcagctattgacgatcacccatgactgcatctctgctgcatgtgtgagctcaagaaccgggccaggagcgacgcgagggagggagggagcaccgtgatcctcactcagcctccccttctgaccagcggccagtagtgcatctcatcagggaaccagaagataatataagatggggtgcgtgtcgtccaagatcctagcgaaatcagggagctttcaggagaaggtgagcggcctgggccacgcccacggcttccagaggagcagcgccatcgaggagatcatcctgtccacctccaagagcagcggcgaccagttcatggcgctcctccgcacatcatcccgcgccagctcgtcgtcggccgaggcgcatagccccgcgccgccgccggcagctgctgctgctgccaggatcgagacggtcgacgtggccgagctgctcgccggcctggaggaaggcagctgcggaacggcaggcgaggctcaggctccgtcgcggccccgcgcgtcggccggtagggccaggagcttccgcacggtggaggagctggacgcgatgctgctactgacgcaacatcagcagcagcaggaggacgagaagcttgctacagccacggagggggcagaggcagcacgcgtgtcggagggcgccaagcggagtgggcgcgcgcggcatcttggcgagctgcaagtgccggcggcggcggcgttcgacttctccaagtccgggagcctgcgggactggctgcggcagggcgggcagaccttctcgccgggctcctacgtcacgcccaggttcggaacgccggcggcggctgagcgcgggggaggcgagcagcagcagcaggaggcgctgctgttcgacccggagctggtggcgcagttggagcgcgccatggagcagctgtcggaggacaggggccgcgtcctggaccagatcctgggctgtaagtgaaggggtccacgtacgtacgtacggcccgctagaaatgagggcgaacgggccgcgaagccgtctctctcctctcgtggagggaggaggctgttgggctgggactgaagattttgtgtgtttattagttggtcgtcgttgtatagatagattaaataaaaaataaacataacaacaagattaataataataataataataataat

SEQ ID NO: 124417 - DNA, 2190 bp, Zea Mays
atggatgattggatgcttccctcacccagcccaagaacactgatgccaagcttcttcagtgaagagttcatctccactccgttctccaacatcttcgctgacgatagaggcagcaaaccccaggatgaaaacgaggacagtaacacctgcattggttccggtgctcacgaaacctctcaagatgtgaaatgccatcgtccacagatcgaatcgaacatttttggcgtgaatcagaaaccgacctctcctggaggtcttgcggagaggatagctgcaagagccggttttggtgtcctgaaaattgacatatcccgtgtcggttcatctggtgcggcgattcggtctcccgtgacaattccatctggtgtgagcccaagggaacttcttgagtcgccggttttccttccaaatgccatttcgcaaccttctcctaccactggtaaattgccattcctgatgcctaataattttaaatcaacaatgctgtgtggccccgagaagtctgaagaccacttacacgaagattctgcgttttccttccagccctttttgaggtctaaaccaccaacattatggactgcaaagaaggggccaagtgttgttcacgaaaccgggtccttatcaaaggatagccaggaggagctaaaccttcatgctaacccagcagctgcgaccgagcatgaaaccgaggaaagtctagttattagacctaaggcatgtgattccatgttcgacaatggtcatccttcttcccctgacgaaggaccagaacagagcgaggaaaaccaaaaccgggaagattgttcagctccggtcactgcccccggcgaggatggatacaactggagaaaatatggacaaaagcaggtgaagaacagtgagcatccaaggagctactacaaatgcactcacccaagttgccctgtcaagaaaaaggtggagcgttctgtagaaggtcatgtaacggagatagtttacagaggttcgcatactcacccactgccgctgcccagccgccggtcgagcgtccctcccacgcagctcgagtgtggttcacaatctgatggtctggagaacttgagctccaagcctgggcctgcctatcactcagcagcttcacaatcacagggaattgctccagatggccagttccaagatgtgcatagggaagctcttgaaacaaaactgtctggctctcttactacaactgagattgctgacaggcccgttatggatgtctcatcaacactctcctccaatgagaatggtgatagggcagttcctccaaccaatggcaggaacgaagatgagaccgaatctaaaagaaggaaaatggaggcatctgccgctactaacactaccaccaacactggcattgacatggcggctatggcatccagggcttcccgtgagccccggattgtcgtgcaaacgacgagtgaggtcgacatccttgacgatggctaccgctggcgcaagtatggccagaaagttgtgaaaggcaacccgaacccaaggtcagtgccatttctgtatcaagaaaccaaccaagtggaatttccagttgctgaacgcacgcacgcacgcacccgcacccttcttctacctgcacgcaggagctactacaagtgcacctacgcgggctgctcggtgcgcaagcatgtcgagagggcctcgaacgatctcaagtccgtgatcacgacgtacgaggggaagcacaaccacgaggttccagctgccaggaacagcggcaacgggcatccgagctctggctccacaccagcaccaccacaggggagcggcggccttcaccggaggctggagccgccacaggtcagcatccctcggttgagcgctgctgctgccgccgccgccgccgccgctgcctacggctcgctctcgcttcgtttcccaccacagctcagcgcagctcccgggggtttctccttcggaatgctccgtcccactggcatggcaccgtctctgggcggcttcttgccagcgcagatgccaggccgtgggttgccgatgcagggctgcgcgggcctggtgctgccgagaggcgaggcgaaggtggtgagcccagagcagcagtccggattgccggtggcgaacgggaatgccgcggcaacctaccagcagcagcagcagcagctcatggccaggtgggctcagggtcatcagatgtga

SEQ ID NO: 124418 - DNA, 2547 bp, Zea Mays
gatctgtgcgtgttcttctcaatccattccagagtccacgctgcagaagccaaggggatggaggtcacaatagcggagaagaagccccgggccgccggcgacggcggcggcctggttgagaggctccccgaggcgctcctggtggaggtgctggcccgtgtcgacgtcgacggcgcctgctccgccgctgcgtcctgccgctcgctctacgctgccgccaacgccgttctccccgccctcacctccatcgacctctccgcctttgccccgtcgaacgccatcctcagcaggattctcgcggggaatggcgcggtccgcagcctcaccgtcaactgcagcctcctcgacgactccgccgcctccgtcatcgccaggggtagcctgcgcgacctctcgctgctcaaatgctccttctcgatgagcttctttgtggctcttggtggggcatgccacgatttaagatcgttgaagctggagatggcggtttgtccatacactctatatccttgcctagcacctgtctacgtgggatgtgttcacttggagactctttgggtgaagttccctctgctagatccactcaccacttttcgcagttacaaggctggatcacctctcattcctagtaacatcaaggacctgttgctacaacctgtatctcattctagggcaaagacggtcttcctgaaaaccacatctctgaacaaacacatcactgacaacttggaatcactctctttagttcttgacatggtaacggatgaactcgttatgttgatcaccagtaatgtccataagttgtctgagctatgcctggaagatgaacctgatacccaaccaaatttgcctgaagatttgaccaatgtggggcttcaagcacttggcttgtgccacaacttgaaacatttgtctctgacacgacgttcctatgacttcagacgggtaaacgactttgggatactgatgcttgctgacggatgcaagcaactgagaaccattagacttggtgggttttctaaagtaagtgatgcagggtatgcagcccttctccactctggaaaggacctgaagaagtttgaggtcagcaatggctggtgcttgtcagacttggcatgcctagatcttgataaggcagctccaaatattacagaagtgaggttgcttaactgtgctctcctaaccagtgatacagccatatctctagcaccctgcactaacttaaaggttcttgatctttcgggttgcaagagcattgcagactctggcttggtttccatctcacagcttcccaacctaactctactggaccttgctggagctgacattactgatgtgggtttatcggcactcggtaatgggaggtgcttgatatcttctttgtgcttgagaggttgcagaaggatcagcagtaatggaatagcttcactgttgtgcggggctggcaccatcaacaagacattagtttcgcttgacatcggaaatgtgccaagaatatcatgtcgggctgtgacagtgattgctaagaactgtgagcagataagcagcctgtgtctgcggaactgcctcctcataaccgattcatctctcgaggtgctaggttctatgggatgcgactccagtaaatgccccctgagaatgcttgatcttgcctactgcagcaaactgtctcgaaacttcctgagacactttgagccgccgctgttccgaggactgcggtggcttggcatcggtaagaatgtagctcaacgtcgtggctgcagcctgacaattgcggaggttctggagcgaaagccaggattaaccatctgctgcaacgcctgcgacatgggctgcaggaacaagtgccatccagacattcgttttcttcagtagatgtgctgcaaaggctgcaacatgggctgcaggaaccagtgtcatccagagtccagacatttgtttccttaagtagatatgcaggattaagggtctgtttgtttcagtttatagatttatatgagattaaaggatctggattatataatctagattagattatttgggtgtagctgtttggcaacctagtttattgaaaaattcaattattgattttagtcatatgttgcgtggtgggagcaagaaaaaaatagatgaaacatttttttaggtaaggagtgacaatggtgagtaatatcttctgaagttgctataggtagtgagtctagattatttaagccagattgtataatctggacagattataagctaagacaaacagaccctaacccatctgtggcatgggttgcaatagaagtgtcaacccaacattcgttttcttcagtacatgtgtttgatattgttgtgaaacgacacctcttcactaacagatgccttttcaggagatgatctcatctattcaagcataagattagtggattggattagacggttagaattactttcaaagggcatgttcttcaggaatgttcttcaggagagatatttggaataatgcacacaccatgatcttataatttattttttatataattgattattttagtttaagtc

SEQ ID NO: 124419 - DNA, 748 bp, Zea Mays
gtccacgctgcagaagccaaggggatggaggtcacaatagcggagaagaagccccgggccgccggcgacggcggcggcctggttgagaggctccccgaggcgctcctggtggaggtgctggcccgtgtcgacgtcgacggcgcctgctccgccgctgcgtcctgccgctcgctctacgctgccgccaacgccgttctccccgccctcacctccatcgacctctccgcctttgccccgtcgaacgccatcctcagcaggattctcgcggggaatggcgcggtccgcagcctcaccgtcaactgcagcctcctcgacgactccgccgcctccgtcatcgccaggggtagcctgcgcgacctctcgctgctcaaatgctccttctcgatgagcttctttgtggctcttggtggggcatgccacgatttaagatcgttgaagctggagatggcggtttgtccatacactctatatccttgcctagcacctgtctacgtgggatgtgttcacttggagttacaaggctggatcacctctcattcctagtaacatcaaggacctgttgctacaacctgtatctcattctagggcaaagacggtcttcctgaaaaccacatctctgaacaaacacatcactgacaacttggaatcactctctttagttcttgacatggtaacggatgaactcgttatgttgatcaccagtaatgtccataagttgtctgagctatgcctggaagatgaacctgat

SEQ ID NO: 124420 - DNA, 2221 bp, Zea Mays
catttttattaagcgcagacctccaagttaacaagaccatacactccagatgatacaaaaataactacacaagaaagagctgcaaatggcaagccacatcgcagtttgcagctagcggacacaacagtcaggcagcagcagcagttaccactccgtgctccaccgtgttgcctccctcccaagtcccattggccgccatgggctcctgcctctcctccgagacccccgccgccagcgccggcgcggcggcgtggtggcggaaggggcgccgcgggacccgggaaggcgcggctggcggcctccccagcggcggcaagaagccgcccggacgagggggagagatgacggaggacgagctcgcgcgggtctccggcaggatgtgcggcaacggcgccagcgcggtggcgtgcctccacacgcagcaggggcggaagggtaccaaccaggacgccatggtcgtgtgggagagttttaactcaagtgacagcatcttctgtggtgtgtttgatggccatgggccatacggtcattttgtcgccaagaaagttagagattcacttcctgtcaagttgcgcacacaatggcagactagtgctaatgggccctgctctagtcctcatcaaaatggaagcatctctggaagtatcaactccgaagaaacagcttctattgtcgatgacgaatggggagatggtgataacactgagaagcttcctgagatgtttcttccacttaagcgatcttacctaaaagctttcaaattgatggacaaggaactcaagctgcatcccacagttgactgtttctgcagtgggtctacggcggtaacgttggtgaaacagggattggaccttgtaattggaaaccttggggactcgagagcaattatggggacaagagacgcctctaacaatctaactgctctgcaactcacagttgatttgaagcctaaccttcccagggaagctgagaggatacaacaatgtaaaggacgagtctttgctcttcaggatgagccagaagtcgccagagtgtggttgcccaataacgactcccctggactggcaatggcaagagctttcggcgacttctgccttaaagactatggtttgatatctgttccagagatatcgtatcgccttctcaccgagaaggatgaattcataatactagccaccgatggggtgtgggacgttctctcgaacaaggaggccgttgatattgtggcgtcagccccgtctcgggcaacggcagccagggctcttgtcgacagcgctgtcagatcgtggaggctcaagttcccaacatccaagagtgatgactgcgctgtcgtctgcttgttcttggatcgtgctggctcggctcaagagagcgagagcgaagccattgtggagacggcagagcccaccggggaggaggtctgcaggcgggatgccggtgaggtcgacgaggacatggcagtcgcagatgctggtgtacatgtagtatccagcgcggagcacagtgccgaggcgactccgttgcagcactccaccacgtcaagggagctcgacgacgagattgtaccggcggacgagcacgagcctcccgtcgtcctgaaggagcctgcgaggtgcgggtctgctcgcagcctggcagagtgcatatcgacgagcgaggaagaggagtggtccgcgctcgaaggcgtgacgcgggtgaactccctcctgaacctcccgagaataatgtccggcgacaggagatcggccagctggaggaagcgacggtgaacagcagaggaagctctccactggagttcttcgccgagttcaaatcctccctcagtctctgggaatcttccccaggttgttttgacctcaaccgcgtcagcgtgtgcgttccggatcgtttgtttgttcattcttgtgccttttttgccggtaggtgttccatgcttggggcttctctgtgtccgtttgtgcatagaaaagtttttttttttggttctgtgagaagcttctgtaaaacatgcagcacctcctggagtgctatatgtgtatcattaggtcatcgttttgttcatcttatttggtttttggtttgtagtttggattcgtgttagttgtgcgttattgcgatgagaagtcctcgaaatatgttacaaatcatgtggaaactaaaactccctcctaagatcaaaatcattctctggtatctaggtaggaagaggagtgactcttac

SEQ ID NO: 124421 - DNA, 2252 bp, Zea Mays
catttttattaagcgcagacctccaagttaacaagaccatacactccagatgatacaaaaataactacacaagaaagagctgcaaatggcaagccacatcgcagtttgcagctagcggacacaacagtcaggcagcagcagcagttaccactccgtgctccaccgtgttgcctccctcccaagtcccattggccgccatgggctcctgcctctcctccgagacccccgccgccagcgccggcgcggcggcgtggtggcggaaggggcgccgcgggacccgggaaggcgcggctggcggcctccccagcggcggcaagaagccgcccggacgagggggagagatgacggaggacgagctcgcgcgggtctccggcaggatgtgcggcaacggcgccagcgcggtggcgtgcctccacacgcagcaggggcggaagggtaccaaccaggacgccatggtcgtgtgggagagttttaactcaagtgacagcatcttctgtggtgtgtttgatggccatgggccatacggtcattttgtcgccaagaaagttagagattcacttcctgtcaagttgcgcacacaatggcagactagtgctaatgggccctgctctagtcctcatcaaaatggaagcatctctggaagtatcaactccgaagaaacagcttctattgtcgatgacgaatggggagatggtgataacactgagaagcttcctgagatgtttcttccacttaagcgatcttacctaaaagctttcaaattgatggacaaggaactcaagctgcatcccacagttgactgtttctgcagtgggtctacggcggtaacgttggtgaaacaggtggttgatacttcaaaacttgccttggtgtttgcacatacttccagatttctaataaaagtgttcgaagtagaattaaatcgctgaatgagctggacctgttcttgttagggattggaccttgtaattggaaaccttggggactcgagagcaattatggggacaagagacgcctctaacaatctaactgctctgcaactcacagttgatttgaagcctaaccttcccagggaagctgagaggatacaacaatgtaaaggacgagtctttgctcttcaggatgagccagaagtcgccagagtgtggttgcccaataacgactcccctggactggcaatggcaagagctttcggcgacttctgccttaaagactatggtttgatatctgttccagagatatcgtatcgccttctcaccgagaaggatgaattcataatactagccaccgatggggtgtgggacgttctctcgaacaaggaggccgttgatattgtggcgtcagccccgtctcgggcaacggcagccagggctcttgtcgacagcgctgtcagatcgtggaggctcaagttcccaacatccaagagtgatgactgcgctgtcgtctgcttgttcttggatcgtgctggctcggctcaagagagcgagagcgaagccattgtggagacggcagagcccaccggggaggaggtctgcaggcgggatgccggtgaggtcgacgaggacatggcagtcgcagatgctggtgtacatgtagtatccagcgcggagcacagtgccgaggcgactccgttgcagcactccaccacgtcaagggagctcgacgacgagattgtaccggcggacgagcacgagcctcccgtcgtcctgaaggagcctgcgaggtgcgggtctgctcgcagcctggcagagtgcatatcgacgagcgaggaagaggagtggtccgcgctcgaaggcgtgacgcgggtgaactccctcctgaacctcccgagaataatgtccggcgacaggagatcggccagctggaggaagcgacggtgaacagcagaggaagctctccactggagttcttcgccgagttcaaatcctccctcagtctctgggaatcttccccaggttgttttgacctcaaccgcgtcagcgtgtgcgttccggatcgtttgtttgttcattcttgtgccttttttgccggtaggtgttccatgcttggggcttctctgtgtccgtttgtgcatagaaaagtttttttttttggttctgtgagaagcttctgtaaaacatgcagcacctcctggagtgctatatgtgtatcattaggtcatcgttttgttcatcttatttggtttttggtttgtagtttggattcgtgttagttgtgcgttattgcgatgagaagtcctcgaaatatgttac

SEQ ID NO: 124422 - DNA, 2142 bp, Zea Mays
catttttattaagcgcagacctccaagttaacaagaccatacactccagatgatacaaaaataactacacaagaaagagctgcaaatggcaagccacatcgcagtttgcagctagcggacacaacagtcaggcagcagcagcagttaccactccgtgctccaccgtgttgcctccctcccaagtcccattggccgccatgggctcctgcctctcctccgagacccccgccgccagcgccggcgcggcggcgtggtggcggaaggggcgccgcgggacccgggaaggcgcggctggcggcctccccagcggcggcaagaagccgcccggacgagggggagagatgacggaggacgagctcgcgcgggtctccggcaggatgtgcggcaacggcgccagcgcggtggcgtgcctccacacgcagcaggggcggaagggtaccaaccaggacgccatggtcgtgtgggagagttttaactcaagtgacagcatcttctgtggtgtgtttgatggccatgggccatacggtcattttgtcgccaagaaagttagagattcacttcctgtcaagttgcgcacacaatggcagactagtgctaatgggccctgctctagtcctcatcaaaatggaagcatctctggaagtatcaactccgaagaaacagcttctattgtcgatgacgaatggggagatggtgataacactgagaagcttcctgagatgtttcttccacttaagcgatcttacctaaaagctttcaaattgatggacaaggaactcaagctgcatcccacagttgactgtttctgcagtgggtctacggcggtaacgttggtgaaacagggattggaccttgtaattggaaaccttggggactcgagagcaattatggggacaagagacgcctctaacaatctaactgctctgcaactcacagttgatttgaagcctaaccttcccagtacgttcagttctcactctgatcatttcattgacccccgaagaccgtcgtaatctgcatatctgatctttctgtcctcgaggggaagctgagaggatacaacaatgtaaaggacgagtctttgctcttcaggatgagccagaagtcgccagagtgtggttgcccaataacgactcccctggactggcaatggcaagagctttcggcgacttctgccttaaagactatggtttgatatctgttccagagatatcgtatcgccttctcaccgagaaggatgaattcataatactagccaccgatggggtgtgggacgttctctcgaacaaggaggccgttgatattgtggcgtcagccccgtctcgggcaacggcagccagggctcttgtcgacagcgctgtcagatcgtggaggctcaagttcccaacatccaagagtgatgactgcgctgtcgtctgcttgttcttggatcgtgctggctcggctcaagagagcgagagcgaagccattgtggagacggcagagcccaccggggaggaggtctgcaggcgggatgccggtgaggtcgacgaggacatggcagtcgcagatgctggtgtacatgtagtatccagcgcggagcacagtgccgaggcgactccgttgcagcactccaccacgtcaagggagctcgacgacgagattgtaccggcggacgagcacgagcctcccgtcgtcctgaaggagcctgcgaggtgcgggtctgctcgcagcctggcagagtgcatatcgacgagcgaggaagaggagtggtccgcgctcgaaggcgtgacgcgggtgaactccctcctgaacctcccgagaataatgtccggcgacaggagatcggccagctggaggaagcgacggtgaacagcagaggaagctctccactggagttcttcgccgagttcaaatcctccctcagtctctgggaatcttccccaggttgttttgacctcaaccgcgtcagcgtgtgcgttccggatcgtttgtttgttcattcttgtgccttttttgccggtaggtgttccatgcttggggcttctctgtgtccgtttgtgcatagaaaagtttttttttttggttctgtgagaagcttctgtaaaacatgcagcacctcctggagtgctatatgtgtatcattaggtcatcgttttgttc

SEQ ID NO: 124423 - DNA, 2668 bp, Zea Mays
agaacattcgagaacccctcgcctcctcccccaacgataaaatcctcaccgcgccgcaacgcatcttcgccccacaaaccctcgtctcgtgccactttctcagtcccctctagccgccgcctaccgctcgcgctctcctcgcgttcgggaaggtcgtttcgccatggcctcggagacggagacgttcgccttccaggcggagatcaaccagctgctctcgctcatcatcaacaccttctactccaacaaggagatcttcctcagggagctcatctccaactcctccgatgccttggacaagatcaggtttgagagtttgacggacaagaccaagctggatgcacagccagagctgttcatccacattgtccccgacaaggccaacaacacgctgacaatcatcgacagcggcattggtatgaccaagtcagaccttgtgaacaaccttggtaccattgcgcggtcaggcacgaaggaattcatggaggcacttgctgctggtgctgatgtgtccatgattggccagtttggtgtcggtttctactctgcctaccttgttgcagagagggttgtcgtgaccactaagcacaatgatgatgagcagtacgtgtgggagtctcaggctggtggctccttcactgtcgcacgtgatacctctggggagcaacttggcaggggtacaaagatgaccctctacctcaaggatgatcagttggagtaccttgaggagcgccgcctcaaggatctgatcaagaagcactccgagttcatcagctacccaatctctctctggattgagaagaccactgagaaggagatctctgatgatgaagatgaggaggataagaaggatgaggagggtaaggttgaggatgttgatgatgaaaaggaagaaaaggaaaagaagaagaagaagatcaaggaggtttctcatgagtggcaattggtaaacaagcagaagccaatctggatgaggaagcctgaggagattaccaaagaagagtatgctgctttctacaagagcttgaccaacgactgggaggagcatcttgccgtgaagcacttctctgttgagggccagcttgagttcaaggctgtactctttgtgccaaagcgggcccccttcgacctctttgacaccaggaagaagcagaacaacatcaagctctatgtgcgacgtgtcttcatcatggacaactgtgaggagctgatcccagagtggctgagctttgtcaagggtattgttgactctgaggatcttcccctcaacatctctcgtgagactctccagcagaacaagatcctcaaggtcatccgcaagaatcttgtcaagaagtgcgttgagctgttttttgagattgcggagaacaaggaggactacaacaagttctatgaggccttctccaagaacctcaagcttggcatccacgaggactccacgaacaggaccaagattgctgagctcctgaggtaccactcgaccaagagcggggatgagctgaccagcctcaaggattatgtgaccaggatgaaggagggccagaacgacatcttctacatcactggtgagagcaagaaggctgtggagaactccccgttccttgagaagctgaagaagaggggctatgaggtgctgttcatggtggatgccattgacgagtattctattggacagctgaaggagtttgagggcaagaagctcgtctctgccaccaaggagggcctgaagctggacgagagtgaggatgagaagaagcgcaaggaggagctcaaggagaagtttgagggcctctgcaaggtcatcaaggaggtgctgggcgacaaggtggagaaggtggtggtctccgaccgcgtggtggactccccctgctgcctggtgaccggcgagtacggttggaccgccaacatggagcggatcatgaaagcccaggcgctgagggactccagcatgtctgggtacatgtcctccaagaagacgatggagatcaaccccgagaacgccatcatggaggagctccgcaagcgtgccgaggctgacaagaacgacaagtccgttaaggaccttgtcatgctgctgttcgagacggcgctgctcacttctggctttagcctcgacgatcccaacacctttggcagccgcatccaccgcatgctcaagctgggcctgagcatcgacgaggacgaggaggctccggaggctgacaccgacatgccccctctggaggatgacgctggcgagagcaagatggaggaggtcgactaagctgggtttattcttatggaggaaagagagagaacatcgggtctgttctgtgggtcttaccacttatgctattatgcaatctgttgttggtatgctagtgctactattgtctctgctgtcttctagttaattttgttgttgttttgcgtggtcagtttctcatcgcatcagtggtagaaaacattcacctgtgggactaaaaaaatgtttggtaattggaacgcatcgccaagttcttctgttcttggttctattatatgtaaaggtgatttgctttgagaacttaatacgttagtacggttgcctgaaacgatggagggcatgagagctcgccgtattcctatgtaataacaaaatgtacatatattttgtcatccatgatggtttagttcgccaaaaaaaata

SEQ ID NO: 124424 - DNA, 450 bp, Zea Mays
atggcgaacgcgaggctgagcgtcacggccagcggcaggccctcggggacggccacgaccacgatggtgacggcgatggcgaagaactcgagcagctccagcgcgtcgtcgccagtccagctgagccaggagccgtcggcgagcttgcgccagaacaggctctgcgtgagcaccgcgaacgtgacgacggcgaaggcgaggccgatcttgccgatgatggtggccacaccgttcagcttgacctgcagcggcgtctcgtcgtcgccgccctcgctgagcgtggccatcagcttgccccactgcgtgcgcatgccgacggtggtgaccagcatcttgcacgcgccgtcctgcaccttggtccccgacagcaggaacgggttctcggcgctcaccgccacgggctcgctctccccggtgaggctggactcgtcgatgagcatcgagaagccc

SEQ ID NO: 124425 - DNA, 684 bp, Zea Mays
ccctctcaaacacgcgctttcgtctgcccaggccccagcagctagctgctcctcaccggccgccgggacatgaaggaggccgccaacaatgccaccgccgacgcgccgtcccaccaggccccgtctgcccggagaggcccgccgccgccgctccggtgacccctgtagctagcttctcctttctcgccttctaattaagtcgccgttcttcttctcggagcaagcaaattaagccatcgtctatggagctcgccgtcgtcagcagcgggctaggagagccagccgcagccgggctggcgaagaaggatcggagcaaatacgtgtccccggcgatacgtgcggattgttagtatttggcatgcgggaaagccaggcatcttttcttttttcttcttttctcgatgattattgtgactcgttttcgctacccttggtgattgttgttgatttagcctttttccttttcttctctctctctccttctttcttcggtttggtccccctccatcgatgcatagtttgacgccgattacactttctaatgataagaacacgtcgattgtcggagatggaaatgttcatgtggcttgtgtgcttctctgtctgtttaccattatgtacgtactacgtagcaatatgaaatctactccttcaaggatcatgcatgctttccttgagcacaca

SEQ ID NO: 124426 - DNA, 2014 bp, Zea Mays
agaatgtatgagtttgcacaaaaagcgtcagctggtataacaatggatgatgtgaagaaaaagctagtggtaccatcaacatatgcaccaaatctgcagaatgctgataacattacactggaaaatgtggaaatatatgttgaggccgttaaaggtgctctgcatatgttagaaaatggtgcatctatagcagatgccaaatctgtctgcccacctaatgttctgtttcaacttgtaaagtggaagaacaagttgagtgtagttcttgcaccatttcttcatggcatgcgatacacatcgtatgggcgccacttcacaaaactggacaaactccagctgatagttgataagctacagtggtatattcaaagtggtgacacggtcgttgatttttgctgtggttcaaatgattttagcttgttattgagggaaatattggaatcttctgggaaaaattgcttctacaaaaattatgatctcatccaaccaaagaatgatttcaattttgagagacgagactggatgactgttcaacctgatgaattgcctacaggatgcagactggtcatgggattgaatcctccctttgggactaaagcctctcttgcgaaccagttcatcaacaaagctctcactttcaagccaaagcttataatactcattgttcccaaggaaactgaaagattggacaagaaatacccaccatatgagctaatatggcaggactcagatcagctctcgggaaagtcattctatctacctggatctctggatgctgacaacaaggtgatggagcaatggaatgtgtcacctcctccgctttctctgtggagtcgtagtgactgggctgagaggcactccgagattgccaaatcaatggggcacatctcgaatgaaattggtgacttgcaaagggatctggctgcatctatacataccacagagcacgtggaggcagatgatgcaggggttgcaggcatgtctccatgtttactagatcagttgttgtctgacacgttccatgacccaacaacttctccaggggactgctggaatgataccagcggccgatcacggcaaccatgcaactacgaaacagcaggacaaggaaggggcgatccaacctacaatcatacaacagaaagctgctctgatatgagcatttcattgtcggagagtgatgttcagagaaaagatcaagctttgccaatgccagagcatggaggcaccggctctgatatgagcatttcattgtcggagagtgatgttcggagaaaaggtcaagcctgggatgctgttggaagtgcatctgcagggaaaccaactgctgatgccgattacgatgaggtaacatcagcctgtggtccgtatcatttctcgggggttgcgggcaaacaggcagctggagttgagtactggatgatacaagactcaccagtcctggaggaaggagagctgagcgatgcaccggctgcggcgggcaggcctgcatctggcacgcgtcataaaccgacggaacacacgccagcagcagcaacacccgaagctgcctcctggtggagtgggcagctggatcatcactcgcggtctgtggccgctaggcataatgccagaactctgccaccaagaaacaccttccccggactgcgcttgcggcaaggatgcaacacctctcgtaagttcctgccccaaggcatgggctatgacgccatccatgaagggccatcgaatggctggatcgaggaagaagactactagtataggtgctaatgtgcctcgccctcgcgttgtcttcacaggtgtgagctagttaattctacggccggctttaggagtatgctgctgaggttatgctaacgttggtagagtcggttctgcggtctgtcattggatcagtattttcgttaactgttgcattcatgccctgtatctgtttctgacgaaacatcttaccatggacttgattgcctttgagcctgaattatccaggatcgatctttcgttgcctgctata

SEQ ID NO: 124427 - DNA, 816 bp, Zea Mays
aacaggtctcatagaagtggaaagatcaaacaagaatttgggattgttaattcataggatatggctgatttagtttgtgctctatgcgacaatggaggtgaaattataagctgtgaaggcaggtgtctgaggtcgtttcatgcaactaacgattctagtgaagactgtccaaccttaggatacagcaggcagcagttagatgcggcggaagtttttaagtgcaagaattgtgagtatggaatatatcaatgctttgcttgcggaaggctaggctcagctaaaactaatcctcccgaggtatttccatgtgcttcttcaacttgtggtcacttctatcatgcgatgtgtgttactcagttactcttccctgaaaacgaggccaaagcaactgagtatacagcaaagatagccagtggggcaaaatttgcatgtcccctccacaaatgtggcatctgcaagcatggggagaacaaagaggatagggagctacagtttgctgtctgtcggcggtgcccaaagtcataccacagaagatgcttgccaagggaaattgtctttgaggacttcactgagaatggtcaacatgttttccaaagggcgtgggatgaccttcttcccaacaatcgcatcttgatatattgcttgaagcatgatattaatccagaatatcgaaccgccacgagaaatcatattaagtttcctaaggaccctactgctctcaagaaacccctcaattgtgtcaatggaatgaacacaaagacattgaagatacgacgtcttgaggagcttccttctgcgccattgtctaatgttaaa

SEQ ID NO: 124428 - DNA, 1652 bp, Zea Mays
atggcaggcgtccggtgcacgctcggaggagaacggggatgtcaggttgtgcgggtgggcatgggtccggcgtctacttgcgggagcggcggcgccggagacgggatgtgtggggcgcggatggcgataagtgggtggggtggaggcgggggcatacacaggtcgcgcctgtccaccgccgtcttcagggtcttcgcctgcctttgcatgcataggccggacagggggctccaagatctcctcggatcaaggaatcgttcgactctggcgacctccctcccacccttccatcttggtgattctacacgcaccgcaccgaatctttctccgacgggatccgccttcgattctggtcgcacgccaatcaatcagcgaaggctattggaatctaatggccagatctacgccacccttcccttgttccttccccacgacaaccgcccagatcctcctcacctgacctctcctttctcgtttttatgccttccactgtatctgcagcaaagtgaagtatcagaggctactccgttcggagcaaggaaaggaattgtgagccttgtgttggagaagtcggagactgagagtatatggcgactccattggtgtccatgtcaacggctgaagtgttctagagcaactcggggttgtcgcagagctcagggagacttgccaaccttgtcaccaccatgtcaattaagtaatcatgtctttgttgaagcaagcaatagatactgctaccagcaaaaagacttgataaaggagtacgacgttgtactgaagggtccattcaactacacggctcgtgatgaagctggtaaccccgagaatggtaacttctggctagcatggcataagtctgtaagcatttgcatctttaggaggttaatttttatattatttcatgtacgacaagaagttcaaacaagaagcaacgcaaaaacttttagatgtgagatactatcatagttttttatgataatgttttgctatggagctaaactggcaatatgttcttgacaggttcatgatagattagcttgtattgttgagatggaaaaagagaatgcaagtttgggataagcagttgaagtatcatcctccaaagaacgttgaatcagaaatcttgtgtgagcatatcaagaaagagagggaggcaacaaaggctagaaaacgaccatgctatctgaagaaacctgaacttcacgaaaggaagctgatgaacaagtacaacgagctcaaggaggcaggaaagcttgatgcattcatggaaaagcggcggaggaagaatgcctccaaagatcatcggttcatgtcgtaccaacgcagtggagatgcataatagtttcctgattctggaggcaagcgaaaggatgatggacggtcttctcatggtggctggacactggacagtcagtgtctctgttactttgttgccctagccgtacaatcgtcagctccgtgcacaatctctactagttcttaagaatagagtgcaggcgtccacagtgggtttttatgtttctcatttcactctctgcattttcagttacaactacactgcatatgttgacagatttgttcatatattactccagctgacattttcactatcgcaacaacatctctactattatttgttttttgcatataaa

SEQ ID NO: 124429 - DNA, 960 bp, Zea Mays
atggcaggcgtccggtgcacgctcggaggagaacggggatgtcaggttgtgcgggtgggcatgggtccggcgtctacttgcgggagcggcggcgccggagacgggatgtgtggggcgcggatggcgataagtgggtggggtggaggcgggggcatacacaggtcgcgcctgtccaccgccgtcttcagggtcttcgcctgcctttgcatgcataggccggacagggggctccaagatctcctcggatcaaggaatcgttcgactctggcgacctccctcccacccttccatcttggtgattctacacgcaccgcaccgaatctttctccgacgggatccgccttcgattctggtcgcacgccaatcaatcagcgaaggctattggaatctaatggccagatctacgccacccttcccttgttccttccccacgacaaccgcccagatcctcctcacctgacctctcctttctcgtttttatgccttccactgtatctgcagcaaagtgaagtatcagaggctactccgttcggagcaaggaaaggaattgtgagccttgtgttggagaagtcggagactgagagtatatggcgactccattggtgtccatgtcaacggctgaagtgttctagagcaactcggggttgtcgcagagctcagggagacttgccaaccttgtcaccaccatgtcaattaagtaatcatgtctttgttgaagcaagcaatagatactgctaccagcaaaaagacttgataaaggagtacgacgttgtactgaagggtccattcaactacacggctcgtgatgaagctggtaaccccgagaatggtaacttctggctagcatggcataagtctgttcatgatagattagcttgtattgttgagatggaaaaagagaatgcaagtttgggtaggcgctctactgattatttaccatatttaaaccagtcttcttaa

SEQ ID NO: 124430 - DNA, 810 bp, Zea Mays
atggagttcaaagccggcgttttcaccgtggcaatgctagccatcgtcgtgctctccacaccagcagccccgcagaagcccaagagccctcccgctccgcgatccccagtcgtcctggcgccggcgccagcgcccgcaccggcggcgccgcaccacgtggacctcgcggacctcctcagcgtggccgggccgttccacacgttcctggactacctgcagaagaccggcgtcatcgagaccttccagagccaggcgaacgacacgaagcggggcggcatcaccgtcttcgtgcccaaggactcggcgttcgcggcgctgaagcagaccacgttcgccaacctcacccaggaccagctcaggtcgctgctgctgtgccacgcgctgcccaagtactactcgctggccgagttcgaccggctgagcgcgctcggcccggtggccaccctcgccggctcgcagtacacgctgaacctcacctacgacatgggcaccgtccgcgtgaagtccatgtggtccgaccccaagatcagcagcagcgtgtactccacccgccccgtcgcggtgtacgaggtcggcaaggttctcctgccgatgcagatcttcaagagcgaccccccgctggcgcctgcccccgctccggcaccggatgccaaggcatccgacgtcgctcccagcccggcgtcggggaaatcatcagcgagtgcgaaggcgaaggagaaggcgggagagaagagctcgtcgtgccgagccggtgtcgtcgcccattacttggcgatcgctgtctccggcggcctggtgctcttgtggtga

SEQ ID NO: 124431 - DNA, 1039 bp, Zea Mays
ttcgcacctcctgctgtctccatccggctccatggactccaccctgctgctgccgcgtcttcctcctcctcccctcccgtcgtcgcttcgtcgccgtcaccggcagccgcactgtcttcctccgcaccgccgacccaaaaccgtcccgagacatggcaggatgccgccggcggcgcgagaaggacgcgccgacgccggcacgaagttccgcgcccgagggctgttcggcggcggcggaggaggagacaggctccgggccgtgatgaggatggtgaagctcaactcggccatccagaaccggagcgtcagggagctgctggagctgctcggcgacgagtgcctctacttcctcgggaacctccggtccgtcgacgttccgcggctgggcaaggacatgttcctgctcctccacgcgctgatggtccggcaccacgtgtcgttcgtgctcaagccgtcgccggacgacgaggcaggcttcgacctgggcgtcaagtggtctctagagtggaaggggaagaagctgccctgggacctcgactgcaacgtctccaccacccacgtctaccgcggcctcctgctcatcaggtaccttctgctagctgctttcgcatgcttgcacgtgcagcaaaagaacgaccggctaaataaccgccttgtctccccgtcgccgtcgcaccgcacgcagccaagtgaacaagacctgcgtgccgctgctccagaggattcttgggatcatgcagcaggcaagcaagcacacgatgcgatcaatggcaaacagatagcgaaacaaggtctaaaacagtttgagattcctttatcttttgcgactgcagaacctggacgcggtagtcctggccgtcgtgcacaaggtgctgccagaaggcaccctcgacgagaagcagaggagcacgatggttttctgcgccgtcatcggcctcctcgtcatgctgctgttctacgcattgctcaagaacttgtagcttcgtcgtcgccgtcgccaccagcagcaccaccaggagggcaaggagcaagtatctag

SEQ ID NO: 124432 - DNA, 779 bp, Zea Mays
ggacatctcctaaataatcctcagccggtacttctgctagtccgtgccatgcttatactggtgatcaagatgcctatgtctccaccaccgtcgctcagctgcttgcctctgtgttggctcgccggacctactgtttgcgctgtgcttaaggtcctactcaccggtcttctcgtcgacagcgccagtcgtgtctcccaccacgccgacactttttctccatcgctcgactccgtgctcagcgctctcaccatcaccgcgtctctcctcgccggtgttcgccggacatacgctcaacctcgccaccgtgggacttacctctcctccaaaccgtgttcgccgcagcctagccatcgtctacctctatgctcagcacgaaaccgctcgccctacagcctcgtcgcgtcaccgtcctgcaggcactgagctccacccacctcggcgaaggccaccgtccccttcttcactgtgcactcggcatcaacttcctggtgcacaccgacacaacgctctggtcgcgcgccctccatcgcacgctcagacacttgcccctgttcgtcacctcgggacttcgccgtcacccgtacttcgctggttgtcaacttcgctggctgtgttcgacctccagccacgtcaccatcgtgcccttcatccgttcgaagaacacctagaaaaagtgatgtttgaaggagttcacttcagtgcctgttgatccagtggtggagtttcatctaactacttaccagagtagaataattttgggatcttctgctgcaataagg

SEQ ID NO: 124433 - DNA, 1088 bp, Zea Mays
ggacatctcctaaataatcctcagccggtacttctgctagtccgtgccatgcttatactggtgatcaagatgcctatgtctccaccaccgtcgctcagctgcttgcctctgtgttggctcgccggacctactgtttgcgctgtgcttaaggtcctactcaccggtcttctcgtcgacagcgccagtcgtgtctcccaccacgccgacactttttctccatcgctcgactccgtgctcagcgctctcaccatcaccgcgtctctcctcgccggtgttcgccggacatacgctcaacctcgccaccgtgggacttacctctcctccaaaccgtgttcgccgcagcctagccatcgtctacctctatgctcagcacgaaaccgctcgccctacagcctcgtcgcgtcaccgtcctgcaggcactgagctccacccacctcggcgaaggccaccgtccccttcttcactgtgcactcggcatcaacttcctggtgcacaccgacacaacgctctggtcgcgcgccctccatcgcacgctcagacacttgcccctgttcgtcacctcgggacttcgccgtcacccgtacttcgctggttgtcaacttcgctggctgtgttcgacctccagccacgtcaccatcgtgcccttcatccgttcgaaggtgaggcctcccagcttcgatcttcaggagtgcagcagcttttattggtggccgatgtcattcagtggttgtgatctctagaggacgaaatggttgtgtatattctagatcgagtataattattgttgtggacttcgtatttggagtcacgccggtgtattgcgtctctggtcggaacttggaagtcgactagcggcttgcaccatcgacgtcaatcctgtggctatacgtgtgaattgcagcgctgcaactagttgaaaatgaagggaactagataatatagaatagtggagtgcagaacgtcgctcgccgggttctctgtatattgcccggatttgattcgtcaccattttggcgaacctccactcgactcggtattacgtaagcttagattcactcgctgtaagatttggttcattttggggcata

SEQ ID NO: 124434 - DNA, 1794 bp, Zea Mays
ccctcacgccgatctgctcagctcaatgtcccatctctctccttcatcttctgatctgacgccgcgaccttcgatcttctccagctccgacgccgacgacctggatcctgcactgcgtacctcacgatgagaaccggcggctggagatcagccgtttttataatagcggcggagatcggcgagcgcttcgctttctacgcagtggcctcaactctgatcacctatctaacgggacccctgcaagagggaatcgcggccgcggctgccgccacaaacgtgtggaacggcacggcgctgatgctgcccctgctgggcggcgccattgctgacctgtggctgggaagatacctcaccattgtcttagcgtcactcctatacatcctgggtttaggcctgctggccgtgtcaaccgtggttggggggcagcactgcgacgctgccgcccacaccgccggtgagaagtgcccgccgccgcccgccgcccaggtggtcctgttctacgtgtcgctctacgtggtggccgtgggcgagggcgggcacaagccgtgcgcgcacgcgttcggcgccgaccagttcagcggcagcgacccgggcgagtccgtctccaggggcgccttcttcaactggtggtacttcggcgtgtgcgccggcaccgtcgccacgctcctggtcgtcagctacgtgcaggagaacctcggctggggcctcggcttcgccgtcccgtgcgccgtcatggcgtgcgccctcgccgtgttcctgctcggtacgaggacgtaccggcacaccggcgacacggtcgggacgcggaacggcctgttcgctcacgccgccgaggctttcgctggctgctggcgtcggcagcgacgtagcagcagcagcagcagagtcgatgaggaagcgcaggtggcgacgacgaacacagccgtcctcctggtcagcgaaaccaaggacgtcctccgtctgttgccgatatgggcgacaacgctggtgtacgccgtggtgtactcgcagtccatgacgttcttcacaaagcaggcggcgacgctggaccggcgcgtgggcgagctggccaaggtgccggcggcggcgctgctggccttcatcagcgtgaccatcatggcgctgatcccggtctacgaccgcgtggtggtcccgctggcgcggcggtacaccggcaggccgtcggggatcacgatgctgcagcgcatcggcgcggggatgctcctgtccgtcgcgtccacggtgaccgcggcgctcgtcgaggcgcgccggctccgggtcgcgcgggccgccgccggcctgctggccgacacgcccggcaaggcggcggcgcagcagcagctgccgatgagcctgtggtggatggtgccgcagtacgtggtgttcggcgccgccgacgtgttcgccatggtcggcctgcaggagttcttctatgaccaggtgcccgacaggctgcgcagcgtcgggctggcgctgtacatcagtgtcttcggcgtcgggagcttcgtcagcagcgcgctcgtgtcgggcatccaccgggcgacggcggccaggggccagagctggttctcggataacatgaacggcggccacctcgactacttctactggctgctcgccgcgctcagcgccctccagttcttcgcctatgtcttcgttgcgtggaggtacaaatataaggacgctggagccgagcacacgtgacgtgacatcgtagtaggatctatcagatgtatgccgttgcacagcgacatcaaacagagggatagctaggagaggtatatataggctaca

SEQ ID NO: 124435 - DNA, 1836 bp, Zea Mays
ctcgacatctgcttgtcttcgactcctgtcgaatagcgaaccctaaccctagcgggcagcgacttgcggcgtggaggccggctgcggggtgccggggtagcacgtctcgcggaggtgcgtagacgacggcggagcggcatcctcacctccatggcgccgctgtcgaggaagcaccaagtcctaatccaggcgctgctcgcccgcggcccgctcttcgagcgcgacttccacgctatcttcgatggcgcctttggcaagaacaccgccaatgatcaacaactgttcaatgatacgctttggaacatcaacaaagaactcgcatttgtgagctttgagttgcaagcattcatcaatcaatatgatggaatggtgtactacggagtggtaataatgttgctgacaaagaatcacagctcggaacaaagtattatgtgtcccagattgcattctacaagggactattagaagcaattattcgggaagctggaaacgatgggagcataaccagtattgatgctctcaatgtccaacttgaaaaccaggtcacgactgtagatggttcacaggacaaccaatctcatcttcctataaagaacctctcgttgagcgagaaagagaaagctctagatgaactgatacgggattgttggttgtcatatacctccacaggcaagattggtctgggctccagatcatttcttgatctccgaagctggttctattataatgacatcccatcatgtgtggtatgtggggaagcttgtataaaggtatttatagccctcaaccaccaaaacaaccgttggggctggctgctgtcgatgggcgcaccggacactgtccggtgcgccagccacgtcacccaaccgttagggttctgaagcaatcgaccattggagcgctgacttctggtggcaccggacaatccagtgccgcaccggataggcactgttcattgttcgctgcgcctcttgaaagggaaatgtgccattgggcaatttctataatgttttggtgattaagtgcccaacacatttaattgagttctaatgtgcaaaataaagcgagaagtgtacttcaaagaaaaaggtatgtttctagacttagtacattgttttgagtactaacatattttgtctaagtactaaaaacatggagaaaagaattggaaaaagacttggctctgtgtagccaactccagctcggcttggcacaccagactgtccggtggtgcaccggacagtgtccggtgcgccaggctggtccgcgtggaaaggccgctctcgggactcaacggcggcgtacggctataattcactggaccgtctggtggtgcaccagactgtccggtgagtcatccgcggtgaactcgtcgccctcgggaaaatcaaaggggcaacgtggctataattcaccggactgtcgccagcgccaacggtcggccgcgcaatcttcgcgcgacgcgtgacagctccaacggtcggcagggggcaccggactgtctggtgtgcaccggacagtgtccggtgcgccaacgggcccgaagctgcaatggtcatctgtgcctgatttggaaggcaatcgcgcaccagaccatctacaggacctatccgatggcacaccggactgtctggtgcgccactcgacagaaggcaaggatagccttccatgttgatctacaacggctcctagctgccttggggctataaaagggaccccctaggcgcatggaggatatacccaagcattcactaagtattctaaggcatccagactctgctcccgcgcattcgctttgttgtgttagagatttgagctccattcgagtcacgaact

SEQ ID NO: 124436 - DNA, 657 bp, Zea Mays
gggtgccggggtagcacgtctcgcggaggtgcgtagacgacggcggagcggcatcctcacctccatggcgccgctgtcgaggaagcaccaagtcctaatccaggcgctgctcgcccgcggcccgctcttcgagcgcgacttccacgctatcttcgatggcgcctttggcaagaacaccgccaatgatcaacaactgttcaatgatacgctttggaacatcaacaaagaactcgcatttgtgagctttgagttgcaagcattcatcaatcaatatgatggaatggtgtactacggagtggtaataatgttgctgacaaagaatcacagctcggaacaaagtattatgtgtcccagattgcattctacaagggactattagaagcaattattcgggaagctggaaacgatgggagcataaccagtattgatgctctcaatgtccaacttgaaaaccaggtcacgactgtagatggttcacaggacaaccaatctcatcttcctataaagaacctctcgttgagcgagaaagagaaagctctagatgaactgatacgggattgttggttgtcatatacctccacaggcaagattggtctgggctccagatcatttcttgatctccgaagctggttctattataatgacatcccatcatgt

SEQ ID NO: 124437 - DNA, 642 bp, Zea Mays
atggctgccttcattgactttttcacgttatccagctcttccatcactaactccagagctgatctcatgaacattgctatgactacccttagttcaaaaattctttcccaggataaagagtactttgctgaacttgcagttgacgctgtattaaggcttaagggcagcaccaacctggaagccattcaaattctgaagaaacctggaggatctcttaaggactcctttttggatgaagggttcattcttgacaagaaaattggcattgggcaacctaagagaattgagaatgccaaaattttggttgcaaacagtgctatggacacagatttaagactatggggcatgcagttaatctataacttccctgaagaactctttgttgatgttggcatcctcgcaattgagcatgctgattttgagggcattgaacggctagctcttgtcactggtggtgagatcgcatcaacttttgataatccggagtctgttaagcttgggcactacaaggttattgaacagattatgattagggaggacaggctaattcatttggcagttacctcaggcggcacggctgacgatattgcatcgcggggctgtgaggagctcagcgaaggaggccgtcgagatccgcggtga

SEQ ID NO: 124438 - DNA, 894 bp, Zea Mays
atggatacagacgtcaatccaaattctgcttcaatttgtaaaggctcttcaaattctacttcgttttgtgaaggtggcagtcgtgaaggtggccatgaacaaaaaaatccaaacacttttgtgagagaaagcagttttcctaaaatgcagaaaagaggactatctgcttgtggaaattggagatgctcagttgactacagcttatttttgacatcaatgcaccgtgctggtgatatgagtaacacattgatgagtgttatcgtcgaatacttcaacagtatttctggggccctctttgacactgtttctagaccctctaccatttctaaatatgtcatctgtcctttcttgttgaagaaagttaaaaagggttgcaactttaaagttaaagatagtttactgaagactcttgaggaaacccagaaaagagatatgattatgctcctgattctggatggcagtcattggcaacttcttgctaatttcatcgaattactgaagatacataaatgcataaaatttgatgttaattctttcgaaaagatcaaagctagcgaaattgttgcatgcagaatgaaactcacacatatgctgatcaaatctaaacaaaatagtgctgatccatgttatgtggttaaaaaactagatgcgaatataaagaaatatggcattaattcccgaaaggtgatcacaagtaagaatttgacgatgctgatgggactaatagatcaagagattgaagagattaatgcagaaaagagaaagcgaagtggacatccagcaggaggacaaccagaactgaaggacgatgacggtcaactaagggcaaactcagtcaaggctcgcgacgctgaattgcgttgtgaaagggctgtaaagctacgacgactatag

SEQ ID NO: 124439 - DNA, 1230 bp, Zea Mays
ggatctctatgtgtcgtgtccaaaaggtgacgggcccgcgagctagggtttccggtcaccgcggatctcggcggcctcctccgccgagctcctcgcagccccgcgacgcaatatcgtcagccgtgccgcctgagtgcccaagcttaacagactccggattatcaaaagttgatgcgatctcaccaccagtgacaagagctagccgttcaatgccctcaaaatcagcatgctcaatcgcgaggatgccagcatcagcaaagagttcttcagggaagttatagattaactgcctgttgacaaaatagttgatcccatgcgctataatcttctgcaccttctctctcattttctgcttttcagcagcttcaatatctgcaaccttaaacattgaatccacccagacacatgccccatagtcttaaatctgtgtccatagcactgtttgcaaccaaaattttggcattctcaattctcttaggttgcccaatgccaattttcttgtcaagaatgaacccttcatccaaaaaggagtccttaagagatcctccaggtttcttcagaatttgaatggcttccaggctatttgaggagatgccgccatcgtcatcgtcatccttactctctggctccaatactgcgagtgctgagcttcctctaatcccttgcaagctctgcaatggggtggtgattgagcgggtttccaaacaaccagaaagcacgtcgaggaagttctaccggatgggtctcaatgtgatttttttccactggcaagcgagctatgctgttttgttaatcaaggatggggttgtcagtggtgaccaatgccttgagttgttaatggtcgcacttaatgatcatggcaaagctgttgaatctctaaccaattccatcagagaaatgaagaaaaagttgtccgacctggagttagtgatggaagagctggataacgtgaaaaagtcgatgaaggcagccatggttgagaaattgaggaaaacaagaaatcgatagctgcattgaaattgatggagaatgagatgcaaatgctgaaagggccaactaaagtgaaacctaggaatatggcactgtgttttctgcttttggcgttgattgggtggtttgtgatgggacagatgaattggggggaggaagcatccaatcgatttatgctgggaggctaatgaactttgggtggacttttgtatagctagatgtaatcagaactggttaggc

SEQ ID NO: 124440 - DNA, 1249 bp, Zea Mays
ggatctctatgtgtcgtgtccaaaaggtgacgggcccgcgagctagggtttccggtcaccgcggatctcggcggcctcctccgccgagctcctcgcagccccgcgacgcaatatcgtcagccgtgccgcctgagtgcccaagcttaacagactccggattatcaaaagttgatgcgatctcaccaccagtgacaagagctagccgttcaatgccctcaaaatcagcatgctcaatcgcgaggatgccagcatcagcaaagagttcttcagggaagttatagattaactgcctgttgacaaaatagttgatcccatgcgctataatcttctgcaccttctctctcattttctgcttttcagcagcttcaatatctgcaaccttaaacattgaatccacccagacacatgccccatagtcttaaatctgtgtccatagcactgtttgcaaccaaaattttggcattctcaattctcttaggttgcccaatgccaattttcttgtcaagaatgaacccttcatccaaaaaggagtccttaagagatcctccaggtttcttcagaatttgaatggcttccaggctatttgaggagatgccgccatcgtcatcgtcatccttactctctggctccaatactgcgagtgctgagcttcctctaatcccttgcaagctctgcaatggggtggtgattgagcgggtttccaaacaaccagaaagcacgtcgaggaagttctaccggtgcagagccaagaaattggatgggtctcaatgtgatttttttccactggcaagcgagctatgctgttttgttaatcaaggatggggttgtcagtggtgaccaatgccttgagttgttaatggtcgcacttaatgatcatggcaaagctgttgaatctctaaccaattccatcagagaaatgaagaaaaagttgtccgacctggagttagtgatggaagagctggataacgtgaaaaagtcgatgaaggcagccatggttgagaaattgaggaaaacaagaaatcgatagctgcattgaaattgatggagaatgagatgcaaatgctgaaagggccaactaaagtgaaacctaggaatatggcactgtgttttctgcttttggcgttgattgggtggtttgtgatgggacagatgaattggggggaggaagcatccaatcgatttatgctgggaggctaatgaactttgggtggacttttgtatagctagatgtaatcagaactggttaggc

SEQ ID NO: 124441 - DNA, 465 bp, Zea Mays
agggagacaaaggtttataaacaaggggtgaatggttttctagcttttgcatttagacattcagcaataggaaacaagatactatgcccttgcaagaagtgtgttaactcattttggagagaggccggtgaagtgcgcgaacacttgatatgtgatggttttctaaaagagtacacaacatggaccttacatggagaagcttcgtcctcttttgtgaatcatggtaacaatgatgatgagtttagcgagcatcctacagaagatgatgcaatatctgagttgttaaaggatttagcttgtggtttagatgatggaggggatatggaggatgatgggtcttttgacgaacctaatgaagacacagtagccattcgtaagctagcagaagacaatagtcaagaattatatccgggttgtcaaaactactcaaagctacgtttcctagttcgtttgcttcacatcaaa

SEQ ID NO: 124442 - DNA, 356 bp, Zea Mays
tttttttgaagaggcggtttttaactttccagttcaaagtaaaaaagatttcaacaaagaggttagacttaggtcctacgataataggagagaagattggccgaagtgcatgcatggtgaggattgcttcgtgtagatgttcgttgagggtggaattgatggaggtcggcgtttctttagatgtccttatgcatatgtaaaaattaatttctaatcctttgttctaaatacttttgttgttcagtgaaactaactataaacatttatgcaacattcattggtcaaggagaattgtgggttcactcgttgggtagatcctcgtccgatttttcctcatgcggaatacatatcctacc

SEQ ID NO: 124443 - DNA, 1069 bp, Zea Mays
ttactgttacttgcttagttgtgctgctgttactttgcttggttgcgctagatagattctaaatggttatgctgttctctctggcatggaatcccttgcaactataccttttttcttcaggtaaggtcagcatggtgagggtcagtgtgctcaacgatgcgctcaagtccatgtacaacgctgagaagatcggcaagaggcaggtcatgatcaggccgtcgtccaaggtcatcatcaagttcctgacggtcatgcagcgccacggctacattggagagttcgagtacgttgatgaccaccgatcgggcaagatcgtggtcgaactcaacgggaggctgaacaagtgcggcgtcatcagccctcgctttgatatcggcgtgaaagacattgagggatggactgcaaggctgctcccgtccaggcagttcggatacatcgtcctcacaacttcggcaggcatcatggaccacgaggaggcccgccggaagagcgtaggaggcaaggttctaggtttcttctattgaagaagctgagaatctttgttatggcctgcctgcctgtcttactctctcagactagagtacctgttattttactttaatatgtctctctcagactagagcgccttcttttacttgaatattggtgactgcattggtctttcactttaaaatcggtgactgcattgatcgaattatctgagccggttcttcagatactagttggcacaacccttagttgcccatggtaatttgagcagttcggattactaaaaagattagtcacggacatcttattttcccaaggtgctcaaacagtcaaactaactgcaccttggggtcctacatttcgtgcgtgcaaggcaaatgcgctgcaattcgcaagtaaacagcaaagcgaaatcttgaggccaacgtaggtataagcgtggtaatgggttggtaaagtgtttcataataataaggtgctgtttggttttttatatttgtaacatggggtgctgtttggcagatttgtaatgtgatggtaaccgataatgttgcattggatagcaaattagaaagtgata

SEQ ID NO: 124444 - DNA, 240 bp, Zea Mays
atggcaatcgtcgacaaaaccaaaacaaaatcaagcagaacaaggctcaatgtcttcacgaaggaaatccgaccttcgcgcccaatgtctcgggacgatcgaaagaaaggctccaaatccaaaaagatcgagactgataaaccatatgatggtgacagtaaggaaagcaagatggaaacatctgaaaaccttgaagatcgcggtttccctttggatgcgaaatcagatgcctctgcttag

SEQ ID NO: 124445 - DNA, 2233 bp, Zea Mays
atctgcctccggcacggcaccacacacacagtctcaagtctcaactatagtctccagtcccccgcctccacgcctccggctccggccagccgcagtaattgcagcgcagcccaagccaccaccaccaggcaccagccaaaggtgcggcctttgaccccgcgccggcgccatggccgcggacgccaccgcttccccctcctcctcctacctcccgccaccgctcccgacctcgcgcctggacatccaggccgccgtcgccgaggccgccgagctgcgcgcgctccacgccgcgctcctccagggcggcggcgcctccaattccgggacctacgccagcgctagccggagccccgccgtcatccgcctgccgccggcgctcgccaggccggcccccctgcccacggccgccgaggactaccccgtgtttgccccgatgtatgatgaggagcccttgggcggaacgaactgcattcgtcaagataacaggagcctgtccgagaactggagcggcgtcggtttggaccatgatggcctagaggacgacgaggtggccttctcggatttcgacaaccacaacaccttctcttcgtcgaacagcgagctccatctctcttcgtcgaacgagcacctgcggaacagaagggcgtgcagaaaccatccgtccttccttcaacccaccgcccttgctgctgacggtttgatcaggtcaaccagcaggatgactgacttgactgaattcaaggtcgttacgacgtgcaatacctgcaagcctgcgacgatcaatcgtggggacgacgccaagtccttgaagaaccttgattgcaccgtgccgctgtcaaactaccaccccactgtcgccgcctttccccggacaaggcacaaaggaccacaacatatcctctcctggttgctaccaaagtcaaagaggaagccgaggccagatgtgtcgccgaccaccgtggaatgtgagaacatgtcgcagcttctcaaggactggggcgtgttctcgctggactccctgaagaaagaggttgtcgaggccaacgagcacagggacgccgccctgcaagaagtatcagagatgaaactatcactcggagaactgaccaccaagatagcgagcctggaagcgtactgttcggagctgaagaaggctctaaagcaagcgacaagcgcgaagagcatgcagtctcatcactcgaagagatcgtcgaccaggtcggttagcgggagtcccttgcccgtcagtcacgaggttatggtggaagggtttgtgcaggtcgtgtccgaggcccgcctctccgtaaaacagttctgcaaggcgttgatacagcaggtcgaagaagacgccgacaacgggctatcagagaagttaaatctactcctgcagccgtaccagatcacgctcggcgacaggcgcccgaagctggtgctgtaccacctggaggctctgatgaaccaggcgatgtaccaggacttcgagaactgcgcgttccagaagaacgggccgcgcaggtgcctcgaccctaggcaggagcggcaggagagcttcgcgtcgttcgtggcgctgcgcaacctgagctggagcgaggtcctgaggaagggcaccaggcaccactgcaaggagctcagccgcttctgcgaccagaagatgggctgcgtggcgtcggccctgatgaactggtcgcggccgtgttgggccgagccgctgctgcagtgcttcttcgtggcgtgcaagtgcgtctggctgctccacctgctggccttctccttcagcccgccgctggcgatcctgcgcgtcgaggagggcagggcgttcgagcagacgtacatggaggacgtgctgctcgacatgcagcggtcgcaggaccatgagccgccgccatcggcgcgggtgaaactcatggtggtgcctgggttctacgtccaggacaggctgctcaagtgcagggtgctctgcagttacatcagcggctagatctttgttgctggtcgaaggatgttctagtgttcttttgactgattgttagtgtgatgcagtagcatttgttgttcagctaggttgcaactgggatgccagaatgccattttgaccgttgacgtgcctgtcagatgtatgcatggttttaactacacattcctccaactatcgtgcagcttagaagcaagtgattaatcgattcatcatgttggtcacacacgaatactaacgaaaccaaacaaaaaaaaaaaa

SEQ ID NO: 124446 - DNA, 920 bp, Zea Mays
atctgcctccggcacggcaccacacacacagtctcaagtctcaactatagtctccagtcccccgcctccacgcctccggctccggccagccgcagtaattgcagcgcagcccaagccaccaccaccaggcaccagccaaaggtgcggcctttgaccccgcgccggcgccatggccgcggacgccaccgcttccccctcctcctcctacctcccgccaccgctcccgacctcgcgcctggacatccaggccgccgtcgccgaggccgccgagctgcgcgcgctccacgccgcgctcctccagggcggcggcgcctccaattccgggacctacgccagcgctagccggagccccgccgtcatccgcctgccgccggcgctcgccaggccggcccccctgcccacggccgccgaggactaccccgtgtttgccccggtaagcttgccggcaggcctctgaaacttctcgcgcccacgttcgttcgtttgttttgttggtaccacgagcaagggttcgcgtctgtcaaaaggtgcctcttttgttgctcgattcgcatgtcccgccttccacgctaatgtttttagcaaatttcgtggctgtttgatgctaagttagtgctggcgtcgactgttcttctcgccgcgaccgacaatgttcttttcagagagggtagcttgggtttccgggttcaatagatggaatttggttggagtcaagctagaagaagccgagaacagtatacttgattgcgttctatttcactgaagcaaagatgtaggtcgattaacctggtggatctgccgtctaggtgttttcagtaactcccaactagatagagaaaaaccaaggatttgtcgacatgaatctcgtcatttttttgtacttacagttgccgagggatgatttttctactcgcacgctt

SEQ ID NO: 124447 - DNA, 116 bp, Zea Mays
ggtttaaaccatatttattagctctaaacatttatttacacccacataaccaacaaaaacatatgtttcttgtgttttatactctatatttaagtataatatatgtatttatatga

SEQ ID NO: 124448 - DNA, 494 bp, Zea Mays
ctccttggcaggttttgggaaggaagtatgttagactctatcctgcttctacatctgtgggcctataccctaacacagaaagcatgctaagcaatactagtgaggtagacctcgacaacactgacggaaaagagtacccggagactgcagctcttgagttcgtggactgcgtattggaggaaggtgacctgctttacattcccccgaaatggtggcgttacgtgagatctctctctattagcttttctgttagctttcggtggcgaacatcacagcttccttgaggggaggttcataacgatggttttgacaaatttgatcgtacgtccacgatgtcgttccaatcatcctattggtagagacttaataagaagacttcattgagctgagcccatatttcgtggtctaagtgttgtgtgcggtcgcctcactagactgggattgtaaattgttttcacgacaatgattggtttcaaacatactaagcggtacta

SEQ ID NO: 124449 - DNA, 630 bp, Zea Mays
atggtacttcaacttctaccagtgaattccctatcttgtaagcaaattgagaggcgatcatgcatttctttggaggcatttatacgtgattactttttatgtgagtcccctgttatactcagtggatgcattgatcattggcctgcaaggaaaaagtggaaggacataaagtacctagagagtgtagctggagatcggactattcctgttcaggttggaaaaaattatgcatgtactgagttgaaacaggagcttatcacattttctcaatttcttgagaggatgtggtcaagtgattctgcaaacttggcatatattgcgcagcatcaattgtttgaccagataaaggagctccacgaagatattgctgttcctgagtactgttcagctggtggtggcaaactccagtcacttaatgcttggttcggccctcatgggacaataactcctttgcatcatgacccacatcacaacctttttgctcaggcaaccgtagccacagccgccatcgtccctggcgtcgccgcggtcatcgctgatgcagcgacccgcaccactttcgcgctcgcacaaagcgctgcgaccgcagccgcggcagccagcgcgcgttgccggcgttctcccctctag

SEQ ID NO: 124450 - DNA, 2122 bp, Zea Mays
cgggggacggggctataccaaccagccaaaaccaagcagggaatcacaccattcaccaagcagcagatggaagcgaaaggtggcgccgcggcgtggctagctaggccggctcgtgcgcacgcggagacagacacgggactggttgcgtgaccgagctctggtctggtggctggtgctgagagagagggagacagacgacctgcagctcgcatcacagtcccacagtgcaggagggagtggaagagagtagagagagagtgggagcgagagcacagggaggggagttgttttgaaggcaacagcgagccctgctgtccctctgcttcgccacctcctccctccctctctttccttcctcttggaggagagagaagagggggagagccagtcagccagccagcccaagaacagcgtacgtacgttgtcaagtcccgtcgccgccgcagcagcttcgctcctcccgccccgcccaccgtcgcgcgcggcggcggggagcgagcaatggaggccggcggcgccagcggcggcgacgacggggacggccagctgcacggcctcaagttcggcaagaagatctacttcgaggacgccggcggctccagtagcagcggcggcagtggcagtgccagcgcgaccgcgcctccagcgacgcagcagccgtcgccgccggccgcttcgcctagggccgcgcccggtggcggcaggaggggcagggccgcggctggcggcgcgggcccctccttgccgcccgcgcccccgcgctgcctggtcgacggctgcaacgccgacctcaccgacgccaagacctactactgccgccacaaggtgtgcgaaatgcactccaaggagccccgcgtcgtcgtcaacggtctcgagctacgcttctgccagcagtgcagcaggttccacaacctggccgaatttgaccagcaaaagaaaagctgtcgcaagcgtctagcaggccacaacgaacgccggagacggccacctcctggaccccttgcgtcacgatatggccgtctcgctgcaccgctcggtgagcccggcggcaggttcagaagcttcatgctggatttctcatacccaagggttccaagcgccatgagggatgggtttccagcggttcgacctggtggtgaaagggtgcctggcagcaatatccagtggcaagcagcgagcctagatcctcctccccctcaccatcagagcgcggcagcaggatacggtgcccactcgtacgggagcccgggtagctcgtcgtcgtcgaggccaccggtgttccctgctggcccggagctccccccaggcggtggatgtctcgcaggagtccccacggactctagctgtgctctctctcttctgtcaactcagccatgggacgctgctggccacagcgccggccacggccacggccacgccgcgtcactgcccgcaacagcaggcttcgacggcaaccccgtggccatggcgagtagctacatcgcgccgccaagcccctggaccgactcccgggcccacgaaggcgggcggcggaacgtgcctcaactgccacccgacgtccccctcggcgacgtgcactctggcccaggcacccatcacggccagttctcaggtgagctcgagcttgccctgcagggaaacaggccagccccggcgccgcgcaatggccagggctccgcgggcgcgttcgaccaggccggcagcacgacggagtggtcgctctaggaggccaaataaaagcgcggcacatcgtcgtagccgcacagcgagatggagcttgaagcctggctccgctagctacctgcatgcgctgtttgcttgcctagaggctagagcatccagtatgataataagcgaggaactagtgcagtgccggccaggagactgatttcttttgcgcttgtccatgaactcgtctgttgcgtctatgtacacctccatggtttgaactcgtcggggacttcgctcgatgtgttattaatctcatgctcatccttccgctaatgttgcctggcggcatcgccaggaatcggttccaaggcagcgttgttcatgtaaagcgagaccgcaggctttgcagcgtgctctcagcaccagtggtgtgggtgccgatagacaggct

SEQ ID NO: 124451 - DNA, 1834 bp, Zea Mays
tcacagtcccacagtgcaggagggagtggaagagagtagagagagagtgggagcgagagcacagggaggggagttgttttgaaggcaacagcgagccctgctgtccctctgcttcgccacctcctccctccctctctttccttcctcttggaggagagagaagagggggagagccagtcagccagccagcccaagaacagcgtacgtacgttgtcaagtcccgtcgccgccgcagcagcttcgctcctcccgccccgcccaccgtcgcgcgcggcggcggggagcgagcaatggaggccggcggcgccagcggcggcgacgacggggacggccagctgcacggcctcaagttcggcaagaagatctacttcgaggacgccggcggctccagtagcagcggcggcagtggcagtgccagcgcgaccgcgcctccagcgacgcagcagccgtcgccgccggccgcttcgcctagggccgcgcccggtggcggcaggaggggcagggccgcggctggcggcgcgggcccctccttgccgcccgcgcccccgcgctgcctggtcgacggctgcaacgccgacctcaccgacgccaagacctactactgccgccacaaggtgtgcgaaatgcactccaaggagccccgcgtcgtcgtcaacggtctcgagctacgcttctgccagcagtgcagcaggttccacaacctggccgaatttgaccagcaaaagaaaagctgtcgcaagcgtctagcaggccacaacgaacgccggagacggccacctcctggaccccttgcgtcacgatatggccgtctcgctgcaccgctcggtgaagagcccggcggcaggttcagaagcttcatgctggatttctcatacccaagggttccaagcgccatgagggatgggtttccagcggttcgacctggtggtgaaagggtgcctggcagcaatatccagtggcaagcagcgagcctagatcctcctccccctcaccatcagagcgcggcagcaggatacggtgcccactcgtacgggagcccgggtagctcgtcgtcgtcgaggccaccggtgttccctgctggcccggagctccccccaggcggtggatgtctcgcaggagtccccacggactctagctgtgctctctctcttctgtcaactcagccatgggacgctgctggccacagcgccggccacggccacggccacgccgcgtcactgcccgcaacagcaggcttcgacggcaaccccgtggccatggcgagtagctacatcgcgccgccaagcccctggaccgactcccgggcccacgaaggcgggcggcggaacgtgcctcaactgccacccgacgtccccctcggcgacgtgcactctggcccaggcacccatcacggccagttctcaggtgagctcgagcttgccctgcagggaaacaggccagccccggcgccgcgcaatggccagggctccgcgggcgcgttcgaccaggccggcagcacgacggagtggtcgctctaggaggccaaataaaagcgcggcacatcgtcgtagccgcacagcgagatggagcttgaagcctggctccgctagctacctgcatgcgctgtttgcttgcctagaggctagagcatccagtatgataataagcgaggaactagtgcagtgccggccaggagactgatttcttttgcgcttgtccatgaactcgtctgttgcgtctatgtacacctccatggtttgaactcgtcggggacttcgctcgatgtgttattaatctcatgctcatccttccgctaatgttgcctggcggcatcgccaggaatcggttccaaggc

SEQ ID NO: 124452 - DNA, 1075 bp, Zea Mays
tcacagtcccacagtgcaggagggagtggaagagagtagagagagagtgggagcgagagcacagggaggggagttgttttgaaggcaacagcgagccctgctgtccctctgcttcgccacctcctccctccctctctttccttcctcttggaggagagagaagagggggagagccagtcagccagccagcccaagaacagcgtacgtacgttgtcaagtcccgtcgccgccgcagcagcttcgctcctcccgccccgcccaccgtcgcgcgcggcggcggggagcgagcaatggaggccggcggcgccagcggcggcgacgacggggacggccagctgcacggcctcaagttcggcaagaagatctacttcgaggacgccggcggctccagtagcagcggcggcagtggcagtgccagcgcgaccgcgcctccagcgacgcagcagccgtcgccgccggccgcttcgcctagggccgcgcccggtggcggcaggaggggcagggccgcggctggcggcgcgggcccctccttgccgcccgcgcccccgcgctgcctggtcgacggctgcaacgccgacctcaccgacgccaagacctactactgccgccacaaggtgtgcgaaatgcactccaaggagccccgcgtcgtcgtcaacggtctcgagctacgcttctgccagcagtgcagcaggttccacaacctggccgaatttgaccagcaaaagaaaagctgtcgcaagcgtctagcaggccacaacgaacgccggagacggccacctcctggaccccttgcgtcacgatatggccgtctcgctgcaccgctcggtgagcccggcggcaggttcagaagcttcatgctggatttctcatacccaagggttccaagcgccatgagggatgggtttccagcggttcgacctggtggtgaaagggtgcctggcagcaatatccagtggcaagcagcgagcctagatcctcctccccctcaccatcagagcgcggcagcaggatacggtgcccactcgtacgggagcccgggtagctcgtcgtcgtcgaggccaccggtgttccctgc

SEQ ID NO: 124453 - DNA, 1419 bp, Zea Mays
aaagcacacacaggctcagcacagcacagcctctgccactcaccccaatccaccggatccccacccccacctcgctaccccgcccgatgaaggcgtcgatcaagttccgcgacgacgagcggccgctggtgcgcgccaaggtgccgatcgtcgtgctggggctgccgttccagtcggggctcgcggcgggaagggacctgcgggagctccgcttcgacgtgtccacggcgttcgcatcgggcccggcgctccggctctcgtaccgccccaacgacccggcgctccccttcgcgctcgccgtgcgcgcggggctcggcccgctggggtccccggcacgcgcgcctttcgcgctcgccgccgagttcaacctcgtcgcccacgacccctcctcgtcgcccgccttcttcctccgcctcaagccgcggctcggcgacttctcgctctctcacacgctgcgctcccccgcggcggcgccagcgccacggaaggccggggagccgggctccgacggccggcgggaggtgaagcctctggactacatgccgccgttcacgttcaccgggagcgggctcgctgccgacgtggcggcggcggggaccggcagcggggtcggcgcgctgctgtccggcatgcggctgacgaccaggagcgtgctcccgctgtggggccgggcgagcctgcggttcaactggggcctgcgcgtgccgccggagctgctcgccgccgacggcaagggcgcgcgcgcgcccgtcagcaagatgccgctgctggtcatgagcaaggtctgcatcgagcagtccccgcgctccgtcacgggcaccaaggccggcggccgagcacctggacccgccctggcctccacggacgcggcgtcggacggcgacgcggcgttctcgctggtgaggcggcagctggagtcgctgagcgtggacaacatgctgctccggcgcgccgtggaggacctccgcgcggaggtccgcagcagcaacagcagggccgcgccgcccgctgcttctgctgcgggggcccgtggcttgggcagggtggcggcgaccgcgccacaaatgcaggcgcagacgcagacgcagccttaccacgtgacgaagccggaccaccgcgcccggggcgccgcgagggaggctgcggccacgccggacgacgtcagcgaggagctgaagaaggcgttggaggcccgcctgcgctgagcagtcagccttggctgccaggctgcgtcgcgtgcgagcccggcagctcaccggcaccgctcgagtgaaggtgaagtgctagtgtcgctgttaggcgttgtaatctgttggtgtcagcagcaatttggagctgctgatttctccctgttgcttgcttaggtcgtaagtgttgtgaatgatcgctgggaagaaggggatcggacttgtcttgcca

SEQ ID NO: 124454 - DNA, 3086 bp, Zea Mays
tcgatgcttctcttgccctcgcccgtgaggctgcgacccatccctcatacagggtcggccccttcctccttctgccgaccgcaccaaccctccgcctccacctccctgccctgctcgcaccaaccctcctcccctagctcccgcctgcgccaaccctgcgccctcgagctccctgcctcgccaagctcgtggaggcgagcagatgcttgaacgtttaatcaaccctgctccaactccccgggcatggcggtggcggcgcgccggtgcatggccgactcgaggcgagattggatgaattgaggagcgggagaagtacaccgtacacgatggagtgggacgcacggacgctgaggtgagatggccaaaacagaaggcgtcggcacagtcgcagtcagagcacaacacaacatataatggcagtggcggcacgtcggagatttgagacactcatcgtccatggaatggggcacatggtagcggatgagggagggccatagtagaaggtgtccgcgctgaagatctttagctcccatctcgccgctgcagcgaggcgtcatgctttgagcctgtggattagcagggtgtgatcctgtcaacgaactacaacaaagctgacagacgacccttgaggaaatgatgggtcctgtgtcgtcgaccttttcgtcgtgccaaaataagcagacagacgattctggcggccagggatgtatgtaatggttatttgtgcatacattgcagcagagtccagggacacttatctagctatcaaggtgccatatccctcacatctcatgtctgcctctgtcttcttgtatgcctcctttcaattgtttaccgagtatttgtagtcctctgtttgttgccatttactaagaattggaaattctctttctgttatctttgttctttaatattattgtcatttacttatctatttttgtgtgcatacgacaaacctcctacaagctgtcttgttttatgtgtgttggtgcgtctcgtaggagaaaacacatatctttccatttcctggcaactaattcgaggccacctccaactccttttttaatgaatattacgttgtttgtttacaaacaaactgcatgtatgacctgtcaaaccactctaagtttgcattacaatatatgctacaacatttatctactgtataactaagggggtgtttagtttctagggactaatgtttagtccctagattttatttcattttagttccaaaattgccaaatatagaaactaaaactttattttagtttctatatttagcaatttatacactaaaaaggaatgaaatgaagggactaaacattagtccctataaaccaaacaccccttaagttttctatttaattaccatcatccaccacgacatcacgctatacacacagatcactctgctccacgcgcgcatgggcgcgcacaatacactagtgatgatatgaacgagaaaaaagaatgcgagggagtagaatccctgggccgcagcctactagacagcccaatttgttggggcgcgttatggcgtgtgagctttttggcttcgtcggttcaggtactcttcctctacacgaaaggtcgccgatacgcgccccttgcattgcagacgctggtatgcaaatgcaatgcgagactcgagctcgctcttgttcgccgcgcgcattgacggccaatcggcgttgctgcactcggctctctttttttccctttatactttttctgcccgttaagcacgtacgtagatacacatagtttggtgtacagcactaggcacgcacgattgctcttgctcgcaacacagctgccgctccagctcgctcttcttcagtcacccaatatccccaggcctactaccaaccagcccccgcgtccaagatctctccctcccacggcccgctcggactccccggcgcaatggcgaccgacgcgatcctggagacgatcaagccgcggcggagcgaggagcagctcccggtgaccacggcggccgccgccggcaccaggctgcggcggcgcgtgtcctcgttctcggcgcacgtgaggccgccgccggggctgtcgtcctcggcggcagcggcgttccggcgcgcgaggtcgatgccgaccgccaaggcgctggcggcggcgggcgcgctgcggcggtggtgggagtgggtgacggcgccgttcgcgccccgcggcgacgacgacgacgaggcaaggccgctgggcggttgccgctgcgcctgcgccggcggaccgggcgggtggcgccacgtcctggtcaggctccgcgccggcgcgcgccgactgctgggccgcgacggccgcccgctcaaggccgccgcgccgccggacttcggctacgactccgtcagctacgcgcgcaacttcgacgacggcgaggcgtgatgcgggtggtggcgggacggccgtggcggtggcggccgggcgtggatcacaggatcagcagtggtccagctgtcgcaataaagcaattgaattttgtttttcggtggtgtatatggcaatatggcatggcttttacatatgtactagaatatggtggtcgtgtgtatggtggtatcgctcgatctcggaaggaaagacgatcgatcgagcgttgccgcgagctggaggcctggaccatgaatggtccggtccgtgaacgaacatgtaactagtgttcttccgtcgtcgttgttttcttgcatgctccttgaatgaacacgccatggtccatggatccgcttcgagaatcagagcagagcagagcagagaaggttcaaagcaacggaagcgcagcctttcagctagataagagcagagcggagaaggttcttcctcctcacccgccctctcgtcagattcaagagcaggttcagattcagatctgcttcggcttcggtgtccctttcgctgcagcggcgggagcgcgacatggcagctacagggctactacaactaccactgctggctgcccccccgtctcggtccggccagatcggtgccgagacagcaaccagacccctgcacgcccgactgcaaatgcaagatggcacgcgacctcgccgacgtggccacgcatgtgg

SEQ ID NO: 124455 - DNA, 1489 bp, Zea Mays
aatgtttagtccctagattttatttcattttagttccaaaattgccaaatatagaaactaaaactttattttagtttctatatttagcaatttatacactaaaaaggaatgaaatgaagggactaaacattagtccctataaaccaaacaccccttaagttttctatttaattaccatcatccaccacgacatcacgctatacacacagatcactctgctccacgcgcgcatgggcgcgcacaatacactagtgatgatatgaacgagaaaaaagaatgcgagggagtagaatccctgggccgcagcctactagacagcccaatttgttggggcgcgttatggcgtgtgagctttttggcttcgtcggttcaggtactcttcctctacacgaaaggtcgccgatacgcgccccttgcattgcagacgctggtatgcaaatgcaatgcgagactcgagctcgctcttgttcgccgcgcgcattgacggccaatcggcgttgctgcactcggctctctttttttccctttatactttttctgcccgttaagcacgtacgtagatacacatagtttggtgtacagcactaggcacgcacgattgctcttgctcgcaacacagctgccgctccagctcgctcttcttcagtcacccaatatccccaggcctactaccaaccagcccccgcgtccaagatctctccctcccacggcccgctcggactccccggcgcaatggcgaccgacgcgatcctggagacgatcaagccgcggcggagcgaggagcagctcccggtgaccacggcggccgccgccggcaccaggctgcggcggcgcgtgtcctcgttctcggcgcacgtgaggccgccgccggggctgtcgtcctcggcggcagcggcgttccggcgcgcgaggtcgatgccgaccgccaaggcgctggcggcggcgggcgcgctgcggcggtggtgggagtgggtgacggcgccgttcgcgccccgcggcgacgacgacgacgaggcaaggccgctgggcggttgccgctgcgcctgcgccggcggaccgggcgggtggcgccacgtcctggtcaggctccgcgccggcgcgcgccgactgctgggccgcgacggccgcccgctcaaggccgccgcgccgccggacttcggctacgactccgtcagctacgcgcgcaacttcgacgacggcgaggcgtgatgcgggtggtggcgggacggccgtggcggtggcggccgggcgtggatcacaggatcagcagtggtccagctgtcgcaataaagcaattgaattttgtttttcggtggtgtatatggcaatatggcatggcttttacatatgtactagaatatggtggtcgtgtgtatggtggtatcgctcgatctcggaaggaaagacgatcgatcgagcgttgccgcgagctggaggcctggaccatgaatggtccggtccgtgaacgaacatgtaactagtgttcttc

SEQ ID NO: 124456 - DNA, 926 bp, Zea Mays
ggtcggccccttcctccttctgccgaccgcaccaaccctccgcctccacctccctgccctgctcgcaccaaccctcctcccctagctcccgcctgcgccaaccctgcgccctcgagctccctgcctcgccaagctcgtggaggcgagcagatgcttgaacgtttaatcaaccctgctccaactccccgggcatggcggtggcggcgcgccggtgcatggccgactcgaggcgagattggatgaattgaggagcgggagaagtacaccgtacacgatggagtgggacgcacggacgctgaggtgagatggccaaaacagaaggcgtcggcacagtcgcagtcagagcacaacacaacatataatggcagtggcggcacgtcggagatttgagacactcatcgtccatggaatggggcacatggtagcggatgagggagggccatagtagaaggtgtccgcgctgaagatctttagctcccatctcgccgctgcagcgaggcgtcatgctttgagcctgtggattagcagggtgtgatcctgtcaacgaactacaacaaagctgacagacgacccttgaggaaatgatgggtcctgtgtcgtcgaccttttcgtcgtgccaaaataagcagacagacgattctggcggccagggatgtatgtaatggttatttgtgcatacattgcagcagagtccagggacacttatctagctatcaaggtgccatatccctcacatctcatgtctgcctctgtcttcttgtatgcctcctttcaattgtttaccgagtatttgtagtcctctgtttgttgccatttactaagaattggaaattctctttctgttatctttgttctttaatattattgtcatttacttatctatttttgtgtgcatacgacaaacctcctacaagctgtcttgtttt

SEQ ID NO: 124457 - DNA, 2207 bp, Zea Mays
tactgcaataatcacccgaggcaattttggcgtgctttacttccgcttccaatatacctttttttccgcgacaaaaatcatttttgttaattgcgaaaaggaaagagcccgtgtgaacaggaggggtgaggagaagagggggaaaagagagagaaatcggagggcattagcaagaaaccatgagttctaggttagctgaaatctcctttgatctttaatctgttcatctccttgcgtgagtctgtggcgttagcgtgatgccttctccaagttcatgaacttcccggtctggagctttgcttactcagttacccttttttgacccgtatttttttctctccattccgcaactgttggctcccaaattctggtgatttgttgggtatccccctgcgaaatccgggcaaaagtggggatctgcagcttctgtggcttgtcggctttaagcctacctttttcttggaccttttaccattttcttttgcccatttttaatcccccatttccgtcagtaatttacttttattttcatgtctacttatttccgccgtaaaactgtgtttgtcgcgtgaaagatcgcgtacttgagcagtgaagggttttatggttttttttgcaggttcgcaatccctagtcgtcttgtcctgatcttacttgagtgctcgtgagctctttccagtggctaatgactgcagatttgagttctggcccaagaaccgcgtgctagcccgccatggaggtgaggtccgagcaagggctgatggcggggagggatctattcggcttgacgaagagcccgccggcgcccgcgccgccgtcgtccgccgccatgcagagcgtgcgcatggcgtacaccgcggacggcaccgccgtgttcgctccggtgagctcttcgcctgcgacgccgtcttaccagccgcagggcgcagcccacggcgctagcatgtccgcggcgacggtcgttggaggcaatggcgctccagctgcgccgagcatgggtgagccgctggccaagaagaagcgcggacgaccaaggaagtacgggcccgacgggtccatggcgctggcaatggtgcctgcttcggcggcttcagggtcgccggcgacagggcagggtttttctgggccgttctcaccgcctgcgttaaatccggcgagctctctggtggtggcgtcgccagacggattcaagaagcggggccggcctaagggttctaccaacaagccacgcgtggacgctgctgggtcatcaggagctggatttacacctcatgttatcacagttcaagctggggaggacgtggcatcaaagattatgtcattttcccagcatggaacacacggagtttgtgttctttcagcaaatggctccatatcaaatgtaacgcttcgtcagactgctacatcaggcagaactgtaacatacgagggtcaattcgagatactgtcgctgtcggggtcattcttcctggctgaggatggtgtccagcgcagccgaaacggaagcctcagcgtgtcgctggctggtcctgatggccgtctgttgggtggtggggtcgcaggacttctagtagcggcttcaccggttcagatagtactgggaagcttcaattctggaggcggaaaggagccacaaaagcaggctccttcagaacccacatcggctccaccgagggttgctccgacagccgggatgggaggacccagcagcccttcttcaagaggcacattgagcgagtcatccggtggcgctggaagcccaccgccactgcatcgagccatggctgctagtgctagcaatagtaaccagccaccgttcttgtccagcatgccttggagatgagtttgcagcttgcattctcttggccaattccaggcaggatgtagcaatctgcgctttcagtagcgcccgttgtgtgagtagctgtgtgtagtacaagccagaagcttgggtgggaatagaattgcgtctggtaaatctgtagctctgttgtaggttccaccctgaattcctgtgctaggtgtgttgagctgtgtaagcaatgtaatcctttcagcgttatcaaatgctatttagttaaatgtttctaccaaggcatgtcgatttgaatcataagatatcaatttgctgtttgcgtctcgggcaacttctgttctagagaacgttctactcactgaaatttgagcctgttgccaagtttgaaaac

SEQ ID NO: 124458 - DNA, 1874 bp, Zea Mays
tactgcaataatcacccgaggcaattttggcgtgctttacttccgcttccaatatacctttttttccgcgacaaaaatcatttttgttaattgcgaaaaggaaagagcccgtgtgaacaggaggggtgaggagaagagggggaaaagagagagaaatcggagggcattagcaagaaaccatgagttctaggttagctgaaatctcctttgatctttaatctgttcatctccttgcgtgagtctgtggcgttagcgtgatgccttctccaagttcatgaacttcccggttcgcaatccctagtcgtcttgtcctgatcttacttgagtgctcgtgagctctttccagtggctaatgactgcagatttgagttctggcccaagaaccgcgtgctagcccgccatggaggtgaggtccgagcaagggctgatggcggggagggatctattcggcttgacgaagagcccgccggcgcccgcgccgccgtcgtccgccgccatgcagagcgtgcgcatggcgtacaccgcggacggcaccgccgtgttcgctccggtgagctcttcgcctgcgacgccgtcttaccagccgcagggcgcagcccacggcgctagcatgtccgcggcgacggtcgttggaggcaatggcgctccagctgcgccgagcatgggtgagccgctggccaagaagaagcgcggacgaccaaggaagtacgggcccgacgggtccatggcgctggcaatggtgcctgcttcggcggcttcagggtcgccggcgacagggcagggtttttctgggccgttctcaccgcctgcgttaaatccggcgagctctctggtggtggcgtcgccagacggattcaagaagcggggccggcctaagggttctaccaacaagccacgcgtggacgctgctgggtcatcaggagctggatttacacctcatgttatcacagttcaagctggggaggacgtggcatcaaagattatgtcattttcccagcatggaacacacggagtttgtgttctttcagcaaatggctccatatcaaatgtaacgcttcgtcagactgctacatcaggcagaactgtaacatacgagggtcaattcgagatactgtcgctgtcggggtcattcttcctggctgaggatggtgtccagcgcagccgaaacggaagcctcagcgtgtcgctggctggtcctgatggccgtctgttgggtggtggggtcgcaggacttctagtagcggcttcaccggttcagatagtactgggaagcttcaattctggaggcggaaaggagccacaaaagcaggctccttcagaacccacatcggctccaccgagggttgctccgacagccgggatgggaggacccagcagcccttcttcaagaggcacattgagcgagtcatccggtggcgctggaagcccaccgccactgcatcgagccatggctgctagtgctagcaatagtaaccagccaccgttcttgtccagcatgccttggagatgagtttgcagcttgcattctcttggccaattccaggcaggatgtagcaatctgcgctttcagtagcgcccgttgtgtgagtagctgtgtgtagtacaagccagaagcttgggtgggaatagaattgcgtctggtaaatctgtagctctgttgtaggttccaccctgaattcctgtgctaggtgtgttgagctgtgtaagcaatgtaatcctttcagcgttatcaaatgctatttagttaaatgtttctaccaaggcatgtcgatttgaatcataagatatcaatttgctgtttgcgtctcgggcaacttctgttctagagaacgttctactcactgaaatttgagcctgttgccaagtttgaaaac

SEQ ID NO: 124459 - DNA, 1778 bp, Zea Mays
tactgcaataatcacccgaggcaattttggcgtgctttacttccgcttccaatatacctttttttccgcgacaaaaatcatttttgttaattgcgaaaaggaaagagcccgtgtgaacaggaggggtgaggagaagagggggaaaagagagagaaatcggagggcattagcaagaaaccatgagttctaggttcgcaatccctagtcgtcttgtcctgatcttacttgagtgctcgtgagctctttccagtggctaatgactgcagatttgagttctggcccaagaaccgcgtgctagcccgccatggaggtgaggtccgagcaagggctgatggcggggagggatctattcggcttgacgaagagcccgccggcgcccgcgccgccgtcgtccgccgccatgcagagcgtgcgcatggcgtacaccgcggacggcaccgccgtgttcgctccggtgagctcttcgcctgcgacgccgtcttaccagccgcagggcgcagcccacggcgctagcatgtccgcggcgacggtcgttggaggcaatggcgctccagctgcgccgagcatgggtgagccgctggccaagaagaagcgcggacgaccaaggaagtacgggcccgacgggtccatggcgctggcaatggtgcctgcttcggcggcttcagggtcgccggcgacagggcagggtttttctgggccgttctcaccgcctgcgttaaatccggcgagctctctggtggtggcgtcgccagacggattcaagaagcggggccggcctaagggttctaccaacaagccacgcgtggacgctgctgggtcatcaggagctggatttacacctcatgttatcacagttcaagctggggaggacgtggcatcaaagattatgtcattttcccagcatggaacacacggagtttgtgttctttcagcaaatggctccatatcaaatgtaacgcttcgtcagactgctacatcaggcagaactgtaacatacgagggtcaattcgagatactgtcgctgtcggggtcattcttcctggctgaggatggtgtccagcgcagccgaaacggaagcctcagcgtgtcgctggctggtcctgatggccgtctgttgggtggtggggtcgcaggacttctagtagcggcttcaccggttcagatagtactgggaagcttcaattctggaggcggaaaggagccacaaaagcaggctccttcagaacccacatcggctccaccgagggttgctccgacagccgggatgggaggacccagcagcccttcttcaagaggcacattgagcgagtcatccggtggcgctggaagcccaccgccactgcatcgagccatggctgctagtgctagcaatagtaaccagccaccgttcttgtccagcatgccttggagatgagtttgcagcttgcattctcttggccaattccaggcaggatgtagcaatctgcgctttcagtagcgcccgttgtgtgagtagctgtgtgtagtacaagccagaagcttgggtgggaatagaattgcgtctggtaaatctgtagctctgttgtaggttccaccctgaattcctgtgctaggtgtgttgagctgtgtaagcaatgtaatcctttcagcgttatcaaatgctatttagttaaatgtttctaccaaggcatgtcgatttgaatcataagatatcaatttgctgtttgcgtctcgggcaacttctgttctagagaacgttctactcactgaaatttgagcctgttgccaagtttgaaaac

SEQ ID NO: 124460 - DNA, 1627 bp, Zea Mays
tctcgaagtaaaatagcacaattgctggggccaaatgaggttcgcaatccctagtcgtcttgtcctgatcttacttgagtgctcgtgagctctttccagtggctaatgactgcagatttgagttctggcccaagaaccgcgtgctagcccgccatggaggtgaggtccgagcaagggctgatggcggggagggatctattcggcttgacgaagagcccgccggcgcccgcgccgccgtcgtccgccgccatgcagagcgtgcgcatggcgtacaccgcggacggcaccgccgtgttcgctccggtgagctcttcgcctgcgacgccgtcttaccagccgcagggcgcagcccacggcgctagcatgtccgcggcgacggtcgttggaggcaatggcgctccagctgcgccgagcatgggtgagccgctggccaagaagaagcgcggacgaccaaggaagtacgggcccgacgggtccatggcgctggcaatggtgcctgcttcggcggcttcagggtcgccggcgacagggcagggtttttctgggccgttctcaccgcctgcgttaaatccggcgagctctctggtggtggcgtcgccagacggattcaagaagcggggccggcctaagggttctaccaacaagccacgcgtggacgctgctgggtcatcaggagctggatttacacctcatgttatcacagttcaagctggggaggacgtggcatcaaagattatgtcattttcccagcatggaacacacggagtttgtgttctttcagcaaatggctccatatcaaatgtaacgcttcgtcagactgctacatcaggcagaactgtaacatacgagggtcaattcgagatactgtcgctgtcggggtcattcttcctggctgaggatggtgtccagcgcagccgaaacggaagcctcagcgtgtcgctggctggtcctgatggccgtctgttgggtggtggggtcgcaggacttctagtagcggcttcaccggttcagatagtactgggaagcttcaattctggaggcggaaaggagccacaaaagcaggctccttcagaacccacatcggctccaccgagggttgctccgacagccgggatgggaggacccagcagcccttcttcaagaggcacattgagcgagtcatccggtggcgctggaagcccaccgccactgcatcgagccatggctgctagtgctagcaatagtaaccagccaccgttcttgtccagcatgccttggagatgagtttgcagcttgcattctcttggccaattccaggcaggatgtagcaatctgcgctttcagtagcgcccgttgtgtgagtagctgtgtgtagtacaagccagaagcttgggtgggaatagaattgcgtctggtaaatctgtagctctgttgtaggttccaccctgaattcctgtgctaggtgtgttgagctgtgtaagcaatgtaatcctttcagcgttatcaaatgctatttagttaaatgtttctaccaaggcatgtcgatttgaatcataagatatcaatttgctgtttgcgtctcgggcaacttctgttctagagaacgttctactcactgaaatttgagcctgttgccaagtttgaaaac

SEQ ID NO: 124461 - DNA, 514 bp, Zea Mays
gattgtgatgttttaatcagctacgctccaccaaaagatgaatcgctggttgccagttttattacccaatatgccgtaaccgcttatgccagccagcgctatcttgagaaacatcccattagccgtcctgacgaactcgaacatcactcctgtattttgatcgactcgatgatgatcgacgacgcgaatatctggcgcttcaacgtcgccgggagtaaagaggagcgggattatcgcgtgaagggaaattacgtttgcgacaacacgcaatctgcgctggagctggcacgaaatcacctgggggattgtgtttgcgccagactaaagtgtgcagagcgacctgcaagacggcacgctggtggcctgcttttcagcaacccctatgaatggtggttggatctgggtgtctatctttccgtatacggcaataccagcccttggcgggtccagtatgtgctggatgaaatgctgcgtgaaattccgccacagcttgcttagttcgcagcaactgcgg

SEQ ID NO: 124462 - DNA, 387 bp, Zea Mays
atggagcttggggccgggcacgcagggagcaacgccagagagcttgagggagatagaggaagggccgctggggcctgggggcgtccatggcgagcggcagtagagggcacgaccggacttggggaagaggagggaggccggccagagagagcagagcagaggccacaggggtcgccgctgcgcacccacgaggaccgagcacgctcagccgggtccagcatggcgttgcgcgaggaaacggcggcggcgcataggagccggagcgagcgggaggagggagctccgggatggcctggcgcgcggaggaagctccagggcgcgcagcaggggaagaagacgaggcgcagagaagataagacgagggagagagacacggctggaggttga

SEQ ID NO: 124463 - DNA, 234 bp, Zea Mays
gcacgcgagacgacggggcacgggggttggaggtcggccgcgtgcattgtgccggtgtggagagtggcagaggccgcggcgggcgagggcgcggcgacgtggagcgcggcgggcgcggcggccgagggcgtggagggcgggcgagggcgcggcgggcaagcgcggcggccgagggcatggagggcgggcgcggcggcgggtggacggcgcgacgggcgaggggcgcgggcggcg

SEQ ID NO: 124464 - DNA, 1226 bp, Zea Mays
tgcctttctcccaccaccggcgccgtagcttgcttttagttagttaccttctcgatctgctgccctctttccatcgtctttgccttccacggcacacaggtccttccttgtactcactactcaggcctcttcttttctgagggccatggagaaggcgcggcggcggcacgtgccggcgttcggggagtggaactactactactcctcctcctcgtcaacctccccggactccgcgcccgccgcggccgagccctgctggtggtacgcgccggagccggaggcccgcagcgaggcctggttcaggtactccccgcccccccgccgcaggccggcgccggtgccggcttccaagaaggcgcggcggcccgagaccgcgggcggcggcggaggagccgtcgccgccgccgtagctgcggagcgcaagagggcggcggcgcccaagggatccggccgcagggtggtggttgtcaggcccgtcgacgaggacctttaccgcgtgccgccgccggacgacaacgacggcgccgccgctgtctcccgccttcccagacgccggaagcgtgcggcgaggaggagcttgtggatgggttgcttgggcctcaactgcgtggcctgaagcctgaagccagtagtagtagtacgtaggttttacaaggtgcattcgggcggctaattaagctcagtagtactactgattagttaagctgtatacgtatagtaagtatgtcgtgccgtgcgtatgggatctgggcaagttgtactagtactagtagttagtggtagagtcagggtgctcttcacattttccatgtttcgtgttcgtcgttagcttagaccactcgcactgtactgtgtgccataccgattgctgtataaggcagcacggagcagattagaggacccagcagcagttgttgtgccagccaagaattagagtagtaccggtcaaattcaacagggcccagtagatgttgcagcatctcttgtctctctgggtttaccgaaactaaaacactgccttagttttcagccgcttcagatgtttgtactcatgtactgacaagtatgttgccataagcatgcagaacaaatatattatatatttatatagagagagagctatcctgttggtagccttcgcacgtactgacgtacacgtactgctggtagccttcgcacgtcctgatcattctgaactgacataaatatatatattgatctttatc

SEQ ID NO: 124465 - DNA, 1360 bp, Zea Mays
atccggccagccactgcctttctcccaccaccggcgccgtagcttgcttttagttagttaccttctcgatctgctgccctctttccatcgtctttgccttccacggcacacaggtccttccttgtactcactactcaggcctcttcttttctgagggccatggagaaggcgcggcggcggcacgtgccggcgttcggggagtggaactactactactcctcctcctcgtcaacctccccggactccgcgcccgccgcggccgagccctgctggtggtacgcgccggagccggaggcccgcagcgaggcctggttcaggtactccccgcccccccgccgcaggccggcgccggtgccggcttccaagaaggcgcggcggcccgagaccgcgggcggcggcggaggagccgtcgccgccgccgtagctgcggagcgcaagagggcggcggcgcccaagggatccggccgcagggtggtggttgtcaggcccgtcgacgaggacctttaccgcgtgccgccgccggacgacaacgacggcgccgccgctgtctcccgccttcccagacgccgggtacgtacgtacgtggcacggcagacagacatatatgtgcaatgccgcagccaacgactgcaaaacaaacgcttgcgtgttctgaaaacttcgtcgtctcgggctgtgtgttctttgcagaagcgtgcggcgaggaggagcttgtggatgggttgcttgggcctcaactgcgtggcctgaagcctgaagccagtagtagtagtacgtaggttttacaaggtgcattcgggcggctaattaagctcagtagtactactgattagttaagctgtatacgtatagtaagtatgtcgtgccgtgcgtatgggatctgggcaagttgtactagtactagtagttagtggtagagtcagggtgctcttcacattttccatgtttcgtgttcgtcgttagcttagaccactcgcactgtactgtgtgccataccgattgctgtataaggcagcacggagcagattagaggacccagcagcagttgttgtgccagccaagaattagagtagtaccggtcaaattcaacagggcccagtagatgttgcagcatctcttgtctctctgggtttaccgaaactaaaacactgccttagttttcagccgcttcagatgtttgtactcatgtactgacaagtatgttgccataagcatgcagaacaaatatattatatatttatatagagagagagctatcctgttggtagccttcgcacgtactgacgtacacgtactgctggtagccttcgcacgtcctgatcattctgaactgacataaatatatatattgatctttatc

SEQ ID NO: 124466 - DNA, 2777 bp, Zea Mays
atgcatgtttgttgcagcgcattccggcagcaatggcataacggcggcgggcctgcgtgtgtgcttagcgtcggcacagccaacccaggcaactgcgttcagcaagatgagtacactgactggtacttcagtatcaccaagaacgatcatcttacacacacgaaagcaatcatgaagaaaatgtgtgagaagatgatggtaaaaaaacgatacctgcaagtcaacgaggagctgttccgtgagcatcccgagttcttggaccctgcagctccaagtctagaaggcaagctagccgtcgtggccagtgtcatgccagggcttgtggccgctgccgcagagaaagccattgccgaatggggccgaccggctgaagacatcacgcacctcgtcttcgccaccagcagcagtgctcaactgccccacatcgatctccgcatcgcttcccttctcgggttaagcaccaccgtgcagcgtacggtgatcggctttcatggctgcagcggcagctccgcggcgctccgcgttgccaaggacatcgccgagaacaaccgcagcgcacgagtcctcgtcgcttgcgcagacatgttgagcgtcatggatggttacctagtccccaacgtagtagcccaccgctacggaatcatcggccacgccattttcggtgacggtgctggtgcagttgtcgtcggaagccggccgcaggaacccgtagagcgcccaatcttcgagatggtgtcagcgtcgcaggccacgctacccggctcggagctggcggttgctgccgagctcaccaatttcggcatggagtaccgcctcgagtttggagagctggcggcgggggtcggcgacaacatcgagcggtgtctgatcgacgcgctgtcgccgctcggcattggtagtgttggctggaataacctcttctgggcggtgcacccgggtggccccaaggtcatggacaacttcacggcggctctgaggctagagcccgggaagttggcgcccagccggcaggtgttcagcgagtacggcaacatggtgggcccgactctgatctttgtcctcgatgaggttatacgtcgtcgccagcaagatcacgaggaagggagctgcgagtgggggttcatggtggggttcggcccggggttcaccatcgatgtaatggcattgcatgcgtgcagtgttacaaacggatctgccactgcaccgtcggaagaatgaacggcggacgaaatggtctacaacaaacccacaacggactgcatgcacgatctacattattagtacgcgacggctatttaaaagccagctcctgctctatttccatcgtcatatctccaggcggcgtcgtcaggcccttccgccgtcgtcacgcaaccgagctcggcacgcggcaacagccgcctccacacagcgcctgcaacctcctcctgcccacccatggccgccgctcgtcccggcaatctcagcgaattggagcagaaatggcataacggcggcgggcctgcgtgtgtgcttggcgtcggcacagccaacccagccaactgcgttcggcaagatgagtacactgactggtacttccgtatcaccaagagcgatcatcttacgcacaccaaagcaatcatgaggaaaacgtgtgagaagatgatggtaaaaaaacgctacttgcaagtcaatgaggagctcttcagtgtgcaccccgagttcttggaccctgcagctccaagtctgcaaggcaagctagctgtcgtggccggtgccatgccagggcttgtggctgctgccgcagagaaagccattgccgactggggccgcccggccggagacatcacccacctcgtcttcgccaccagttccagtgcccagctgcctcacattgacctccgcatcgctgcccttctcgggttaagcaccactgtgcagcgcacggtgatcggctttcacgcctgcagcggcagctccgccgcgctccgcgttgccaagtacatcgccgagaacaaccgcagcgcgcgagtcctcgtcgcttgcgcggacatgtggagcgtcatggatagttacgtagttcctaacgtagaccaccgctacggaattattggccacgcctttatcggtgacggtgccggcgcagttgtcgtcggaagccgaccacaggaacccgttgagcgcccaatcttcgagatggtatcagcgtcgcaggccacggtgcccggctcggagcgggcggttgccgtcgagctcaccaattgtggcctggagtatcgcctcgagtttggagatgtggcggcggaggtcggtggcaacatcgagcggtgcctgcttgacgcgctgtcgccgttgggcattggtagtgttggctggaataacctcttctgggtggtgcacccgggtggccccaggatcatggacaccttcacggcggctctcaagctacagcccgagaagctgtctgccagtcggcgtgtgcttagggagtacggcaacatgaccggcccgactctgatctttgtcctcgacgaggctatacgccgtcgccagctcgaccacgaggaggggagctgcgagtgggggctcatggtgggattgggcccggggttcaccattgatgtaatggcattgcgtgcgtgcagtggtaaatccacaccaacaccaagaatcaagagtagtctgtaagggagagccagaactcagaagcggccctttggttgtctgtttgtcagtgcgtttgtacgtgtcttcatcccaataaaataaataaataactgtggtttggctttgtggca

SEQ ID NO: 124467 - DNA, 1714 bp, Zea Mays
gaccgttgtgcttgcggcttcgctcgttcccctccaccactccgtctccttcctattgctgagtgcggcacccttgcctataataaaccccgccgcacgcccgcaccggagaagaaagctcccaagtcccaatccacgttcctcgccccctgccgctccggagagtcatggccaccgccgtttccacccccgcggacctgtcgcccacgcctgccccgagacggcggggccggccgccgaagaaccccgccccagccgaggccccaggcagcccggcggaccaagcggaggtgattggggactacgagcgcgagagggacgcgaggatccgggagaacatggagcggatgcagaagctcggcatcctcgacctcgcgcacaccctcagccactgcgccgccgcctcgggtctgggtaccggcagcgggcggtggcgccggaagcccgtggagccggggtctgctggtggggccagggtgaagcccgcgtcgccggcgccctcgcggagatcgctcaggttgaaggacgtggaaccggttacctatcgtgaaattgagccaaagaaagagaaacgctctgaaggtggcaaaactgttttaatggaggtgggagccaaggaagaaatatacactgaagagcatgacaagcttttgggtacatgcaacactccttggactctctttgttgatggttatggcaaagatggaaaacgcatttatgatcaagtgaggggtcaaacctgtcatcagtgccgtcagaagactcttggtcatcatacaagctgctgtaaatgccagattgtccaaggacagttctgtggagactgtttgtacatgaggtatggtgaaaatgtgttagaggttaagaagaatcctaactggatatgtccagtttgccgtggcatctgtaattgcagtctatgcagaactaagaaaggatggttccctactgggtctgcgtataggaaggcgatcggacttgggtacaaatctgtggcacactttctaattgcaacacatcgagcatcatcagtcaattcaagctcagtcgacaataacaagctgccgtttgctaaatctgaaacctcgtgcatttctgaccatgccaatgagagcccagaggatggagaaacgaccagcaaagctaagcagaacaaagcaactcgccgccgagtgaggaagagttctgatggcgacaacgatagcagaagtgggtccgtggtgacatctgactgccaggatgatcaagccaacaaggatgctgggtgtgtgactccgtcgtctaagccagcgtcaacgaagaggaagtacgttgaacgaagccctgactgcatcgcaagcaggctgcggtctcggctcaatatgccatgagcccatgaagatgtgatcaggatcatgtatctcttttactgcctgaccgcaggctctgtcccttcttgcgatgatgttgtggctctttcatctacaagcagttcatggtttgccagtaacgatgttctgcgcgagtaagaaggtgattgttatagtctcttgcgcagctgtgttaagagcttgaaactagactcagtcatgtgtagtatttgtaccattagtgccaactgtggtctctggcattagtgcctactgtggtttgtgagctatgagttgacgcgatagcctgtagctttaatgtacaattcatgatatgcaagtgaatatgttcattttcagctgaa

SEQ ID NO: 124468 - DNA, 831 bp, Zea Mays
gcttcgctcgttcccctccaccactccgtctccttcctattgctgagtgcggcacccttgcctataataaaccccgccgcacgcccgcaccggagaagaaagctcccaagtcccaatccacgttcctcgccccctgccgctccggagagtcatggccaccgccgtttccacccccgcggacctgtcgcccacgcctgccccgagacggcggggccggccgccgaagaaccccgccccagccgaggccccaggcagcccggcggaccaagcggaggtgattggggactacgagcgcgagagggacgcgaggatccgggagaacatggagcggatgcagaagctcggcatcctcgacctcgcgcacaccctcagccactgcgccgccgcctcgggtctgggtaccggcagcgggcggtggcgccggaagcccgtggagccggggtctgctggtggggccagggtgaagcccgcgtcgccggcgccctcgcggagatcgctcaggttgaaggacgtggaaccggttacctatcgtgaaattgagccaaagaaagagaaacgctctgaaggtggcaaaactgttttaatggaggtgggagccaaggaagaaatatacactgaagagcatgacaagcttttgggtacatgcaacactccttggactctctttgttgatggttatggcaaagatggaaaacgcatttatgatcaagtgaggggtcaaacctgtcatcagtgccggtatgtttctactcgaataactattttttgaatcagatgcctttgccatttgttatgcttatctttttttgaaggatgaacttagtaatctac

SEQ ID NO: 124469 - DNA, 830 bp, Zea Mays
tgatagtgagatggctgatttggagaaaatggcattcatgaatgttattaatgaattattttcttgctattcatcaaccatcaatgcaaaatcaaccaaaaaagggactagctcgaaggattttgttccaaataaacaagttttgatggctgatgatgatgagaatgaggttgatcttgatgagttgtatgcagcaacagacaatgagaagaaagtgtcagaattggatctatacatgagtgagggcctagtgaaggctaatgaaagtgatgcaccatttaatgccttatcatggtggaagggtcaagtgacaaatttccctattctttctacccttgctcgtgatgtactatcaatgcaggtgtcaactgttgcttcagagtcggcatttagctctggtggacgcgtggttgatgcctttcgttcgaagcttaaatctgaaattattgaagccttggtttgtactaaggattggaagattgcttcagagaaagatttggagtgtgaaataaaaactatagctgaagctatgaatgctatggaggtggacgatgatgttgcgacttgagatcttcaaacaagcatggattgcttgcactattttatgccatttgaaaactaccttttattgtaatagtctattgtgttgaactatcttgtgctatgttagactcttgtgtgatgtgaacttatcgctattatatttgaactattgtgttagactattgtatgctatgaacttattgttatattgtcttgttgatctatggtctatgtaatgctatattgtatgatgtgttgaatgatgagaacttactgctatattatca

SEQ ID NO: 124470 - DNA, 331 bp, Zea Mays
atggctaccacaagctccagcacctcctctccacggatcgctgctcctctgctcctccctctcccaagttggacgccgaccttcacacgtcatgcatggccgagctctcccctttggcctctcccagccatgaagcacaacatcgcggtgcccagaagcttgccagccccttccctgcgccccacctcccttggctccggcgtggcctggttcggtctggacaagaatgccaacccctcatcccctgttgtgcgtgacacatgatgcaaggtaggagatgaagacctctgcgagtcaatgacgaatggccccatgtgcttttgtgctgaaa

SEQ ID NO: 124471 - DNA, 127 bp, Zea Mays
gttttaaggcattctaaacttagctctggacctcagttttcaaaactgcggtattataaactacaatattgtcataactaaagtatagtatagtatttcaaaaactgtggttttcaaaaactttgtt

SEQ ID NO: 124472 - DNA, 111 bp, Zea Mays
agcttggcccaattaggttgccgcgagttttgatgtgtaaaatgcagctcccgccaaatttcaaaattttaagccctattaaataaattacagcacatttgaactaaaaat

SEQ ID NO: 124473 - DNA, 462 bp, Zea Mays
atggcgagcggtggcgtggtggcgtctctactgtcgtcggcgaccaagctgctcgacctcctccggggtgcgccgtctgtttctcgccgtgcagggcagcagcagccggtttccgcagacgtgcatcggttgcagcggctgctgaggaggatccaggccacgatcgatgacgctggggagagggagatccgggacagttctgtgaagctatggatcgcagagatcacggtcgtcgctcgcgacgccgaggacgtcctagaagactaccgttacgagctgatccggcggcgcgtgcaaagactagaaggcaccggcggcggcgcctctacctcgtgcaagcggaagcaccaccacgacgaccaaggttatggcatccgtgaggtgacacagtttcttgttgtactttctctcgctttaatgtctcctactgctacaaaccgaccaagcaacaagataccatga

SEQ ID NO: 124474 - DNA, 144 bp, Zea Mays
attattcttttcttcctttacaaattcaaagcttcaactctaaaagaaattctttttgtggcaaatttgtccttgggttagatattaaatttgaacttgccaatacgaatttttattagtaagttttattttgtactttatagt

SEQ ID NO: 124475 - DNA, 366 bp, Zea Mays
atggcactttgagcgattcaactttcaatgaagcacacaccctcactattcacagaactgcaagaaggaaataaataggcaaaatgcgcaattgatcaaccatggactgggacttcattcgaagcaaccaattgtgaagccagatcaggacctgtagcttctccaacgccatgttcgactactagctcttccgaggcagaaggttctgaaggagggacttcagctgagtttccttgcgcctgcgcaacctttgcccttgaaaccttaggtttcgagtttgcgattttcggctttgtagctatgggtcttggttcagcctttgtggtggcagacacttgcaatggagttttcgtgactggcctctga

SEQ ID NO: 124476 - DNA, 1900 bp, Zea Mays
accctttttcgtctctcctctgcctttccccatcgtctctccgtctacacctcatcataatcacagattcacagagcgctagggaggagagagggctagggtttcgtgctccctcacgcaacgaatccgagccggatcggggggtgcgcggagtcaccggcggcccggcgttgcctgggctgtgatacagttgcaatggcatctgtaactgatgagacagctaagattgagggtttgacatctgctgcagcctttgtggagggtggcattcaggacgcatgtgatgatgcatgcagcatttgccttgaggctttctgtgagagtgacccttctgcattgactggctgcaaacatgagttccatctccaatgcattcttgaatggtgccagagaagttcacagtgcccaatgtgttggcagcctattactatgaaggatcctaccagtcaggagctgcttgaggcagtagagcgtgagaggaatataagaactaatcaaactcggaacacaactatatttcatcatcctgctcttggggattttgagctgcagcatctgcctgttggtaatgatgctgagcttgaagagcgtatactgcagcatctagctgctgctgctgcaatgggaagggcacaccatcttggaagaagggaggggcacaggggacgatctggctctcatggtcgtccacatttcctagttttctctacacaaccaaattcaccttctgctggcacaatctcttcatcttctgctcatatggagggagaaaatgattcaaatcctgccacacctagagctagcgagtcatctccacgagctattcgcattggagaagtgggaaaccaaagtcctgggatgcttacctacgatgctgaacaggatgctgtcgtttcttccggaaatagcactcctgtatcgagtcctaggttttttaacaggagacactccactggacagtcaactccagacagggctgggccatcggatattcagtctttctcagactccctgaagtcccgcttaaatgccgtctctatgaagtacaaagaatctattacaaagagtactcgagggtggaaggagagattgttttcacgtaattcatccgtggcggatcttggttctgaagtgagaagagaagttaatgctggaattgcgtccgtatcacggatgatggagcgtctggaaactagaggaaatagcagaacaagtgatagcccggcagcatccacttctgaagttccctctgctacagaatcaagcaatgaaagggttacagagagcaactctgctgctgctgctgctggtggtggtactaccactacgggtaccagcgctagcaacgcctccgccccttgtgttgcgacatccggttcaaattaggacatgtaagggtctcagaaagaaggcttacacctgcaattcttcatcttcaaaggtttgtgagcctggcggcagagcagaagtgcagtaacatgatgccgtcatttttttctcaaccactgcataaacggctgcaaggggaaaaaaaccaaacggtgatttgatgtattggctcgataaaatggtggtgcgtgtggcctaggagaagtcggatttcatcttctgttttcgtctctttgtaaaaaaaatcgtctgagggcagatgtttaccggtataaataacggatatgtcatcttcatagtacgtggatcagttataaatatgattggaacagcaaagcttgctgctgttataaagttgtaccgtggcacgatttcctgttctgttctgtgtgggtgaattgatggattttgctgtacacaagatatgcatctttccaggtctcatgcctatgtatacatatacatattacacgaacctaccttgaatccatatctctgaaacttgtttgtg

SEQ ID NO: 124477 - DNA, 1805 bp, Zea Mays
tctgcctttccccatcgtctctccgtctacacctcatcataatcacagattcacagagcgctagggaggagagagggctagggtttcgtgctccctcacgcaacgaatccgagccggatcggggggtgcgcggagtcaccggcggcccggcgttgcctgggctgtgatacagttgcaatggcatctgtaactgatgagacagctaagattgagggtttgacatctgctgcagcctttgtggagggtggcattcaggacgcatgtgatgatgcatgcagcatttgccttgaggctttctgtgagagtgacccttctgcattgactggctgcaaacatgagttccatctccaatgcattcttgaatggtgccagagaagttcacagtgcccaatgtgttggcagcctattactatgaaggatcctaccagtcaggagctgcttgaggcagtagagcgtgagaggaatataagaactaatcaaactcggaacacaactatatttcatcatcctgctcttggggattttgagctgcagcatctgcctgttggtaatgatgctgagcttgaagagcgtatactgcagcatctagctgctgctgctgcaatgggaagggcacaccatcttggaagaagggaggggcacaggggacgatctggctctcatggtcgtccacatttcctagttttctctacacaaccaaattcaccttctgctggcacaatctcttcatcttctgctcatatggagggagaaaatgattcaaatcctgccacacctagagctagcgagtcatctccacgagctattcgcattggagaagtgggaaaccaaagtcctgggatgcttacctacgatgctgaacaggatgctgtcgtttcttccggaaatagcactcctgtatcgagtcctaggttttttaacaggagacactccactggacagtcaactccagacagggctgggccatcggatattcagtctttctcagactccctgaagtcccgcttaaatgccgtctctatgaagtacaaagaatctattacaaagagtactcgagggtggaaggagagattgttttcacgtaattcatccgtggcggatcttggttctgaagtgagaagagaagttaatgctggaattgcgtccgtatcacggatgatggagcgtctggaaactagaggaaatagcagaacaagtgatagcccggcagcatccacttctgaagttccctctgctacagaatcaagcaatgaaagggttacagagagcaactctgctgctgctgctgctggtggtggtactaccactacgggtaccagcgctagcaacgcctccgccccttgtgttgcgacatccggttcaaattaggacatgtttgtgagcctggcggcagagcagaagtgcagtaacatgatgccgtcatttttttctcaaccactgcataaacggctgcaaggggaaaaaaaccaaacggtgatttgatgtattggctcgataaaatggtggtgcgtgtggcctaggagaagtcggatttcatcttctgttttcgtctctttgtaaaaaaaatcgtctgagggcagatgtttaccggtataaataacggatatgtcatcttcatagtacgtggatcagttataaatatgattggaacagcaaagcttgctgctgttataaagttgtaccgtggcacgatttcctgttctgttctgtgtgggtgaattgatggattttgctgtacacaagatatgcatctttccaggtctcatgcctatgtatacatatacatattacacgaacctaccttg

SEQ ID NO: 124478 - DNA, 1935 bp, Zea Mays
accctttttcgtctctcctctgcctttccccatcgtctctccgtctacacctcatcataatcacagattcacagagcgctagggaggagagagggctagggtttcgtgctccctcacgcaacgaatccgagccggatcggggggtgcgcggagtcaccggcggcccggcgttgcctgggctgtgatacagttgcaatggcatctgtaactgatgagacagctaagattgagggtttgacatctgctgcagcctttgtggagggtggcattcaggacgcatgtgatgatgcatgcagcatttgccttgaggctttctgtgagagtgacccttctgcattgactggctgcaaacatgagttccatctccaatgcattcttgaatggtgccagagaagttcacagtgcccaatgtgttggcagcctattactatgaaggatcctaccagtcaggagctgcttgaggcagtagagcgtgagaggaatataagaactaatcaaactcggaacacaactatatttcatcatcctgctcttggggattttgagctgcagcatctgcctgttggtaatgatgctgagcttgaagagcgtatactgcagcatctagctgctgctgctgcaatgggaagggcacaccatcttggaagaagggaggggcacaggggacgatctggctctcatggtcgtccacatttcctagttttctctacacaaccaaattcaccttctgctggcacaatctcttcatcttctgctcatatggagggagaaaatgattcaaatcctgccacacctagagctagcgagtcatctccacgagctattcgcattggagaagtgggaaaccaaagtcctgggatgcttacctacgatgctgaacaggatgctgtcgtttcttccggaaatagcactcctgtatcgagtcctaggttttttaacaggagacactccactggacagtcaactccagacagggctgggccatcggatattcagtctttctcagactccctgaagtcccgcttaaatgccgtctctatgaagtacaaagaatctattacaaagagtactcgagggtggaaggagagattgttttcacgtaattcatccgtggcggatcttggttctgaagtgagaagagaagttaatgctggaattgcgtccgtatcacggatgatggagcgtctggaaactagaggaaatagcagaacaagtgatagcccggcagcatccacttctgaagttccctctgctacagaatcaagcaatgaaagggttacagagagcaactctgctgctgctgctgctggtggtggtactaccactacgggtaccagcgctagcaacgcctccgccccttgtgttgcgacatccggttcaaattaggacatgtaagggtctcagaaagaaggcttacacctgcaattcttcatcttcaaaggtaccacatatatcttgtcctggagcttcggttggatgaaactaacaggtgccaaatgttgcaattccaggtttgtgagcctggcggcagagcagaagtgcagtaacatgatgccgtcatttttttctcaaccactgcataaacggctgcaaggggaaaaaaaccaaacggtgatttgatgtattggctcgataaaatggtggtgcgtgtggcctaggagaagtcggatttcatcttctgttttcgtctctttgtaaaaaaaatcgtctgagggcagatgtttaccggtataaataacggatatgtcatcttcatagtacgtggatcagttataaatatgattggaacagcaaagcttgctgctgttataaagttgtaccgtggcacgatttcctgttctgttctgtgtgggtgaattgatggattttgctgtacacaagatatgcatctttccaggtctcatgcctatgtatacatatacatattacacgaac

SEQ ID NO: 124479 - DNA, 2727 bp, Zea Mays
atggagagagaaccgcgggagctgagggagaaagaagctgggcgcggcgctgggagatccggtgagccgagagggaggctgcgcgccgtgggagctggagcagcgcgcgacacagagaaccggagggcgcgcaggctgggagctcggccgccatgggcaagtgcagggaagaacgcgacgcgccagggaagagcagaggtcgggggcgagctcggcacggcgcgtgcgcaagaagcagctcggcacggcgcggctggggaagaagacgcgctggggaagagagcggcgatgggaaccgggcgcgggaggagcagaggccgaggagcggcgggagacgaccaccttcacgaaattggctgcgcggttggccttgctggagtcggcgagcgcgttcttgcgctgcggagtaatatagtggcgaagccgcgcgacgagattgttacaaactcaaataactcctccccctcactcccaaaaccccaaactcctctgggctcttgtcctccctccctctccagccgccgccgccgccgccgccgccgcccagagccgagcatgccgggtgccttccactccctcctccttcccctcaaacggaagcgcaaatccaaacgccgcagcagacgcggtcaccgaaaggagaacaaccccaacatatccaagaaccacctcgccgccgctggagacccgtccttccacctgaaaagctgcacctctgtctcccccagagacatcggactccttgtccagccgctcggcaacctcttcctctccgccaccccgcgagctaacctccgggacgcggggctcggcgcgctccggcctcttccagacgacctgctcctcgacgtccttggcttgctccccgcgcgcgacctcgcggcgctctcggtggcgtccaaggcgctctacgtcgtcgcctcccacgacccgctctggcggaccctcgtcctcgacgagctcggcggcgccttcgacttcgccggatcctggcgcgccacctacatcgccgccgcctccggcggccaggcctacctcatccctcctcgcgctctgagaatcaagggcttctactccgactacctcttccagagctggctctgtgccaacatggagatgcggcacgagtggcttgcgcgcgacaacatcgagcgccgccgcggcttgtcggtggagcagttcattgccgaggtcgaggagcccaacaggccggtgttgctagaggggtgcattgatatgtggccggcgttacagaaatggaacagagactacctgctggagatctcagcgggtaaggagttcgcggtcgggccagtgagcatgccattagataggtacttccggtatgctgacaatgtccaggaggagaggccattgtacttgttcgatgcgaagtttgctgagagagtaccagagatggggagggactatgaggttccggtgtacttcagggaggacctgtttagtgttcttgggaaggagaggccggattacagatgggttatcattggaccagctgggtctggttcatcgttccatgttgatccgaactcgacatccgcatggaatgctataatcaagggggctaagaagtgggtgatgttcccaccagaggttgtgccgcctggtgtccacccgagtgctgatggagcagaggtcaccagccctgtgtctatcatggagtggttcatgaacttctatggggcttgtgagacctgggaaaagaggcctatcgagtgtgtgtgccgatctggggaggtggttttcgtgcctaatggatggtggcatttggtgatcaatcttgaggagtcaattgccattacccagaattatgtgagcaggaggaatttgttgaacgttattgatttcctcaagaagcccaacgcaagtgagcttgtctctgggactgaagacagagtgaatctgcacaacaagttccgtggtgccatcgaggcagctcacccgggcatgatcaagcggctcgagcttgaggctcagcagaaggccgctgctcggaagaagaaagcgtcgttctgggattctgctgtcgatgccaagaatggaggattcaagttctccttctgagtttcacaacaaccaggtctctgattttcatgtttggttggatccagttttcttggtagttaagaaattttgtatgcccatttttccttgagcagtctgcagtaccttcccggtggacaatgatcatgggccctctgattggcacggcgctcaccgggaatccagctaactgattgtctgatttagtttgtacaatgagctgctacattaatgtcatcaaaatttttgatataattcagcgcaagaacgattgcattgtcgttgtaccgtgcagcctgtatccttgtacaatttagtgtgtttttgaagaatttagctgaaaacaaatatactgtttggcataacatgtaacttagtatctaagtactaagtgatgtaatattgcaattgataattggtttcaccaggaaaagagaaggaaatgttgcatttgccttctatcagaagcgcactgaaccatgtacacgcagcttcagacactttgtttaacattttgtgctggactctgaatgtgtagccaattactctctctgttttttttgacgataaatattcgagaatggaggtagtactatataaatccaaatgaattagttgacaacaaatattctagatggagatagtactatataaacccagcac

SEQ ID NO: 124480 - DNA, 2648 bp, Zea Mays
atggagagagaaccgcgggagctgagggagaaagaagctgggcgcggcgctgggagatccggtgagccgagagggaggctgcgcgccgtgggagctggagcagcgcgcgacacagagaaccggagggcgcgcaggctgggagctcggccgccatgggcaagtgcagggaagaacgcgacgcgccagggaagagcagaggtcgggggcgagctcggcacggcgcgtgcgcaagaagcagctcggcacggcgcggctggggaagaagacgcgctggggaagagagcggcgatgggaaccgggcgcgggaggagcagaggccgaggagcggcgggagacgaccaccttcacgaaattggctgcgcggttggccttgctggagtcggcgagcgcgttcttgcgctgcggagtaatatagtggcgaagccgcgcgacgagattgttacaaactcaaataactcctccccctcactcccaaaaccccaaactcctctgggctcttgtcctccctccctctccagccgccgccgccgccgccgccgccgcccagagccgagcatgccgggtgccttccactccctcctccttcccctcaaacggaagcgcaaatccaaacgccgcagcagacgcggtcaccgaaaggagaacaaccccaacatatccaagaaccacctcgccgccgctggagacccgtccttccacctgaaaagctgcacctctgtctcccccagagacatcggactccttgtccagccgctcggcaacctcttcctctccgccaccccgcgagctaacctccgggacgcggggctcggcgcgctccggcctcttccagacgacctgctcctcgacgtccttggcttgctccccgcgcgcgacctcgcggcgctctcggtggcgtccaaggcgctctacgtcgtcgcctcccacgacccgctctggcggaccctcgtcctcgacgagctcggcggcgccttcgacttcgccggatcctggcgcgccacctacatcgccgccgcctccggcggccaggcctacctcatccctcctcgcgctctgagaatcaagggcttctactccgactacctcttccagagctggctctgtgccaacatggagatgcggcacgagtggcttgcgcgcgacaacatcgagcgccgccgcggcttgtcggtggagcagttcattgccgaggtcgaggagcccaacaggccggtgttgctagaggggtgcattgatatgtggccggcgttacagaaatggaacagagactacctgctggagatctcagcgggtaaggagttcgcggtcgggccagtgagcatgccattagataggtacttccggtatgctgacaatgtccaggaggagaggccattgtacttgttcgatgcgaagtttgctgagagagtaccagagatggggagggactatgaggttccggtgtacttcagggaggacctgtttagtgttcttgggaaggagaggccggattacagatgggttatcattggaccagctgggtctggttcatcgttccatgttgatccgaactcgacatccgcatggaatgctataatcaagggggctaagaagtgggtgatgttcccaccagaggttgtgccgcctggtgtccacccgagtgctgatggagcagaggtcaccagccctgtgtctatcatggagtggttcatgaacttctatggggcttgtgagacctgggaaaagaggcctatcgagtgtgtgtgccgatctggggaggtggttttcgtgcctaatggatggtggcatttggtgatcaatcttgaggagtcaattgccattacccagaattatgtgagcaggaggaatttgttgaacgttattgatttcctcaagaagcccaacgcaagtgagcttgtctctgggactgaagacagagtgaatctgcacaacaagttccgtggtgccatcgaggcagctcacccgggcatgatcaagcggctcgagcttgaggctcagcagaaggccgctgctcggaagaagaaagcgtcgttctgggattctgctgtcgatgccaagaatggaggattcaagttctccttctgagtttcacaacaaccagtctgcagtaccttcccggtggacaatgatcatgggccctctgattggcacggcgctcaccgggaatccagctaactgattgtctgatttagtttgtacaatgagctgctacattaatgtcatcaaaatttttgatataattcagcgcaagaacgattgcattgtcgttgtaccgtgcagcctgtatccttgtacaatttagtgtgtttttgaagaatttagctgaaaacaaatatactgtttggcataacatgtaacttagtatctaagtactaagtgatgtaatattgcaattgataattggtttcaccaggaaaagagaaggaaatgttgcatttgccttctatcagaagcgcactgaaccatgtacacgcagcttcagacactttgtttaacattttgtgctggactctgaatgtgtagccaattactctctctgttttttttgacgataaatattcgagaatggaggtagtactatataaatccaaatgaattagttgacaacaaatattctagatggagatagtactatataaacccagcac

SEQ ID NO: 124481 - DNA, 1684 bp, Zea Mays
caaacatggcgtcttcgtcgctgccggaggagctcgtcgaggagatcctggtgcgccttcctcaagacgatcctgtgcacctggtccgcgccagcctcgtctgtaagtcgtggcgccgcgtcctctccgaccaggactgcttcctgcgccgctgccgcggattccacggagcggcgccgccgctgctcggctacttcgccatcaaccgctgctacggcaacgacgccacgcagttcgtccccgcgacctccaccgcctcgcccgtccgcgtgcccgcggtggaccacagacgacgctggttcctccccgtggactgccgtcacggccgcgtgctgatccactacgaggacagggacaggtcgaccaagagggggttcgtcgtctgggaccccctcaccggcagccggcagcacctgggcatgcccagcgctagctacccgtcccactcgtgccgctacacctcctacaccggggccgtggtgtgtgccaaggccggctgcgacgacgaccacctcgactgccaggccggtccgttccgcgtggtctgcgtagagaccaacctcctgaagcctgtattcgcgtgcgcgaccagctactcgtcagtgaccggcgcgtggagtgctcccgtgcccaaccatgacagccacgacttcaactactactgcttgagaagctatggcaagcagagccttcttgtcggcgatgccgtctacttcctcttccaggatgaccaaagcatcctcaggtacgacctgggtaggcaccggttgtctgagatcggcatgccgccagctatgtgcaacacagctctcatgaagacggagggcggggggctagggcttgccgccctacccaacaataatcgcatccatatatggtcacgacatgatgaggatggatgctgggtggagcacagggttgtcgagcttgagacgttgctgccaagacgcatgcgaaacaggtaccatcgagtggttggctccgccgagggcacaaacactgtcttcgttaacgtatgtaatacaatcttcatgctcgacgtcaagtcaaacaaggtgagaaagtttagcaaaagaaagagcggacagttcgagtacatcttaccttacctgagattctacgccccaagctaagatcttcctaaggttttgttcaaccccatgtggatcgaaggagattgaggggattaaatccctttctattaaattttaattagcaagggatctaatcttctctaattagcttcaatccacttctatcagaacatgccctaaattaagggtgaactgccaccgcgaggaagatgcaatggtccatgatcctgctgttgtaggatgcttgagcacgaaataaaaggataggttttatggccaatggatatgttcagttttagttgtggttccaggaaataaattaaataaagtgtttgttgatgtagagatgattttattttgtcttttgtgttcagctatatatgcagcagttcttgtgtaaccaatgaccagtatttatggtatgtttacctcttcagtacttcagttggaatctagacaatgaatctatctttttttatagaacattgagtatttcttgtctgttgggattttataactacaataaattcgtttatggtgtcatacagtttcaaatggggctttatttaaattaaatgaaaaaaagaaaa

SEQ ID NO: 124482 - DNA, 2576 bp, Zea Mays
agcaatagggcgggagcttggacatcggtccggtggcgcaatagggaggagaaaggggcgccgttggaagccgccttgaaaggaggaaaaacagcgagcgctcgggagtatgtacgggccacttggggtgtggtgccgaacgtaagcaggcccacgtgcaatcagtggtgccagtggactggatacatagcacatgcatgcaaataagcgtttatagacagactcggagtattttatttaaatggagcaacgacaacgatccccacacatgttcatcagctacagctagcccttgagagctctctctcttttttttttttgagagcagatagatgggtgattccactagtacgggcttcgcggcggccctggagctgtggcaagaacaccagctgagcatcctcgtcgtcgcgagcctcgccatccagtggttcctcttcgtcttcgccccgcttcgacagcatcggatcccaggtctgctcaggctctccatctggctggcctacctgggcagcgacgccgtggccatctacgccctcgccaccctcttcaactcccaccggtgcgacaccgacaccggccgccccggcgtggagctgctgtgggcgccaatcctgctggtgcacctgggcggccaggacagcatcacggcctacaacatcgaagacaacgagctatggcggcggcatgtcgtaacagcggtgtctcaggtcgccgctgcgatctatgtgttcgtcaaggcgtggccgaaatccctggtgactactgctcaccaagcagttaaccaagccacccttgacaaggtaaatgccatccaggcccataacgaagagatggaggcttacgggagaatcttcacaccagcacttcttctgttcttctgcgggatcaccaaatgcgtgttcaagccctgggacctcaagagagtcagcgtcaacagcctcgtcgactcttcatcgggctcggaagagaagggcggcgagagtgagatgaattcgcttcaggggtacgtgggagctgcgacacggtatttcgagtcccgcggccatggcagaggagcaggactgcaggaggatgacggcgacgacgacacttgtaaagcaggggaagtttggaagccctacaacctatgcgtggacctggcgcccccttactccggccggctgagctgcctgaaacacctggcgcgcagcccagcggacgaagcccatcgcctggtgaaatccagcctctccgcgacgttccaccagctctacaccaaggaatcgctgaagctgcacgacatctcgcatttcgtcttcacgaacaacgccgccttgaaccgctggaaggtgctcacctcggctcgagggctccggacggtagccgcggccacgctgctcggtgcgatcgcggtgttccactacggcggcggcgccgccgaccaggtcaaggccgacgtcaccgtcacgtacgcgctgctgtggtctgcgtttgtgatggagtacgtcttgcccaccgtgatccaccatacgttcggcagggtacagcggctgttcaccgggcaccggacgtggccggaccaggtcgcgcagtacaacctcatggggtacgtggcacgcagaaggaagcactcgtggctcatggaggtggtaggctggctcggctgcagggacctggtcgaccagctatggaccatggacccgtgcaagggcgcttcgtccagggagatcaccggccttgtccacggccacgtcgccggagggtggatggagggtcacatagccggcgcggactcgttccgggcgttcaacgactaccggggacagtggactctcaacaacagcagcgtgccatccatggtactgatgagcgtgtcgaggccgttcgacgagagcgtcctcgtctggcacctcgccaccgacttctgcttccacctcctccaggaggacccgtccccctccagcgccaccgcccgccgttgcagggagatgtccaactacatggcgtacctcctcttcgtcaagccggagatgctgatgcccggtgcccgacgcagcctgttcagggacacctgcggcgagctcgtgggcctgctcggggaggaccgtcctggcgcgccgcgggcacggggaaagagaggcctcgcgcacaaggtcgtccagctgctcaagagggacgacggcggcggcgtcctgggctcagcaggcgtcggcgtcgttcgccgggcttggtgcgtagccgaggatctcatggactcgcacaggggcagcgaggagaagatgtgggccgtgatccagggcgtgtgggtggagatgctctgcttctcggccagcaggtgcaaaggctacctgcacgccaaaggcttgggaacgggcggggagtacctgtcctacgtatggctcctgctcttgtacatggggatggagaccttggcggagaagatgcagaggacggagctgtatgagggccccactgcagcagcgtcgtccatcagtggccacaatgtttgataccgctcggtctaactctttggaaggagtctaatcctctcaagtttagataaattttaagataataatgtttattgttagata

SEQ ID NO: 124483 - DNA, 304 bp, Zea Mays
ctggaattgtgccaagaaaaccagctgcgcgtcctcgtcgtagcgagcctcgccatctggctgaggttctccatctggctggcctacctgggcagcgacgccgtgcccatctacgccctcgccaccctcttcaactcccaccggtgcgacaccggcagcagcagccgtgccggcgtggagttcctgtgggcgtcaatcatgttggtgcacctgggcggccaggacagcatcacggcctacaacatcgaagacaacgagctatggcgacggcatgtctttacagcggtgtctcaggtaataagat

SEQ ID NO: 124484 - DNA, 1972 bp, Zea Mays
acgacggcacgagcagacggcgagacccgctgggaaggctttcccatcctagttgtcggcgcctcctccacatcgagtgcgctagggttttctctgcccctcgcccgccgccgcagccgccgatggccgagcgctggcgctcgagggcgcggcgggacccagacctggacgaagatgcttccccgccgtcccggcagccgcgccacagcgggggcgacgaggaggacgatgagctggggaacgaggatctcagcctggagatcgtcgcgcgcgcgcagcggaagcggcgcggggaatcagccggcggagtgcccgtgttcgccgaccttctttcggtgtcctccgccgacgaggagggcgccgtggtggagctcgatgaggcggatgagccccggaggaagcagaagaagaagcagcgccggaagcaaaggaagaagcatcggaaggagactacagaggctgcggcgggggccgccgtagaggtggatgagaatgcggtttgtagcaccgaggaggggcccattgggacagcagaatcggtgttaactgaaaatggggctgatgcccctgcatctgataatatggttctgcggaagctccttcgcataccgagatactttgatcctggggaaacactgttggagacttgttttaattgtagcgaggaagggcatgtagctgcaaactgtccattggaaaagcgaaagaagccttgctttgtttgtgggttgtttgggcacaatgcaaagcagtgcacgcagggtcaagactgttttatctgtaaaaaaggaggccatatggcaaaggactgccctgataagcacaggaggaatgatcatcaatccacattatgtttaaaatgtggagaaataggtcatgatatgtttggatgtaccaatgattacccaccagatgatatcgagaaaataagatgctacgtgtgtaaccagaagggccatctatgttgttccgacttctctgacgattgtccgaaacaaattagctgttataattgtgcccaatctggtcattctggtctgggatgtgccaaacgcagggaaaccagtgctgtcacaactccaaccttatgcttcaaatgtggcgaggaaggtcactttgcacgtggctgcacaaagaacgctaagtccgatcggtcgaaaggcaagtcatcgtcgcatattcagaggaaggagaaatggaaaaaggcttccagtagtgctagatcagctccttatgacgcccgaaaaacaagcaaaaggaaaagcccccatctcgaggaaagagtgggcacacctcgtcataaacccaaatcgaggggtggctggactggtggagatgatctaccattgaagaagtacaaatccaatgggtggggctctccatctactcccaagaagtcttacgcaaaccaccagttcttgtctggttgcgactacctcactccccagccttcacgaaggcacaactaccatggtaccatgtcttcaccgaatcaccaattcttgtctggctgtgactacttcactcccgagtcttcacgagggcacagccatggtaccatgtcaccgaactggaattattcacccagcgccaggaagcatgggttctcgtcatcaagattcgccgcggctgccgccagcaacacccatgtccggttcgggagaaattagctggatgcacgcgcctgatattgttgttcgttttagccatagatagataccaattatctcctggggatgaactctacctgtcgtcggttcatgccctttcgatagttgtttgttctgagattattatatatgtaatcgtggttcaaactatttattatttttttttactgtcttccatggcatggcgttgatgccttttgcaaaaacggcaactgaaagtctgtaactgtgctttgagcctttccctgatgtttgagtgggcagtgcatcactgatgcggcattacatgcaaatgggtaact

SEQ ID NO: 124485 - DNA, 661 bp, Zea Mays
atggctagcccatcttctggcaacaatggcaactatgatccaaagacagaaaaaacaaggaaggctagctcaaatgattcaggttggaagtatggttattgggcaaatttgaaaaatagggatcaagtgacatgcaacctttgtgacaccacagtttctagagggataaaaaggctaaagcagcatctagaaggtggctatgaagatacaaagatatgttcaaagaccactactgcaattataaaggagatgagggattattggaaatccaatagaaggaaaagagctattttcctagatgataatgagcagcaagaggaggaggaggatgtaatggtggtggatgcaacagctgaatctgttcaagttcaacaagatgcgcctatagaatcccaaggctctaaggtacaaccaagtccagggactgcagccaatcaaagacgtgcaacatatctgtataagactccaacatcaatcaagaccaaggcaaatcaagcaagcaagcaaaactcaattgtggagatgcttcggaaatcacctaaagatgtagttgatgaaaggcgtaaagggtgttctcaacccacaattccagccaagatgaagtccaaagaggagaaggattatgtggatatgcaatgggctttgtggttttatgaatgcg

SEQ ID NO: 124486 - DNA, 2215 bp, Zea Mays
aatcatagacaagctacttatacaatatatatatggtacgtccctttctactaccagtaccagctgctatactatactgctcccagttcttcctgccctgctgtgctggttcccaatcctcacactgattgtggccttccagttcttgtggtctctcaaccagcatctgatacccaattcctcgcacaaacctgccacacgcaatgtccaagaccgagagcaggaagctgtcggacgactatgaggtcgcggaggtcctcggccgaggcggattctcgatcgtgaggcggggagtgagcaagtcagaggggaaggcggctcaacaggtcgccataaagaccctgcgaaggctgggcccggccaccacgaccggcgggagcacgctgccgccgcagcaaggctcaaataagggcggcggcctggttccgacgtggaagcaggtgtcgtccatctccgacgcgctgctcaccaacgagatcctcgtgatgcggcggatcgtggaggccgtggcgccgcaccccaacgtcatcgcgctgcacgacgtgtacgaggacgcgcgcggcgtgcacctggtcctggagctctgctcgggcggcgagctgttcgaccggatcgtggggcgcgaccgccactactcggagttcgacgcggcgggcgtcgtccgccagatcgcgcgcgggctgcaggcgctccacggcgcgggcgtcgtgcaccgggacctcaagcccgagaactgcctcttcgccgacaggggcgaggcctccacgctcaagatcatggatttcggcctcagctccgtcgaggacttcagcgaccccgtcgtcaccctgttcggctcgatcgactacgtctcgccggaggccctctcgaggcaggatgtctcggctgccagcgacatgtggtctgttggggtgattctgtatatcctcttgtccggatgcccgccgttccatgcaccaactaatcgagagaagcagcagaggatactgcagggagagttcagtttccaggaccatacatggaagacaatctcttcatcagccaaagaactgatctccagtcttctctctgttgagccttacaagaggccaacagcaagtgacctgctggggcatccttgggtgataggggactgcgcgaagcaggacctcatggacgcggaggtcgtgacgaagctgcagaggttcaacgccagaaggaagctgcgggcggcggcgatcgccagcgtgctcagcagcaaggtggcgctgcggacgaagcggctgcggaacctgctgggacggcatgacctgagctccgaggagctcgacaacctgcgggctcactttgcacggatatgcgccgacggcgagaacgcgacgctggcggagttcgagcaggtgctgagggcgatgaggctggaggcgctggtcccgctggcgccgcgcgtgttcgacctgttcgacaacaaccgcgacggcacggtggacatgagggagatcctgtgcgggctgtccagcctccgcaactcccgcggcgacgacgcgctccggctctgcttccagatgtacgacgccgaccgctccgggtgcataagcaaggacgagctggcgtcgatgctgcgagcgctgcccgaggagtgccttccgggcgacatcacggagcccgggaagctggacgaggtgttcgacgagatggacgccaacggcgacggcaaggtgagcttcgaggagttcaaggcggccatgcagaaggacagcgccctccaggacgtcgtcctctcgtccctccggccgccgccgccgccatagctagacggggagagagattccaactcgttcaacttcattcccacgagaacgcaccattgattacagtaccgttcgaatcatttaatcagtctccggcatgtgccgttgtccgatccggccggctagctgttggaaactacgggtcgtgggaaagcctcgatggatcctgctagatatggctgtgctgttatgtgtttctggatcctgctagattagctggctgtgttgttatgggtggcggccacagatgttttttttacatatggctagtttagaagttacaaaatcgaaaggggttcgagaggctaaaatcacttccttattcaactttgaatggaggagattttagtccctccaattcacttcggtttttgtactcctaaactagcttttaaggtagaaaaataaacgtgtcaagagtggtg

SEQ ID NO: 124487 - DNA, 2680 bp, Zea Mays
agctagcggccagccatgagcttcgcagcatccgtgcagtggtgggaggactggcagctgcggctgctcgtgctggccagcctcttcttccagtactttctcttcgtcgccgccgtcgtccgcaagctccgcgtcccgccctggttccgggcgctcatctggctggcctaccacggcggcgacgtcgtggccatctacgccctggccacgctcttcgaccgccacaaggtgctggccgccgcgcaccccgcgctcgcccacctcgacacgctctgggcgcccgtcttgctgctgcacctcggcggccaggacggcatcaccgcctatagcatcgaggacaacgagacctggagatggcactttctgctctcggtgtctcagatcaccgtggccatctacgttttccgcaagtcatggtggtcaggtgacacgatcctgctgcgagcagcgatcctgctcttcgtccccggcatccttaagtgcttggagaagccatgggctctcaagaacgcgaccgtgatgagcatcatgaactgctccgacccacggctggaactaaccctcgacgaagacgacacggcgcccaagggcatccactcgcaggagcagtacgtgcgggccgctgccgagtccgtcgcccagttcgagtccctggatcaggagctcttcgaggacgagttggcggaccatccgtaccacctcttcgtggacctcggccacccctactccatccggctcatcaacctgcggctcgtggcgccgcgcctcgcgagggccaacgtgcacggtctggtgcgctcgtccctgtccaaggcgttcgaccgcctctacaccaagcacaaggcgagcttcggcggcctgctgcgcgccgccgtcgtgctgctgacgttcgcggacatcgggctgttccagaggagccaccgcggcgtgtacgagcgcgccgacgtcgtcgtcacctacgtgctgctctgctgcaccgccgcgctggagttcgtctcggcgtgcctggtgctgggctcgggccttcccaagccagacgaccagctcgcgcagtacaacctcgtcggctacctcgcccgcaacgagaagcacccgtggctctgggcgctcgcccgcctgctggggggcaagctccagctggaccggctctggtgcacggcgccgcccgcgccgtccctcggcatcaccaggctcgtctacgaccacgtcgccagcgggtggaaggactacataccaaaatctgtgcacgacgaactcgccgccggcggcggtcggaagatgaccagcgccgtggaagcctaccggaggttcaacgacagccgcggccagcggacgctggagagggaaggatgcggcggccggagggccatcgaggagagcctgcggatgcccttcgacgagagcgtcctgctctggcacctcgccacggagttctgctacttcgaccacgtggacaccggccacgacgccacccggcacagcagggcggtgtccaactacatggcgtatctgctgctcgtcaagccggagatgctgatccccggtgcaaggcgcgggctctttccgtgccgcccacgcggagctccggaaaatgctcaagccgccgccggaggacgagatagcggtagagctcgagccgacggagaagaaggcgcctccgccgagggccgagaacgagatggtgcggaaggtgatgcagaaggtgaagagcaccatcggtctcggctcggaaggccttgtccacaaagcacgggcggtcgcccacgagctcatggaatttgccgaggagaagagacgggagttcgtccaagagcagaaggagatgggggagaggaagaagatcatcgtgcaagccttgcgtgaggccaagcagaaggcaaacgaattcaacaccaatccgatggaaggtttcaaagagaaggcaaaccggttcatcaacgaggtgaaagacaagaagaaaaccaaggacgaggagaagttcacggatctcttgggagatgcaaggaacaaggctgaggaactcatcaaggtgatcaaagacgaggtaaaaaacgcgggcaagcgcacggatcaaaagcgcgaggaggaaaaggataagaagatgcttaacgttaacgaattatccgagagtgtagggaaggccatcaagcatgccgaagaggaggagaggaagctcagggatctcatggagcggaagctcataaccaacgaggaggagctgctcgtgatccgaagcagggaggaggcggacaacaagatgtgggcggtgatccaaggcgtgtgggtggagatgctctgcttctccgccggcaggtgccgcgggtacctgcacgccagtagcctgggcagcggcggcgagtacctctcctacgtctggctcctcctgtcctacatgggcatggagaccatgccggagcggacgcagaggcccgagctgcccgtggtcggggacaccgggtctctggtgaagacgcccacggaggacgatatgaacgacgagccgacggcacagacgacgacaacacccgccgccacaaccacgaagcaacagggaacgtcacaggcaggcggcacaagcgccgatgctgccgtgccggcgcaggaacagcaacgtatggcggcgaggaccgttccagtgatgtcgatgaccgcggtggtgcccgtcggtgatgacatggtt

SEQ ID NO: 124488 - DNA, 3654 bp, Zea Mays
gttgcgctctacttttcatagaatatgatcagttgcaacagggaacaggcgttgagggccagggaaattgctctaaagaagatagaaagcaaagatttttttggtgcccagaagactgtgcttaaagctcaaaagctttttccagagctggagaatgtgtctcagctgttaaccatctgcagtgtgcactgtgcagcagagttaagggtgaatggagagatggacttctatggagtccttcaagtggaggaaggtgctgatgaagccttgataaaaaagcagtaccgcaagctcgcagtttcacttcaccctgataaaaattgttttgtgggtgctgaggcagctttcaagttgattgctgaagcttattctgtactatgtgatcctgcaaagcgaaatgattatgacctgaaaaggagcaatgtatttagaaatgtgccaaagctagccaaacagcaaccatcaaagtggactaattcacatagacagagcatgcctggatttagagaaacattttggactgtatgcccaaattgtcggatccaataccagtactacagcagtatcctgaacatcatggtccactgtctgaactgtaaaaggagttttattgcatacaggctgaatcaacagcccatggccacttcatcaagtgtacccaacaactcccaagttcctgcaaacatgtttgtgaataaacagcgcgacactcccaatcaacaaggtcactctgtgaagccttcatgtgtcggtagaggcaccaatgtcaagccaaatggttaccaagaccttgttcacatgtttcgaaatcaacaacatcgcgttcacagtcaaaatggtcatcctgtgaagccttctgcaggaagagacacagatgcaaagctgagaatgaatgtggcccaccgtgatgaatacatgaaagggaaaggtaatgacccggagatgtcgagggggaaatttcaattttcaacgctgaatgaagataaattttctgtcccaatgggaaatggggacatgcaaggaaggtcatcaatttcagctcttgctgatccaaacattattgacacacagaaatcagttcaggaagatgcgtctgcagtgccagatgctatggatctgcttggctctgcaaggccttctgcaggttggaaaacatatggagattcaaggataaatgttgcaggtaaaaaattgatgctagatcatgttgatctaagtattattggcagaagaaacttgcaaagacaagatgcatctacagtgccttctagtgccggatcctctggtacccaacagtcagttaagaggaaaacatatgctgatggcaatatttgcctaaacacggataccaacaagagaccaatgaagaataaatgtccatctgatgttaacatgagttgtaaacaagtatgtgatgatggtgtcaccaatgctggcatacaattagatccacttcatttgtccagcaatgtagacacccaccacaagccaaaagttactgatcatcatgcaaatatcaaggaaaaagctactgaaactgatagtgataaggacaatatcatggaagaagctcctcaaactgttagtgaaaagaagccttcctactctgagtgtgtcaccttacctgatctagatttcttcaattttgagaaggttaaggatatcaatgtgtttgaagttggtcagatatgggccctctatgataaccttgatggcatgccaagatattatgctcgtataaagcattttgatgcctcgaacttcgaaatacattcaacttggctggagtatgttgcaatggatgaagatgagaagtggactgatgaagaactgcctactgcttgtggaaactttcgccttggaaaaggaaccgatatattagaaaaggaaatgttttctcacattgctacttggacgaaaggtaaaaagaggaagtcgtatgtcatatatcctaacaagggtgaggtatgggctctttacaaggggtggagcatggaatggtgctcagatgcagataatcatagatcatatgagtatgaggttgtggaagtcgtgtcaagtatgtcagccaatggtggcgcgaccgttgtcccactggtcaggattaacggatttgttagtttatttgcaacagctaaggacaaaccttcatttgtgataccatcaagtgagctgctccggttttctcacagcattcctttttataggactaaaggaaatgaaaaggttggtgttccaagaggatttctggaactggacaatgcatgtctccctgctgacctggatgcagcattcccttctcttactcttgattcttacatgtctctcggcaagaacgaaagcagcacatttgttgatgtgaccactgacaatacaagttgtaggatggatctgggagatgatcaaattgctcaaaaagagaatgaccacccaatatctacagacaatcccaaagatatgtgcccggaacaaaatacacccttaaaggaaaccactaattatgccaaagagtctggtgattgctctcttcaaagcagcctctcccccatcatatacacatatcctgattctgatttccacagatttgaagaaaatcgctcctgcgagaagtttgaacgtggacaagtatgggccctgtacaacaacattgataaactccccaagttctatgcctgggtaagaaaagtcagggaagagccgtttagagtcgaggtgatctggctcgaggcctgccccgaacaggaccaggagaaacagtggctggagcaggacatacccatcagctgcgggacattcaagatccgaaaatggagagccgagtacggcacaaacgacaccttctctcatcaagtaaatgccagagaaaccggcgcaaagtgggcgctcgaaatcctcccgcaggtcggcgacatctgggccgtctacatgaactgggcacctgactgggtcccgtgcggtgctgacgcctgcgagttcgctatctgcgaggtcgtcgagcgcaccgctgaagctagcacaaagctcgccttcctggcccaagtcggcggctaccggtccgtgttcaggcctgacgagcagaggggagtgttggaggtgcctgccacggagaggacgaggttctcccaccagataccttatttccggctggcgggagagggaggtggtgggctccgtggcttctacgagcttgaccctgcttccgtccccgacgccttcctgtatggggacacctgatgatgtggactggcagacggtgaagcaggtttcctagatggttgaaccgaaccctgagtctgggtagcattatgtctcaagtgttaggctgtcactttatgtctcactggaaccgtgcggatgtagatacggaggtgcctggggtgggtgggttatcgtcctgtacacactgtggaaaaggtctgttgtgctggttacagagcatggctaccgatcaagttaattctggattaccagggtcacgacaatgtttaacgttagcttatgatatactagtgcggaggtggagctgtaccccgcaccacttgcaccgtggaggcgtggactatgcttttaccatgcaattttggagctgaaacctggacaactcaagtttaatactgctatatgtatggagtcgtctgttacctggacagttgg

SEQ ID NO: 124489 - DNA, 2412 bp, Zea Mays
ggctttccttccctttctctcccaactcccaacgattctagaacaccttggtggcctccgcgtctcgccgcctccccggactccgcatccagccccggcactcgcactcccaaagcagcggacactagtagggtttaaactttccccccgatccgcctcgcctccggcgctgtcgcctgccgccagaccaacgcccccacacccagccggagacgacgatggtggggctcggctcgatggcgggctatgggatccagtcgatgctcaaggaaggccaccgccacctctccgggctcgaggaggccgtgctcaagaacatcgacgcctgccgcgagctctccgccatcacgcgcacatccctgggccccaacggaatgaacaagatggttatcaatcacttggacaagctgtttgtcacaaacgatgctgccaccatcgtgaatgagcttgaggttcagcacccggctgctaaaatcctggtactggctgccaaggctcaacaggaggagattggggatggagccaatctcaccatatcgtttgctggtgaactgcttgagaaggctgaggagctcatcaggatgggcttgcatccgagtgagatcatcattggctacaccaaagccatcaacaagacaattgaaattttagaggatcttgttgagaaaggctcagagaacatggacgtaagaaacaaggaggatgttgtgttgaggatgagatctgctgtcgcaagcaagcagtttggccaggaggatatgctgtgccctcttgtggctgatgcctgcattcaagtttgccccaaaaatcctgcaaactttaatgttgacaatgttagagtggctaagctacttggaggtggtttgcacaattcttctgtggtccgtgggatggttctgaaaaatgatgctgttggtagcatcaaaagggcggagaaggcaaagattgtcgtatttgctggtggtgtcgacacctcggcaactgaaacaaagggaaccgtgttgatccattccgctgagcagctagaaaattatgctaagactgaggaagctaaggtggaggagcttatcaaagctgtcgctgactctggtgccaaggttattgtcagtggagctgcagtgggtgacatggcacttcatttctgtgaacgttataagctgatggttctgaaaatcagctcgaagtttgaactaagaaggttctgccgtactactggggctgttgcaattttgaaacttagccaacccaatgcggacgaactaggatacgcagattctgtttctgtagaagaaattggtggtactcgggttactgtcgtcaagaacgaagatggtggaaattcagtggctactgttgtcctgagaggcagtactgacagtatactagatgatcttgaaagagctgttgatgatggcgtcaatacatacaggtcaatgtgcagggacagtaggataattcctggtgctgctgcaacagaagttgagctggcaaagagattgaaggagttctctttgaaggaaacagggttggaccagtatgccattgcgaaatttgctgaaagctttgaaatggttccaagaaccctggcagaaaatgctggacttagcgcaatggagataatatcctctctttatgctgagcatgctagtggcaatgcgaaagttggcattgatctggaggaaggcgcctgcaaggacatctcgactttaaaaatatgggacctctatgtcacaaagttttttgccctaaaatactctgccgatgctgcttgcacggtgctgcgggttgaccagatcattatggcaaagccggcaggaggtccaagaagagatgcccagcctggtggcgggatggacgaggattagtttgattatagttgttttctttgtatcacgtatgtgaggtttcagagcagagatcatactttatcttggcttttggttctgtagaaggtttgggtgcctggagttcacttttggaaggtctgcacggttgcgcggatatcacataggcaatttgtatgttttttcctggtgtattgcggtgcggatgtatcaaatgattcattacaggggccgttccgtcagttcatcacaccaactgagctcttgtaatgtctcgtttggttgggttgagtactaaagattagtcatttcattttagtccttaaattgccttaaattgccaagcggagagactaaaataaggactaaactgtttgtcttagtctggagtaactaaaagagactaaacaatattaattccaccttttgtcatcttttcttttatgtcagttatattgatggcaagagaatgctaagggtattttagttctgttatgatttatttaatgagttttaaatacgtaggcactaaactttagttttttaattaaattttagtccctgtatt

SEQ ID NO: 124490 - DNA, 108 bp, Zea Mays
cggaaatggtaattttcggatatcggatatcgttttcgaaactttaccgaaatttagggctaaacaaaatggaaatggttaccaaaaatacgaaaataaaatcgacag

SEQ ID NO: 124491 - DNA, 103 bp, Zea Mays
tatactccatttctagtgaagtgctttatagtcaagggaaatcaactagagaaaggtagaaacacatacctcagggatttagatactagaagcagataatgtg

SEQ ID NO: 124492 - DNA, 1752 bp, Zea Mays
gacgaatccaatcctcagtgggacttgggcagaaggtgtattgtatctggcaggttctaagcatcgaacacaaatctccattaaatgatgaatttaaatacagacacatacataagcagaacagtggttccaaatgacgaatgcctttaaaccatcgctactcaaagaaccaaaacggccagagccgcagcagcagcagccaccacccccaagaaccggccgctggccgccctgcacgcgccgctcgtgccagcgccgccgttgtccccggcgccgtcgccgggctcgaccccgccggtgcccgagaacgccgtgcccgccggcggcggcgcgaggacgcggcccttgggcgccggcggctggtgcagtagcgacggcggcaggccccggccgtgctcgaccttgatctcgaaccgcatcccctgctggcactgcgcgcccccgtcggcctcggagaagaagtagttggcgccctcggcggtgagcgccaccgcgatggtgctgttctgctcgaggccgccgcccccgccgccgccgccgccgtagatggacgtcgtctccgccaggtcgtcgctggcgtcgcagagcccgtatgtcgtggcgttggtggtctgcaccaccgacgagttgtcgttcgtcttgaaaactggtagaaccgggaccgatggtcaggagacgacattcagatcactagtttgaatctagtcagcgacgggttttctcagcaataatatgaaatgacttgaggttttgatgatctctcagtttcaaggacgtgctggtggcgctagtactactgctctgctcctgtggcaacagagcttccggctggtacaactgagatctggatctgagttctagtttccgtatcgctagctaccccccaacctatctatcctctctctggtttagtttccatgctgtctaaccaccgacagacattgctggatggtacggaatcatcaagacaccacgtttgaatctcggacgagaacgtaaactaatctcaaaactagttgtaggaatggtgattaagtggcgaggcgaatctattaatgctaattagactatggttagctacgggcagagcagtgatgggcgaggagaggcaagtaggtagtaagaaagaagggagacgtactgaggtagtcaccgaggtagaaggtctcgccggcggcccagtcggagtagttcccggacgaggcgttggtgttggcgtcgaagaaccacccgtcgccgccgccaacggtgtggttcctgtacggcggcgcgtcgtccgccgccggcgaggcagacgccgcccgggcgcccggcaggcccgccaccaggacggcggccacgatggccgctgccgcggccgtcgggagcagccgcgccatggatctcgccggcgggctcgagcgcagcgtgtcggtggagtggagcttggctgtgtcgtgctggtgcgctcttgctctgctgtgctgttgttggaatggaacgctggctgatccagggttttgtatgtacgctgcacatgctgccgcgtgcatcattaattttatataatcgcggtggcatggcaaggtgcggtgtgcgacagtttaataatcgggattaacgatacgagctgcttggagaaactgtgtgtgtgccagtaattgtgacgcgcacccagctccagccgcgtcaacgagagggacgcggcaccgcctgccgcccgtagccgttgggcggaagtgtcggtcgtctccactctccagtgcagtgcag

SEQ ID NO: 124493 - DNA, 2065 bp, Zea Mays
gaggctgttctcttcacgtgtctatgacatctggtcctactcgtcaaagtcgatctatctcacatcgcatgtactccatgtagccaccaagtccagccctttttccccaaaatcgacttccaatcccgacgaaaccctagaaatcctccggcatgatgtccgccgccaatccgcaggtcaagtccacgccgctgcctccgcccgcggcgcccaccgcggcgtcgcagaacccgcaggtcgctgcctccaaggcgtcgtcctcttcgacgtccgccgccgaccccaacccaaacaagcggaccaacccgggcaacgccgctgccgcctccgcgcccccagagcctaccccgagcgtcaacggggaggccagccgctcgcctctggtcccctcgccgctccctcaccctcacgagcagcaccaccctccgcccggcgcgtcgcctcttctgccgcccctgcccccgtcgcggccgctgctcaccgtagccgcggtggaggcggtgatagcagccatcccgccgccaccgcggtacgggctggaggacctcgaccgccgcaccgtcgcgctctctgacggcaccgtgcgcacctacttcgctctcccgcgcgagccgccgccgcagctccgccagccgccgccgccgatacccgcgcatctcttagcgccgccaccgcccccactgcccctgccgcgcccgtccctcgagcggtgggctcctccgccacccatgcctacactcctgcccgctgccgggctgcttccgctgcctgttccgaaacggaagtgggaggatcaggtcaatggtgttgtgccctgggagtcctccgtaagcacgctgcagaagaagtctgaggcgcatgctgcgaagcagatgaaagtggagaagcaggtgaaggtggaggagacgggggtggacccgaaggtgctgaagagcgcctttcttaagatggtgaaactgatgaatgagaatgaagcggataagaagaattactgggccaatgggaagctttcccagctgaagtgccctgtatgtcaaagggattctgtagatttgcatgcactcctcaatcatgcatactatgcaaagaatcaggagcatcgtgctgatcacttagggtttcacaaagccttatgtgttcttatgggttggaattattccgtagcccctgttcacaaaaccgcttaccaagcattatcaactgtcgacgctgaagccaatcaaggagaccttatcttatggccaccaacagttataattgagaacacatacaagtcaaagaatgatggagaaaaggatgtcatgagtgataaagaggtggagagcaagcttagagaaatgggctttgccggtgtcaatgtgcagccgctccctgggaaggacgggcagaggtcggtgcaagctaagttctccgccagcctcgatggtctgaacaacgcgtcacggctcgccgagttgttcgagcgccaaggccacgggcgagcagcctgggctcgcgtccggagcgccgtccccacaggcggtgggggcgataacaaccccatgctggtcaaggtggatggcaagggagagcggacatgggtcctctacggttaccttgccacggcatgggacttgaatgtcctggaccctgagtcgaagcagaacgccactgtgaagagcaggaaggaactggatttagattaggacccacctgaatacctgatcctgctagagttgtgcatgttacctgacgagttatgaatccatggacagtgtgattcgagtgtttgtgttcacggcacagcatttaagttcgagaagaaattctttgctgaggaatcagcttcgtggataccgctgtgcaaataatgaccctctatatgtcagttattcgtagtgtattaatctactttggtagcagtgggctctgatgcaggggcgaggtgatctctcagtctgatttgagtatagcagcggtggatgcatatgctttacatcttcatgacctgagtaaccatcctaattggtaatgtgcttgacgttttaagtgcgcagggttctgcctcgagaaattctttgttgag

SEQ ID NO: 124494 - DNA, 615 bp, Zea Mays
ggacatcaatcggaaactgacatgtttatcaactcctgtatgtttctttttagaaatgggctttgccggtgtcaatgtgcagccgctccctgggaaggacgggcagaggtcggtgcaagctaagttctccgccagcctcgatggtctgaacaacgcgtcacggctcgccgagttgttcgagcgccaaggccacgggcgagcagcctgggctcgcgtccggagcgccgtccccacaggcggtgggggcgataacaaccccatgctggtcaaggtggatggcaagggagagcggacatgggtcctctacggttaccttgccacggcatgggacttgaatgtcctggaccctgagtcgaagcagaacgccactgtgaagagcaggaaggaactggatttagattaggacccacctgaatacctgatcctgctagagttgtgcatgttacctgacgagttatgaatccatggacagtgtgattcgagtgtttgtgttcacggcacagcatttaagttcgagaagaaattctttgctgaggaatcagcttcgtggataccgctgtgcaaataatgaccctctatatgtcagttattcgtagtgtattaatctactttggt

SEQ ID NO: 124495 - DNA, 1869 bp, Zea Mays
ccagccctttttccccaaaatcgacttccaatcccgacgaaaccctagaaatcctccggcatgatgtccgccgccaatccgcaggtcaagtccacgccgctgcctccgcccgcggcgcccaccgcggcgtcgcagaacccgcaggtcgctgcctccaaggcgtcgtcctcttcgacgtccgccgccgaccccaacccaaacaagcggaccaacccgggcaacgccgctgccgcctccgcgcccccagagcctaccccgagcgtcaacggggaggccagccgctcgcctctggtcccctcgccgctccctcaccctcacgagcagcaccaccctccgcccggcgcgtcgcctcttctgccgcccctgcccccgtcgcggccgctgctcaccgtagccgcggtggaggcggtgatagcagccatcccgccgccaccgcggtacgggctggaggacctcgaccgccgcaccgtcgcgctctctgacggcaccgtgcgcacctacttcgctctcccgcgcgagccgccgccgcagctccgccagccgccgccgccgatacccgcgcatctcttagcgccgccaccgcccccactgcccctgccgcgcccgtccctcgagcggtgggctcctccgccacccatgcctacactcctgcccgctgccgggctgcttccgctgcctgttccgaaacggaagtgggaggatcaggtcaatggtgttgtgccctgggagtcctccgtaagcacgctgcagaagaagtctgaggcgcatgctgcgaagcagatgaaagtggagaagcaggtgaaggtggaggagacgggggtggacccgaaggtgctgaagagcgcctttcttaagatggtgaaactgatgaatgagaatgaagcggataagaagaattactgggccaatgggaagctttcccagctgaagtgccctgtatgtcaaagggattctgtagatttgcatgcactcctcaatcatgcatactatgcaaagaatcaggagcatcgtgctgatcacttagggtttcacaaagccttatgtgttcttatgggttggaattattccgtagcccctgttcacaaaaccgcttaccaagcattatcaactgtcgacgctgaagccaatcaaggagaccttatcttatggccaccaacagttataattgagaacacatacaagtcaaagaatgatggagaaaaggatgtcatgagtgataaagaggtggagagcaagcttagaggtacttcttcaatgcttgctatgtcactgtgatcttggtagttctaaacttctgattgatggccctattaatcatcagaatttttgatgttttgccttctttttattcttttgggcggataagttagggggaaatcatttggtttgaccaaaacttgttattcggtttctttaaagatgccagtcttggctgacagttgaattccccagtattttggtcggttgcttatctatttacatagttcgttggacatgctgtaagaattatatatatattataaactagtacagggcggagggcgcgcgcctagcgtgcgtaaccacacgttttccagggaacagcgggcccacgtaggacacctgtcctccctacatagtgtagggagcaccactgctgaaattcagggtgctcggcatgctagctgctgcgaccgctgaaatgctggacacatgttattgcagggcacacgacatgctagctgttgatgcaagattggacagcaccaacatttaaaaggcgacgtggttgtccagttttgcccccgtcgtttatatatataaataaatgtagtcagtgtcctctatctccctcattttgtgtagctgaggatgctatggttctccttt

SEQ ID NO: 124496 - DNA, 2840 bp, Zea Mays
tgcgatttctccaacttccatctgattgtccgcgaccgcttcctcaccgcctccaccaaactccatcaagattccgcaactcgccgtcgcgatcttaagggagattgaaggaacctgcattgtgtgattgactgctgcctagcgttcggctgatcatcctgcttctgccatgggggaatcacagagtagcgaggacgcttccaggttcagagctttgggcaacggtgtctccggtgctgggcaggggagtgctggtgacaatgagctccacgatgggagcattgcatcgcaggctgtcagggcttatccgaatggtgggagatccttggtttctgacgttgggttgtttgacacgttgagggttggaagcaaccagtattttggtttctctcacagtgccagtggtaatccctatgatgagcagtccttgtcgtttgcttttgagggcatgggctttgattcacgcaaaactaattcacctaccagtcatcacaatgtaccactgacaaatggacactatccatctgaacgtgtggatggtactctgagccagcagcatgcacctgcaacacgccaatgtgattctttgggtctacagtttagtgtgcaacatgccatgcagaacaatgatgttgaacaccaggaacaatctcccaggtttccaccacagttggggactttctcaagaaaccctgagctgcacagctttgatcgcaattttggtgttccttgccatccatcaattgcatcagcttcatccttaaaaatgtggcaatctcaaatgtacacaccccatgatcagaatgttggctcaaacttcatgtggcagcaaaatactggtgtacaaccatactctattatgcaaccgaattatgcatgtccacaaatgcagcaagtttctgggtttggtatttctcgacataggagcaatgagcaggctgcagtctaccctcctgcaaagggcccatcctcatcatatattggaacaccaaattttcattggctggaaaatgggtattcttacctaaacggtgctgcttctcagaaaagaagaaatagtggcggtctgaataatacatttgcagacagcttcccaagtacatcttacaccggcagttcatgtggcagtggtgattttcaccattttcaatgggcagaaaaggttttcaattcatatggaccgcatcaccagcaaggtgataacctcagtcatccatatggcttaggtttatcacatcatcaaagatctgatatcgctcatccatatggcttaggtttctcacatcatcaaagatctgataaactcaacacagcaagttacgtggagaggatccgaatgagacctgacgttggaaattcagtaaatttttttgatttatcttcctatgctcgcttgctgaactccccattcttgtcctcacaatctgatacatataaatccattgatgaagtgatgggaagagtatgcatgctgtcaaaggatcaagatgcatgtcgctttctacaaaaattattatcagaaggcactcaagaggacattgataaaatctttggtgaaataattgacaatgttggtgatcttatggtggatccaactgctcactatttggtgcagaagatccttgaagagtgcaccaatgaccaaaggacacacatgattcgtgaaatcactaaagcacccataaagcttcataaagcttcttgcaatgtgcatgggacccgcgttgtgcagaaggttatagacaccatgaatacccctgaccaagtgtcaatgttagtgtccgccttaaatactggaatgatgtgtttaatgactgattcttatgggaatcatgttgtggaccactgcctgcagaaattgttacctgagcacaaggcattcattcttgaggctgctgcatcatgctatcttcaactagcaagagatcgtcatggttgctgtgtcctccagaaatgtattggtcattcaagtgatgaacagagaaacaacttgttgtgcaagataacatcaagtgcccttacactctcagaagatccgtatgggaactatgttattcagtttattctggacctcaatatcgaatggataacagtcagagtagtggatgagctggcaggtcactttggaaatctatccatgcagaagtgtggttcccatgttgtggagcattgcctgaagctagcgccacggctgatctgtgataggatcatcaacgaactcatgcatgatcctaaactgttggatatcatccttgatcagtatgggaactttgtgattcagacagcgcttaaacagtgtcagggtgaacatcatgctgcttttgttgaaactattaagccgcacactgctgtaatgcaaagtaacatgtatgggaagaaggttctttcaaggatatgcttgaagaacaagcactgccgatttgacctccattaacctagcattttttttttggcgaacgtgtcttcagagacagcagacgggacggaacccttgtacaattctgtgataacttgcagatcttacagatagtgtgtcttggcgaaaagggaaaaagatcttttctttcaagggaaattttggttggttaggggaagcattttgtcgctgccagtttagtgtaatttcgaatgtagaattagtatagtttcatctgcgtgtgatgatggtggtttacattgccggcgttgttatcagtactgtagtttaatgtacctgtcgaactgtgatatcagtaacatcgtgtaatgtgttagttgtacgataaaagctaaagtggcacactagcctggtcattttttcttttggaaaaaaatgaattgaatcggttgtttgaacactt

SEQ ID NO: 124497 - DNA, 1733 bp, Zea Mays
tgttggagaaggcgccctttacttatttattattatagcacatttcacttacacagtctctcaactagtacaagcgtacttaggcaagacgtatacatgtcatgcatggaacaacatcacgaacacacgtacacagctagctctctcatcggagagccatggccgccgtacgcgcatgcagctaccactctttattcccacgtctccctacgaaggagcagtagcacttggtggatgggtccctggagactggagagtgccacgcccggtgacacgtacgtacgcggtaagcgtacactacccttttattattagctctgcgccacgccatgcacgtcgtcgatcgtcacaccacctcaaggatggcgccggccaccgtttcccagccacggccgcggcggcagtcgcgcacgcactgctgctgcttgtcgtagtcgcggtggtgctgctggcacttcttctcgcaccggtcgccgtggctggcgtcgtcgtcagcgtcgtcgcgtgcgccgccctcctcctgtcgcccgcaccgttgcatgcaccgcagccttttcatccagtcgctgtgctgctggcatcttttctggcaccggtcgctgttctcgtcgtcgtcggcggcggcgtcctcctgttgcttacgctcgcagcgctgcacgcaccactgcctcgcctgccgatcgctgtggtgctggcatctcttctggcaccggccgctgttgtcgtcgtcggcggcggcgtcctcctcctgttgcttacgctcgcagcgctgcacgcaccactgcctcgcctgccgatcgctgtggcgccggcatttcatctggcaccgccggtcgctgtcgtcctcgtcgacgttggagtcacggctgccgccgcgctgctgtcgccggcgctcgcaagcctggacgcactgctgcctgctttcccggtcgtggtggccctcgcactgcttctcgcaagggcagcggtcgccgctgtcctcctcctcctcgccgcgccggccgccgctgccgccctcctcctcccgctcccggctcttgcagtccatcaggcagcgctgcctctcccaccagtccccgcggtggtggcgctcgcacctctcccggcacttgcccgcgctctcgctgccgcgaccgtactcttgctccatgtcgacggccagtccgcggcggcggcaccgcctcatgcactcctgggtctcccacggctggccctcgtggcggcgcaggcactggcgccggcactcgcccctcccggagcgggagacgtaggcgtccacgccgctgtcgccgtcctcgcccgcgtcagcttgctggtgccgctcgcggcactcgctctcgcattccctcttccgcggggtgtcctttccgtactgccactcgcacgcctgcttgcaccaccgcaggtcctccttgcggtcccgttcgaccactccgtcctccgccccggccgtggctgctacgaccagcagcacgccggcgagcaggaggaacgcccaccatgatgcacccacactacccttccccatgtgtcgtcgtccgccacccgaccagtgatctcgtcgacgtacaaatcacaagctactaaaggagtggcggactgtgtggtgaacgagggtgaggagatggctgggtcgatgtacatggccgagcatgagacgaggtatttataggagcgcggggatggatccggaggagccaggatgaggaggacgacgtcgatcgatgggggac

SEQ ID NO: 124498 - DNA, 2466 bp, Zea Mays
atggacgccacgggggccgtcggagtcggcggccgggacggcgagtgccacgcggcgcaggtggtgggcgcggacggagagatggacgcggccgcgatcgagcggttcgccgccgccgcggggctccaggggcggggcctctcctacgccgtcgtctcaatcctcggaccccagggcagcgggaaaagtaccttgctcaaccatctcttcgggacaagcttcagggaaatggatgccttgaaaggaaggcaccagaccaccaagggcatttggatcgccaaggctgctgggatcgagccgttcactgttgtgctggacctggaggggacggacgggagggagcgagggcaggatgatacagctttcgagaagcagagtgctctgtttgctcttgcagtttcagacattgttatgataaatttgtggtgccatgacattgggcgagaacatgctgctaacaggcctcttttgagaacagtattccaggtcttgatgcgtttatttagccctcgcaagacgacactactacttgttatccgtgataaaacaaagactccactagagtacctaacacaagctctcaaggaggatattcagaagatatgggactctgttcagaaaccagaagcttacaaggaagcagcgctcagtgatttcttcgatgtggaggccactgctctatcgagttatgaagagaaagaagaactatttaaggagcaggttggacaactgaggcagaggttttatcattcaattgcaccaggtggtcttgcagccgatagaagaggtgtgatacctgcttcaggcttttctctcagtgcactgcagatttgggaagtaatacgtgaaaataaggacctcaaccttcctgctcacgaggtcatggttgctactgttcgatgtgaagagattgcaaatgaaaacctcaaacagtttttgtctgataagggttggttggatctaaatgcagctgtagaatctggtctgccaccaagcttcggaatgaggctcagtgctattctcgactcttatctatccgagtatgacatggaaaccatgtattttgatgaaggtgtacgagctgctaagcggcaacaattggaatcttcaatgctagatcacgcatatcctgttatcgagagagtaatggagcacctgcatcttgtggctctcgacaaattcaaaggtgacctcgaacaatcattaaggcatacagaaggatttgcagaatcagttcgtcggtgttctcaaacttcaatggcagagtttgatgctggaatgacagatacagcagttaaacatgtgcagtgggatgcttcaaaagttaggaataaactgcaagagcatatacaagctcatgtagaatgtattaggaacgcaaaattggctgaactgagagctaactttgagaagaagctgtcagacgcaatttctgggcctgtacaatccatactggaaactggcgagagagactcctgggcatgcattaggagactatataggcgtgagattgaaaatgctgctctttcattctcagcttccctttctgagtttgacctagaccaaacaatttccaataagatggtctcagatttgagggaatatgcaagaagtgtagtagaaactaaagctagagaagaagctggaaatgttctgatgcgcatgaaagaaaggtttttcactgtgttgagccatgataaggactcgatgccaaggtcatggatgcgagatgaggatatccgtacaatcactagagaagcacgcttaggggctttaagacttatgtctgtaatggcagctattcggttagatgataatccagacaaaatagaacgagctctgactactgctcttttagatgggggccccctttctcacaagaggagtatagaatttgcttctgatcctcttgcttcaagcacgtgggaagaggtttcaccaaaggatacactgattacgccagtgcagtgtaaatccatctggaggcaattcaaagcagagacagagtattctgttgcgcaagcaatgtctatgcaggaagcacaaaggcgtagcaagaactggttgccacctgcatggactattctgcttctggcaatactaggctacaacgaatttatgtttcttcttaggaatccattgtaccttctggggctctttgttgcctttgtgttatcatatgccatatggatgcaatatgacatcactgcttattttcgtcatggcacgctatctgctcttcttacgattttatcaagactgctcccaacaatcatagacattatgatgcaaataattaatatgaagcacaagcacaagtccccacatccatctcgtcatccccaacatatccatgctcagagcttcatgaaccagacgtggggacgggcccaagtgcggtaccagtctcctgactcgccatcctcatcttcctccgtgggctcgaacagtggtgatgactcttga

SEQ ID NO: 124499 - DNA, 118 bp, Zea Mays
agctgcgcaccacccaatactggtttataccccttcacgcttcttttttgtgaccaatgcacattatttatataatgctatgtttatcgtttctatacttcacttgggaatagttcat

SEQ ID NO: 124500 - DNA, 1299 bp, Zea Mays
cctcttcctttcttcttccaaatcacctctctctctcaaaagcgtgtggcagccggcctgtgagtctgtgtctgtgaccggctgactctgccagccgcacgcacgccctcgcgcttggagcgttgcgaggatcggctcacaggtcacagctcagtctcagatcggccaccggccggccgggcaccggaccacagctgtctgctgcctgctccgcttgccgccattgctggccagcgcgagcgagctgccgggaccgcacggaggtagcgtctacggggcagcaccgcgcgtcgtggttcgcgctcttgaagctggatctggaccgacggtcgatcgagcgagtgcagctgcctgcgagctcttctcccgccgcgatatgggcgccgtgagctgccggaggcggacgagccggcgccgctgccacgccgccgccctcctcgccgccgcaatcttcgccgcggccttggttgtggcggcagggcggcggcccatccgtctgccagcagcggcgctggcgaggaggcgagtagactcgtcgacggcaattgccgccgccgccgacgaagtcctcccagccgcccggcggcggtggctgctggcggggccggggtcgtcgccgccgacgtgccgcgcgaggtgcgggcggtgcgcgccgtgccgcgccacccgcgtggccatccagcccggcgtcggcccccagtgggagtactacccggaggtgtggcgctgcaagtgcggcaacaagctcttcatgccatgaccagtacgtgatcaccaacggcggaggggctgtcgggccggcatgcaggcgcgcgcgtggtcttccttttgtactacaagacgacgatggattgatcgagacgacggcgaccactcgatggatcgatcgatgcgttaatttaattttgcgagacttaagtgtacgtacgtacctacctgcgtgcgtacaaattgaaaggggaggacggattttggatgctactaagaaagaagctaggggattgcattggtgaggtgattaggcgtgcgtaagtggtggtgctgtgtctgtgatctgtgtatatatatgcaaatcagtagatcttatgttaactactactacgtctacatgcatcttctttcttccttccttcctttggtgagactaaactgttttaatttctcttcacagcaaatcagaatgaatggaggagcgaggtcattgtaattatatttttataatgtaatttctacattgtttttattctatttattttgcatgtcgatatatatttcttgtaccagcgcgtgcctggaaat

SEQ ID NO: 124501 - DNA, 674 bp, Zea Mays
acatgctgcggcctctcattgcctgctctgatctgttcctctcaacaggcgccatcaccaccgcctgccctcgctacaccctcttcctttcttcttccaaatcacctctctctctcaaaagcgtgtggcagccggcctgtgagtctgtgtctgtgaccggctgactctgccagccgcacgcacgccctcgcgcttggagcgttgcgaggatcggctcacaggtcacagctcagtctcagatcggccaccggccggccgggcaccggaccacagctgtctgctgcctgctccgcttgccgccattgctggccagcgcgagcgagctgccgggaccgcacggaggtagcgtctacggggcagcaccgcgcgtcgtggttcgcgctcttgaagctggatctggaccgacggtcgatcgagcgagtgcagctgcctgcgagctcttctcccgccgcgatatgggcgccgtgagctgccggaggcggacgagccggcgccgctgccacgccgccgccctcctcgccgccgcaatcttcgccgcggccttggcaaatcagaatgaatggaggagcgaggtcattgtaattatatttttataatgtaatttctacattgtttttattctatttattttgcatgtcgatatatatttcttgtaccagcgcgtgcctggaaat

SEQ ID NO: 124502 - DNA, 339 bp, Zea Mays
atgacttctcgatccgaaggcatgacgggagcggctctccgatccgacggcacggcggcgacagctcccgggcggcgcgatggcggtggtttctcgatccgaaggcacaatgacgatggctccctgatctggtggcatgacgatggcagttcctcgatccggaggcgcagcgatagtagctctccgatctggaggcacgacgtcgatggcttcccagaggtgtgtgcaagacttcagctcctcagaggcgcgcgctctggagtggcacacgctggcgtccctcctcccgcgaccacgccagccttcctaggcgagagcgacgacgacacacttctctag

SEQ ID NO: 124503 - DNA, 235 bp, Zea Mays
aatatgtatgagatattgtctcttattagtactggatgatgagatgtgtcttattatgactatggatgagacttttgtgatgtaattgatgagactatggatgagacttttgtgatgtaattgatgagactatggatttaaatattgttatgtgattgtgtgtgagatgttttatgtgaaaatatgttgtgctatatagtttttgatatatttgttatgttgtggaatgtggtgt

SEQ ID NO: 124504 - DNA, 2222 bp, Zea Mays
acactcttcttcttcctctgatcctctcggcctccacacccccgcacactccccgtgaccccgacccgtccggatagacaggagcggagagcccgaggtacaatggcggcctccaacgctgcatccgtctcctcggccgcgccccgcctgctcctgctccgccgccgcggaggagccagcggcagcgcgcagcaccgcaatgcgcgcttccgcgccgccgccggcggcgggtcgtacctggacatgtggaagaaggcggtggaacgggagcggcggtcggcggatctcgcgcgcaggctccaggcgccccccgccgaggcagacgcgcccgcgcccgcaccgcccgtggaggacgtgcggcgccggacggcgcggttcgaggagatgctgcgggttccgcgggaggagcgcgaccgcgtgcagcgcaaccaggtcatcgaccgcgccgcggccgccctcgccgccgcccgcgccgtgctcaaggagccgcctgccttctcgccgcccccgacgccgccgcaggtggcggagacgggcaaggtgggatcggccgggggcggtgctgctaggggatcagatcggaattcccggtcggcggcacgggcacagctgtcgccctcggcggaagtgcaagactccggtggctcatctcctcacaaccagtcaagttccaagcttggtactccaggtccagatttctggtcatggttacctccagtacaagatagcagtaaacaaaaggaaagcaatactggtttgaagccatccaaaaaattagataccttttccagtcagcctgatctgttgatggaaaaggaacgcttggcggattctttaccactccctttcgagacagctttcttcaagaaggaagatcgatctcttcctcccttccaatcatttgctgagcctgagaatgtggattcctcggccgatctggccgctgacaaagaggacacgttcgaagaacagttctcgaaaaatgcagccgaggtggctcgcgcgctcagtgagagcgtcgggaaaccatcacacggaatacatctagatggctcaatgtggtggaaggaagtaggtgtagaacgaagacctgatggtgttgtttgcaagtggaccgtgatcaggggagttagtgctgatggcgctgttgaatgggaagacaaatactgggaggcctcagaccggttcgatcataaagagttaggctcggagaagtctgggcgtgatgctgcgggcaacgtttggcgggaatactggaaggagtcaatgtggcaggattacacatgtggggttatgcatatggagaagaatgcagacaagtggggacagaacggtaaaggggagcagtggcaagagcaatggtttgagcactatgactcgaccggcaaaaccgaaaaatgggctgataaatggtgcagcttggatccaaacacaccgctggatgtcggccatgcccatgtctggcatgaaagatggggcgagaagtacgacggccttggtggcagcgaaaagtacaccgacaagtgggccgagcgttcggagggcgacgggtggtctaaatggggcgacaagtgggacgagcacttcgacctgaatgggcatggcgtcaagcagggggagacatggtgggcgggcaagcatggggaccggtggaaccgcacctggggtgagcggcacaacgggtctgggtgggtgcacaagtacgggcgcagcagcagtggcgagcactgggacacgcacgccccgcaggacacgtggtacgagcggttcccacactttgggttctaccactgctttgagaactcgccgcaactccggtccgtgaagaggcagccgccgccaccacgaaaatgaagcctgaagagatcatgctggcatcagcagcatgtgctgttgtgaactgaatgttcagactgatatgaatagaaaggcctgtagaagttttgccgtatattctgaaacaccttttttcttttagcctagaaagattatgctggtaagcttttgcccaaagtctaatgcacgcagttactgcgacttcttctgtgatgttttttttttggtgtcagttacctcctgatttcccaaacactcagactagcactgctgggattgggaatgtatctggccagtcatgagactgagatttcccaaagtttgtatgccacagtgctattctatggtctagcagcaggttggagttctgcttaaatgaagcagca

SEQ ID NO: 124505 - DNA, 3078 bp, Zea Mays
cccaattttcatatattcatattgattggaatacagacacaaagtttcaagccacttttcttaaaaaaacataaataagcattgggcgtgacgccgaggaagaaacaaacccgccctgccaccacccctacccttcaacaaatccaatccgttcatgaacacacaaccactgctctcctgcacgtcagctcgcggtcgccttgccggcgactttctgcgcgatccagcccaggccgtcgtagaggccatcgccggtgatggcacacgaggcctggatgtgccagtcgtggtcctttatgctgtggagcgagagggcatcggtgatctccgcgggtgccatggcgtccttcaggtcctgcttattcgcgaacaccaggaccaccgcgccctccaggtccgcgtgctgcagcagccggaacagctcgtccttgatgatgttgatccgggcgcggtccgtgctgtcgatcaccacgatcacggcgtgtgttccccggtagtacgtcgcccacgaagtgcgcaggctttcttgccctcctagatcccagacctggttcattcgatcattatgttagcacaagtttgtctggcagctccgtgtgtaggttaggttcggcactggaaaatgcactgcatatgatcaggatacaaaacatacacaaaatgagtttgttctcaagtgaaacatgtatgggctgttaccagatctgttacataaggttagtataaatacgccactattattgggtctccttgatcctgcagaattaaaagagctaaagaggcgaggcgaccttgacaccacagaattaacaagttaaatattgtcatgaaagttcacaccacttgcagcaaaaatacttctttccaggagacaagtgagcattgtaccatgtccatattaaaaattacagattctttgtcattttctattagaaactccctaaacagatgttttcgtttccttcaagaaagcatgaagaaaaatagatgtagcaggcgtagcactataaattgcaaaaacttcttcgataaagtggtgctttgatggtacaagttgccgaatgcctgagcatctgtgtttttttatttttcattttgcaatgaagccgcccaaagaatatattctctaatcaaaggtatggttgcagacaggtaatattcttagcagtgtttgcacatgataacaaagggttttaatttttaatactggttttagtcaataatgacaacaaagccttttagtcctaagcaagttggcgtatgtctagaattgaaacccaactgaaaccacaaatcaaaatttaggcatgttgatagctgttttccatttgttcctatttatgactaaacatctgttgctcctatttaagactacatttagtcctaagccttttagccgtttttcataacattttttggtattttgtcataagtgttctctaagtcaatgaaaaccatcagggcccatcacattacccctttcacccttttaaatgcctctataacctcagattcttccatcctacgcacaaagcgtctattgatgtcatcaaagcgtcatacgactgaagatgaaggccaagcctaaaggagtacacaaccacaatagcaacgattaagggcctatttgtttcagctttttttctgacgagctttttaaagaatctggttgtggggagaatctgagtatcgtggggattacatgcggaggaagattaagaggtccattgggtttaggatataggaaatgacggactcctatcgcaacgattctgccgattatgtgttcacgttgattttggacaatttttaccaaagcgatttttatagaagtgagctgaaaagctggatgtttggcagtccgcagcagcttttggtggccataatcagaaaaaagctgaaacaaacatgcccgaaatccactggatgtaactggagttgaactcactaatgtgttacccaaacaaatatgccatgccaatattgatttatttcatcacagaattgactaatgtgttagccaaacaaaaataaaaatactagctacctgtttgatatagtaaagggattagaaaaccaggttggattaatccccatgatgaaacagagaaaatataggttgtccattgttaataatcaggcggcaatcacagctagattaaaggttgagcaaaacaacttccaaagggcagatcatacacataaccactcaatcctaaactgtgtagtactccgctttatagcaagtaaaagcagactaaaggcaccaggcaaaaggtggatttcgaccgccagtgttgatggattagtgcagtatacaccacaagcatcttatcgatttgcaagctaaacagatctcacctaatgcattcatcctagacgaagcacaatctcaaacacctacaatggccctgaacagagcgagtagctagaaggacatctcaaattctcgatccacctatgaacaacgcaacaagggcagcgaaagcaacgcaaaattcacctttctcctctacagctctacctttatagcatagatcttaggccagcctaacggagaaaccggcttccgccgcagcggtcgatccggcagcgactgcggcgcagcgagtccaccctagaatttgccctggccccgggtaggaggaaagagagagagagagaggggggaccggtcgggggagctaacctcgaagcgcaggttcttgaagacgacctcctcaacgttgctgccgatggtgggcgcggcggtgacggcctcgccgaggtggagcttgtagagcgtggtggtcttccccgcgttgtcgagccccacaacgacgagcttgtactcccgcgctgggaacatgaggaaccacacgcgcgacatccacgcacccatcctcgctttctcccttaccggcgaggggccaaatctgaatcttccgcgcgcgccggcggttggtggttggattggggggtcgggtcgggcgctcggggtcgggtcgatctcttggcggcggcggcgacggcagagaagatcggagtcgccgatgaaagagacgaggaggaggaagggaggaaggaatcgagtcgtcg

SEQ ID NO: 124506 - DNA, 160 bp, Zea Mays
tgcaaccatctcaatctggtattcatagcaattatacattgccacaaagaaacaagactagagattatactacgttgcaagccaggtccttccaaatctccaagtagctgtaattacagaatacaatacgtccaagctgagcacatataaacgatactct

SEQ ID NO: 124507 - DNA, 1028 bp, Zea Mays
ctcctcgcaacttctcccctgccggtggcgccatgttctgcttgcgcgtgggcaaagctaaccaactcagctagagaccctttcgcgacgaggatgctgaggccgcccgcgctagcgtgctgcaaactctacatctccgaggcccgcaactcgggggcgttgcgtgccatcgagcacgcagcggcggcgctccgcccgttggccgtgctcgtcaacaccttcgccgacgacgcctacaaccgggtcgggtacacgctcgtgtcccccctcgcgggcggcggcgcctcgccgccgctgcgctgcgcatcgttccgcgtggtcgcggccgcgatcgaggccgtcgacctggacgcccacgccggcgcgcacccgcgcctcggcgtcgtcgaccacgtcgccttccaccctctggccagcgcccacctcgaggacgtcaccgcgctcgccagggccgtggcggcggacatcggagacaggcttcaagcagtgccgacgtacctgtacggcgcagctcacagagacggtaggacgctggcgtccatcaggaggcagctgggctacttcacgccgacctcccccggcggagagcagtggcacggcgcgccggactcgctgctgccagtggccccggacgccgggccccggacgtcgtccgcgtccaatggcgtggtggtggtgggcgccacgccgtgggtggacaactacaacgtgcccctgaccacggccgacgtcagcgtcgcgaggcgcatcgcgcgcgcggtcagcgagcgcggcggcgggctcgcgtgcgtgcaggccatggggctcgcgcacggcgacggcgccaccgaggtcgcctgcaacctacttcacccggacgcggtgggcgccgaccaggtgcaggagagggtgagccggctcgccgccggcctcggggtcggcgtcggccaggggtacttcaccgacttgtcgcgggagaaggtcgtcgagctgtacttgcaggccgctcaagctgcctgaggcttctcggcagtgatagattgtttatt

SEQ ID NO: 124508 - DNA, 2487 bp, Zea Mays
ccgccaccgctttaaattgctcccaaaagcgggagccgaacagagcgacccacccagagcgcgcggcagcagaggaaggcgagacgcgagaggagttgcaagatggtggcgatgggcgtggacgaggacgaagagcggcggatggacgagcggcccatgcaccagggctgcatggcggggttcctccacctgttcgaccgaccccagatcctctccggccgccgcctccacagctcgcagcgccgactcacgtcggtttccagtggctccgcgactccgtccgagcggtcgatgccgctggaccgggcgccgtcgtcgccggacacgacgccgccggccgcgccgcggccgtcgctgcagctttcgccgctggacctcaaggagggaggcgttggcggtggattcggagcaccgcaggcgtggaggctgccgcggctgtcgctggacagccgcgcggtggtcgacgccaggggcaagctgcggccgcgcgagatccggacgtcggccgccgcaggcgcgccgccgtccccgtccgcggggtgcgcggacgagcgcaggtccccgagcgtcgtcgcgcggctcatgggcctcgacgcgctgccgcacggtctgggccaggcgtccgccgagtccgggcagcacggcggcggcggcgccagcccggccgcgctccggcggtccgcgtccgagcgcgtgccaagggacccggcgcagttccgcttcgtcgacccgtccttcttcgagaggccggcgtcgccgctgccgtcgccgccggtggccgaggaggtggcggtgcggcgggcgccggatccggcggccgtcccgcgcgcgctgcagaggcgcagccgcttcgacgcgcactatgaggtgttcccggagccggcgaagcgcgcggacccggcgtccggcgccgccgcccacggcgagatcgcgctgtacggcgagatcgagcgtcgcctccgcaagcgcggcatcgcggagcctgccagggacctcgagacgctgaagcagatacttgaggcgctgcagctcaagggcctcctccaccacaccgctccggtgcccgcgcaggcgcgcaccacgccgccacccatcgtcgtcatgcgcccgtccagtcgcgcgcagccgcagatgccaccgccggcgcgcctgacgcccgcgcggcggctccgcgtggacgtcgaccgcgcgcgccgcccccggtcgccggacccgtcgccatcccccgcccgtagcccggcgtcccccgctcggcgtggctcgctgtccccccagcgccgtgtctcgccttcgcagtcaccgaagcagcagcagcagtctagtttcaggaagacgagcggtttcgactccgccggcgcccgcacccgcattgcgcgccgcgcggcgtacaacggcattgccttgtcccccgacgacgaggcctcgaccactttctccgacggcggcagcagcagctccgcctcctcccgctgggacttcgacacgcagctggaccccaggacagaccgcggcctgctagagcggtgcgggaagctgctgagcagcatccacgcgttcacccgcggcgacgcgtcgggtgcggaccagcagccaagccccgtgtccgtgctcgacgcggcggccttcctcgcggacgaggactcgccgtcggcgttgtcggcgtcgaagcgagcgatcgacttccgcagcagcagcgtcggacacccaaagccggcgtccgcggtgtccgacccagagcatgacgagtacgtggacccggaggcgagcggctgcccggacccggactacgcgtacgtggccgagctggtccggcacctcggcggcgctcgtgcccgtgcccgtgacccggccgccgcgtaccgcgccgcggagcagcgcaggcgcgagcgcggcggcgaccccgacacgtggcaccttcggcggctgctgtgcggcgcggtgacggaggcgctggagcggcagcggtcggcgtgcccctgggagcccgcggcgtggctccgcggcgccgagctcgtgggccacgtgtgggccgaggtccggcgcgccggcgagcccgtggcgcctgccgcggacgccgacctgaacgacgtcacctgccgcgcgatccggcgcgacctcgccgcggacggcggcagcccgtgggggtccctgcggcagcgtccgcggcacggcgcggatgtcgccgacgcggtcctgcagatcgagcggctgctgttcgtggacctcgtcgcggacaccatccgcgagctcgccgacgccgaccggcccctgccccgccgcaagctggtgttctgatcacgcgcgcgggcattggcgggacttgcttgcagcagagcggagggaaaataataattattgtgttttaacttaaatgatttgcgtttcgtctcttgtactgcgtcgagcgtcgtcttcaattagcgagtgatgtaaaattgtgactgctaatctggactgttaattactggtgattgcagcagccatgtg

SEQ ID NO: 124509 - DNA, 177 bp, Zea Mays
atggcgagattggcgtggccgatgtcgggcgtgggagccaacgaggcggtgggggcggagcgagcgtcggtgggcgccgggagggtgccggtggctctagcggctttgtcgaggctggctccagcccagcgtggcggcggcgccgcaattgaaacggtggcagctggtatgaagtga

SEQ ID NO: 124510 - DNA, 414 bp, Zea Mays
atgacggagagaccttgtgagcatataccgcggcagtccgtgctgccagcaccttacagcgggtcgccctcacgggcacacgagcgtgctcaggcgacgggaggcgcggcgaggagggcgacagacagagctggagcaggccaacgccaggctgatgcgcaacctggcggaggcgcgggcggcgacgaagcagtaggcgcagaggtacgaggtggagctgatggaggacgcctgcttcgagctcatgcgggaggtggaaggccaggtcggggcagagctgctctgttggggggggggctgcgcatgcgggaggagatggagaaggagcaccgcaccctgatgggtgaagtgtggcaggaggagcgtggtccgatgaagctcgcgctgcagacggagattggaagggaaaggtag

SEQ ID NO: 124511 - DNA, 576 bp, Zea Mays
atgacggtaggaaggtcagcctcaggagccgcctggccgaggtggtgggccgtgggcgcaaaggccggtggagaggtgttgcacggggctcgagctcagcgtggagaatgggaagaacagggacaccgcccaatgtttcttcccggggccaaaaagctttggggagcggcgaatggggacttcaagaagcgaagcgggatctggtggatttcatcctcgaggacgctagcgccgacggagcggctctccttgcgagcggattggaggccgcagaacacctctgctcctcgaggacaatgtcggcggtggagcggctctccattccctcacgaggcggatacgcgcctccatcttggcgtccctagactccgcctcgagcgcatggaaggcaacgtcgagcgccgagcgggagtgcttcctgaccgcggcggtgtcggtgacgcggtgctccgcctcctccggtgagcggcgaccctgtcgcgggtaatgaacgcgagctacggcgagaggtggtggcacgtgggggtccgatgaggcgaatgcggcattgagaggtggtggcacggtcgactgagg

SEQ ID NO: 124512 - DNA, 900 bp, Zea Mays
atggctgataaggcagattggtgtgatgccaatgtgaggcatttcattgatgtatgcaaaggagagatagatgctgggaatcggccgatgggaatgttcaccaaaactggttggaaaaatcttagaactaagcatgaagaaaaaacaggccagaagctaaccaaaaaacaattaaagaataagttggacaatatgaaaaaggaatatacatggttcatggagttcaagaattatgccactgggcttggatgggatgaggcaaagcaaacagttgactgttctaaggaatggtgggatgaacaccttgctagatgtaataatcctggaaaaggtattaaatgcaaccatgtgaggttcagaaaacaaggacccaagcaccttgatgatctacatatattgttcgataaggtacacgttagcggggctactgcatcctgtcctggagatatatcctcggatgagtcaagtgatgatgatgtggttgaggtacaaaaaactattgataatgttgatgtgaagctggctgcgttgaagaaatcaaaactaggaaaaaggaagcgtaaggactgctctactgctactgaagagaaggatgagaagagcccattctttcgactgtacaagaacacatgtttgaagatagaaactgcagcagagaagatctccacaagtgttgaagcatcatcgactcctccaaccaacccagtccctagtattgcagaggccatgaagatggtgaaagattgtggggtgcaagaaaaaactgcactaatgcacacagctaccttcctaattgtgaagcctgaatttagggaggtcttcagcttactagaaacaaatgaaggaaggctagatttgcttgaaagggagcatgaaaaggagtcgattaagcggatgtag

SEQ ID NO: 124513 - DNA, 358 bp, Zea Mays
tgctctcatgatgacgacatggccaccatcgccgccctcagattgaagaatttacctgaagggagttatggatcggatggaacaggtggttgtggaatttcttgaggtagcagtcagctacatcgtcttcctcaaaggcttatattctcctcataagagtgctcttcatttgagttggtttagtcaagaattttttgtgccatcaaagaagtagctcatcatggcttgcatcggggaacctgcttccattttacttttttatgaagggtttgagaattgtgcaacaacagtttcagggaagccattaatgtcatcatgtaaacatgaaagctcaaataaatgagaaaagcacgctatt

SEQ ID NO: 124514 - DNA, 469 bp, Zea Mays
cggcccaattctcacgcgctcatcgcctaggagcattcacgttggcggcgggcggcggctcgcttcctctcctccaccgcacctccaagaatccacccctgcctgacgcctccacctccacgactgagctgacggctcggcggcgccatggcggttctccggctccaaccttccccctccggcctacaatgctccaccgcccggtcgccagtgctcctccatgggccacggctgacgggtgcacgcaccggtatacatcacttgctgctctattcccgacgctctagctcatgtaccagttgtgcagcttgccgcctagccctgctccggcgtgaaggacttccgcttctgcccctgcacatcccgcccttggtcgcgcacctcggcatgttcctcggctcgacggctactgtcttgaggcgtacggtggccgcccacctcgtacccagtcaccagatctcaagttcca

SEQ ID NO: 124515 - DNA, 879 bp, Zea Mays
atccggtgtgcaccggactgtccggtgagccaacggtcgatccaagttgtgtacttcgaataatgttgtattgtatggttgataagtgaagaacattgtgtagcttcagttttactgtgatgtaggtacacacagttttgacactcttaattttggtatgcaactgctatgatgcctctcaaatcccaatgttgtgtcttttaaagagttatctaaaatatgttgaaattgctaccgagagtactgagtttttcatcatttgtctgaaacatgttgaaattgctactaagagtagtgagtgttgcatcatagcctctcaaatcaatggtgtatttaaagaatggtatgccatgcgtggaaattgctactacagttgaggtcctagagccccaatattgatggtaactttgtcaaattgattgagatgcggacgtttgtgttagcatggtgccatggttacaatgaaggttgttgcaattactagtaagtttaccttgtgttaaattctgaaaattaacagtcacaatactaaatctatcatgtaaaacctgcttgaagccttgaaccatttcctatgtagattagtctatcatggttttatcactttagtatccatcagaattttctaaggccctaacatttgctaacttcatggggctaactatacgtgaacagatttatgtttgaaatgatggatgccctgtttcaggatgactgttgagtgatctttttgatgagggtaaggaggctattgatatagcaatataataaaaaatggatctctgacacattttgaggtagtttagtattggaaattagcctacatgtgataattagaatttgactgatttgtggatgcatacaaataattactgcaag

SEQ ID NO: 124516 - DNA, 621 bp, Zea Mays
atggctactccggcaagaggcaagaaacggctcgtcgtcgacgtcgatctcgagctcgacagtgaggtcgaagtggcctccgccttcagccgactgtctgtttcagtcgttgccaagcgtacaggcgagagttctacaggcgacggttgcggcttcgagcactccaccggcaagcagcgcacctccagcaaggagtggaccagcggcaatgaactcacctgcgcggccacatcagagctcacagccggcgtcaatcactgctcggcacctcgttcagtgtcgattacccgatttgaaacagttcgtagtgacctcgcccaagccattacaaagatgcgtgtagttgggaaggagttgaaagatttggctggagacgagattatgaattcgccagatacggccaaagatgtgtcagtgaacttcgcaatgtggcgcgtgtatgaacttgctctgtcacttgaggacgaagcacagcgtttagatgatctcgaagctggtccgtcgccaccattatcggagcagttcaacaaccaatttgctgaagatgaacaaatgggtggtggggaatgggcactggatgatgtcagttctgaagagctttcggatcgtcagatgaagtag

SEQ ID NO: 124517 - DNA, 3132 bp, Zea Mays
tcttcagcagaaatggcagaagcaataatccttgctctgagaaagattggtagcgctttagcagatgaaactgccaagaaaatgctggccaaattgtctgaaaaggttaacaatctgagggatctgaatgacaagatcgagtcaataagaatgcaactgacagccatgaacaatgttatacgtaagattggcacagtatacctcactgatgaagtcgtcaggggatggattggggaagtgcgcaaggtggcctaccatgttgaggatgtaatggacatgtactcctatcacacacttcaaatggaggaagaatggttcctgaagaagtacttcattaaagcgtcacattatgtcttggtttttagtcaaatagcagaagaagttatcaaggttgagaaggagatcaagaaagttgtagaactcaaaaatctgtggttcgagccttcgcaccttgttgctgatcagctaattgagatggaaagacagcgttcgcacgataactacccactactttttaaagatgaagatcttgtggggattgaagataacaggagaaggctcaccgaatggctatattctgatgagcttgacagcacagtgataacagtatcaggcatgggtggacttggaaaaactacccttgtaacaaatgtttacgagcgtgaaaaaaccaatttttctgctacagcatggatggtcgtgtcccagacctacactatagaagctctgcttaggaagttactcatgaaggttggtcgtgaagagcaggtgtcacctaacattgacaaattggatgtccatgatttgaaagaaaacataaagcaaaagctcgataatcgcaaatgtttgattgtattggacgatgtatgggaccaggaagtgtaccttcaaatgtctgatgcattccaaaatcttcaatctagtagcatcatcatcacaacacggaagaatcatgtggctgctcttgctcagccaactcgtcgccttgttgtccatcctctgagaaacactcaggcatttgatctcttctgcagaaggattttttataacaaggaagaccatgcgtgccccagtgaccttgtggaggttgctactaacatagtagacaggtgccagggattgccactagcaattgtatcaatagcttgcttattgtcttcgaggacgcaaacatattacatctggaaacaagtttacaatcagcttcggagtgagctatcaaaaaatgatcatatccgggcagttttgaatctgagctaccatgatctaccaggagacctaagaaattgcttcttgtactgcagcctcttccctgaagattaccctataccacatgagagcctcgtcaggctttgggttgcagaaggctttgcattgagcaaagaaaacaacacagcagaggaggtggctgagggaaacctcatggaacttatccaccgcaatatgcttgtagtagtggaaaatgatgagcaggggagggtgagtacatgtacaatgcatgatgttgtgcgagatcttgcccttgttgttgcaaaagaggagaggtttggcactgcaaacaactatagagcaatgatacaggtggacaaggataaagatgttcgacgcctatcatcttatggatggaaagacagtacatctctagatgttagacttccacgtcttcgaactctagtatcacttggaacaatttcatcctccccaaacatgctattgtcaattttgtctgaatccagctaccttactgttctcgagctacaagattctgaaattaccgaagtgccagggtctatagggaatctgtttaacctgcgttacattggcttgcgccgtacaaaggtcagatcactacctgattctatcgagaagctcctgaacctccagactctggatatcaagcaaacaaaaatagagaaacttccacgaggaatctctaaggttaagaagctacggcaccttctagctgacagatatgctgatgagaagcagtcacagtttcggtacttcgttgggatgcaagcgcctaaagatctgtcgagcttggtagaacttcagactcttgagactgtggaagccagcaaggacttggctgaacagctgaagaaactgatgcagctaaggactctgtggattgacaatattactaatgctgattgtgcaaatatttttgccagcctatcaagtatgccactcctttccaacttgcttctttctgcaaaggatgaaaatgagccacttcgcattgaggctctcaagcctgggtccacaggactccacaggttgattatcagagggcaatgggcgcagcgaacattgcagtgcccaatatttcaaggccatgggagacacctcaagtatttagctctaagctggtgccacctttcagaagatccactggagatgctcgctccacatttgccaaacctcacaaatctgagactcaacaacatgcgtagtgcaagtatattggttcttcctccaggatcatttcacaacctgaagttgcttgtcctgatgcacatgcctaatgtcaagcagctggtgattggagaaggtgcgctccaatgcatcgaaggtctgtacattgtgtcactggtggagctggataaggtccctcaaggcattgaatcgcttcgctccctgaagaagctctctcttgtcaagctgcacagggacttcctgactgagtggaacaacagcggaatgcatcagaagatgcaacatgtccaagagattcgtgtttagacgtggcagatgggtaccttctgcagcactattcacaccgtcgacaactccacatttcaatttcatctatactttttctttttcttttttttcatctatacttgtggtgactagtgcaatctaatcatttcccaacctgaagttgcttgtcctgatgcacatgcctaatgtcaagcacaagcagctggtgattggagaaggtgcgctccaatgcatcgaagtctgtacattgtgtcactggtggagctggataaggtccctcaaggcattgaatcgcttcgctccctgaagaagctctctcttgtcaagctgcacagggacttcctgactgagtggaacaacaacggaatgcatcataagatgcaacatgtccaagagattcgtgtt

SEQ ID NO: 124518 - DNA, 1587 bp, Zea Mays
agatgcagatactatgctaccacggtttacacgaacagtggtgacagtgacagcttgcacaaggggtgaagggcatattttattcggcctccacgaagctgctgagacaatgcttcgaaaattgtgtcatcccacaccgtgttcacctcctcacacggtctagagtcaagtcaactcactctcctagtcttcgatccagatcccatcgggttggactgtgtacactcttaaaacttcatcagctcccgagcaatctcagcccgtacatcaggttcttggatctctcccgagctgggatccgtcaagttttctgctccagcggcgacaattcgtcaggaatggccaacaagccgagtcttctgagcactctgccgactaacccaccagcacagtttctgaaagatatcacggacggcttctctgaaactcaaatgcttggtgaaggtgcatttggaactgtttacaagggcattctgcaagatgggcagccaattgcggtgaagaagcttgcagagaatgcgccggtggcacctgagaagcagttcaagattggggttgggaaccttatggccatgcagcatccgaatatagtcaggatactcggctactgccgtgaaccgcaaaggaaagtgattgagcagagtggaagatacattattgtagacgtggttgagagcttactgtactatgaatacgttcctaatggaaaccttgaaaagtatatttccgatgcatcagcttctagacctgattggaagacatgcttcgagataatcaagggcatctgccagggcttacgttacctacataaggaaatggataggccaattgttcatttggatcttcatcctaccaacatattgttggatgagaacatggtgccgaaaatcacggatttcggcctgtccagactctttggtgaagaacaaaccagaataaacacaattaatgttgtgggaaagaaagggtacatggctccagaatatctatataggggtgaaatttcaacccggtcagatatatatagcttaggtctagtaatcatggagattataacaggcaagaacagttcttcaagcgacaaagatatgtctgcaagggactttgtagataaggtgcgtgagacgtggacagatgagcacatagcatccaagcactcagcactagatgcagtcagcctccaggaagtaagaacatgcattgaaattgggctaaaatgtgtggatattgatcagaacaagagaccttctatagttgaaattgttgacaagctcaatggaaggcatgctcactgaatgatgaactcctgcatactatacatgcaagtgaaaattatgttgcggacccatggagatttgctctagatggaatcatggacaaaataattgtatgtgttaccgattatgtacttttgaataatgtgttcctcgtgttgtgtcactttttcaggagttccttgatttgtcattgtgtttttctttcttttgacacaaatctgcatgcataacctgttgaaaaattgtgtgcatactagttatttgttttttctcatgttatgtgaatactatttttttttaccaaacaaga

SEQ ID NO: 124519 - DNA, 106 bp, Zea Mays
tatttagtatcagtatatatcataaattggtcctaacgagcctagttgcatggctgttgcagcgatcctatattaatggagaaaataaagcatttaaaaatagaaa

SEQ ID NO: 124520 - DNA, 1504 bp, Zea Mays
gttcggagttcggacaatctcctggaaattctgatcgaacctcctgcttggagcttcgcagcaacaccgtcctcacccgcgctgaaaaagcacccatcttcctattgcgcctttcttgtagagtcaagtcagctcacttttctcgtttcgatccagatcccgtattcccgttggattcgtttatcccgcgtcccgcaagcaatatcagatccttagcttctgtggttctgcacttattcagcgtctctccagcttggaccccttaaagtgttctccaggtacagctacttgaatcgtcagaaatggccactgacgccagcggaggtgaaaactgggtcaaggtggatttggaactgtttacaagggattcctgcaagacgggcaagccattgctgtgaagaagctctcagataattccccagtggcaaccgaaaaacagttcaagaatgaggttgggaaccttatggccatccagcatgagaacatagtgaggttgtatggctactgtcatgaactgcagaagaaagtgatagaacacaatggaagatacattcttgtggatgtggttcagagcatgctctgctacgaatacgcccccaaggggagccttgacaagtgtatttttgatatatcttctaggcctaattgggccacatgcttcaaaataattaagggcatttgccagggtttatatttcctacataaggggatggataggcctattgttcatctggatcttcagcctgccaacatactattggatgacaacatggtaccaaaaattgcggattttggcctgtcaaggctctttggtgaagaacaaacccgaataaacacaataaatgttgtgggagccaaagggtatatggctccagaatatctgtacagaggggagatctcaacccggtctgacatatacagcttaggcgtactaatcatggagatcacaactgggcagaagaactctccgaatgacaaagacatgtgtgcaaggaactttataaatcaggtttgccaaacatggacagacgaacacatggcatccaagtactcatcactagatgcagacagcctccagcaagtaaaagcatgcattgaaactgggctaaaatgtgtggatatcgatcagaagaagaggccctctatagttgaaattgttgacaagctcgatggaaggcttgctctctgaatggtagtgtatgctgcgcaaggtaaaactgtgatgcagagttaattctgcctatggtgatatgctctagatgcaatcacggaaacaataattgtatcacttactaatttatgtacttatgaaaaatatgttgcttgtgtaatgcatgtgttttggttagcatctagtacaccttccagccagttttttgtgtaacttcagctgtgaacaaaagatgtcataatgtgacatacctgtgatctcaatgttcatgttatgattttactctaaactatgtctataatcttgtatcatttgcatgttcatatattttta

SEQ ID NO: 124521 - DNA, 1533 bp, Zea Mays
cacaatacaacgcgcccgttgactgactttgctgtgctccgtgctcagctgtgttcggttcggagttcggacaatctcctggaaattctgatcgaacctcctgcttggagcttcgcagcaacaccgtcctcacccgcgctgaaaaagcacccatcttcctattgcgcctttcttgtagagtcaagtcagctcacttttctcgtttcgatccagatcccgtattcccgttggattcgtttatcccgcgtcccgcaagcaatatcagatccttagcttctgtggttctgcacttattcagcgtctctccagcttggaccccttaaagtgttctccaggtacagctacttgaatcgtcagaaatggccactgacgccagcggagaaaactgggtcaaggtggatttggaactgtttacaagggattcctgcaagacgggcaagccattgctgtgaagaagctctcagataattccccagtggcaaccgaaaaacagttcaagaatgaggttgggaaccttatggccatccagcatgagaacatagtgaggttgtatggctactgtcatgaactgcagaagaaagtgatagaacacaatggaagatacattcttgtggatgtggttcagagcatgctctgctacgaatacgcccccaaggggagccttgacaagtgtatttttgatatatcttctaggcctaattgggccacatgcttcaaaataattaagggcatttgccagggtttatatttcctacataaggggatggataggcctattgttcatctggatcttcagcctgccaacatactattggatgacaacatggtaccaaaaattgcggattttggcctgtcaaggctctttggtgaagaacaaacccgaataaacacaataaatgttgtgggagccaaagggtatatggctccagaatatctgtacagaggggagatctcaacccggtctgacatatacagcttaggcgtactaatcatggagatcacaactgggcagaagaactctccgaatgacaaagacatgtttgccaaacatggacagacgaacacatggcatccaagtactcatcactagatgcagacagcctccagcaagtaaaagcatgcattgaaactgggctaaaatgtgtggatatcgatcagaagaagaggccctctatagttgaaattgttgacaagctcgatggaaggcttgctctctgaatggtagtgtatgctgcgcaaggtaaaactgtgatgcagagttaattctgcctatggtgatatgctctagatgcaatcacggaaacaataattgtatcacttactaatttatgtacttatgaaaaatatgttgcttgtgtaatgcatgtgttttggttagcatctagtacaccttccagccagttttttgtgtaacttcagctgtgaacaaaagatgtcataatgtgacatacctgtgatctcaatgttcatgttatgattttactctaaactatgtctataatcttgtatcatttgcatgttcatatattttta

SEQ ID NO: 124522 - DNA, 1678 bp, Zea Mays
gaccctggggcctgggccctgggccctggcacaatacaacgcgcccgttgactgactttgctgtgctccgtgctcagctgtgttcggttcggagttcggacaatctcctggaaattctgatcgaacctcctgcttggagcttcgcagcaacaccgtcctcacccgcgctgaaaaagcacccatcttcctattgcgcctttcttgtagagtcaagtcagctcacttttctcgtttcgatccagatcccgtattcccgttggattcgtttatcccgcgtcccgcaagcaatatcagatccttagcttctgtggttctgcacttattcagcgtctctccagcttggaccccttaaagtgttctccaggtacagctacttgaatcgtcagaaatggccactgacgccagcggaggtggtaagcctagtcttcttctgagtactttaccgaagcaactaccatcggattttctgaaagagattacggatgggttctctgctgacagaaaactgggtcaaggtggatttggaactgtttacaagggattcctgcaagacgggcaagccattgctgtgaagaagctctcagataattccccagtggcaaccgaaaaacagttcaagaatgaggttgggaaccttatggccatccagcatgagaacatagtgaggttgtatggctactgtcatgaactgcagaagaaagtgatagaacacaatggaagatacattcttgtggatgtggttcagagcatgctctgctacgaatacgcccccaaggggagccttgacaagtgtatttttgatatatcttctaggcctaattgggccacatgcttcaaaataattaagggcatttgccagggtttatatttcctacataaggggatggataggcctattgttcatctggatcttcagcctgccaacatactattggatgacaacatggtaccaaaaattgcggattttggcctgtcaaggctctttggtgaagaacaaacccgaataaacacaataaatgttgtgggagccaaagggtatatggctccagaatatctgtacagaggggagatctcaacccggtctgacatatacagcttaggcgtactaatcatggagatcacaactgggcagaagaactctccgaatgacaaagacatgtgtgcaaggaactttataaatcaggtttgccaaacatggacagacgaacacatggcatccaagtactcatcactagatgcagacagcctccagcaagtaaaagcatgcattgaaactgggctaaaatgtgtggatatcgatcagaagaagaggccctctatagttgaaattgttgacaagctcgatggaaggcttgctctctgaatggtagtgtatgctgcgcaaggtaaaactgtgatgcagagttaattctgcctatggtgatatgctctagatgcaatcacggaaacaataattgtatcacttactaatttatgtacttatgaaaaatatgttgcttgtgtaatgcatgtgttttggttagcatctagtacaccttccagccagttttttgtgtaacttcagctgtgaacaaaagatgtcataatgtgacatacctgtgatctcaatgttcatgttatgattttactctaaactatgtctataatcttgtatcatttgcatgttcatatattttta

SEQ ID NO: 124523 - DNA, 1632 bp, Zea Mays
gttcggagttcggacaatctcctggaaattctgatcgaacctcctgcttggagcttcgcagcaacaccgtcctcacccgcgctgaaaaagcacccatcttcctattgcgcctttcttgtagagtcaagtcagctcacttttctcgtttcgatccagatcccgtattcccgttggattcgtttatcccgcgtcccgcaagcaatatcagatccttagcttctgtggttctgcacttattcagcgtctctccagcttggaccccttaaagtgttctccagctacttgaatcgtcagaaatggccactgacgccagcggaggtggtaagcctagtcttcttctgagtactttaccgaagcaactaccatcggattttctgaaagagattacggatgggttctctgctgacagaaaactgggtcaaggtggatttggaactgtttacaagggattcctgcaagacgggcaagccattgctgtgaagaagctctcagataattccccagtggcaaccgaaaaacagttcaagaatgaggttgggaaccttatggccatccagcatgagaacatagtgaggttgtatggctactgtcatgaactgcagaagaaagtgatagaacacaatggaagatacattcttgtggatgtggttcagagcatgctctgctacgaatacgcccccaaggggagccttgacaagtgtatttttgatatatcttctaggcctaattgggccacatgcttcaaaataattaagggcatttgccagggtttatatttcctacataaggggatggataggcctattgttcatctggatcttcagcctgccaacatactattggatgacaacatggtaccaaaaattgcggattttggcctgtcaaggctctttggtgaagaacaaacccgaataaacacaataaatgttgtgggagccaaagggtatatggctccagaatatctgtacagaggggagatctcaacccggtctgacatatacagcttaggcgtactaatcatggagatcacaactgggcagaagaactctccgaatgacaaagacatgtgtgcaaggaactttataaatcaggctaggatacatatattactttgtgtttgatgacttaaaagttttagatgcttattcaaaatttcctaggttgtaaaatatcacttaggctcataattccaatcctataggtttgccaaacatggacagacgaacacatggcatccaagtactcatcactagatgcagacagcctccagcaagtaaaagcatgcattgaaactgggctaaaatgtgtggatatcgatcagaagaagaggccctctatagttgaaattgttgacaagctcgatggaaggcttgctctctgaatggtagtgtatgctgcgcaaggtaaaactgtgatgcagagttaattctgcctatggtgatatgctctagatgcaatcacggaaacaataattgtatcacttactaatttatgtacttatgaaaaatatgttgcttgtgtaatgcatgtgttttggttagcatctagtacaccttccagccagttttttgtgtaacttcagctgtgaacaaaagatgtcataatgtgacatacctgtgatctcaatgttca

SEQ ID NO: 124524 - DNA, 1532 bp, Zea Mays
gttcggagttcggacaatctcctggaaattctgatcgaacctcctgcttggagcttcgcagcaacaccgtcctcacccgcgctgaaaaagcacccatcttcctattgcgcctttcttgtagagtcaagtcagctcacttttctcgtttcgatccagatcccgtattcccgttggattcgtttatcccgcgtcccgcaagcaatatcagatccttagcttctgtggttctgcacttattcagcgtctctccagcttggaccccttaaagtgttctccaggtacagctacttgaatcgtcagaaatggccactgacgccagcggaggtggtaagcctagtcttcttctgagtactttaccgaagcaactaccatcggattttctgaaagagattacggatgggttctctgctgacagaaaactgggtcaaggtggatttggaactgtttacaagggattcctgcaagacgggcaagccattgctgtgaagaagctctcagataattccccagtggcaaccgaaaaacagttcaagaatgaggttgggaaccttatggccatccagcatgagaacatagtgaggttgtatggctactgtcatgaactgcagaagaaagtgatagaacacaatggaagatacattcttgtggatgtggttcagagcatgctctgctacgaatacgcccccaaggggagccttgacaagtgtatttttgatatatcttctaggcctaattgggccacatgcttcaaaataattaagggcatttgccagggtttatatttcctacataaggggatggataggcctattgttcatctggatcttcagcctgccaacatactattggatgacaacatggtaccaaaaattgcggattttggcctgtcaaggctctttggtgaagaacaaacccgaataaacacaataaatgttgtgggagccaaagggtatatggctccagaatatctgtacagaggggagatctcaacccggtctgacatatacagcttaggcgtactaatcatggagatcacaactgggcagaagaactctccgaatgacaaagacatgtgtgcaaggaactttataaatcaggctaggatacatatattactttgtgtttgatgacttaaaagttttagatgcttattcaaaatttcctaggttgtaaaatatcacttaggctcataattccaatcctataggtttgccaaacatggacagacgaacacatggcatccaagtactcatcactagatgcagacagcctccagcaagtaaaagcatgcattgaaactgggctaaaatgtgtggatatcgatcagaagaagaggccctctatagttgaaattgttgacaagctcgatggaaggcttgctctctgaatggtagtgtatgctgcgcaaggtaaaactgtgatgcagagttaattctgcctatggtgatatgctctagatgcaatcacggaaacaataattgtatcacttactaatttatgtacttatgaaaaatatgttgcttgtgtaatgc

SEQ ID NO: 124525 - DNA, 3722 bp, Zea Mays
atggccgatcttgttgttggcttggccaagacagtggtggagggggccctgaccaaggctcagtcagcgattgaggaggagacaaaactgcagcaaagcgtgcagcacaaccttgtgttcatcgctggcgagtttgagatgatgcactccttcctcaatgttgccaatgaggagcgtgtcaagaacaacgttgtgaggacatgggtgaggcagcgccaaatgctgccaccttgcttggcagcatcagcattgcccataaaagaggcagtcactgagatagagcagctcaaggttagggttgaggacgtgagccgaaggaactcacgctacagcctcatcagcgactctggatccaagcccatcatgcagcaacagacggcacccaaaactatttttggcacaatggtgcttgacatgatggttgaggcgagggacaccgcaaaaaggcagcaaggtttaggagatctcacccagctactaacaaaggaacaagctgacctgggggtaatctcagtgtggggaacaggcagtgaactcggtacaacatccatcatcagaaaggcctaccaggacccagaactctgtcaaaaatttgaatgtcgtggctgggtgaagcttacacaacctttcaatcctcatgagtttctccgcagtatggtcgcccagttctacgcaaacagttgcctgcaaaatggaatggttataaatgtcgatgaactgaagaggattgaggaaatggcgacaacgggaggcggactcattggggcatttatggataaagtaaatgagaacagatacctaatcgtcctggaaaatctgtccacaattggagattgggacaccatcggaacttacctgccagacaggaagaatggcagtcgggtcattgtatccacacagcagtgtgaaattgcaagcttgtgcattgggcattcataccaagtagcagaggtgaagcagtactcagcagagcactctgtatgtgtcttcttcgaggagggattgcaaggtaatggtgataaaagcatggaatctgatagagtagtagacaacaacaatgaaatgtcaatgcaggatgaaataacccacggtactggctttctgtccgacagaattccaacatctaaacggaaggatgcctctgattgggtgaagaattttcaacttgttgaacgcaagtcagaaatgaaccaactcggtaactatattgctaaggcacgtgtctatggtttgcaaatactgtctgtgtgggggatagctggtgttgggaaatcagccctcgttaggaacatgtactttgacagaattcatcgaaatgaccaattatttgagaagtacggttgggttgatgtaacccacccattcaatttaagggacttctcccggagtttgcttttggatttccattcagaacctgttcaagccatgggaatcaaagaccctactcaagagtgtcataagattctagaagataaccggtgccttgttgttattgatgatttgcagtccattgaagaatgggacttaatacaagctgccttggtgtctagaccttctagaagtattatcattgtcattacaactgaagcaagtatcgccacatattgtgcagataatgaaggggtcgtatttaatgtcaaaggtctagaagacaaagcagccctcaagcttttcaaaaagcagccatggggcatatttggcattggaatccacaactcgtacaagaagagtggctggctctcaccatttctccaatttaccggaaatctcaaatttataactaagttgcatggtaaattatgcatggtacataggcaaaaaccatcatctcctataaaggactccatagatgaagagctacaagaacttattttgaagtgtggtggtcttccaaaagttatagttgccgtagctaactttttggcacctaaaacagtctcatggatggacagtgcaagttctatgaatctcaaatttatgcaagagctggagagcagcccagagtttgcttgcctgcagccactctttggttggctgcactcctactttcgaacatgcccggattttctcaagccatgtatcttctatctgtcaatttttcctcgagatcacagtatccggagaaggcgattggtgagacggtggattgcagagggctatgccagggacacggacaaaatttctgcagaggaaagaggggagcagttcttctgcaggctcctcgatctgagcataataatgcagaaaccatattcagtcaccaccggattcagagacagcagaatgactttgtgtcaagtcaacagttttgtccgagagtatatcatctctcgtcaaatggaagagaaccttgtatttgaactgggaggcagttgcaccctaacctctcagcgcatggggcgtcacctcatcatactgaaaagctgggacagagacagaattgtgtttgagagcattgacttctcaaggctacgatctttgacagtgtttggagaatggaagccattcttcatatctgataggatgaggttgcttcgggttctggatcttgaggatgcatctgatttaaaagatgaagacctcaaacaaatgatgaagctgctttgtcgcctcaagtatctttccctacgaggatgcactgggatctatagcctgccgaattcattaggttgcttgaggcagcttgagactctggatgtcagacatacagccatagcaaccatgccaaggactatcaccaagctaaagaagttgcagtacctccgcgctagtaccaccaaaccaactaaggaacaaccaacacccgatactgctgttacacccaaaccaacaaagaaacaaccaaatccacacacctcggtatcatggacgtcatccttgttccacagacatcgacaactagagggtgttgtggttcctactgggctagagaaattgactgcattgctcaccatcggtgttgttaatgtcaattctgctcgggggaggtccatcttgaaagaggtcaggaagctcacccaattgcgcaagcttggagtgtctggaataagtaggaacaacagcaaagatttctgtttggccatctcaagtcgtgcgcatttagactccttatcagttaagctcaagaaggacaatcaggactgcttgtgtgtcaccccagatggctaccttccccccaagaacctacagagctttaaattgtatggccttgcagacagttttccaaaatggatcaatcaacttgaaaatctcaggaagttagttttggagatgactatattaacgcaagatactatcaagggactcaaggatcttaaagtatgtattctgcgtctaattaccaagcagcttcctgatggtaagctcaatttttgtgtcatgttgcatgggcagcaattacgttgctatgaaacagtgaagatactcgagatctcttgcagctccagcttagatgtggcttttggatcacaatcactgcaaaatcttgagctgctgaaagtttcctgctgtagtggttcagggtcggtaatgaagctctctgggctagaaaaactgtctgaatctgaactcaaggaagtccagattaagggttccgatgatttcatagtaaaaacagatgtggaggaacaacttgccaggcacccaaagaaacctgttttgaaggttgaaaaggtactgtcgtccactggggattttgagctctagagtgtcagtttcctatc

SEQ ID NO: 124526 - DNA, 2431 bp, Zea Mays
ctgatcttttttatgtaaacaatcattatgttcacacagcaattagtgtttacaatattgattaagatcatcttaaattgctgcaacaataggtacaaaagaaaagccaaacatcccctctgatgaattcaaacaacaaggagctagaacaacttattctaaaatgtgggagacttcctaaagtgatagttgctgtagccaaatttttggcaccaaagacagttacatgtatggacagcacaaaaacactgaatcacagatttatgcaggagcttgagagcaaccctgagttcagtgttctgcaagatctgtttgcttggatgcattcttacttccgtgcttgcccggattttctaaggccgtgtatcttctatatgtcaatcttccctgggtcccaaatcattcgtcggaggcgtttagtgatgcgatgggttgcagagggctactccagggatacaaaagacatcactgcagaggagaaaggagagatgttcttctcaatgctcgtcaatctaagcatgattcagccgccaacatgcagggtcatcaccgacatgaaaatggtcctatgtcaagttagtgctttcttccatgaatacatcatttcacgtccagtggaagaaaatataatatttgcactcgaggtctttgcactgaaggggcgttgccttccaactaccggacgcacaggacggcaccttgtaatagagaggtgctgggacagggataggattgtgttcgagagcattgacttctcgcgcctgcggtctttaacagtgtttgggcagtgggaatcattcttcatctctaaaagtatgaaggtgcttcgggttcttgatctggagaatgccacaggtgtgacagataaagacctcgagcagatggtgaagcttcttcctcgcctcaagttcctatctttgcgaggaagtactggtatctgccaccttccgagttcattgggtgagctgcggcagcttgagactctggatattaggggtaccttcatagcaaaattgccagcatcgattaccaagctaaagaagctgcagtacatgcgtgctggtacaatatccctggcaaaggaatcatcaacatcttactcttcagcgtctaggttgccaaacctatgcaaatcttgtaaactagttggtgttgagatgccatcagggattgatgaactgacaccattgcacacgcttggtgttgtcaatgctggtattggagggggcaaggccactctaaaagagctgaagaagattacccaattgcgcaagcttggagtgtccggtgtcaacaagaaaaataacaaggaattctgtgctgccatctcatgtcatgtccgcctggaatccttgtcagtgtggcttagcaagggaaatcaaggtttgaatgaaatatcgtctcaggataagcctctgcaaaaccttcagagccttaagttatatggtcttggaagtgaggtgccagcttggatgaaagatcttcccaaactcacaaagttggatttgcatatgaccatatcagcagaagttgacataattaaagtccttggggaaataaaagaactatgcactctacgtctttgtgtcaagccccttcaagatggtgatggtaagcttgatttttgtgtttgggtgaatggaatacagcagcgctgttatttaaatctcaagatcctcgagattacttgcagttcaaagttaaatatatcctttggatcagaagctatgcaaaatcttgagctgctgagagctcgctgctgtagtggatcgacattgaagtttatggagataaagaatctctctaaacaaaaactcaaggaagttcagcttattggttcccatgacactgcactcaaggatgacatggagaagcaactgaaggaacatccaaggaaacctcctttgaagctggaggaaccggaaggatgctgatctcagtatttagcaatagtattattggcgctaatcctatgtgaaacatcttactctgcttcatttcttatcactaggagaagcaactgaaggaacatcttactctgcttcattcaagatgtcatgataattggcgctatcctatgtgaaacatccctaggagaagacattcagttcatttactccgtacatcaaacgccgagcttcagcttatgtaactccataaaggatgttcacttgtgtgcatgtttatggatttgacttatgcgttgatgtagtaatcgttttgtaattttgtgttagagtaatgttagggttttgaggttagccccttgtaattactgtcacacccttagagctgatttggtgaccggggatcccgagggaaagaaatcctcttgctattcaaaattgaattgcaagggaattcctcccccatggatcccctagggatccctaatcaccaaatcagtccttatgtaatggattaggcccaa

SEQ ID NO: 124527 - DNA, 131 bp, Zea Mays
aataatgataatataccattaattagcattcaacaactgttatatatacaaaagcatcacaaatcaccaatttttatacacataatcacatagatatacaaatttaattagtattgcacaatgatagatcc

SEQ ID NO: 124528 - DNA, 1566 bp, Zea Mays
gagcgaccaggtagaaatcatttggtgtccagaaatgacgacaaggtcatccatgctcgttctcacgatgatctccttcctcctcacccttcctccggcctactcccaacaccaagtcttccgtgccaccatgacccgccacgaaccgaccatcaacttcactcgggccgcgcacaggtcccgcgaacggctttccatcctcgccacccggcttggcgcagcctctgcagggagcgcgcagagcccgctgcagatggacagcggcggcggcgcatacgacatgaccttctccatgggcacgccgccgcagacgctgtcggccctcgcggacaccggcagcgacctcatctgggccaagtgcggcgcgtgcaagcggtgcgcgcccaggggctccgcttcctactacccaaccaagtcgtcgtctttctcgaagctgccgtgctccagcgctctctgccgcacgctggagtcccagtcgctggcgacgtgcggcggcacccgtgccaggggcgcggtgtgctcctaccgctactcttacggcctttccagtaatccgcaccactacacacagggatacatggggagcgagaccttcacgctcggcagcgacgccgtgcaaggcattggcttcggctgcaccaccatgtcggagggcgggtacggctccggctccggcctcgtcgggctcggccgcggaaagctctcactcgtcaggcagctcaaggtcggcgccttctcctactgcctcaccagcgatccgtccacgtcgagccctctcttgttcggcgccggcgctctgacaggccccggcgtccagtccacgccgcttgtcaacctcaagacgtccaccttctacaccgtgaacctggatagtatctccatcggcgccgcgaagacgcccggaactgggagacacggcataatcttcgactccggcaccacgctgacgttcctggcggagccggcctatacgctggccgaggcggggctcctgtcgcagacgacgaacctcaccagggtcccgggcacggatgggtacgaggtctgcttccagacgtccggcggcgccgtcttcccgtccatggtgctgcacttcgacggcggcgacatggcactcaagacggagaactacttcggagcggtgaacgacagcgtcagctgctggctcgtgcagaagtcgcccagcgaaatgtccattgttggcaacatcatgcagatggactaccacatccggtacgacctggacaaatcggtgctgtccttccagccaaccaactgcgacagtgtatgaagaatatgagcatccaataaacgcacacccctgctcgtcatcccttctgttgattgttattattacttacgttcttgttgtatcacatgtcatataattcaacacgagacacgtacacgtatagttaattagtataaatgagataattacaggtggtggtgtcagaatgtcttatggatatattccgtgaatatacaagtaaataaatgacactaaactaaaatagaagaagattatcttcattgtgtgcggaccttaattattttacttatttc

SEQ ID NO: 124529 - DNA, 2046 bp, Zea Mays
gcagcagtgccatcagatcattgccgcgagaggggagaaaggctagctatcaggagagatccatcgctcaggaacaggaagaagtgaggcgacagctctgcaggatggcatcggagaaggtggagacgatcgtggcagggaactacatggagatggagcacgagcccggcggcggcggagaccatgaccagcaacccagcggcggcgcggcgtcgtccacttcatccagctccaggggcggcggcaagaagaaggccctgtcgagcctgttctggcacggcgggtcggtgtacgacgcgtggttcagctgcgcgtcgaaccaggtggcgcaggtgctgctgacgctgccctactccttctcgcagctgggcatggcatccggggtggtgttccagctcttctacggcctcatgggcagctggaccgcctacctcatcagcatcctctacgtcgagtaccgcaccaggaaggagcgcgagaaggtcgacttcaggaaccatgtcatccagtggtttgaggttctggatgggctactggggaagcactggaggaacgtcggcctcttcttcaactgcactttcctcctcttcggctccgtcatccagctcatcgcatgtgcaagcaacatctactacatcaacgacaagtatgacaagcggacgtggacgtacatcttcggcgcctgctgcgccaccaccgtgttcatcccctccttccacaactaccggatctggtccttcctcggcctcctcatgaccacctacaccgcatggtacctcaccattgccgccatcgcacacggtcaggtggaaggtgtgacgcactcgggcccaagcaagatggtgctctacttcaccggtgccaccaacatcctctacacctttggaggccatgctgtcactgtggagatcatgcacgcgatgtggaaaccgcacaagttcaagctcatctacctggtggcgacgctgtacgtgctgacgctgacgctgccgtccgcctccgccgtctactgggccttcggcgacatgctcctggaccactccaacgccttcgccctcctcccgcgctccggcttccgcgacgccgcagtcatcttcatgctcatccaccagttcatcacgttcgggttcgcgtgcacgccactctacttcgtgtgggagaagctgatcggcgtgcacgagacggggagcgtggccctgcgcgccgccgcgcggctgcccatcgtggcgcccatctggttcctggccgtcgtcttcccgtttttcggccccatcaactccaccgtgggctcgctgctggtcagcttcaccgtctacatcatcccggcgctggcgcacatggccaccttcttgccgccggccgccagggagaacgccgtggagcggccgccgcgcgggctgggcggctgggcggggatgtacgccgccaacttcttcgtggtggcgtgggtgctcgtcgtcggcttcggcttcggtggctgggccagcaccgtcaacttcgtccgccaggtcaacacctttggtctcttcaccaggtgctaccagtgcccaccgaggcactgactcgatgatcgaccaccaagattaatatatcaacaaattcatatgcatgcttgaatttcttgaggaaacatatgcatatgcctagtcatagagagagagagagacatcacaagatcatgacgaagagggtgttcaatttccatgtcgacgtatgtatgacgacgatccacatggtgtgtccttgtcggtatgtatgcgctacgaacggatgtgtgtatctctcgttaagatatatattgatattgatcgaattaagcgttacgtgtgagagttacgttgtagccatgcaattcagactgatatttgaatctatctttccggagaaaaaatggtcatgcttgccttgtcaaatctagctaggttgtactactacattgcgacatgcatgatgatgttaccatgaacaaaagaaaggaagggggctacattcagatatatagtttgagctgtttttctttctgattccaaatataaaaaaaatcca

SEQ ID NO: 124530 - DNA, 1650 bp, Zea Mays
gggagaaaggctagctatcaggagagatccatcgctcaggaacaggaagaagtgaggcgacagctctgcaggatggcatcggagaaggtggtgttccagctcttctacggcctcatgggcagctggaccgcctacctcatcagcatcctctacgtcgagtaccgcaccaggaaggagcgcgagaaggtcgacttcaggaaccatgtcatccagtggtttgaggttctggatgggctactggggaagcactggaggaacgtcggcctcttcttcaactgcactttcctcctcttcggctccgtcatccagctcatcgcatgtgcaagcaacatctactacatcaacgacaagtatgacaagcggacgtggacgtacatcttcggcgcctgctgcgccaccaccgtgttcatcccctccttccacaactaccggatctggtccttcctcggcctcctcatgaccacctacaccgcatggtacctcaccattgccgccatcgcacacggtcaggtggaaggtgtgacgcactcgggcccaagcaagatggtgctctacttcaccggtgccaccaacatcctctacacctttggaggccatgctgtcactgtggagatcatgcacgcgatgtggaaaccgcacaagttcaagctcatctacctggtggcgacgctgtacgtgctgacgctgacgctgccgtccgcctccgccgtctactgggccttcggcgacatgctcctggaccactccaacgccttcgccctcctcccgcgctccggcttccgcgacgccgcagtcatcttcatgctcatccaccagttcatcacgttcgggttcgcgtgcacgccactctacttcgtgtgggagaagctgatcggcgtgcacgagacggggagcgtggccctgcgcgccgccgcgcggctgcccatcgtggcgcccatctggttcctggccgtcgtcttcccgtttttcggccccatcaactccaccgtgggctcgctgctggtcagcttcaccgtctacatcatcccggcgctggcgcacatggccaccttcttgccgccggccgccagggagaacgccgtggagcggccgccgcgcgggctgggcggctgggcggggatgtacgccgccaacttcttcgtggtggcgtgggtgctcgtcgtcggcttcggcttcggtggctgggccagcaccgtcaacttcgtccgccaggtcaacacctttggtctcttcaccaggtgctaccagtgcccaccgaggcactgactcgatgatcgaccaccaagattaatatatcaacaaattcatatgcatgcttgaatttcttgaggaaacatatgcatatgcctagtcatagagagagagagagacatcacaagatcatgacgaagagggtgttcaatttccatgtcgacgtatgtatgacgacgatccacatggtgtgtccttgtcggtatgtatgcgctacgaacggatgtgtgtatctctcgttaagatatatattgatattgatcgaattaagcgttacgtgtgagagttacgttgtagccatgcaattcagactgatatttgaatctatctttccggagaaaaaatggtcatgcttgccttgtcaaatctagctaggttgtactactacattgcgacatg

SEQ ID NO: 124531 - DNA, 626 bp, Zea Mays
gttcatccactctcatcaccagctaagaacagggcttcgtctcaatggaaggcaaaacagggcagctcaggtgctgtttcgtcgccatcgtgctcgtcctgggtcttgtccttgagtcccaccaggctgaagctggaggcaaatggtgctgcgaaaccgccaccggaaaataccattttaatcgctgcgttgactcgggtttggtcgacaatattgggttctgtgcgggtaatgccggttgcatcattatggaagacagatgtggaggccgttggccggtgcctgctcgtgatgcgctttccctggatgtcatttgattaattataagcaagtacgtgaagaaacgagggccagacgactgtcgtccagcgattggttatttgtgaacttgtcgtttgtcttcttatttcaactttccaataagccccttcgtgaagtgtcatccccttcaaagtctgtcgactgttacgtatacaaatctatatatcaaataaagacggcgccgtacgtgtgtatatgtctctatttctgatcttgcagtcgtttgcttaatcaattgttctgtcactattttatctaataaaattgcacgtacgcatgtatatggtttcacagctaaaaaataa

SEQ ID NO: 124532 - DNA, 667 bp, Zea Mays
gttcatccactctcatcaccagctaagaacagggcttcgtctcaatggaaggcaaaacagggcagctcaggtgctgtttcgtcgccatcgtgctcgtcctgggtcttgtccttgagtcccaccaggctgaagctggaggcaaatggtgctgcgaaaccgccaccggaaaataccattttaatcgctgcgttgactcgggtttggtcgacaatattgggttctgtgcgggtaatgccggttgcatcattatggaagacagatgtggaggccgttggccggtgcctgctcgtaagagacgaacctcgtcgcactcttttcattcttctttttctcctttattttattttaattataatatctctgttctcgaatatttgttgtttcgctaatttattttttaactaaaacacgataaataaaaaattgacatgcataactttgcaggtgatgcgctttccctggatgtcatttgattaattataagcaagtacgtgaagaaacgagggccagacgactgtcgtccagcgattggttatttgtgaacttgtcgtttgtcttcttatttcaactttccaataagccccttcgtgaagtgtcatccccttcaaagtctgtcgactgttacgtatacaaatctatatatcaaataaagacggcgccgtacgtg

SEQ ID NO: 124533 - DNA, 498 bp, Zea Mays
atgtcgtcggtgttcagcggcgatgagacggcccccttcttcggtttcctcggcgccgccgccgccctcgtcttctcatgcatgggcgcagcgtacgggaccgcgaagagcggcgtcggcgtggcgtcgatgggtgtgatgcggccggagctcgtcatgaagtccatcgtgcccgtggtcatggctggtgtgctcggtatctacgggctcatcatcgccgtcatcatcagcactgggatcaaccccaaggccaagccctactacctttttgatggctacgctcacctttcgtccgggcttgcctgtggccttgctgggcttgcagctggcatggccatcggcattgttggtgatgctggagtcagggcgaatgcacaacagccgaagctttttgtgggcatgatcctcatcctcattttcgcagaagcgcttgctctgtacggtctcattgttggaattatcctttcatcccgtgctggtcaatcccgagcagattaa

SEQ ID NO: 124534 - DNA, 3161 bp, Zea Mays
cgcatttggacatttggtggtggcaaggcaacgccaaccttccctgttgctgctttgaatgttctggtggttgtcggatggatcgccgcagttggctctggaagcgcaagtcattggataagagccctggggagagcgatagctctggctctgcttcatcacactctgagccttccttcgatgatcaggaacctaaacctgtgtctagtaattcttctccaaatcatagtcattcgcctgatgtttcttctagaataatttataatgagaatcaagaagctgaaagagcagaatcattgaatgagaagctggtgttagcaactagctcgaatgattcttctccacaacatgatcaatcgatgaagccagatatataccaatcacctctgctattcccaaatatcaggaatgatgatgttccagattctgtaaagaatttgaatgagaaggtgtccccaaagtttaaggtcgatgatgtccaggattctgtaaagagtttgaatgagaaactttctgctgcccttttgactatcaatgataaagatgacttggtaaagcagcacactagagttgcagaagaggctgttgcaggttgggaacaagctgaagctgaagttgcttctctgaagcaactacttgaaactgcatcaaagaagaatacctctctggaggatcaggtcagccacctagatgacgcccttaaagaatgtgtaaggcagcttcgccaagcacgtgaagaacaagagaataaaatccatgagacagttgctaagaagtctaaagaattggagtctgagaagtttgagctccagcaccatattgctgaactcagtaagcagttgcaagccacgaaactagaagctactacggtgcgtgtccagcgtgatctgcaggaaaagcttcagatagtggagaaagaaaacaaagacctcaaggtagaattactcgcactgtccaaggacctgaagatacttgcacgggaaagagacctgagcaaccaagcagcagaaacagcaagcaaacttcacctggaaagtgtgaaaaagataacaagagttgaggcagaatgccttaagttgcgtcatttaacgcggcgtacgtccttgaccaatgattcaaggctgataactaacagtgcttgcatggaatctcagactgacagtcagtctgacagtggggagcacatgctagttgatgagatgaaaaattctgattcatgggcaacagctctgatagctgaacttgatcagttcaagaatgccaacaacgacacaagaaatcttgtgaataattcggttgaaattgacctgatggatgatttcctcgagatggaaaagctggctgcactgcctgaagtagactgtgtaagctctagctttggagctgaaactgattctgaccaaggtgtgagtagagataaatcatcaaaagttaaaactgaaccattgcagtgtcaggtgacagatttgcacgcaaagatcgagaagattgaaggtgagaaaagggagcttgaaatggcccttgcagatgccagagttcagcttggcacatcatgtgatgctctaatggtggccaacaacaggttgattgatttgcagatgcagttggacttggcaaatgagtccaaacatgctgctttcggagaagctgagcgactgaatggtgagaggaaagatttggcattgcaactggagtccaggtcttcacaagttgatgagcttcagctgatggtggcatcgctggaaaagaatgtagacaggaaggtgttggaattgcagttagagttagtttctgtggaggctgcagatctgcgcaagacagtggcttccctggaagagaagattgatgcagagataactctctctatgcagcacaaaacaaatgcagacctggcagaggcgtccaaagaatcattagaggcgcagctgcagtctgcaaacacagagatagggaaactgaacgggattgtgcaaactttagagaatgaggtgaggaaagagacagattctcgtgaagaactactgaaacagatagaggctatgaaaattgagtcagagagatcactatctgtggtgtctaccaaagagtcattagaggtgcagctccaggtggcgaattcagaagttgcaaagttgcgtgggatggtgaatgctctggagtgtgatgcggcgaacgagaaggcatattcttcagatctccagatgcaacttgaggcagtggaaggtatcaggaaggtgttggaatctgagcttgagtcttcacaccaggaggtgatgaggctgaaggagaaagtttcgtccttggaagcaaggatcaaggaccagacctcgttgcttgtagaatatacagctaaatcagaggatgcagtgtcccggaaaaaggcaatggagggtcaactagaagcagcaaatctggaagttacaaaactgagaaacaaggtgagcctgatacaaggcaaggtggagcaggagaagcttctgtcagaagagtacgaagcaaaatgccgcaagctggaggcgcaggtgttgagggacagccgagaggcgaaactttggcgcctcacgaactcaaacggagacctgaaggtgaagcaggagaaagaactagtcagtgctgccgggaagcttgcggagtgccagaagactattgctaaccttggccgccagctgaaatcgctaacagatcttgatggcgtggtggccgatcctgaaaagctggaatcgagggacacgcacctggacttcagagatggcggagacgtggctgatggactgtatgaactgggtcttcctaagaggaacggtagctgcctctcaccccttcggtcggatccgtcgccgaggggtttgccgtcccttagtagctacctgagcaaaacaaaaaggtgaaaagtctgatgggatcattcaccattgtgcttgtgcataaattatttgacagtctatggatgatgccagttgtgacctggtggtagatcggtgtacatttacagaacttgatggttgctcacatgtgtactttctccttttgttttgctctcattttgcgagactgcagggtttgtgacaaatttactagatcttgtgagactgtagtgcgttattctcgcgttggaattcaactcgtctacaacaaaaatagaagaaaaaaaacaaattcaa

SEQ ID NO: 124535 - DNA, 2367 bp, Zea Mays
gatatcagggcccacaggcaaggaagcccaaaagagccagcgatcattcctctccaaggctccaagactcaggctccaactttcccggccgccgccgccgtcgcgaatccgccgccacctacgcggccgcggtcatgagctccactgccgctgtggcccttaatcgtcgcacgcgcagccggccgccgtcggtcgcgtcttcccgcaggtctgatgatcccacggccgccggcgctggcgcccccgccaacggcaacggcaaagtctccaccaagcccgcctcccccgaccatacctcaggggagagaacggtcaagaagctgcggctgtccaaggcgctgacgatcgcggaggggaccacggtctcggaggcgtgccgacggatggcggcgaggcgggtcgatgccgttctgctcacagacgccggtggcctgctctcaggcatcgtcaccgacaaggacatagctacaagggtcattgccgaggggctgcgggttgagcaaacaatcatctccaagattatgacaaggaacccttcatatgtcatggcggacacacctgctattgaggcactgcataaaatggtccaagggaaatttagacaccttccagttgttgaaaatggtgaggttattgcgatgctggacattgcaaaatgtctgtatgatgcaatatcaagactggaaaaggcagcagagcaaggaagtgcactagcagctgccatagaaggggttgagcgccagttaggtggcaacttctcaggtccacacaatctcttagagactctcagagaacgaatgtttaaaccttctttgtcaaccattatcacagagaacacaaaagtagcaactgtttccctttcagatcctgtttgtgtagcaacccggaaaatgcgcgacttacgtgttaattcagtaattattatggctggaaattcgcttcatgggatctttacctcaaaggatgtgctgatgcgtgttgtggcccaaaatctttctcctgagttaactctagtagaaaaggtaatgactgcacaccccgactgtgctacattggacacaacaatccttgatgcactacatatcatgcatgatggcaaattcttgcatattcctgttcttgatggagatgggcaggttgctgcttgcttggacgttctgcaacttacccatgctgccatttcaatggttgaaggaggtcctggtggcgcaaatgatgtggcaaacacaataatgcagaaattctgggactctgcactagagcctccagatgaggattttgatagtcacagtgaattatctttagtggtgccatcagatgctggggatggcaggagttgtatttatcctcctgctgttggtaattcatttgtatttaagcttcaggacagaaagggacgtatgcatagatttacttgtggctctgagagtttagatgagctgatgtcttctgtaatccaaaggttaggcatgggtgatgagaagagtgtgattcaactgttgtatgaggatgatgaaggcgacaaggtgctgttgacaaccaattctgatcttactggtgctgtgttgtatgcaaaatcatctggattgaaggccttgagattgcatattgacgactcagattccagcaatgaagtaacacagccattgccagagctggcgtcatcaccccacggaagtcagtcgatgcatgttcattatggattgatggcttgtgcgattgctctgactggggtagctgtgatggtttacatgagacactctaaagcttgaacttctggagaacaaagaaatttgcaaagcttatatgcacaactcatgcgcatagaaggatcacacacttcggctcatgagaagggtaatagtgaagtaatcatgggctgatgacgatatacactcgattacattgttggtccaagagaaatacgctgactgactgtcatattctccagttaactgaagtcagttcttctggtgggagggaagcctatgctatggtatttcccgtccatttttgacaagtacccgtagtttcatgatgcagtgaaatatgcaacctttagggctagtttgggaactctatttttccaatggattcctattttctcaaggaaaaataaactaatttcaaatcccgtggaaaaatagggttcgcaaactagcccttagggtatgtacaacctttgtggtgcggtttttcatgtaaaaggcagttaagatatatgtaggtacaatgtggttaagtcacatgtgggttcattgtggtgtatctaaactttgtatcttatttaataaaatttctcaagacatgatttatttatgtggtttgtattattgaagttgtctctttgacttggataacctagct

SEQ ID NO: 124536 - DNA, 1423 bp, Zea Mays
atggggatccaagcaccagctggttgccgctcatcccaggccggcgaccgtcgtcgtctccatggttgcccgcgctagcgcctacgctgacgagcttgtccagaccgcgaaaaccatcgcgtcgccgggaaggggcatcctcgccatggacgagtcgaacgcgacctgcgggaagaggctcgactccatcggcctcgagaacaccgaggccaaccgccaggcctacaggaccctcctcgtcagcgctccaggcctgggacagtacatctctggtgccatcctcttcgaggagaccctctaccagtcgaccgtcgacggcaagaagatcgtcgacgtgcttagtgagcagggaatcgtgcctggtatcaaggtcgacaagggtcttgtgccactcgctggctccaacaacgagtcatggtgccaaggtctcgatggccttgcttcacgtgaggcagcctactaccaggccggtgcccgcttcgccaaatggcgcactgttgtcagcatccccaacggtccatctcaactagccgtgaaggaagctgcctggggcctcgcccgctacgccgccatctcacaggaaaatggtctggtgccgatcgtggagcccgagatccttctggatggcgagcacggcatcgagaggaccttcgaggtggcgcagaaggtgtgggcggagaccttcttctacatggccgagaacagcgtgatgttcgagggcatcctgctgaagcccagcatggtgacccctggtgccgagtgcgaggagaaggccaccccggagcaagtagccgagtacaccctcaggctcctgcgcacaaggatccctcccgccgtgccgggcatcatgttcctgtccggcgggcagtctgaggtggaggcgacccagaacctgaacgccatgaaccagagccccaacccgtggcacgtgtccttctcctacgccagggcgctgcagaacacctgcctcaagacgtggggcggcaggcccgagaacgtcaaggcggcgcaggacgcgctgctgctgcgcgccaaggccaactccctggcgcagctcggcaagtacaccggcgatggcgaggccgcggcggcaaaggagggcatgttcgtcaagaactacagctactaattaaagacgacggcgatacaccactcctgctgctagtacgttcctcgatcgggggcggtgccgttacaggtttcagctggaaaacatacactactgcaaattttactgctaccctgagtgaaaacatggaacgggtcactggatttgggcatcatttttctagagaagaggtcgacacacgataatactcactagtacacagaatcttgacggtactaaagctatttacactaacgtttttttatgcctactaagcgcaagtgaaaaccggcctttttcaccggcgtttgtttt

SEQ ID NO: 124537 - DNA, 1588 bp, Zea Mays
agctcaaagaccgtgtgtgtcaaagagagaaccagcacacagcagagtagcacctgatcgatcgatctcctactactagctcgttcgctttcacaaccagggagcagcaatggcatctgctgctactactctcctcaagtcgtcattcctccccaagaaggctgaatggggatccaagcaccagctggttgccgctcatcccaggccggcgaccgtcgtcgtctccatggttgcccgcgctagcgcctacgctgacgagcttgtccagaccgcgaaaaccatcgcgtcgccgggaaggggcatcctcgccatggacgagtcgaacgcgacctgcgggaagaggctcgactccatcggcctcgagaacaccgaggccaaccgccaggcctacaggaccctcctcgtcagcgctccaggcctgggacagtacatctctggtgccatcctcttcgaggagaccctctaccagtcgaccgtcgacggcaagaagatcgtcgacgtgcttagtgagcagggaatcgtgcctggtatcaaggtcgacaagggtcttgtgccactcgctggctccaacaacgagtcatggtgccaaggtctcgatggccttgcttcacgtgaggcagcctactaccaggccggtgcccgcttcgccaaatggcgcactgttgtcagcatccccaacggtccatctcaactagccgtgaaggaagctgcctggggcctcgcccgctacgccgccatctcacaggaaaatggtctggtgccgatcgtggagcccgagatccttctggatggcgagcacggcatcgagaggaccttcgaggtggcgcagaaggtgtgggcggagaccttcttctacatggccgagaacagcgtgatgttcgagggcatcctgctgaagcccagcatggtgacccctggtgccgagtgcgaggagaaggccaccccggagcaagtagccgagtacaccctcaggctcctgcgcacaaggatccctcccgccgtgccgggcatcatgttcctgtccggcgggcagtctgaggtggaggcgacccagaacctgaacgccatgaaccagagccccaacccgtggcacgtgtccttctcctacgccagggcgctgcagaacacctgcctcaagacgtggggcggcaggcccgagaacgtcaaggcggcgcaggacgcgctgctgctgcgcgccaaggccaactccctggcgcagctcggcaagtacaccggcgatggcgaggccgcggcggcaaaggagggcatgttcgtcaagaactacagctactaattaaagacgacggcgatacaccactcctgctgctagtacgttcctcgatcgggggcggtgccgttacaggtttcagctggaaaacatacactactgcaaattttactgctaccctgagtgaaaacatggaacgggtcactggatttgggcatcatttttctagagaagaggtcgacacacgataatactcactagtacacagaatcttgacggtactaaagctatttacactaacgtttttttatgcctactaagcgcaagtgaaaaccggcctttttcaccggcgtttgtttt

SEQ ID NO: 124538 - DNA, 2704 bp, Zea Mays
gacccatttatgctttgcaaatcatactgtttccaataattatagttggtcactatacacggtttttagcagacatggactcttgcgtattttccaatttacaaaaggaaaaatattaaaaaatagtaataaaaaagggaaaaaaaacaatggagacatcgtcgtcgtctccttcctccctccttcctggtcgcccatggattattccatagatacgacctagctgcgctgctacagcccccgcatttcccttcccccaatcctctcctccacgaacacgccctcccttttgcccgttcccagcctcgaacggcaaatcaaaaggcagatatatgagctcttggtcatcgtctccacgccccattggtagccgcctctgaaattcctataaaaaaagatatatgggtggagccatcacccacgccgccaagatcctgtcttcttgcgcggccagctcgtagctccacgccggatagatagaagaggccaacctttcctccccgcttgctccccttttctttcggcaggattgcacatcttcccccacgtgacacctgagaaagtgagagcacagatttcttcttccccttgctgctgccgtttctcgtttccgttcctctctgctcgtgggtttgtcatagataaacctcgcataaagcttcgttccctcggctcttggtcccaatcggcagggctcctccgcttacccgctccaatttctccccccccccccccccccccccccctgttcttctgtctccaacccgcgggaatccttgaggagttgcaggaatttgtagcgagaggctcctttcctgctgcggaggccgtcgtacggttcttgatccggggagcacacctggggcgcgccaatgcagccggacccgagcgggaacaccaatgcgaaggcgaagctgccgttgatggctccggcgccgtcgtcggggcgcccggcgtccgtgctgccgtacaagacggcgaacgtgcgggaccactatcgcatcggcaagaagctggggcaggggcagttcggcaccacgtaccactgtgtgggcaaggccgacggcgccgagtacgcgtgcaagtccattcccaagcgcaagctgctgtgccgggaggactacgaggacgtgtaccgcgagatccagatcatgcaccacctctccgagcaccccaacgtcgtccgcatccgcggcgcctatgaggacgcgctcttcgtgcacattgtcatggagctatgcgccggcggcgagctcttcgaccgcatcgtcgccaaaggccactacagtgagcgcgcggcagcgaacctcatcaagaccattgtcggggtcgtggagggatgccactcgctcggggtcatgcaccgggacctcaagccggagaactttctctttgccagcaccgctgaggaagccccactcaaggccactgactttgggctgtccatgttctacaagcccggtgataaattctctgatgtcgttggaagcccttattatgttgcaccagaggtacttcagaaatgttatggtccagaagctgatgtgtggagcgcaggggtaattctgtacattttgctttgtggtgtccctccattttgggcagaaactgagtctggaatcttcaggcagattatgcgagccaaacttgattttgaatctgaaccctggcccagtatttctgatagcgctaaggatctggtccgcaatatgcttactcgggatcctaaaaagagatttagtgctcatgaggttctctgccacccatggattgttgatgatgccgtggcgcctgataagcctattgattctgctgttctctcaaggctgaagcatttttcggcaatgaacaagctcaagaagatggcattaagggttattgctgaaagcctgtctgaggaagagattggaggcctcaaggagttgttcaagatgattgatactgacaatagtgggactataacatttgatgagctgaaagatggcttaaaaagggtaggctccgaattaacagagaacgaaatccaggctctaatggaagcagctgatattgataacagcggaaccatcgactatggtgaattcatcgcagctactctgcacatgaataagctggagagggaggagaacttggtttcggcattctcattttttgacaaagacggaagtggctttataaccattgatgaactgtcacaagcatgtcatgaattcggtcttgatgacgtccacctcgaggatatgattaaagatgttgaccagaacaatgatggccaaatcgactacagcgagttcacagcgatgatgaggaagggcaatgctggtgcaacaggaaggagaaccatgaggaacagcttgcacttgaatctcggcgaactcttgaatcccagcaaaacctagcgtgcattggaaggtcttgtcgggtacattcccatggcatatgaagattttggatgcgttgtcgatcggctggcctattctgagatgttgagcggttgtcctgtggtattactaagatgctgaagaattttcctagaagtacaactgccctgcggcatatatgtataactgtcgatgtaatgtagattgaacatggtctaaacattacttccctagaagtacaacttctctgctgtcaagtgtgtgtttagttgatattgaatagcaatttctttctctaatttcattgatgactcttttttaca

SEQ ID NO: 124539 - DNA, 2184 bp, Zea Mays
caatttctttccaaatttttcggaggcctgtccaccaccgaaccaccaccccgcgcgccgagctcaccccgatccagatccaccagtcgtccctccggtctgcgacgggcgccctcctcctcgtcctcacgcgcctccggaagccagtgcctgcgcagtgaagcatccatctgcctctcctctcgtcggatccggggccggccaggcggcggcagcatgaagcgggtgtcgtcgcacgtctccctcgcctccgaggcggagatcaacctcgatctgtcgcgcctcatcatcgacaagcccaggttcacgctggagcggaagcgctccttcgacgagcagtcgtggagcgagctctctcaccgccagaacgacggcttcgacagcgtgctgcagtcgccggcattcccctctggtgtctttgactcgcccttctccgtgggcacgcatttcggggggccgcacccgctggtcaatgaggcctgggaggcgctcaggaaatcggtcgtctacttccgggaacagcccgtcggtactattgctgccgtagaccatgcgtcggaggaagtgctcaactatgatcaggtttttgtgagggattttgttccgagtgcattggctttcctaatgaataatgagactgacatagtgaagaactttctcttgaaaactcttcaccttcagagctctgagaaaatggtagaccgattcaagcttggagcaggtgcgatgcctgcaagtttcaaggtggaccgtaataaaaacagaaacactgaaaccttagttgctgattttggtgagagtgcaatcggcagggtggcaccggttgactctggattttggtggatcattctccttcgggcatatacaaagtacaccggagatgttagtttgtcagaatcacctgaatgccagaagtgcatgaggctgatactgaatctctgcttatctgaaggatttgatacttttccaactctgctttgcacagatggctgttcaatgattgatcgtcgaatgggtatatatggttatcccattgaaatccaagccctattctacatggctttaagatgtgctctccaaatgctcaagccagagggtgaagggaaggatttcatagaaaagatagggcaacggctacatgcactaacttaccacatgaggaattacttctggctagattttcaccagctgaataacatatacagatacaaaacagaagagtattcccacacagctgtgaacaagtttaatgtcattccggattccattcctgattgggtgtttggtttcatgccatgtcgaggaggctactttcttggcaacgtcagccctgctatgatggacttccggtggtttgcccttggtaattgcattgccattgtatcatctctagctaccccagaacagtcagttgctataatggatctgatcgaggaaaagtgggatgagctagttggtgagatgcctttgaagatatgctatcctgctctcgagaatcatgagtggagaataatcactggatgtgaccccaagaacacccggtggagttaccacaatggaggatcgtggccagttcttctgtggctgctgacagcagcctgcatcaagactggtcggccacagatggcaaaacgtgccattgagcttgctgagtcgaggctgctcaaggacggctggcccgagtactacgatggcaagcttggaagattcgttggtaagcaggccaggaagttccaaacctggtccattgctggttacctcgtggcccgcatgatgctggaggacccatcgacactgatgatgatctccatggaggaggaccggcctgtgaagccgaccatgcggcggtcagcatcatggaatgcctgaatgcgtggacagttgtttctgaattaaggaaatttagaagcaaaggttatacgtgagtttttttgggatcataaaagtttgatgtgattttgttgggaccggaatagttcaacgttcattatagttgagctctgtcaattaggacagaaattgtataccatagaggatcataggagttacacaggattttgtcacacctttttgttttgaatactaggatcctgttcagttgaaaccttgattttggaataacaaatcactatttatgcacacttttcactgtggcattactggtatctctgataactctggaat

SEQ ID NO: 124540 - DNA, 2026 bp, Zea Mays
aatggcagtggaaacgctccaccaccagaaaatgagaaaaaaaaaggttgggaggaagagaagcaacgaggttagggtatgtagctataggtccctgccagccagagcaatggcttttgcttaggaaattaacccatgacataacccaacaacacccccaaccccacccctctttctctctctctctctctcactctcctcagtcatcaccatcctctccctccctctgacctccccgcttctctctccaccacgtccctctctctttctctttcgcctcccagccccacacctctgatctccactccccacacccacatccgcgtctgccacgcacgtgcaacggtgcacacacgccgccgccgccgcgtcctcttccgctccgctcccctccgtccaacgccgtcgctcgtgctgcatgaaggcgcacaccacgcggccgggagagagcaagcgtagctagctagctccgaagggatcggaggttcttttgctcaaggaagacagaagcacgacgaggcatggacgcgccgtcgagcagcacgagcacgagcaccaacagcagcaggagcgcctccgagcagcagcatcatcaccagcagcaacagcagcgctaccaccaccatcaccaagcggcggggcaccagccgttctactacgccgctgccagcgcggccgggatggcgcagttcatggggtcgcgggccatcgcgcccgccgtcccggtggatgtgcagctggcgcagcagcagcagcagtcgtcggcggcggcggcagcagcgcctgcaggatcgtccggcgctgctgcggacaagacgaaggccgtggtgcccgcggctgctgcggggagcaaacggcccaccaaggaccgccacaccaaggtggagggccgcgggcgccggatacggatgccggcgctgtgcgcggcgcgggtgttccagctcacgcgggagctgggccacaagaccgacggcgagaccatcgagtggctgctgcagcaggccgagcccgccatcgtcgccgccaccggcaccgggaccatcccggcgaacttctcctcgctcgccgtctccctccgctccgccgccggcgcgtcccacccgtcctccgcctcccgcgccgtcgccttccaccacctcccgccgccgcagcacgaggtcgccgccatgctcggctggaaccaccatcacccacaccagcagcagcagcagcagctcctcccaccgcctccgcagcagcaggcgccgcaagatcccggcgccggggagttcatgaggaagcgctacagggagggcgacgacgacctgttcaaggaccccgcggcgcgccagcatcatcccgacggcggcgacgccgaggaacacaaggcccgcgtcacgccagccaccgcaatgtgggccgtggcgcccaacagcgccggcgctggcgccttctggatgcagcccacgtgggcgttcggcggcggcgggagcacggtgcaggcgccgctccagttcatgtcaacaagaagcgccaacaacttccccgccgggacgacaatggacgccaacatcggcatgctcgccgcgctcaacgccagcggcggcgtccagcagcaggacgaggggcagacgcgggagatggcccagcgccaccgcggggcgaacggcggcgacgccggacgtggcgcagcgagcccccagtaaggatggaatcggtcgcatgatgaggtagctagcattgcagtgcaaggtgtgcgccgctgccgctggtgcagcaggcatttggcggcgattagggcagagttagtggcttgattaggtgattgctactgcagtactgctcttgtgatgagagttgatccattggttgcttagtttattcttcaaggattattttagtttgctcttggattaatctatggttgtgctgatgggagtgatgattagctgtgggtccgattaaatcacaaaaggatcagactgtcaattcttattatatatgctatggtgccaccaacaagatttgcagagagatttgtacagtc

SEQ ID NO: 124541 - DNA, 124 bp, Zea Mays
attctattttatttactttctgtgatcataattactgtattttaagtaggctaatcactgttcatgctatgggaaaataggaagtttaatttaaaattccgttatgttattgattcacatagtt

SEQ ID NO: 124542 - DNA, 865 bp, Zea Mays
aggccaaaatgcttctgaatactgggattctttcttgactagtgaagacaaaaggtacaattcaaccaacaaggagtagggataaagtcaatcatagcattggatcatctaaaaattatatttatatggatggtcaaatgtgaggtatgctcaagatttatcttattaaatttcttggatgtttattggcctacttcagctctactagcgcttattctgacttcagattgaacatgagagagactgcaaatttgtctgatgcaaaaaatcatcgataagtcaaaccttcaaataaagtcagttggggcattggatcatctaaaaattatatttatgttgaagctgagaaggaggctcatgtcaaagagagagggaccgtctaaaagtattgtgcaagatatagagcatgcactcatcatatctaagtgatcggagtgatattgattggcttattagatggatattggcccagtttatctttcattttttctatagctgtttgaaatttaccttgctcatagttcatactataattaatatgagactcttgttttgtagtacgctagcttgttgtcatgaagaagtcattcaagttccttcaaggtgttctggacaaagaaagcttgtaccttaaaacaggaggatacaagaagctggagtggttgtctgaaggcttttgaactgcttgaagcattagtgtagctttggtgcttttgtgactgatcatctctagagcagctagagtgatatagttgtgggcttttgaacaatagttggagtgatatgaaacattagtgatctagttgtgaatgatattataattgtgatgcttttgtgaatatataattgtggtgcttttgtgttt

SEQ ID NO: 124543 - DNA, 2804 bp, Zea Mays
aacctcaggtcaccagcaccttctccccacacccccgagttcgagtgcaaccgaagagccaagaggagctgtccgcgtcgtttcgactcccgccgccgaaaggccgagcccgtgcccgtgctcgcaaccctaatcccctttccccgttgcctctcgccgggaagaagagggagccgcgtggcgtcgccagccagcacgcgccccctcccttcccggctccctccgcgccgtgggcgaggcgcatccaacccgatccgccctcaccgcgaggcggaggacctggaggggagggagacaggtctggtgcaccctctctcgtccgcgccggcgagcgccaagtgtcccccacaggcttggctgaggaagacccgtgctctgtgggtcttggacactgcttcaccatttaccaagtcttgagttattgctccgttgttagacaagaaatcaaactctctggccaaacacaatgatggcacaagcctgtaagaagaggagaggagtttatataagcactgaattgggaggctctgatacagattctgatgttgagggaagcaaaccctctaaaaaatctggggtgacatcaatttctacatgcgagcatcagtcatcttataatctcaaggctgcaagtatgaaaagtagcaggatgataaggctgtgtggaaatattgtaaggaagctcatcgatcacaaaggtggttggcttttcaaagatcctgttgatccagatctatataagattcctgactactttgatgttatccgcaacccaatggatttgggtactgttaagaataaactcacaaaaaagaagtatgtaagcattgaggagttcgcagcagatgtgaggctaacattttcaaatgctatgaagtataatcctccaggcaatgatgtacatgctttcgctagagaattgaatgaaatatttgactcagaatgggaatcagtagaaaggaaatttagaggccgaaaccttgttcaagagcagaagacaaaggccataaaagttcgagctatcgtggattcgaagtctacagttgctagagggcaggttgcctgctcaaatcctaaatctttggctgcaagagggccagtaccttgctcaaattcgtttgcaaagaagacactgacagatgcattatcctccaaagtaaaaatcaaattttccgtgcgcagctctgcacatacctcttccaaagatatacctgttcaaacagctggtgtcaaagaggggtcattaaaccactcttttcctaccggcaacaaagaggcatatttaaattgcacttttccttttgctaaggagaatgctaaaatttcaagtacacgagaaactgagcgcagctctggttcaactggaaatgattcatggtcttgcaatgacatttctacttcgcctatcgcctcctctgtacaaggtgaggaaagttacctttgtgatgaacctttatcaccaagcagggctcttcgtgcagcaatgctcaggagtcgttttgctgggactatagtgaaggctcaacagaaggcacttctggatcatgggaagaatatagaccctgtgaaattgcaattggaaaaggagaggctggaaaagaggcagcaagaagagaaagcaaggattgaggctcaggtgaaggctgctgaagcagctgcacaacaaaagtttgaggaagaaatgagggtgaagcgagagcaggaaagggaagcagcacggctggcagtacgcatgatgaagaagactgttgatattgacaacagtgacttcctaaaggagctggagaacttcagcaaaacgtggcagtcgaatccacctggcaaattaatcgtggattttattgatggggacttgccaccggggttagggagccctctggagaggcttggcctgttcatgaagaacgatctcgaggatgaggtggaacaggaagtcgaggacagcgcatcaccctcgatggacgttgacatgaggaaagatttagcagggcatgaaatgcaagacagcatatcacccgtgaaggtcattggcacgaaggatgacttccagggagcggacattaacacgaggaaagatttccaggaagacgcagcagggcatgaaatgcaagactgcatatcagccgtgaaggttattggcacgaaggatgacttccagggagctgtagggcatgaaatggcgaacagcctatcaccatccactttcgttgacacaaagaaatattccgaagggacagaacatgagatggtggatagcatatcgcctttgatggatcctaacaccgaggaaggggagatcagctgctgacgttagctacacttgtcatccacatcatttgttgagttcgtgaggcagacatccttgctgggttgttggattaggcgacatcataagcagagtgacgaagaaacgctattcccctctggttgtgtcgtagaacaatgtggagaacatgtgtcagccgaactgagtagtggttttggctttgttgcggttttttttcctgtcgtggtcttgtcagtcgggcactccgctgtatgctgggttacctgagctcgtcagctggatgacctgtataaaaacatgatgaaattagggaggggttaatttagtgctagtatatattgtaggtgtaggactgtaggagcttatggtggagccggctgcagcacacaagctatagcattgttctcagatttggtcagcgcgccgtagtaccttgttactgtattcattctaaaacttgaataaaatgatgccagtcgcacaagttactgtaggagtagctatgacatgttatttg

SEQ ID NO: 124544 - DNA, 513 bp, Zea Mays
atggcgacgatgccgccgatgcagatgccgcctccaccgccctccggtgacatgccgcccatgccgatgccgcctatggacagcagcatgcccacgatgcatgcggccttcttctggggccaccgggtgcaggtgctcttctccaactggccgggcgacgaccgcgccggcgccgggatgtacgtcctctgcctcctcgtggtggccgcgctcgccgcgctcgccgaggtgctcgcggcatggtcccgcgccctctccggccgtggctccaacgcgctggggtggacgctgcaggtcacgtggatccacctgctgaaggtgggcctctcctacctggcgatgctggccatcatgtccttcaacggcggggttttcttggccgtcgtggctggccacgccgccgggttcctcgttgcgcagagatcgatgctactacgctctgcggtccgtgacgacgacgtgcacaccaacggtaacggtgatgtcccttcgtcgtcagaaccaaagccttga

SEQ ID NO: 124545 - DNA, 1389 bp, Zea Mays
atggtccggtcccgggggcatctggccctgtctacgcggctgatgaacgtaggcctcgcttcgctctgccggggtggctggctcgaccgtgcggagtccgtcctcgtcgacgccatccgcctcggcctgcccccggatgtcgtcacctacaacaccctcctcgccgcgtactgccgggtcgacggactcgacgcggggctagccgtcgtgcaccggatgcgggaggccggggtgagacccgacgccgtcacctacaactccctcatcacgggcgccgatcgcagcggactcacggtccgcgcccttgacctgttcgacgaaatgctgaggtcaggggtcgcccccgattcgtggagctacaacgccctcatgcactgcctattcaggtccggccacccggagcatgcctaccgtgtgtttgctgatatggctgacaggggcgtggcaccatgtgccacgacgtacaacacacttctggatgggctgctcaaggctggccacgtgacaaatgcattcaggatgttcaggtacctgcagagggcggggcttcccgtaggcattgtgacttacaacacaatgatcaacgggctgtgcaagtcaggcaaggtgggctatgcccgcatggtccttaaggagctggggaggacagagcatgccccgaacgctgtcacgtacacaacagttatgaagtgctgctttaggtatggcaggtttgagcaagggttggagacgttcttgtccctgcttgaaggagggtacatttcggatgccttcccatacacgacagtgatcagtgcgcttgtcaaaaagggccggatgcaagaagccaatacctattgtgagctcatgatacaaagtggttctacgcttgacaatgcatgctacaacactctgattcacctgcgatgccaagaagggaagattaatgacgcgtttgagctgttgaacatgatggaagaaggtggtctagagagcgatgagtacacattctctattttggtcaatggtctttgcaagatgggacaaatcgaggctgctgagaagcagatatggtccatggagatgatgggcatgcaatcaaatgtggtagcatataattgcttgattgatgcgttatgcaaatgtcatgaggttgatgcagccataaaaattttgcacagcatgaagctaaaagatgatttttcttacacatcactagtccatggtctatgtaaggtgggtagataccatatggcatccaaattcttgcggatctgcttgcatgaaggaaacaacgttcttgcatctgcaaagcgcgctgtcatttctgggcttcgtagtgcagggtttaaaaatgatttgaggaaagtccgatcagcattatatatggctaggctgttgcggtcttaa

SEQ ID NO: 124546 - DNA, 1665 bp, Zea Mays
atgttggctttggaggatcctgtccaaagtagtgtgactgttggagtttcacattttgagagatgctcgctctgggttcaagttttgtattacccgttttatggaagtggtggatctgcagactatgaaggaaactatgcagaagaagaggattcgcagatgatgaggcagaagcgctcacttcggcctgagcttggggaaccagttgttttgcggtgccaaccctacaagttccctctcgccgagcttctgctaccattagaatgctctccagttgagtatttccggctatggcctagcctaccagccatggtggagtgcactggcacgtacacatatgaaggcagtggtttcaaggccacggccgctcaacagtatgacagctctcccttccttggtggactgaagtcaatttcttctaagcccttccatcaagtctgctcacatttcatccgaacagtagctggattccagttatgttatgcagcaaagacatggtttggtgggtttgtgggcatgatgatatttggggcaagtgaagtcagccggaatgttgatttgggtgatgagaccaccacaatgatctgcaaattcgtcatgcgtgcgtctaatgaatccatcacgagagagattgaatctgatctccagggctggctggatgatatcaccgacggtgctgtggaatacatgcctgaggatgaggtgaagagcgcggccgctgagcggctgaagatctccatggagaggatctccctgctcaaggcagccaagccaaaggtcccacctgcgaagaccgagcaagaggaggaagaggagcgaaagcagagcgaggaactagatgggtttgggaaccccaagggcccctcgaccctctccaagctcactgcggaggaagccgagcaccgagctctccaggctgccgtgctgcaggagtggcaccagctgtgcaaggagaaagctatgaaagcacaatattgtgtcgcgaacaaactttttgtaacagtagcatttttaagatctggcgtgaagatcaattatgcctcggctgatgctccagaggttaagaagaaaaggaagctccagtgttcgttggacatgcagccgatgtctacccaagctaagctagacatcagcgatgatgtggtggatgctggtttggtggatgatgtggaaggtggaggcatggtgaagacagtcaggtatgttggggaggaaatggaggaagatgatgatgatgatgagggagttcttgcattagtcggctatgccgccgatccagtcctgaccctagagggcgctccagcccccgagggtgctctagccctcgagggtgtcgtgcttggttctccttctgctgcttcaatggaagttcaggttgggtcgctaatgcctccgattgacgatgctgtggcaacaagttctaccctgcccatcagatctcgtccagacgatccaaccacttttggagaggccaccccgagtcaagttcctgaagatgctacaacaacttcgaccagcgttgggatcccaatgggtgttgcacttcgtctgggggatttggagcctttggcgcttgttcctacttcctttgtggcttctacggatgttgctacttctgggctatcttggcttcaccagctttggatcttccagtgtttctattga

SEQ ID NO: 124547 - DNA, 1507 bp, Zea Mays
ctcccgcatcaaggaccggtccttctcaactccgcgccggagcccctccgcctcgggggcgcgatggatctcctcatcgcgcagatcaccaccgaccttcgctcctcggacgcactccggcagtcattggcgctgctgcaggccctgcagcagtgcgccgcggggcgggatgtctccgcgctcgcccgcaccgctgccaccgagatcctgtcggcaccctcctccgcagtctgcaagcgcctggctctcgacctcctccgcgcgctcccgctgccgccagacctcctcgacccgctcctcctctcctccctccgctccgacctctcctttccggaccccgacgtcgcctcctcttccatcgcctcgtttccatccttgccctcccaccttctcccatcgctcctctcctctgcccatgctgaaatcgctaatgcgctctcctcgcccgctgagtcgctgcgcctcggcgctgtcacatctctgtcctcgttcctcccgcgcgatgacctcgtgctcatgtgctccacaaacccctccctcatggcacacgccaccacgtggtgggcccgcctggccgagcttgcgctggactctgcagacgctgtttccgccggtgcgtttgaggcccttgcacggttgttccaggagctagaggggcgccgcatgagccggctagctggtgacaagcttgttgatggagaaggtgtgcttgcagtgcgggcccagtgggcggctgatgccattgatttcatttggtcaaggcgcaatatgctgattgcgcgctccgtggtgatgcctgcggagagcttccgacttactgtgcaccctctagtgcatgcagcgaaaatggttgcttctggtgtagtaaacacgctgcagcggattgccaagccaggggacactacaattgctgatagtgtggagtctagtgcggagaaattggttggagtgtcagacattgtctcgcacttgctgccattccttagttcacttgacccaccactggtgtttgaggtggggatcaatatgctggcacttgcagatgtccctggtggcaagccagagtgggcttcagctgccattattgcaatcctgacactatgggaccggcaagagttctcatcgatgagggagacaattgtaagggctgttgtgaccaatcttcatttgctggatcttggaatgcaggtctctctgttcaaaagactgcttcagatggtgagaaatttgagagcagaatcagatcgtatgcatgctctggcatgtatttgtcggactgctctttgtgttgatctttttgcaaaggaaagtgttcgaagaggtcagaagcctgttccaggaacagacgtgatatcactctttgaggatgtgaggctgaaggaagatctaaatagtgtaaccagcaaaaacttgttcagagaagagctagtggcttccctggtcgaaagttgtttccagctatcccttccactaccagagttgaagaattctgggacagagagcagag

SEQ ID NO: 124548 - DNA, 252 bp, Zea Mays
atgtgcgaagagatcattttctcctttatgttcaagagaatatgtccctgcgacatttttcactcgaatgtcaagtgctggaaaaataacctgcaaacatcaacagaaaaatcttataccacaaatgttctatgcatcacgacgggcttacagttggcaaataaatttccacaaatataccaatctatgggcatttcagaaattaatctatctatgataaaaacatgtaattatacaaggtccatgctttga

SEQ ID NO: 124549 - DNA, 261 bp, Zea Mays
atgctcctcctcaaggagctggcgagtggcctaaacctgttggcatcagcgctcttctcttccacggcgagcaactcgtcgaggcgctgcttgagaacaacaatgtccaattccggcaccatgacgatgacgggtggtgacaagtcgaaagggggcggcagcgacaaggtggcggcgcccaggtggcagcgacagcctggagaggcagagatggtggcggcggccacgaccagtggtggcagtggcgaccctaggggatga

SEQ ID NO: 124550 - DNA, 635 bp, Zea Mays
aattgctgtataacgtataaacttaagtagcgtttacagcagttagtgtgccccgacaaaaaccaaatattgcctgactgaggaaaaaatactgttctcacgcgggaatctatcggctgcccacctgactgcaccaaagaaacaaataatatcaaaccagtaagcttgtaatatttcatcttatggcaatgtctgtatatgtacaggagcaagttctgttattttctttcgccaacattgatggcaacaatgacacttctgtaactagaaacgttgccgatgaagcaggataagaaatggctaacaaaaatgctagcaaagcctcttcaatcctttactgcaagccttcccaagctactctgctccgtttaacctcaagttagtaacaaaagatagatgaatggccatggccaagcgagcatgataaaaatgctagcaaagcctcttcaatcatgtgaaaagaacagatggcggttgcttgaagctggagctgaaagcacctgctttatttgacgatgttaacatcttatccttagcagtggcactgcctataacctgttcagaagaatctggctgctggttgttttcactatggatgggtcgtgcccaaattttgattagcccctcacggcata

SEQ ID NO: 124551 - DNA, 719 bp, Zea Mays
ttcctgcattgcctaaacagacgatgaaaaagtgagggtgacgtaatgcataggaaattggataaatataagaaatgaattctgaattgctgtataacgtataaacttaagtagcgtttacagcagttagtgtgccccgacaaaaaccaaatattgcctgactgaggaaaaaatactgttctcacgcgggaatctatcggctgcccacctgactgcaccaaagaaacaaataatatcaaaccagtaagcttgtaatatttcatcttatggcaatgtctgtatatgtacaggagcaagttctgttattttctttcgccaacattgatggcaacaatgacacttctgtaactagaaacgttgccgatgaagcaggataagaaatggctaacaaaaatgctagcaaagcctcttcaatcctttactgcaagccttcccaagctactctgctccgtttaacctcaagttagtaacaaaagatagatgaatggccatggccaagcgagcatgataaaaatgctagcaaagcctcttcaatcatgtgaaaagaacagatggcggttgcttgaagctggagctgaaagcacctgctttatttgacgatgttaacatcttatccttagcagtggcactgcctataacctgttcagaagaatctggctgctggttgttttcactatggatgggtcgtgcccaaattttgattagcccctcacggcata

SEQ ID NO: 124552 - DNA, 873 bp, Zea Mays
gttaaaagatccaagaggtctaagaaaatgggcggtgacctctagtttctcatcacaagccctggcaaaagaagagagagcaacataatcagcagtagaaagcgacctgtacagtaattgagaaaaatatcagggagagatccattaaacaagaggctggagacgctttccattccattcaaagtaaaatgagcctccttattaaagggagcagcgaagaaagagactctgcttgtccgcacgggcaaccacctcccgctcgagtccgaccctgtccatggcagcagccccgctggctgcccaccagccgtcgtcgtcgcgctagtctcctgatagatgcatgggggccgcctcccgccgcgcggcgccggcgccggcctggcggtcgtcgtgcctagcgctgtgcctgctgcccgtcgcgctgccgctgctgctgctctgcctcccgctgctctgcgtcgtcgtcgccttcgcccgcttccgccgccgccggcgcaggctgctggtgacggcggcgaagagcaggagttgctgtcccggtgagcgatcgttgcacgaggcggagggccaccgcgccgcgctgctgcacaagtacctcgaggaccagatggagctcgtggccggcgacgccgttgccgtggacccgacgccgagctcgcagcgaagccacccacatcagaagcagcagtagcgtgggctacaagacggcgcaggaaacagagcttgatgactacgggcggatgatctgattagaggacttcggtgttcttgcgtcactttgttctcttaggacggacttgtttgtagatggttgttcccgctgtaaattcctcttttttttttgacaaagataaagttgagctcaaacacata

SEQ ID NO: 124553 - DNA, 422 bp, Zea Mays
ctaaaaaaggttttctctaaaaacatagatcacaaattagagctaatccttaccttatgcttccattctcatcttaacccatctgaagagaaaagtgccttacccaagaagataccgggaagcttacccttgaagcctagaacaagctacagaagaaaccagtccagccgctcagtcaaaaggaccgaccgtgaggatcaaagcactaccccgagtcaaagtaaacaggaaaagaggacagaaggagttattaccatacagagaggcaaagattcttggaaccagagaccacaaacatcagggtcattgaccccaccactcacccgtgcccctcgcacgcgtgcccgcctccatgcgcactaccaccgccccacgccccctttgcagcgcactaccgccgcccacccccctttgcagcgcac

SEQ ID NO: 124554 - DNA, 981 bp, Zea Mays
ggtggccctcatctacgcccggcccggcccatgcccgcgcggccagctggcacggcgcggaccaccttcaccggccggcgcaccacgaaggcgccctcggcgacgcccacgacgctcctgcaaccgtacaggtcgaggagcccgacgaccccgccggcggaagcgatggaccaccgccggctgctgggcaccgacgacgacgtcgtcggccgcgcggggaagagcgcgtccatcaggccggcgtctgatcccgcgccgccgcgttccctggtgcactccgcgagcgccgcggcgaaggggtccccccccgcgtcgtcggcgggcatcggctttccgcaggcgcgtcggcgccgggcgtgctgctggtggcgcgcccttgaagtctccgggacccgcagcggcggcgggagcgggaggggcgttggcgcggaggaggcagctccggcgccaccgaggaagcgcgccttggggatgcccggatggtgctcccaggagaagggcacggcgcggccgcgcggggacggcgacggcgaggatgccgccgaggacagcgtggagagggacgacgaggacgacgacgatgatgagaaagtgcgatggcgacggtgggtcgacgatggggaggacgaggctgttgttgtcggcgtctgcgtctgcggcgctggtgcttgagtctccaccgctagcgtctcaccggtcggcatgggagacgagacgagtgcgctcgtgatggccgggccgggtggtggtggtggtggtgggtgaattttgaggtgtgaccgttcggggaaggcggggacagagaactgatgcataaatacgcttgaatccatcatgtgtttgtttcttaaaaaaacataaaacataaaagtcgatccgactgtgttccactacccagggtgtccagactgaagagtgagacgcagtgtgtgcactctttccactaaacgagctgaagtttttcctagtcctgtgggcctt

SEQ ID NO: 124555 - DNA, 489 bp, Zea Mays
atgtcgcactacaagttcaagcactcgaggcacggttctctcggcttcctccctaggaagcgatcctcccaccaccgcgacaaggagcaagtttgtattgtctcggtctccatctcgctacagggtctcggcctctcgggcgagctcgccacctcctccctctgccgcgtgcggggcctggtcgcgctgagcctcgcgtccaacggcttcgagggccaggtgcccgccggcctcgccgcgctcagcggcatcctccaggtgctcgacctcgaggagaacgtgctctccggtgtgctccacccggcgctgttcgacaacctcaccagccttttgaactggaggaaaagcagggtagccatagtctctgttggcgtcgcctgtttcattgtgttcttgatgatcctttcagtaataggcctttttaggcttacacagacctgttttgacaagagacgagcagcgatgcttccatttcggaccacgacctag

SEQ ID NO: 124556 - DNA, 420 bp, Zea Mays
atggcgacgagctcggggaatatgcgacgcagggacgtcatgaaatcacagggaaaaagagatgcggccatggaagctccaagccggcgcggcactggagatccggccggacgccatggagatggggccgagaagggggcgcggtctgagccaacagagggagcgagggcgagcagagggatggccggtagcgctgggaagaggccgagcgccataaggaagaacctcggcgcgcaggattttatccaatgcttaagcggcaatagaggagcggcgcaagaagataagaacgacggctgcgatctcaccggcggtgagtggctggaagaaaccagagaatggagcagcgtgatttttctcccaggaaagaagacaggcacacacggtagaaaacatcaaggctgcggctggaacagataa

SEQ ID NO: 124557 - DNA, 84 bp, Zea Mays
atgtctttcagctctaacttttcccctgaatacacggaacgctgcgtcggcgtactgccggtggcgacgacggtcgggcactag

SEQ ID NO: 124558 - DNA, 2536 bp, Zea Mays
cccgcctcgccgtccccttcctcctcatcactctgctaataagctgccccggcctcccctcaagttctctctctctatcgcaagcggccaccttgcacccctggccagtcccatccacaccacccaatcctgctgcgttctatataagctgctggagcatcttgtgctttgttcgatactagcggccacgtacgtacaatgcctcctaacgccgaggacgtgcacggaagcggcggcggcggcgccctcgccacgacggcccctgcggcgtccaagatggactgcttcttgaccaccgtctgcacgccgctcgacctccagttcatcgacgtgtcgtaccgcgtcaagcagacggagcggtcggcgtccaaggcgccgccgggcggccggatatcacactcgggtcccggcgcccccgcgacggcggaggagcggacgatcctcaaggggatcaccggcgaggcgcgtccgggggaggtgctagcggtgctgggcccatcggggagcggcaagtcgacgctgctgtccatcctggggggccggctggcgggccgccacagcgggacggtcctggcgggcgggcgccctccgtgccgcgccgtgcagcgccgcacggggttcgtggcgcaggacgacgtgctgcacccgcacctgacggtgcgcgagacgctggccttctgcgccatgctgcgcctcccgcggtccgcgccggcgtccgccaaggccgccgcggccgaggccgtgatcgcggagctgggcctcgcggcgtgcgccgacaccgtcgtcgggaacgccttcgtgcgcggcgtgtccgggggggagcgcaagcgcgtcagcatcgggcacgagctgctggtgaacccgagcctgctggtcctcgacgagcccacgtcggggctggactccaccgccgcggcgcgcctcgtggcgacgctgtcggcgctggcaaggaagggacgcaccgtcgtcctgtccgtgcaccagccctcctcccgcgtctaccgcatgttcgactccgtgctgctgctcgccgagggcagctgcctctacttcggcgccggccgcgacgccatggactacttcgcctccgtcggcttcgcgccgggcttccacgtcaacccggccgacttcatgctcgacctcgcaaatggttttgctcaagctgactacaacgtcgtcacggcagaaggcggcaacaacgtgaagcagtcgctcatctcgtcctacagcaaggtgctggccccacgggtgaaggcctccatcgacgacgctgcgggccacgcgcagaacggcggcggcgagccgctgctgctgccgccggtggggagcgggtgcacgagctggtgcaaccagttctcggtcctgctccggcgcagcctcaaggagcggcggcacgagacgttcacgtcgctgcgcgtggtccagatcatggcgcccgcgctggtggcgggcgccatgtggtggcggtcgtcgccgctggcggtgcaggaccggctgggcctgctcttcttcgtctccatcttctggggcgtcttcgcctccttcaacgccgtgttcgcgttcccgcaggagcggcccgtgctggcgcgggagcgcgcctcggggatgtacgcgctctcgtcctacttcatgtcgcgcatggccggggacctgcccatggagctcgccctgcccaccgcgttcaccgtcgtcgtctacctcatggcggcgctcaacccgtcccccgccgcgttcgcgctcacgctcgccgtcatcctcgcgtacgtgctcgtcgccgaggggctggggctggccgtcggcgccgccatgatggacgccaagcgcgcgtccacgctggtcacggtcgtcatgctggcgtacctgctcaccggcggcttctacgtccacaacgtgccggggttcatggtgtgggccaagtacacctccttcacctactactgctaccgcctgctcatcgccgtgcagtacggcggccacctcaagcgcctgctcccgccggaggccgtcgacggcgaggccgggcctggggcgtgcatcgccgcgctcgtcgccatgttcttcggctaccgcctgttggcgtacctcgcgctgcgacgcgtcaggaagtgatctgatgacctgaacgtgaaccccgtcgtcgatcagctgttgtagctagctagggacgtgtgacttgtccattaactaatcaggcgaatcggcttggtacgatcaaacacttcgtccggcggctgcacgcggcgaaccgaccgagatccggagggctggcgggcgtcgaaggagatgactttggcgcggttgttgttggcgtcaccggccggggatcgacgaggtcgtccgtcgtcttcttctccaacgatttgttgcttttccccctttttttctccatcgatcgagatgccttgtttgcaagtgtattatatattcatcaatcagcgagtgtaagctcaagctgtgatatatagctgatttgggcttcttgatctacgaataacggaatgtacatgcatgatggctacaaatttatgaaaccaaa

SEQ ID NO: 124559 - DNA, 210 bp, Zea Mays
atggcaaacagtaggactagaattcagctgcaaaatgccagggaccatataagtcaggatttcctcttcttggacctactgaagcagagatttggacaccttacaaaggataaggattacgaggatccaccagactctgcatcggcgtgcccacgcgccagatggccattgaggaacactaccgatgcaggcgccatctttggtagctga

SEQ ID NO: 124560 - DNA, 330 bp, Zea Mays
atgtccatggatgataattccatggatgacgagtttgtcaaagccgcagaggctgaggaacggctacttgaagctcagaatgagcaagatgatgcccgatgtttcctccttggtagcagttcagctgctgccattgaggttgatggcaccggtgccgctgctggaacaacgggcatggcagatacacgcatcggatccaccagcccaacggcgacggccgatgctagcacatctgcgcttgcctctggtaagcgctccaggaggaggggaccgacctccaaggtttggttgcattttgaggaagttactgagaagcagggaggtaaggag

SEQ ID NO: 124561 - DNA, 1062 bp, Zea Mays
ccgaccgtatcgataccattgtcccatccccgccggtgcaggtggctctttaccaacaaccactcccaccccgacccaccgttacatatctccatctcacccgcgcgcccacgcgcctccaccacgccatccatcgcaatggccgccgccgccgcgctcctcctcctcctgtgcgccgcgtctctcgcgtccgcagccgccgacgacgggttgacgaccttcaaggtgtacttccacgacgtcgtggcggggacgaacccgacggcggtgcgcatcgcgcaggcggcgtcctccaacacgtcgtccaccaacttcggcgcggtggtggccatcgacgacccgctgacgacgggtcccacgcgcgccgcgggcacggaggtgggccgcgcccagggcacctacacgttcgcggaccagcagacgttcggcctcctcatggtcatgaacttcgtgttcacggccggcgagcacaacggcagcacgctctccatccttggccgcaacgaggtgctcagcgacgtccgcgagatgagcatcgtcggcggcagcggcaagttccgcatggcgcgcgggtacgtgcaggcgcacaccatcgactccggcgccacctccgggaccaccgtcgtccagtacaccgtcaacgtcaaggcctagctacctgttacgtacccttgcttgcgactccgggccgtggcttctcgtacgtccatccatatctccggctgctttgtacacaccttgtctgtcgtctttgagcgggattcggatttgcagagccgaatttactactaaagtttcaaaatttcacagagttgtagggtcgagaattaaatgtgtcgaaaacacgttagcgaccattcttatatagtttttgttggaattttgttggcacatttggatgaattttgttggaattttgtggacaaacaaacacaagaaattaacagaaccaatcaatcgacagcaaaacgtcagtcagagcatggcatgtggttgttgatgattgcctccactcatccagccaacagctagcaaacgcgtgttgctagtgactggaaaacg

SEQ ID NO: 124562 - DNA, 105 bp, Zea Mays
tacgttctgaatattttgtctctgcaaccaaaccgttttcgccagatagattcacttctattagagaatcattcgaaatcactccatcaaaaaatcaactctcga

SEQ ID NO: 124563 - DNA, 1299 bp, Zea Mays
agagagaggagagggtgagagagaggagagagaggagagggagaggagagagaggagagggagaggagagagaggatggagagagaggagagagagaggatggagagagaggatagagagagagaggggatggagagagaggatggagagggagaggggagagagagtggagaggagatagaggatggagagggagagggaagagagagtggagaggagagagaggatggaaagagaggagaggatggagagagaggagagagagaggggatggagagagaggatggagagggagaggggagagagaggggatggagagagaggatggagagggagaggggagagagagtggagaggagagagaggatggaaagagaggagaggatggagagagaggagagagagaggggatggagagagaggatggagagggagaggggagagagaggggatggagagagaggatggagagggagaggggagagagagagtggagaggagagagaggatggagggagagagagtggagaggagagagaggatggagatggagaggggagagagagtggagaggagagagaagatggagagggagaggggagagagagtggagaggagagagaggatggagagggagaggggagagagagtggagaggagagagaggatggagagggagaggggagagagagtggagaggagagagaggagagagagggagaggggagagagagtggcatgaataggaggtcgtgtctgaatttcgtgcgatactcgaagaagtcgtggcacgatacgaagacgtaccggagccgacccaagacgcaccggaacagaccaagacaacaaccgagacgtcaaggaaaaggaagcagagcgatcgaaaaagagaacaagtaccgccaccacctaggcacaggtggttacaagcgtcaggttcctaaatggacacaagaagacgccgagaagaaggccgcagggttgccgacgctgtccgagcaacttggtgaaagggcggcaaattggctccgtgctagaaaaccaagggaaaccgagaccggtgtatcttttgatgatcccattgtcgaagaagcggcaaaaaacatatatacaatggcagctaagcagagcgaaggaacttttaagccacaaagggaaagagacatcctaacggctggtctcggtaaccctgagcatcctggtcgtgtacgaggaatctcgtctaaggaaggatggaaggaaggattcggaccacagtgggaaggtctgtacaagaaacgtgatcgatacaaggaagag

SEQ ID NO: 124564 - DNA, 938 bp, Zea Mays
agaatacaggtcatacagacaaaaaccaaaactctggttacaaatccaaccaacacctttacttgaacattgtgtatcgatgatcataatatcgctgaagaggagctaaatgctcagcaggctacacattacaactccttaaatttattgcggtagtgcatttacattatcaactgtgactggtgcctggcttctaaaagattctaatcttatggcaaaagctggacagctgcaattttagggattttttcacggagcttctgagtcaatgctactcggacagtcatcacaccagcagctgggcctgtaagcctaaccttgacaataggctcctcgattgtgacaaactcgagctcgccacctcctgtgccagcaaggtatggcctaatctcaacatttaccttttcaatgttctcttggttcaactcaaggccagtttcctcatcagcaatgggctcaactgcaacaatctctggtattttctccatcaagcgccgttcaatacccatcttcatcgttgttactgaagccgggcatgaaccacatgctccttgcagctttaaccttaccacgttcccatcaatctcatgcaacgcaacattgcctccgtctgccataagatacggccttacttcatccaacaccatctcaacattttcagcagtcaatggaagctcgatcgcagggtctggattggcaacagcttgaaccacttgtcgcagccgtcgacagcccaggggcgcggaggacgcaacaagcctgggcgcggaacaagcccgcacggccgtcgacgcaacccccacctgtgtggacggcgaggacgatgacgaggtggacgccgatgggccaggcgcccatgccacagccgccgccgccgtcgtctgcatcgctggagaagagaagcgcggtgtgaattgttgcccgcggttcttggtgga

SEQ ID NO: 124565 - DNA, 719 bp, Zea Mays
cctttgaaccgaacatgacctgatttagtttcttccatcgtgattaacgagaatacaggtcatacagacaaaaaccaaaactctggttacaaatccaaccaacacctttacttgaacattgtgtatcgatgatcataatatcgctgaagaggagctaaatgctcagcaggctacacattacaactccttaaatttattgcggtagtgcatttacattatcaactgtgactggtgcctggcttctaaaagattctaatcttatggcaaaagctggacagctgcaattttagggattttttcacggagcttctgagtcaatgctactcggacagtcatcacaccagcagctgggcctgtaagcctaaccttgacaataggctcctcgattgtgacaaactcgagctcgccacctcctgtgccagcaaggtatggcctaatctcgtcaagtacctgatacaggagaaaacatgttcagtttctcaatgctcttaaaaaatactgatccatgagaaaaatagaaattataaatctttgaggctagttttcaaagtaagcgttaagggcaagatagatttgcttgttggtcaccatatcttctttattgctttgatcttacagatacgaagtgaacttggaaaatcacaaaaactaggcattgatggtcaccatatcagcactcagcagacagaatttcctattaatgatagcatgattaacat

SEQ ID NO: 124566 - DNA, 433 bp, Zea Mays
atagagcaggcaagatcattgatccattactgataaaaaaaaatattcggatgcgctagagaggaggagaagcaggcaagcagcaatggcagcagcaatcaacgactcgtgcaggagaccaggctcgatcccgttcaagtgggagatctgcccggggacgcccaagcacgccaggagcagcagcgccagcgcggctccgtcgtcttcgtcgtcgccgtactactcgtcctcctccgccaccgcctccgtctcctaagtagcggtgtcgccgaagctgacgccgcccccggccatgtcgccgtcgccgtaccactccccgcacgtctcctattacccagcgcgctcagagtcattgtcgcgtcccaagagccgcgcgcagaacagccccacgcttcctgaagttaaccccgattcgccccatgtacctagccgg

SEQ ID NO: 124567 - DNA, 1898 bp, Zea Mays
gtaggatcccaatgctatatgctactcgactacatactgctgagtacatcagtactcagatagcccaagtcggaccacactgcttgcacagtagaagatgataggcgatgaactggattccgatgtggttgtacgctacttcagaggcaagagcatcctgatcactggatcaaccggtttcctggggaaagtgctcgtggagaagatactgagggttcagccggacgtgaagaagctcttcctcctcgttcgagccgccgatgacgagtctgccaagcagagggtcgagaccgaggtgacaggaaaggagatctttcaggttctgaaagaaaagcacggtaacgggttcgaaggtttcgtccaagaaaaaatctgccctctgccaggagacgtcatgcacgagaacttgggcctaggcgctgccaaactgagacaagtgtgcaaggaaatagacatcgttgtaaacggagctgcaactacgaatttctacgaaagttctatgcatgcacatgcagatacgatgtggctttcgacacaaatgtcatgggagccaagcacatatgcgagttcgcgaagaggtgcagcaaactcaagatgctgctgcatgtttcaacaggtatatatagtagggaagcaacaacagtccattttttttctccaattaaatggacatgtgtaatgaatgataaatcttctttgagcatgcatgcagcttatgtagctggtgaacaggaaggggtggtgctggagaagccattccgtttgggcgaaaccctgagggaaggcacgcacctggacatcgagtccgaactaaacctgataaaagagacgaggagagaactgaaggccagccgttgttcagaaaaggctgagaggagaagcatgaaggagcttggcctcaagagggcaagggagttcgggtggcccaacacctatgtgttcaccaaggcaatgggggagatgctgctgggcgcccacctccggggagacgtgccggtcgtcatcgtccggcctagtatcataaccagcatcctcaaggagccattgcctggatggatggaagggatcaggacgattgactcgttcatcatcggctacgccaagcaggctctgtccatcttcttagttgacctcgacctgataatggacgtgattcccggggacatggtggtgaacgccatgatggtggccatggcggcgcactcggaggagcgggggcagcagactagcatctaccacctgacgtcgtcggtgcggcacccggcgccctacgccgtcctcgcggagtgcggccgccgctacttcctccacaacccactcaggtccgggggcaagaacagcgagcccgtgcggcctagcaggatgcgcttcttccgcaccctccccgggttccgcgcctacatggccatcaagttcaggcttccccttgagatccttcgcctgctcaacattgtcctgtgcggtgctctctcccggcgccacgacgagctcagccgcaagtacagatacgtcatgcatatcgcagagctgtacgcgccttactccttgttcaaaggatgcttcgatgactccaacacggagaggctgagggcggcgatggcgaacaggagcagcggatatgacttcggtttcgatcccttgtgcgtagactgggacgactatttctacagggttcacatccccggtgttgtcaagtacctgtgtggttactaggttaatacatatttaagatccggagagagccaaatgtatctcgcatgttttaatacacaaatatgtcgctgtagtttgcagattattaatttccctagcattcttgttcagtggtacaggtttctaagaatggtacttgttttcctttaatcttctgccactgaaaggtgtcttactctttacat

SEQ ID NO: 124568 - DNA, 1685 bp, Zea Mays
gtaggatcccaatgctatatgctactcgactacatactgctgagtacatcagtactcagatagcccaagtcggaccacactgcttgcacagtagaagatgataggcgatgaactggattccgatgtggttgtacgctacttcagaggcaagagcatcctgatcactggatcaaccggtttcctggggaaagtgctcgtggagaagatactgagggttcagccggacgtgaagaagctcttcctcctcgttcgagccgccgatgacgagtctgccaagcagagggtcgagaccgaggtgacaggaaaggagatctttcaggttctgaaagaaaagcacggtaacgggttcgaaggtttcgtccaagaaaaaatctgccctctgccaggagacgtcatgcacgagaacttgggcctaggcgctgccaaactgagacaagtgtgcaaggaaatagacatcgttgtaaacggagctgcaactacgaatttctacgaaagatacgatgtggctttcgacacaaatgtcatgggagccaagcacatatgcgagttcgcgaagaggtgcagcaaactcaagatgctgctgcatgtttcaacagcttatgtagctggtgaacaggaaggggtggtgctggagaagccattccgtttgggcgaaaccctgagggaaggcacgcacctggacatcgagtccgaactaaacctgataaaagagacgaggagagaactgaaggccagccgttgttcagaaaaggctgagaggagaagcatgaaggagcttggcctcaagagggcaagggagttcgggtggcccaacacctatgtgttcaccaaggcaatgggggagatgctgctgggcgcccacctccggggagacgtgccggtcgtcatcgtccggcctagtatcataaccagcatcctcaaggagccattgcctggatggatggaagggatcaggacgattgactcgttcatcatcggctacgccaagcaggctctgtccatcttcttagttgacctcgacctgataatggacgtgattcccggggacatggtggtgaacgccatgatggtggccatggcggcgcactcggaggagcgggggcagcagactagcatctaccacctgacgtcgtcggtgcggcacccggcgccctacgccgtcctcgcggagtgcggccgccgctacttcctccacaacccactcaggtccgggggcaagaacagcgagcccgtgcggcctagcaggatgcgcttcttccgcaccctccccgggttccgcgcctacatggccatcaagttcaggcttccccttgagatccttcgcctgctcaacattgtcctgtgcggtgctctctcccggcgccacgacgagctcagccgcaagtacagatacgtcatgcatatcgcagagctgtacgcgccttactccttgttcaaaggatgcttcgatgactccaacacggagaggctgagggcggcgatggcgaacaggagcagcggatatgacttcggtttcgatcccttgtgcgtagactgggacgactatttctacagggttcacatccccggtgttgtcaagtacctgtgtggttactaggttaatacatatttaagatccggagagagccaaatgtatctcgcatgttttaatacacaaatatgtcgctgtagtttgcagattatta

SEQ ID NO: 124569 - DNA, 2787 bp, Zea Mays
cccgaacgcccacccctactcgcacgtgcttcccctccttccccatcgactcgttccgacaacgcccgcgtctagtctcgtctcgtctcaccattcgtcactcgcgcgcgccgtcgtccttctccgccgtcgtccccgccgccgacgatgcctcgtaaggcctcgtcgacctcagattcgcgcctcaaatggcgcaagcggaagctcaaccccgacgcgtccccgtcgaagccctccatttctaccgcggcggccgaccactcctccgactccgactccgccgccttaaacgacgacgaggacccctccgccctcggcgcgacgggggacggggcaaccgacaacgacgcggacgccgcggcgtccgaggaccccgcggtcgagctccgcgaggcggaggttctgccctcggccgatgccatctctagcttccctgccgccaagcgccgcgtggtcaaccggccgcatgcgtccatcctcgcgctgctcgaggccgaacgatctgcttgttccggcgatgtccctaccgtggcactgccggcgctagagaacatctcgcacgggcagctgcaggtgctgtctggggtgcttccggaccacccatcccttgcgacagaccccgacaagccgtccttgtatgtgtgcacgccgcctcccctcatggagggtcacggggtgcccaagcagttccagggtcgcttccatgtggtgcccaagcactcagattggttctccccagggacagttcataggctggaaaggcaggtagtgccacacttctttacagggaagtctccagggcatactccggagaagtatgtcatgttaaggaataaagttattgctaaatacttagagaacccaagcaagaggcttgcttttgctgagtgccaggggcttgttgggagcacatctgaattgtatgatctgagtaggattgttaggttcttggacacttggggcatcatcaattaccttgcggctgggtctgtgcaccgtggtctgaggatggcaacttcgcttctaagagaggaacctacaggggaactgcaattgcttacagcaccattgaaatcaatcgatggtctaattttgtttgaccggccaaaatgtagcctcccagtggaggacatttctaggatggcagcgacttcatcgaactcggaggctgtggattttgatgctgcattttcagacttggatggaaagattagggagcgtttgtctgagagctcttgcagttattgcttacagcctttgccaagtttacattaccggtcgcaaaaggaggcagatatttttctatgttctgattgcttccatgatgcgagatatatcactggacattcttgcttagatttccaaagagttgatggggataatgatgaatcagaaaatgatagtgataaatggactgatgaagaaacattgttgctgttggaaggcattgagaagtacaatgacaactgggatgacattgcaggtcatgttggaacaaaatcaaaggcacaatgtatctaccattttattcggttgccagtggaagattgtttgctagagaatgttgagatacccaatgcacccattccatttcgaccacaaagcaatggttatcaatgtttagattccaatggcagcacatcaggagctccagttcaaaatatccaacaaggcaatgagcttccgttcataaattcttctaatccggtcatgtcactggttgcatttttggcctcttcaattggacccagagttgcagcatcatgcgcacatgcagcattatcttttttgactagagacgaggattccagggtgagttcagaaggctcacatgctggtggtctgggcaatggtgcaaattcaaattttcagaaccataatggtgcttcaccatccatttctccaggaaatgttaaatatgctgccatgcttggtctgtcagcagcagcaatgaagtctaagctctttgccgatcaagaagaacgcgaagtgcaaagactaactgctactgtaataaatcatcagttgaagagattggagttgaagctgaagcagtttgcggaagttgagaccttgctcttgaaggaatgtgagcaagtagaaagggttagacacaggatttcagctgaacgcgtcaggatgaggtcagccctattaggtcccaccggaagcggtctaccagggggcagttgtagcactatgccatcaaatccagcaggcatgagccccagaccagtcggtgtgccaggctacatgccacagaccagcatgccagccacatatgccaacaacctgcaggggcatgggaatcctcagatgccgttcttacatcagcggcctcagatgctttcgttcggccctcgcctaccactctcagccatccagactcaaccatcaccacaatcatcaaacatgttcaactctggcatgcccaattcgattgctcctaaccaccatcagttgctgagatcatcctccggaaacaattctagtgcaggataggggaattgtccataagattttttttttctcagcttaggtttgtcaggtgtagcattatgtcatttataaacacatcactgtaattcatttatgtgatgtatgtgtttgtcatataagttttttattaggtcctataaattgtccccatattgctgcgcccttgtgtacctttgttaccaggtcacctcttcccagtgcagggagattcaaatgaacagaatatgttttcatatgtatcccttgagaactcttattgaatatatatgtatgtagttaattcaataa

SEQ ID NO: 124570 - DNA, 2722 bp, Zea Mays
cccgaacgcccacccctactcgcacgtgcttcccctccttccccatcgactcgttccgacaacgcccgcgtctagtctcgtctcgtctcaccattcgtcactcgcgcgcgccgtcgtccttctccgccgtcgtccccgccgccgacgatgcctcgtaaggcctcgtcgacctcagattcgcgcctcaaatggcgcaagcggaagctcaaccccgacgcgtccccgtcgaagccctccatttctaccgcggcggccgaccactcctccgactccgactccgccgccttaaacgacgacgaggacccctccgccctcggcgcgacgggggacggggcaaccgacaacgacgcggacgccgcggcgtccgaggaccccgcggtcgagctccgcgaggcggaggttctgccctcggccgatgccatctctagcttccctgccgccaagcgccgcgtggtcaaccggccgcatgcgtccatcctcgcgctgctcgaggccgaacgatctgcttgttccggcgatgtccctaccgtggcactgccggcgctagagaacatctcgcacgggcagctgcaggtgctgtctggggtgcttccggaccacccatcccttgcgacagaccccgacaagccgtccttgtatgtgtgcacgccgcctcccctcatggagggtcacggggtgcccaagcagttccagggtcgcttccatgtggtgcccaagcactcagattggttctccccagggacagttcataggctggaaaggcaggtagtgccacacttctttacagggaagtctccagggcatactccggagaagtatgtcatgttaaggaataaagttattgctaaatacttagagaacccaagcaagaggcttgcttttgctgagtgccaggggcttgttgggagcacatctgaattgtatgatctgagtaggattgttaggttcttggacacttggggcatcatcaattaccttgcggctgggtctgtgcaccgtggtctgaggatggcaacttcgcttctaagagaggaacctacaggggaactgcaattgcttacagcaccattgaaatcaatcgatggtctaattttgtttgaccggccaaaatgtagcctcccagtggaggacatttctaggatggcagcgacttcatcgaactcggaggctgtggattttgatgctgcattttcagacttggatggaaagattagggagcgtttgtctgagagctcttgcagttattgcttacagcctttgccaagtttacattaccggtcgcaaaaggaggcagatatttttctatgttctgattgcttccatgatgcgagatatatcactggacattcttgcttagatttccaaagagttgatggggataatgatgaatcagaaaatgatagtgataaatggactgatgaagaaacattgttgctgttggaaggcattgagaagtacaatgacaactgggatgacattgcaggtcatgttggaacaaaatcaaaggcacaatgtatctaccattttattcggttgccagtggaagattgtttgctagagaatgttgagatacccaatgcacccattccatttcgaccacaaagcaatggttatcaatgtttagattccaatggcagcacatcagttcaaaatatccaacaaggcaatgagcttccgttcataaattcttctaatccggtcatgtcactggttgcatttttggcctcttcaattggacccagagttgcagcatcatgcgcacatgcagcattatcttttttgactagagacgaggattccagggtgagttcagaaggctcacatgctggtggtctgggcaatggtgcaaattcaaattttcagaaccataatggtgcttcaccatccatttctccaggaaatgttaaatatgctgccatgcttggtctgtcagcagcagcaatgaagtctaagctctttgccgatcaagaagaacgcgaagtgcaaagactaactgctactgtaataaatcatcagttgaagagattggagttgaagctgaagcagtttgcggaagttgagaccttgctcttgaaggaatgtgagcaagtagaaagggttagacacaggatttcagctgaacgcgtcaggatgaggtcagccctattaggtcccaccggaagcggtctaccagggggcagttgtagcactatgccatcaaatccagcaggcatgagccccagaccagtcggtgtgccaggctacatgccacagaccagcatgccagccacatatgccaacaacctgcaggggcatgggaatcctcagatgccgttcttacatcagcggcctcagatgctttcgttcggccctcgcctaccactctcagccatccagactcaaccatcaccacaatcatcaaacatgttcaactctggcatgcccaattcgattgctcctaaccaccatcagttgctgagatcatcctccggaaacaattctagtgcaggataggggaattgtccataagattttttttttctcagcttaggtttgtcaggtgtagcattatgtcatttataaacacatcactgtaattcatttatgtgatgtatgtgtttgtcatataagttttttattaggtcctataaattgtccccatattgctgcgcccttgtgtacctttgttaccaggtcacctcttcccagtgcagggagattcaaatgaacagaatatgttttc

SEQ ID NO: 124571 - DNA, 2788 bp, Zea Mays
cccgaacgcccacccctactcgcacgtgcttcccctccttccccatcgactcgttccgacaacgcccgcgtctagtctcgtctcgtctcaccattcgtcactcgcgcgcgccgtcgtccttctccgccgtcgtccccgccgccgacgatgcctcgtaaggcctcgtcgacctcaggtccatgcgtccgggcccttctcgaaacctcttaaactctctagcgccagatctaaccgccttgctaaccctaactcccagattcgcgcctcaaatggcgcaagcggaagctcaaccccgacgcgtccccgtcgaagccctccatttctaccgcggcggccgaccactcctccgactccgactccgccgccttaaacgacgacgaggacccctccgccctcggcgcgacgggggacggggcaaccgacaacgacgcggacgccgcggcgtccgaggaccccgcggtcgagctccgcgaggcggaggttctgccctcggccgatgccatctctagcttccctgccgccaagcgccgcgtggtcaaccggccgcatgcgtccatcctcgcgctgctcgaggccgaacgatctgcttgttccggcgatgtccctaccgtggcactgccggcgctagagaacatctcgcacgggcagctgcaggtgctgtctggggtgcttccggaccacccatcccttgcgacagaccccgacaagccgtccttgtatgtgtgcacgccgcctcccctcatggagggtcacggggtgcccaagcagttccagggtcgcttccatgtggtgcccaagcactcagattggttctccccagggacagttcataggctggaaaggcaggtagtgccacacttctttacagggaagtctccagggcatactccggagaagtatgtcatgttaaggaataaagttattgctaaatacttagagaacccaagcaagaggcttgcttttgctgagtgccaggggcttgttgggagcacatctgaattgtatgatctgagtaggattgttaggttcttggacacttggggcatcatcaattaccttgcggctgggtctgtgcaccgtggtctgaggatggcaacttcgcttctaagagaggaacctacaggggaactgcaattgcttacagcaccattgaaatcaatcgatggtctaattttgtttgaccggccaaaatgtagcctcccagtggaggacatttctaggatggcagcgacttcatcgaactcggaggctgtggattttgatgctgcattttcagacttggatggaaagattagggagcgtttgtctgagagctcttgcagttattgcttacagcctttgccaagtttacattaccggtcgcaaaaggaggcagatatttttctatgttctgattgcttccatgatgcgagatatatcactggacattcttgcttagatttccaaagagttgatggggataatgatgaatcagaaaatgatagtgataaatggactgatgaagaaacattgttgctgttggaaggcattgagaagtacaatgacaactgggatgacattgcaggtcatgttggaacaaaatcaaaggcacaatgtatctaccattttattcggttgccagtggaagattgtttgctagagaatgttgagatacccaatgcacccattccatttcgaccacaaagcaatggttatcaatgtttagattccaatggcagcacatcaggagctccagttcaaaatatccaacaaggcaatgagcttccgttcataaattcttctaatccggtcatgtcactggttgcatttttggcctcttcaattggacccagagttgcagcatcatgcgcacatgcagcattatcttttttgactagagacgaggattccagggtgagttcagaaggctcacatgctggtggtctgggcaatggtgcaaattcaaattttcagaaccataatggtgcttcaccatccatttctccaggaaatgttaaatatgctgccatgcttggtctgtcagcagcagcaatgaagtctaagctctttgccgatcaagaagaacgcgaagtgcaaagactaactgctactgtaataaatcatcagttgaagagattggagttgaagctgaagcagtttgcggaagttgagaccttgctcttgaaggaatgtgagcaagtagaaagggttagacacaggatttcagctgaacgcgtcaggatgaggtcagccctattaggtcccaccggaagcggtctaccagggggcagttgtagcactatgccatcaaatccagcaggcatgagccccagaccagtcggtgtgccaggctacatgccacagaccagcatgccagccacatatgccaacaacctgcaggggcatgggaatcctcagatgccgttcttacatcagcggcctcagatgctttcgttcggccctcgcctaccactctcagccatccagactcaaccatcaccacaatcatcaaacatgttcaactctggcatgcccaattcgattgctcctaaccaccatcagttgctgagatcatcctccggaaacaattctagtgcaggataggggaattgtccataagattttttttttctcagcttaggtttgtcaggtgtagcattatgtcatttataaacacatcactgtaattcatttatgtgatgtatgtgtttgtcatataagttttttattaggtcctataaattgtccccatattgctgcgcccttgtgtacctttgttaccaggtcacctcttcccagtgcagggaga

SEQ ID NO: 124572 - DNA, 2686 bp, Zea Mays
cccgaacgcccacccctactcgcacgtgcttcccctccttccccatcgactcgttccgacaacgcccgcgtctagtctcgtctcgtctcaccattcgtcactcgcgcgcgccgtcgtccttctccgccgtcgtccccgccgccgacgatgcctcattcgcgcctcaaatggcgcaagcggaagctcaaccccgacgcgtccccgtcgaagccctccatttctaccgcggcggccgaccactcctccgactccgactccgccgccttaaacgacgacgaggacccctccgccctcggcgcgacgggggacggggcaaccgacaacgacgcggacgccgcggcgtccgaggaccccgcggtcgagctccgcgaggcggaggttctgccctcggccgatgccatctctagcttccctgccgccaagcgccgcgtggtcaaccggccgcatgcgtccatcctcgcgctgctcgaggccgaacgatctgcttgttccggcgatgtccctaccgtggcactgccggcgctagagaacatctcgcacgggcagctgcaggtgctgtctggggtgcttccggaccacccatcccttgcgacagaccccgacaagccgtccttgtatgtgtgcacgccgcctcccctcatggagggtcacggggtgcccaagcagttccagggtcgcttccatgtggtgcccaagcactcagattggttctccccagggacagttcataggctggaaaggcaggtagtgccacacttctttacagggaagtctccagggcatactccggagaagtatgtcatgttaaggaataaagttattgctaaatacttagagaacccaagcaagaggcttgcttttgctgagtgccaggggcttgttgggagcacatctgaattgtatgatctgagtaggattgttaggttcttggacacttggggcatcatcaattaccttgcggctgggtctgtgcaccgtggtctgaggatggcaacttcgcttctaagagaggaacctacaggggaactgcaattgcttacagcaccattgaaatcaatcgatggtctaattttgtttgaccggccaaaatgtagcctcccagtggaggacatttctaggatggcagcgacttcatcgaactcggaggctgtggattttgatgctgcattttcagacttggatggaaagattagggagcgtttgtctgagagctcttgcagttattgcttacagcctttgccaagtttacattaccggtcgcaaaaggaggcagatatttttctatgttctgattgcttccatgatgcgagatatatcactggacattcttgcttagatttccaaagagttgatggggataatgatgaatcagaaaatgatagtgataaatggactgatgaagaaacattgttgctgttggaaggcattgagaagtacaatgacaactgggatgacattgcaggtcatgttggaacaaaatcaaaggcacaatgtatctaccattttattcggttgccagtggaagattgtttgctagagaatgttgagatacccaatgcacccattccatttcgaccacaaagcaatggttatcaatgtttagattccaatggcagcacatcaggagctccagttcaaaatatccaacaaggcaatgagcttccgttcataaattcttctaatccggtcatgtcactggttgcatttttggcctcttcaattggacccagagttgcagcatcatgcgcacatgcagcattatcttttttgactagagacgaggattccagggtgagttcagaaggctcacatgctggtggtctgggcaatggtgcaaattcaaattttcagaaccataatggtgcttcaccatccatttctccaggaaatgttaaatatgctgccatgcttggtctgtcagcagcagcaatgaagtctaagctctttgccgatcaagaagaacgcgaagtgcaaagactaactgctactgtaataaatcatcagttgaagagattggagttgaagctgaagcagtttgcggaagttgagaccttgctcttgaaggaatgtgagcaagtagaaagggttagacacaggatttcagctgaacgcgtcaggatgaggtcagccctattaggtcccaccggaagcggtctaccagggggcagttgtagcactatgccatcaaatccagcaggcatgagccccagaccagtcggtgtgccaggctacatgccacagaccagcatgccagccacatatgccaacaacctgcaggggcatgggaatcctcagatgccgttcttacatcagcggcctcagatgctttcgttcggccctcgcctaccactctcagccatccagactcaaccatcaccacaatcatcaaacatgttcaactctggcatgcccaattcgattgctcctaaccaccatcagttgctgagatcatcctccggaaacaattctagtgcaggataggggaattgtccataagattttttttttctcagcttaggtttgtcaggtgtagcattatgtcatttataaacacatcactgtaattcatttatgtgatgtatgtgtttgtcatataagttttttattaggtcctataaattgtccccatattgctgcgcccttgtgtacctttgttaccaggtcacctcttcccagtgcagggaga

SEQ ID NO: 124573 - DNA, 2215 bp, Zea Mays
catcgaggccgccccgtccatccgtcgacacgtgtcggagcacccttctataagtaaccccgggtacagctgcgcgatgttccattccaaaagctctcgagacttcctcagcaatcaatcagctttccagcgatcggcagctcctcgatcgtttcgaagctccaatccgcccggccgcctccgcctgttgccactagctaggtgatcgatcgaatggactgcggtggcgcgctgcagctcccgcctgggttccgcttccaccccaccgatgacgagctggtgatgtactatctcctccgcaagtgcggcggcctgccgctcgccgcgccggtcatcgccgaggtggatctctacaagttcgacccatggcagctcccagagaaggcgttcggtggggagaaggagtggtacttcttctcgccgcgcgaccgcaagtacccgaatggctccaggcctaaccgggcggccgggacagggtactggaaggccaccggcgccgacaagccggtagggtcgccgcgccccgtggccatcaagaaggcgctcgtcttctacgccgggaagccgcccaagggcgtcaagaccaactggatcatgcacgagtaccgcctcgcggacgtcgaccgctcggccgccgcacgcaagaagaccaacaacgcgctcagggataggctctagagacatgtaaagcgcgggcggcgtggcgtcacggctcacgcacgccgcgatagagacaagcgcggcaaccatggtccatggccggcgcagagccgccgcctgatcttatcgcccgcgcacaaattaccacatgcgcggcgcgcaccggatccgacgtcacgtcgacctcatctccaagcctcttccaaacactccaatgcctggatgactgggtgctgtgccggatctacaacaagaagggtgttatcgagcggtacgacacagtggacgacgacgacggcgacggcgccgtggccgaagacgtcaagccggtgccggcgccggcggcgtcgaagaacccgcgtgccagtgcccgcgtaggggcagcagcggcggcgccgatgaaggtggagctccccgagtacggcggcggctactacgactacgacgacctggagacgccgtcggcggggatgctgtgcttcgaccgcccgtcggccccggcgcccgcggaccgcgactcaaacaactccgtgccgtggacgacgcaccacacgcacacggacaactccagcagcggctccgagcgcgtgctctcgccgtcgccggacctgcccgaccgcgaccacgccgagagccagcccgccgccgccgccgccgccgccgggtggtggcctgtcggaggcgactggggcagcgccgccgaggacgggttcatggtcgacgtcgacgtcgacgacgggagctcgctgttcgggccgctgtccccggggctgttcgcgcgcgtcgacgccgccgcgttcggcttcggcgacatgctcgcgtcgtacctgcacaaaccgttctgatgcaacgcgacgcgacgcgagcgcggccaccccgcgcctgcgtgctcctctaggccactgaccactgacatggacattctggtcgtcgtgtagctcggttcaggacgaatcgagagccggccggtctaggtgtagtgctgcgaaaccaacaccaccgtgcaggcacactctccgcgggcggcagatcgacggacaatcctgcgcccgtaggtatataccggtcgtcgatcaggtgttcatcagttcttcattcattcaggtcgacgtgcaactggtaattgtacaagatcttgggcagctgccgtatggagatcgatgagtgccgagttagcatggaggacgactggtggtcatggttggtacagagctagctagccgtccgatcgggtatcggattaatctgattgccagttttgtttttttttggtcgcgtcaagtagctgacatcttaagaatgaagcctactggattcagaggcctgttgatggtaatggtatggtgtatgtatatcgtctagtttagtctagcctagctgtacttagaattggttcaggttggtggcaagcagagcgctgtaatttttgttgagtgtttatgcactataattgcaacgtcatgtattagagtcgctctcagcggtcgctttctcgtgatcgaaaattttgcgatgcaaattatcctaataaagttgttgtaagatgtaattacgt

SEQ ID NO: 124574 - DNA, 1476 bp, Zea Mays
ggcaaccatggtccatggccggcgcagagccgccgcctgatcttatcgcccgcgcacaaattaccacatgcgcggcgcgcaccggatccgacgtcacgtcgacctcatctccaagcctcttccaaacactccaatgcgtactggatgactgggtgctgtgccggatctacaacaagaagggtgttatcgagcggtacgacacagtggacgacgacgacggcgacggcgccgtggccgaagacgtcaagccggtgccggcgccggcggcgtcgaagaacccgcgtgccagtgcccgcgtaggggcagcagcggcggcgccgatgaaggtggagctccccgagtacggcggcggctactacgactacgacgacctggagacgccgtcggcggggatgctgtgcttcgaccgcccgtcggccccggcgcccgcggaccgcgactcaaacaactccgtgccgtggacgacgcaccacacgcacacggacaactccagcagcggctccgagcgcgtgctctcgccgtcgccggacctgcccgaccgcgaccacgccgagagccagcccgccgccgccgccgccgccgccgggtggtggcctgtcggaggcgactggggcagcgccgccgaggacgggttcatggtcgacgtcgacgtcgacgacgggagctcgctgttcgggccgctgtccccggggctgttcgcgcgcgtcgacgccgccgcgttcggcttcggcgacatgctcgcgtcgtacctgcacaaaccgttctgatgcaacgcgacgcgacgcgagcgcggccaccccgcgcctgcgtgctcctctaggccactgaccactgacatggacattctggtcgtcgtgtagctcggttcaggacgaatcgagagccggccggtctaggtgtagtgctgcgaaaccaacaccaccgtgcaggcacactctccgcgggcggcagatcgacggacaatcctgcgcccgtaggtatataccggtcgtcgatcaggtgttcatcagttcttcattcattcaggtcgacgtgcaactggtaattgtacaagatcttgggcagctgccgtatggagatcgatgagtgccgagttagcatggaggacgactggtggtcatggttggtacagagctagctagccgtccgatcgggtatcggattaatctgattgccagttttgtttttttttggtcgcgtcaagtagctgacatcttaagaatgaagcctactggattcagaggcctgttgatggtaatggtatggtgtatgtatatcgtctagtttagtctagcctagctgtacttagaattggttcaggttggtggcaagcagagcgctgtaatttttgttgagtgtttatgcactataattgcaacgtcatgtattagagtcgctctcagcggtcgctttctcgtgatcgaaaattttgcgatgcaaattatcctaataaagttgttgtaagatgtaattacg

SEQ ID NO: 124575 - DNA, 2002 bp, Zea Mays
catcgaggccgccccgtccatccgtcgacacgtgtcggagcacccttctataagtaaccccgggtacagctgcgcgatgttccattccaaaagctctcgagacttcctcagcaatcaatcagctttccagcgatcggcagctcctcgatcgtttcgaagctccaatccgcccggccgcctccgcctgttgccactagctaggtgatcgatcgaatggactgcggtggcgcgctgcagctcccgcctgggttccgcttccaccccaccgatgacgagctggtgatgtactatctcctccgcaagtgcggcggcctgccgctcgccgcgccggtcatcgccgaggtggatctctacaagttcgacccatggcagctcccagagaaggcgttcggtggggagaaggagtggtacttcttctcgccgcgcgaccgcaagtacccgaatggctccaggcctaaccgggcggccgggacagggtactggaaggccaccggcgccgacaagccggtagggtcgccgcgccccgtggccatcaagaaggcgctcgtcttctacgccgggaagccgcccaagggcgtcaagaccaactggatcatgcacgagtaccgcctcgcggacgtcgaccgctcggccgccgcacgcaagaagaccaacaacgcgctcaggctggatgactgggtgctgtgccggatctacaacaagaagggtgttatcgagcggtacgacacagtggacgacgacgacggcgacggcgccgtggccgaagacgtcaagccggtgccggcgccggcggcgtcgaagaacccgcgtgccagtgcccgcgtaggggcagcagcggcggcgccgatgaaggtggagctccccgagtacggcggcggctactacgactacgacgacctggagacgccgtcggcggggatgctgtgcttcgaccgcccgtcggccccggcgcccgcggaccgcgactcaaacaactccgtgccgtggacgacgcaccacacgcacacggacaactccagcagcggctccgagcgcgtgctctcgccgtcgccggacctgcccgaccgcgaccacgccgagagccagcccgccgccgccgccgccgccgccgggtggtggcctgtcggaggcgactggggcagcgccgccgaggacgggttcatggtcgacgtcgacgtcgacgacgggagctcgctgttcgggccgctgtccccggggctgttcgcgcgcgtcgacgccgccgcgttcggcttcggcgacatgctcgcgtcgtacctgcacaaaccgttctgatgcaacgcgacgcgacgcgagcgcggccaccccgcgcctgcgtgctcctctaggccactgaccactgacatggacattctggtcgtcgtgtagctcggttcaggacgaatcgagagccggccggtctaggtgtagtgctgcgaaaccaacaccaccgtgcaggcacactctccgcgggcggcagatcgacggacaatcctgcgcccgtaggtatataccggtcgtcgatcaggtgttcatcagttcttcattcattcaggtcgacgtgcaactggtaattgtacaagatcttgggcagctgccgtatggagatcgatgagtgccgagttagcatggaggacgactggtggtcatggttggtacagagctagctagccgtccgatcgggtatcggattaatctgattgccagttttgtttttttttggtcgcgtcaagtagctgacatcttaagaatgaagcctactggattcagaggcctgttgatggtaatggtatggtgtatgtatatcgtctagtttagtctagcctagctgtacttagaattggttcaggttggtggcaagcagagcgctgtaatttttgttgagtgtttatgcactataattgcaacgtcatgtattagagtcgctctcagcggtcgctttctcgtgatcgaaaattttgcgatgcaaattatcctaataaagttgttgtaagatgtaattacg

SEQ ID NO: 124576 - DNA, 1012 bp, Zea Mays
catcgaggccgccccgtccatccgtcgacacgtgtcggagcacccttctataagtaaccccgggtacagctgcgcgatgttccattccaaaagctctcgagacttcctcagcaatcaatcagctttccagcgatcggcagctcctcgatcgtttcgaagctccaatccgcccggccgcctccgcctgttgccactagctaggtgatcgatcgaatggactgcggtggcgcgctgcagctcccgcctgggttccgcttccaccccaccgatgacgagctggtgatgtactatctcctccgcaagtgcggcggcctgccgctcgccgcgccggtcatcgccgaggtggatctctacaagttcgacccatggcagctcccagctggcatggtgatcggtggttgcagagaaggcgttcggtggggagaaggagtggtacttcttctcgccgcgcgaccgcaagtacccgaatggctccaggcctaaccgggcggccgggacagggtactggaaggccaccggcgccgacaagccggtagggtcgccgcgccccgtggccatcaagaaggcgctcgtcttctacgccgggaagccgcccaagggcgtcaagaccaactggatcatgcacgagtaccgcctcgcggacgtcgaccgctcggccgccgcacgcaagaagaccaacaacgcgctcagggtaattcactacaccatgacctttctcaggagaacatatttatctccccgaaatactgacacttgcagttagagggaaaaaatatagagagaagtaaaaaaaaaaagattgatgtttgattttaccaatgctgcaacaagaaacagtggatcgaatcgaaatgtgttgttaggcttgcaactatatatgcagattcttagttaagaggaattgaaaaaggtaggcgtgcaaattgtccatttgcagcaagctcgatcgagttgtccctttcgtgacagcgcgcggctacttgggcaggataggctctagagacatgtaaag

SEQ ID NO: 124577 - DNA, 844 bp, Zea Mays
catcgaggccgccccgtccatccgtcgacacgtgtcggagcacccttctataagtaaccccgggtacagctgcgcgatgttccattccaaaagctctcgagacttcctcagcaatcaatcagctttccagcgatcggcagctcctcgatcgtttcgaagctccaatccgcccggccgcctccgcctgttgccactagctaggtgatcgatcgaatggactgcggtggcgcgctgcagctcccgcctgggttccgcttccaccccaccgatgacgagctggtgatgtactatctcctccgcaagtgcggcggcctgccgctcgccgcgccggtcatcgccgaggtggatctctacaagttcgacccatggcagctcccagagaaggcgttcggtggggagaaggagtggtacttcttctcgccgcgcgaccgcaagtacccgaatggctccaggcctaaccgggcggccgggacagggtactggaaggccaccggcgccgacaagccggtagggtcgccgcgccccgtggccatcaagaaggcgctcgtcttctacgccgggaagccgcccaagggcgtcaagaccaactggatcatgcacgagtaccgcctcgcggacgtcgaccgctcggccgccgcacgcaagaagaccaacaacgcgctcagggtaattcactacaccatgacctttctcaggagaacatatttatctccccgaaatactgacacttgcagttagagggaaaaaatatagagagaagtaaaaaaaaaaagattgatgtttgattttaccaatgctgcaacaagaaacagtggatcgaatcgaaatgtgttgttaggcttgc

SEQ ID NO: 124578 - DNA, 1446 bp, Zea Mays
cttttctcttagttattcttccagcagcagttcgcccaaatccattgccgctcctgcccccaacggcgcatgccttcatctcctcagccatggagctcacgagcacctccctctgcgcaccccctccgcgcgtccctgctccctcgtcaccaggtgcacgtgcgcagcttcctgcgcgccgggatggccctctagccccagctcgcccctgccctcagccatggcgcctggccgccgccgcccctgctttccatggcagcacttcctgcttcctggtggtcggcgccctccccaacatctctgctggtggttgtctccatcccctccatggcgagctcgcccctgcattcctgctcgcccaagatccccttccctgttccagccacctcctatggacgccagccctcacctcatagtcgcccagccccctctctgctggtggccggccacctctgctgcttccatggtgtggcacttagggtatttaagatagagtggaatatttcagcacatcacacaccaggtgttcggtgaaaggtccaagccaaaagtcgtcgtcgtttcagaatatatcgagtcaattcgactttgtgccgctggaccacatacaattgttgatggtaaagaagttgtgaactttgcatcagcaaactacctcggtttaattggcaacgaaaagattattgaatcttgcatcagttcattggagaaattggtgttggttcttgtggtccacgtggtttttatggaacaattgtgatgagggtgttcactgggcagtgcaaaatggtctccatctatcaagaagcattgtggtgtacttcaagcacaatgatatggcttcacttgcaagcactttggaaaaacttactcgtggaaataaacgtgctgaaaagattagacgctacattgttgtagaatccatttaccagaattctggccaaattgcccccttggatgagattgtcaggttgaaggagaaatattgattccatgttattctggaggagagtcatttttttggggtgcttggcaagtctgggtgtggtcttgctgaacattatggagttcatgtgagtgtttggcctcagcttttcttaatgtttcaccgtaatgctccacctgtggtgtctgaccggggtgcgctgttacctagctcccaaacgaggcctaactgtttggtgaaatgcttgggacaaactagccagtaagaatggagtcatggaacatcggcaggagggttgtggcagcggcaaccgatgtatcctatggacagtctggttttgacatgatgcaaatcaatctgctgtacactgtatttcgcacttgcatagattgtttggctaattgcaagattatctcagtgttttcgtttggatttagagtacacttatgtatgaaatattcattggtactcatctatattatattaattatattattatt

SEQ ID NO: 124579 - DNA, 1022 bp, Zea Mays
cttttctcttagttattcttccagcagcagttcgcccaaatccattgccgctcctgcccccaacggcgcatgccttcatctcctcagccatggagctcacgagcacctccctctgcgcaccccctccgcgcgtccctgctccctcgtcaccaggtgcacgtgcgcagcttcctgcgcgccgggatggccctctagccccagctcgcccctgccctcagccatggcgcctggccgccgccgcccctgctttccatggcagcacttcctgcttcctggtggtcggcgccctccccaacatctctgctggtggttgtctccatcccctccatggcgagctcgcccctgcattcctgctcgcccaagatccccttccctgttccagccacctcctatggacgccagccctcacctcatagtcgcccagccccctctctgctggtggccggccacctctgctgcttccatggtgtggcacttagggtatttaagatagagtggaatatttcagcacatcacacaccaggtgttcggtgaaaggtccaagccaaaagtcgtcgtcgtttcagaatatatcgagtcaattcgactttgtgccgctggaccacatacaattgttgatggtaaagaagttgtgaactttgcatcagcaaactacctcggtttaattggcaacgaaaagattattgaatcttgcatcagttcattggagaaattggtgttggttcttgtggtccacgtggtttttatggaacaattgtgatgagggtgttcactgggcagtgcaaaatggtctccatctatcaagaagcattgtggtgtacttcaagcacaatgatatggcttcacttgcaagcactttggaaaaacttactcgtggaaataaacgtgctgaaaagattagacgctacattgttgtagaatccatttaccaggcgcagtgcttttgattgttttgtgttgatttatgctgtctttttttatatgaccttatgaaagtttggaaaataaaatgtccatttaac

SEQ ID NO: 124580 - DNA, 1281 bp, Zea Mays
atgcctccgtgtagtgatctttcgatttttcagacaaacggaaaggccgttggtccacccaaggcatatcacctcactatggaagaacgaaagtctgctttactgtacatgttcacgaatatgcctaagtttggggaggaaatgaatttgaatgatgacttacgtcagttatctattggaagcgtaactgccaaaagctatggacgttacgacgtgatggttccatggatggcgcccgtgcctgatgtgtattatgcttggtgtcgatattgggcttccgaaggcttccagaaagcatcagcgcatcacaggcaatgtcgaggaaccaatcctaaccacaagtttggcggtgacgacatgctccgaaaagaaaaaagaatgcctagtgacattgaggtctacgaggagggccacaatggaccagaccctaacaaccctgaccagctctgcagccagacaaccacagttcggctaaggacgggttcgtcttcccgtagctcgtgctctcgtcgaccgaacaagcaggagttgaagattatgaggatgtgtgaggagatgagacagcaacgagaatttatggaggcttgcaatgcacataaccaagcgatgtatcaattaatgcagccccagggcatgataccaaatattccaccgccaccacaatcgagccagtttgcatccacaccagctccgggattggggactcaacagttcaacacccctccgacacatatacctatacctggagatagggttacgcccgaagcggtggtagtgggtctgatcccacagcagggactggatttgttgagtccctcttcgcgttccctcctccaggtggcggcagcggtcaaagctctaaccacccaagtggtgattatccctaagtatgcccatattcttgagttgctagcagaaaagaagcagcctcagaagaaattggcggagcagaaagaacgcctagtggcaaccatgcgatcctgggaggcaccttttgcctgtgaggaccatctgaggggccgtttccaggatttggtcctagcttacaatgatctggaggattactctaatgagatgcatgaggaagttcaccagctttactatcagctgcaccccaatgatgcgccaggagccacagaagcagagggtggtgtggtgctagttgatgggggtgagcctgatgcagacttggaggaagaagcagctcctatgcttgtaccaggtgttgagtccccaagaggtagtgatgtttctgagatagctagtgatacagaagtttaa

SEQ ID NO: 124581 - DNA, 1781 bp, Zea Mays
tttttcttcttcggctgccttatcctcttcttcttccagccatcgtctacatccatcgctggattttttttcccctgcgccgctcatctgctgttcttatcccatgccgccgttcgctggccgcgtgtactctggggtcgtcgtgctggccgcctccctcgtcttctcctcaggcccgcccgcgctctccctgccttctgcacgcgcgcagctcgccccagatcctcccagccatgacgcgcgcttccctgtgccccgcgttccttctctgcactgcttcctctgctccatcttcaagcacgccgcgctccaaatcgcctgctgttcctcttccccagccatggccgcgcctggctcgccggcgttcaggccgcggcttcctcctccaactccggtcggccaagagcctagctgcccccttgcttctctccctccatttcccagcagcgccctgtccctgtcgaagcccttctatggcgcgcgtggatttctcctcctccatccccagctagcctgcgagctcctccctcctccctgcatccatggatctcggcgcccatctccatggctcgccctgcgtccagccgtcgcgcccggttccgagtccctttcctggccgagttccctgctccatctctgccctctgccggcgctccagctcctccatccatggccatgcctgctgctcgtcggtgctcgccgcgggagacggcgcttggtcgcccaaccttcctgctcctccctgttgtcgtgtccctggctcctgctccactcgttgcgtgcgcctgcgcgctgcccagatggccgtctgtccttccgtgtcacgcctagctccagctcggtctctgctcgatgcccagcgtcgcgcagcacggctcggcccgacggcatagagtgtctcgtcatcgccggacttgtctcgccgaccatcgtggcgttgttatttcctgctacgccgtgacatcgtcgagctccggtgtttagtgtcgaggtcgctgcgtcgttgtcgctctgacttccgtgtcctcgcgcggtatgcggcggtagtgttcacatccgcggcatcagcatccccatcgccgttgaactcccagacatgttcctctctgttcgcttgtcctcagttccggtctgatctcgcgcgcgtcattttgaaactctgcgcgttcgtcgtgtcgcgatgtgtgccgatattctctaccggtagacctcgccatcaaccaagttcaagtaattgctggcccctcagacccggccattgtttgccgcggaaccactgtcggattaatttttagcttccctcgcgcggctctttggagataatctcctcaccggctgtcgctcccaatcttcagctcatcgactcaccgtcgtgtttcttgttctccctcgtcggtcggcctcgccgtggctaagtatgtctgccgtgctatgtgcttcggtctttggtcgctgcctcttgctcaccatcccctattcgatctcgtcgtcaagcttcgcctcagccttagctcgtcggtcacgctcgtcagatgtgcgaccgaggacttcagctgaaggccgtcgtcaggcaactaccaagtcgagttgtgatgtggtgcgataattaatcacgtcatgcggaagatgactcaagtcgaccccaagcgcggattactccgcatggagatgctgatgaacgaacctgcctgatcaagtgttaggacaaggatgatcgtcaagtgatcgacgtctaacaaacactaacctagtgtttcttccaggcaagtcctggtgcattt

SEQ ID NO: 124582 - DNA, 226 bp, Zea Mays
gagaataggaatgggctttgcagggaggggggaatgggaaagacagaataggaaatgacagaacatggaaatgggcagtgcggggaggaggaaatgagaaaggcggaacaaggaatgagaatgggagaggcagaacaggaatggtggcagaacacggaatgacagactactcttgcagccttaataagtagtagagattagaaaaaattcatcggatcacgtgagt

SEQ ID NO: 124583 - DNA, 1716 bp, Zea Mays
gatccttgaagaactattagcagctcggaaaagggcaaaagcagatttaaaggaagcgaaggacccactcgaaagggctgttcttgatggtcgtcaacttgcactgaaaataagtgcaaactcagtttatggtttcactggagcaactgttggtcagttaccttgcttagagatttcttcaagtgtgaccagctatggacgacagatgattgaacatacaaaaaagcttgttgaagataaattcacaacagtaggaggttatgagcatactgcagaggtaatttatggggacactgattctgtgatggtacagtttggtgtttctacagttgaagatgcaatgaagttaggaagagaagctgcagattatattagtggaacctttaccaagcccatcaaactggagtttgagaaggtctattttccttaccttctaatcagcaagaagagatatgctggtttgtactggacgaatcctgagaaatttgacaaaatggatgcaaaaggtattgaaactgtaagaagggacaactgtttactggtaaagaacctggtaaccgagtgccttcataaaatactggtagaccgtgatgttcctggtgcagtccaatatgtcaagaacaccatatctgatctattaatgaatcgtgtggacttgtctcttcttgttataacaaagggtttgacaaaaacgggagaagattatgcggtaaaagctgctcatgtggagcttgctgagaggatgcgaaagagagatccagctactgcacctactgttggtgaccgtgttccttatgtaataattaaagcagcaaaaggggcaaaggcatatgagaaatcagaagatccgatttatgttttggacaataatatacccattgatcctcaatactaccttgagaaccaaattagcaagccacttttgaggatctttgagccaattctgaagaatgccagcaaagagttgcttcatggaagccacaccagatctgtttcaatctcaactccttccaatagcgggataatgaaatttgcaaagaaacaattaacttgccttgggtgcaaagctgttatcagtggtgccagtcagacactttgctcacattgcaagggaagagaagcagagttgtactgcaaaacagtagcaaatgtttctgacctggagatgctctttgggaggctatggacacaatgccaggagtgccaaggatctctgcaccaggacgttctctgcacaagtcgggattgccccattttctatcggcgaaggaaggcacagaaggatatgaccgaagctaggctgcagcttgatcggtgggacttctgagcttggaaattctcacatggctgcctgcgtctgcttatattgctgtggaagacaggaagctaccgtcgaccgcatcataatgcatgtgaagatgagactggacttctgcgagcatccagtcacacttgcgtccgtgtcacgtagactgacttgccagtacgattcattagcatgttttctgcttaggttttgcgtaatagtttaggtgtgagttggtacttggtagatggtaggtgtcaccttcctgtggctagtgccgagaaaaatgcttggtcctgagatgaggtgctgattatgtacagggcagaagcaatctggagcagttattatgtaacagagtgagacgagacaatttgaatggcacatgagttctctatctgtctgaattc

SEQ ID NO: 124584 - DNA, 108 bp, Zea Mays
ttttttttttccagtttattcttgagccagacctcagccagggtgagggttctaatatcctgcgccatctcgagcctatgtaacaactcctttgccaaggccaactga

SEQ ID NO: 124585 - DNA, 879 bp, Zea Mays
atcctggaaaggggcataacaattgaaggccttggttcaaagagttttctgacatatgaaagcaacattctttttgcccttcgtttcatgattgattgcaatattgttggtggcaactggattgagcttcctgctgggaaatacaggaaagcagcctgtatcatgtcctattttatgtctattcttaacacaactaacagatactcagatctggtaagccatgcggctgaaggagaatattctaagatggccccgtttcgcatattaagttttgatattgaatgtgctggtcgcaaaggtcatttcccagaaccaactcatgatcctgttattcaggttgagttcattattcatgtatctgatactcgttaccatttagtttcaatacagatagctaatttggttacacatcaaggagaagaccaaccttttgtacggaatgtcatgactcttaaatcctgctctcccattgtgggagtcgaggttatgtcatttgatgcagagagagatattctacttgcatggagggatttcatacgtgaagtggatcctgatatcataattggatacaacatttgcaaatttgacatgccctatcttattgagagggctgaggttctcaagatagcggagtttccaatacttggccgaatcagaaatagtcgtgttcgtgtccgtgatacgaccttttcctcgaggcaatatggtgtgcgtgaaagtaaggatgttactattgaaggaagagtgcaatttgatctcctgcaggctatgcaacgggattacaagttgagttcttattcattaaactctgtatcagcacactttcttggggagcaaggggcagccaaggagagccctttggctccaacaatttcctag

SEQ ID NO: 124586 - DNA, 768 bp, Zea Mays
atggcgggaactccccagtttcagtccccgcacttcccgcctccctctccccctctcggtcccaccttcgtccctccggcgatgaactcaggcggacgcggcggcaagcggcggggtcccccgcccctcgctccctccggtgcggcggcgaagagggtcaatcccagccccggcacgccgcatgtgcctcctcccgcgtcggcggcggccgccgtggaggaggacatgatggacgaggacgtgttcctggatgagtccatcctggcggaggacgaggcggcgctgctgatgctccagcgcgacgaggcactcgcgtcccgcctcgcgcggtggaagcgccccgcaatacccaccgacctcgccgccggatgctcccgcactgtcgcttttcagcagttggaaatagattatgttattggtgagagccacaaagaattactccccagctcatctggttcagcagccatactcaggatttttggtgtcaccagagaaggccacagcttatgctgtcaggtgcatggatttgagccatatttctatattggctgtccttcagggatgggtcctgatgatatatcacgctttcatcaaacactagaggggaggatgaaggagtcaaatagaagcagcaatgttccaaggttcgtgaagagagttgagcttgtgcagaagcagacaattatgcattaccaaacacaacaatctcaacctttcctcaagatagtagtcgctctgcctaccatggttgctagctgtcgtggttag

SEQ ID NO: 124587 - DNA, 1928 bp, Zea Mays
caacgtctgctgggcggaactatgacgaattcatcatcaactccaccacgatcggtatcagtggcaatccagcaacgtctgctgggcgcagccgtatccggcaactccgcggaaatgaaacacatggccctgcgagccccgggggtgctgctggggaccactcctcaggggaacacctgcctccacatcgcctgcatctatggccacgagaggttctgcagggacgtcctggcgctgacgacgaacagccagcagtctccggcggcggcgcctcttctcgtgaccatcaacgcggatggcgagacgccgctgctcgccgccgtggccagcggccacgtctccgtggccttgtttatcctcgggcgctgtcgggaggagcggctgagcgaggcgatcctgacgcaggacaagcgcgggttcaacgcgctgcaccacgccatccgcaacgggcaccgggggctcgccctccagctggtcgacgcggagcccggcctgtcgaaagccgtgaacaaacacgacgagtcgcccttgttcatcgcggtgatgaggaactacgcggacgtcgcggagaaactgctggagatccccgattctgctcacgtgggagcgtatggctacaatgctctgcatgctgccgtgagaagtggcaatccagttgtggcaaaaaggatcatggagacacgtcctgagctggcaagacaagaagacaagcacaaggcgaccccaatgcacatggctgtgcactgggataagattgacgtgctgagagtgctgctggagcatgactggtccttagggtacgtactcgactccagtggtatccctattcttgcttcagttgcgagtcgaggatacgttggtgctgcccaagagcttctcaggcattgcccagatgctccctatgcccctacaaatggcctgttgacatgccttcaccaagccgttcagggtggtcacatggagcttctagaattcttcctgcggtcaaagcatctacggaagctagtcaacatgcgagacggagcggaagagactcctctgcacgacgccgtccgaaagtgcaatcccaagatagtcaatgctttgctgcagcatccggacaccgacgtcacagtgcttaaccggtcgggtaacccggctacctggctactacggggcgaccacgccaagactttaaactggaatgaagtctccatgcttatgttgaaagctgatcctgatgcagcaaacgatacatataaccttcataagcaaatcaaggatcgagtaacttctgaatcaaggaaggatataaagttattgactcaaacatacacaagcaacacttcattagtggcaatcctcattgcaacaatcacctttgctgctgcttttaccttgcctggaggatacgacaatgatgctggaagtgaggggctacccatcatgtcaagaaaggttgcctttcaggcatttttgatctctgactgcttggcaatgtgctcctcactggctgttgccttcatatccatactagcaagatgggaagattttgagtttttagtttactacagatcgtttactaagaaacttatgtgggttagctacgtagcaaccaccatagcatttgcaaccggtctatacacagttttagcccctcgcctcctatggttggctataacaatttgccttatgtcagttctactgccatttcttacttggttactaggtgaatggcctgtcttgaagcttagatttcacctgggcaaaacattcaagtctgagctccttgatatggtctgattttatgaactcgtcttatttcttccaacaactctctgttttactatatctaaaaagatagtatgtatgcctcatgttgtttgaaaagatgtcattgtgattttgaatgtcatgtaaaccttaaattttgtaatttgatgtttatt

SEQ ID NO: 124588 - DNA, 177 bp, Zea Mays
gtgattgttctctatgatgttgataaagtcagccaaaacaaccaacgtctgataaaatggataatagattcctcctctgatgcatgcaagataataatgacttgccaggatgaatctaatctcctagattctataaagaatcgttgcaagattatttcaattggtgtgcccagtaca

SEQ ID NO: 124589 - DNA, 1461 bp, Zea Mays
ctccaccaccatccaatatccactgcaccacttctgctaatcccttgttcttgtgcctccgatccggagctctcaccattgtcatcgtcaatcgatcaatataaagcgagccaattaccccaaggagctaccgcttgcgacggtatggcgatcccggtgattgacttctccaagctggacggccctgagagggccgagaccatggcggccctcgctgccgggttcgagcacgtggggttcttccagctggtgaacaccggcatctccgacgacctgctggagcgggtgaagaaggtgtgcagcgactcctacaagctgcgggacgaggcgttcaaggactccaaccccgcggtgaaggcgctcacagagctcgtggacaaggagatcgaggacggcctccccgcgaggaagataaaggacatggactgggaggacgtcttcaccctccatgacgacctgccatggccttccaaccctcccgccttcaaggagacgatgatggagtaccgcagggagctgaagaagctggcggagaagatgctgggcgtgatggaggagctgctggggttggaggagggccacatcaggaaggccttcagcaacgacggcgagttcgagcccttctacggcaccaaggtcagccactacccgccgtgcccgcggccggacctcatcgacggcctgcgcgcgcacaccgacgccggcggcctcatccttctgttccaggatgaccgcttcggcggcctgcaggcgcagcttccggacggcagctgggtcgacgtccagcccctcgagaacgccatcgtcatcaacaccggcgaccagatcgaggtgctgagcaatggccggtacaagagcgcatggcaccgcatcctggcgacccgcgacggcaaccggcgctccatcgcctccttctacaacccagcgcgcctggccaccatcgctccggcgatccccgccgcaggggtcggcgacgacgactacccgagcttcgtgttcggcaactacatggaggtgtacgtcaagcagaagttccagcctaaggcgcccagatttgaagccatggccacgacgacgaccaagtgatgacctagcagcgactcagcgagagcctaaataaatattaattcacagtcgtcaagttaatcttgtggttatacggtacgggcggggcttgtacttatgtaggttgctaagtcttaagtgtgtagtttaattaacgtgtgtgtggaatgtacgcgtcatacaaatgtgttggtgtgtgccctgccgcaagattgcggtgagcggtggatctatggtcaacgggtgcctaaatgatttgtgcttttgtagcataaaatggcacatctcctctgcttttgttacatctccaccttttctttttgcacttttcacctcaagtaaaacatgtggcggctttcactaagtacaaagaagctctacagagctatttctatt

SEQ ID NO: 124590 - DNA, 275 bp, Zea Mays
cttctatccgacctagcgctgcataaccagatcggagtggagggggagagtggagccgccacgagagtgctccgcgccgtcgtcacccagccatctggtattgtgccagtgccttctacaagcctgggggcgggaggtcgtggtcgtgccactcgggatctaccaccggagccgattgaattgctcgttggagcgatccccttgccgtcaacccgctctgcgccacggccggacccaccaccgcgtcaaatcatgacaaggaagtgattgaggct

SEQ ID NO: 124591 - DNA, 1033 bp, Zea Mays
ctgtttttttatgagccattgtcacttcggaaatggaagctgcttttatggtcatttcattacatgtttattttttatgatattatgacacattgttgtttttcaagtaaaactaatttgttttaaatttgttcacgagactattcttcctgttgtatccatatcttgagttcttgacatacatgtaatgttagctaagagtgctacttgtgcggttgtgcctttcattctttatgcttatttttttgtgcataagtagcaattttaagactgatatattgttttatatttctaggacaagactctggtaaggaaaagattgatatcaagcaacaacactcgtgtcaaggcagagtctggcacctgttaacgatgatgagtttagtgcaacctcatatcatgctttgtatctgtaactggtagaaacaaagttgttgcaacatcatccattgccgatgatttgtcagaggttgacatgccatcaaaacgcaggaggctgttgaatcaagacacaagactatctagagcagaataccttgatgacaacaactcatgtgttactggtatatcagcagaaggcaaacttcttgtggataagaaaaaaacttcaagctggattgatgttgatgtggtgcttttgtgactaatcatctttagagcttttgtgaatgatctagctagctatctgtaaatgatctagttgtgaatgatattataattgtgatgcttttgtgaatatataattgtggtgctattgtgtttatgtgatggatctatgactatggtatactgattaactgtgtatgtctttatgattaatgtataaaaatctgtgatttgtggtgcttaattaaatgtatgttattattaataacaactgtaaaagagcgactttctgttggttgctaaatgtatagtatgccgacttatggttggttgctaaatctatagtacagcaacccacggttagtcgctaaatatacaatattagcaacggtcggtgggtcgctaaaaaaatgtcggtcgctaaagc

SEQ ID NO: 124592 - DNA, 923 bp, Zea Mays
gaaaagaaataaaaaaactaacctaacctaagcccatgaaaccggccatgcccccaaccctagccgccactaccctgctccctctcccaagccgccgccactccttctccctccccctttctctctcttctccttctccctccccctttctctaccccgagcccccacccgaccgcgcctggaacaccgcccaggcgccccgcctctgcatccgcccgccctaggccgcagaagggagcattcgccgccccaccctccgtttcccgtcgcctcgcccccgcgctccgtcagccgcccctctccgatggagcgtgtaaaaaactcgatcagcattggaggaactggcaatggcatcataaccaagaagaaaattaggcttccaaatttgagatgaagacgatgactcaaacttgggccatggaggtgttcaccaacagccaaatttgattcaggacaagactctggtaaggaaaagattgatatcaagcaacaacactcgtgtcaaggcagagtctggcacctgttaacgatgatgagtttagtgcaacctcatatcatgctttgtatctgtaactggtagaaacaaagttgttgcaacatcatccattgccgatgatttgtcagaggttgacatgccatcaaaacgcaggaggctgttgaatcaagacacaagactatctagagcagaataccttgatgacaacaactcatgtgttactggtatatcagcagaaggcaaacttcttgtggataagaaaaaaacttcaagctggattgatgttgatgtggtgcttttgtgactaatcatctttagagcttttgtgaatgatctagctagctatctgtaaatgatctagttgtgaatgatattataattgtgatgcttttgtgaatatataattgtggtgctattgtgtttatgt

SEQ ID NO: 124593 - DNA, 1000 bp, Zea Mays
gaaaagaaataaaaaaactaacctaacctaagcccatgaaaccggccatgcccccaaccctagccgccactaccctgctccctctcccaagccgccgccactccttctccctccccctttctctctcttctccttctccctccccctttctctaccccgagcccccacccgaccgcgcctggaacaccgcccaggcgccccgcctctgcatccgcccgccctaggccgcagaagggagcattcgccgccccaccctccgtttcccgtcgcctcgcccccgcgctccgtcagccgcccctctccggtgagctctcagtcgccccctgaccttagccgctttcatttgagagctttgctcgctgtgaccgtggggtaggaggaggcacaaggccgtctgcttttgtcggcatggaccactcccttccactgtctcgattgaagcttgatgcgtgactagtagctcatagtccgattttgcgtcttgtttgtctcatacgtgatgtttggttgggtgtttttattccgtgatccatttacaatgtgacttgtttccgttgtttgacgtttggttgggccggtccgtatctgtctgtaccgtgatcggttacatagccataacttctcattaccgctccccaccgagcgtgaagctatcccgcaacgctccacctccgctcgcgagctgcaaggtccggccggcgaccgccacacagcaaggtccgttgaaggtccagcggaagaaagaatgaaggtccagaatcggtaccaattaaccctgtcatctaatcgaggcagtagagagacttttccagaataaaggtccagcagatggatataaacgttgtaaaaggacaacaatgtgttacgtgactcatccaaacaaaatcagttaatcgttacattgtaacaaatagcactgtcttctctttacgttagcgttaccactctgtttgctgaaccaaacgccaccatagtctcgattaaaatctatgatgcaatg

SEQ ID NO: 124594 - DNA, 2550 bp, Zea Mays
acagcgggcaaggaacttacattgattgatttatttgcatcagatgcgctgtcgcctacggtggctccggtgcccacagggctgctcggctgcaacaccacctgcggcgacgtgagagtgccgtaccccttcggctttgggcatcccggctgctactggccggggctcaacctcacctgcgacaccagccagagccagctacccccccggctgcttctccccggcaacggcaacagcaccctccaagtcgtcgacatctccttgcgcaactccacagtgcgcgtcatccatcatcgcggcagggccgattcgacgaccaccggcaccgacgtcgatcacacggtggcttacgataacatcagccccggtatcaccagttacagcagcctggtgactgacattcgcgtcccatcagacatcgtcgagccttatgcgctttcgacgaggaacgagttcatcgtcatctccgggtgggacgtgcgtgccagcctctacgggcagtacagaattaacggcgccagcagcaacaccactgacagtatcatcagccaagctgtctgcagcagctccggcggcggaggtcttggttctggtgggccgccgccggtcccaagcccaacacaaacccacggcgggtactgctccggccacgatggctgctgccgtgcgcccatctctgcaggtaccgcgcccaagagagtggaattcaaagcgcttcgtaagaacatcactcattattatggtaattggtcgtggaacttcgcattggcgtccatctccgaggtgggcttgactgatcagtggcacaagatcttcaacatgaatgatgggatcatcagttacacgtcatctcccattgttctacaatgggccgttaagaaaggcttgccagcggcagcgccttctgccgacaactcaggcaagtgcccagcggacgtgatcagccgcctttgcaagagtgagaacagcgactgccggcgagagaatggaggctttacgtgccactgctccaagggatacgacggcaacccttacatcgctgatggatgcaaagatattgatgagtgtaacgacccgaccctacgcaaatcatgcttgggcggctactgcaacaatttgcctggagaatacgagtgccggtgcccgcgaggaatgcacggcaacgcttatgcgccgggcggttgcatcgacaacaagttcccgacaggtttagttattggtttgtcagttgctagtggcccggcgctgtttctgctggttctgggtgtatggtttccactccgcaagtttaaacagcgcaggataaaagtacaaaaacaaaagtacttcaagcaaaatcgtgggcaattgttgcaacagctgttgtcccagaaggcagacattgcagagaggatgataataccattggatgagcttgtaaaggccacaaacaactttgacagagctcgtgaggttggtggcggaggccatggtactgtttacaaaggaatcctatcagaccagcatgtcgtggccatcaaaaagtcaaagattagcaagcagaaggaaatagatgagttcataaatgaggtagcgatcctctcacagatcaaccataagaatgtggtcaaactctttggatgttgcctagaaactgaggtgccattgttggtctatgagtttattcccaatggtaccctttatcaccatcttcatatcgatcgacaaaaaagctcactatcatggagcaacaggttgaggattgcaactgaaatagctacttctcttgcctatctgcactcatcagcttcgatccccataatccatcgagacatcaagtctagtaacatacttcttgatgatgcaatgacatcaaagatatcggactttggagcttcaaggtacattccattagacaaaacagggttgacaacaaggatacagggaacattgggatacatggatccagaatgcttttacacaggtcgtttcaccgaaaaaagtgatgtttatagctttggtgtaattctcgtggagctactcactaggaagaaaccaacttgttcagatttgtccaatgaatgtggtggccttgttcctcatttcgttaatctacattcctctagaaatcttatccagataatggatccacaggttatagaggaaggaggcgaagaagtacaacaagttgctatgcttgcagcatcctgtataaacatgagaggtgaagaaaggccaacgatgcgacatgttgaacttagactagaaggacttcaacaaggttccaataaaaagtacaagaaaggtaatatcgtaatgaaggatttcgagaatagtagcaacggggcaaactattcatcagggattagtgaagggcatagttatgaggaatctagtagaagatacagtttggagcaagagatgatgatgtcggcaaggtatcctagatagcatagctctatgtcatctatattagcacaaggaattttttaaattctacgagtacttgtatgcatgtcaattcaactatatctctatttgtgcctttctctttgttttgttcatattgaa

SEQ ID NO: 124595 - DNA, 999 bp, Zea Mays
atggcgccaatctctgcagcggcggcgctcttggcgatggcggcgttacagctctcggccgcagcaactgcggctcatgatccgtcaccggcaccaatagggctgcccggctgcaacaccagctgcggcagcgtgagcgtgccgtaccccttcgggtttgggccctcccactgctactggccggggctcaacctcacctgcgtcagcagcagcagcagccaccagcccccacggctgctgctcggcgacggcagcctcagggtctccgagatctctctggacaaccaaacggtgcgagtcatgcgcgccggctccatcataaacacaaccggcgacctaacctcacccgcctggaacgcctcgctcgatttcggccgcggcttcagggagcacggctacctgctgtcgctccagaacgagctcgtcgtttcaggatgcaacgtgatggcgacgttttccgcggacatcgtcggcgaagaaaccagcaagatcgtcagcggctgcgcctccttctgcaccaagagcgaccacgaggtcggcttcatagatgaccaccgcgaggtaacaagcaagtactgcaccggcacgtctggctgctgcctggcgcccctcacttctagcggcgtgcccgtgcccaatggagtacaggccaggtggctctacagtggcaaccacaccgtggagcagacaactgtgccggtaatcgtgttcgtcgcggagcaggggtgggtcgacagggaacaccaggcggacggatttgaggaagccccccttctcctcgatttcggggtcaagctgggcttcccacaactgcaaggaaacagcagctctgattgcccacaggacgtacagcgcaggctctgcaagagtgaacacagcttttgcaatgctttggtccaaggctatacgtgtcagtgcgggtatggctaccaaggcaacgcttacatcgccggcgggtgccaaggtcagttaccactgcatatactgttagtaaagtag

SEQ ID NO: 124596 - DNA, 2355 bp, Zea Mays
gttatttatttaatttagtttaattttggcaagacagtttccctgccaactttgcctttttaaaggctgcatcagaattctcatcaatttgttcttccatttgtattcacagattaatttggagctcaaggtctgtggagggtcatctatccggaaaactctggttaaagaagcagctgcttgtggcgcagcacatctcatccttggtgtcacgaacaattcccggtccttcggatcctccttgacatcagttgccaagtactgctcaaagagagttccagccagctgctcggttcttgcagtgaacaatggcaaagtcgtttatcataaagatgctggtcacgggttgcaacatgaactgtaccaaagcaataccacgatacctgagacaccaaggaggagctaccggaagctcttgtcgaccatgataggggataaactctgggatgagaatggaaaagacagaaggtgtgtgtctcgtgccgtcaccatgccaatgaggtctcccgcacggccaaaagaattttcactggcattagtcccggtgaagggttgccaacacgaatcgccagcggtagcaactggctggcccctacttaggaagaagttcttgccagaccggaaagcttctgcgcctgacaagtccaagatgtctgtggtgcagtgggcaatgcggctcccaagcaggtattcagcagtatcgccagtccattcagaatacagaaccacaaaaccggactccacgagcgccagccatatcctccgtgaccgtgtgattgttccctcaaggagcaattctggaaagtcttgtgtagtgattgaagaattggagaaggaaactccagaggaactgacgttgctcaaagagaaattctcatccatttattcttcattcagttacagtgaacttgcaaagatcacctctgacttctcaccagagtgtgtagttggacaaggaggcactagtcaagtttacagaggctgtttggcaaatggcaaggagctagcagtgaagatcctgaagtattctgatgaggtactgaaggagtttgtatcagagattgagattgtcagttctctcagccacaagaatgtgatatccctcgttggtttctgcttcaagaatgatgaccttctgttagtgtatgagtatttgcaacgaggcagcctggaagagatactgcatggtaaaaaagaatgcaagagcatatttggttggactgagaggttcagcgtggctatgggagttgctcgtgctctggattatctccatagtgataacaacagtcgtccagtgatccatagggatgtcaagtcatcaaatatcctcatttcaaaatgctttgaaccaaagttatcggactttggtctcgcagtctgggctgctgatgtgacatctcagatgacatgcaatgatgttgcaggaactttcggatacttggctcctgaatacttcatgcatggcaaggtgggcaacaaaatcgatgtgtatgctttcggtgttgtacttctggagctcatctctggcaggaaaccactttgcactggttgtccaaaagggcaggagagcctagtgatgtgggcaaattccatcatacagggaggaaagctcagacaacttgtagatccaaacttgcccactgaaggccatgtcgatgaagttgagaggatgacccttgctgcgtccctctgcatcagacaaacacctcagaaccgtcctgaaattgatgctgttctgaagcttctccacggtgacaatgataccctcaagtgggcaagatcacaagtcgggttgtcatgcgagagcagcgatatcgatgaatttgtgatgacaccgccagcgccgaggagtaacaccaacatccagtcctacatcaacctcgcctttgatgtcgatgacgactcagcctctgtcagcagcaacgacttcattgcagccaacacctccttggaagagtatctgaagggaagatggagccggtcgtcgagctttgactgacggacccatggtcagagttaaccctttattagtgtatagatcgttcttgttcttcttctaatttaagtttcaattttgcgccttggatgagagttggcacctgcaatgccctccaccaggaaatcctttgattatgtcttagttatttttttccttttcttttgggggtccctcttactctctgaagaggcaccctgttgttttactgtctgaagagacttatcatactcaggtagtctcatccaaagaggtgacaaataaagtcgggatcatacgaaactgtggctttctttccatacctaaatcaatcatcttttgttctgcacacgttgttattgttcaggactttgttttat

SEQ ID NO: 124597 - DNA, 2386 bp, Zea Mays
cctcactctctttaccttttttcacctctctctttcgctcgccgtttacaggtttgctcgtgagactggatgagcgcagcagggccgcggactcgctcgcctccgtgctcgccgtctacgacggtttctgcaacctcaagcagattaatttggagctcaaggtctgtggagggtcatctatccggaaaactctggttaaagaagcagctgcttgtggcgcagcacatctcatccttggtgtcacgaacaattcccggtccttcggatcctccttgacatcagttgccaagtactgctcaaagagagttccagccagctgctcggttcttgcagtgaacaatggcaaagtcgtttatcataaagatgctggtcacgggttgcaacatgaactgtaccaaagcaataccacgatacctgagacaccaaggaggagctaccggaagctcttgtcgaccatgataggggataaactctgggatgagaatggaaaagacagaaggtgtgtgtctcgtgccgtcaccatgccaatgaggtctcccgcacggccaaaagaattttcactggcattagtcccggtgaagggttgccaacacgaatcgccagcggtagcaactggctggcccctacttaggaagaagttcttgccagaccggaaagcttctgcgcctgacaagtccaagatgtctgtggtgcagtgggcaatgcggctcccaagcaggtattcagcagtatcgccagtccattcagaatacagaaccacaaaaccggactccacgagcgccagccatatcctccgtgaccgtgtgattgttccctcaaggagcaattctggaaagtcttgtgtagtgattgaagaattggagaaggaaactccagaggaactgacgttgctcaaagagaaattctcatccatttattcttcattcagttacagtgaacttgcaaagatcacctctgacttctcaccagagtgtgtagttggacaaggaggcactagtcaagtttacagaggctgtttggcaaatggcaaggagctagcagtgaagatcctgaagtattctgatgaggtactgaaggagtttgtatcagagattgagattgtcagttctctcagccacaagaatgtgatatccctcgttggtttctgcttcaagaatgatgaccttctgttagtgtatgagtatttgcaacgaggcagcctggaagagatactgcatggtaaaaaagaatgcaagagcatatttggttggactgagaggttcagcgtggctatgggagttgctcgtgctctggattatctccatagtgataacaacagtcgtccagtgatccatagggatgtcaagtcatcaaatatcctcatttcaaaatgctttgaaccaaagttatcggactttggtctcgcagtctgggctgctgatgtgacatctcagatgacatgcaatgatgttgcaggaactttcggatacttggctcctgaatacttcatgcatggcaaggtgggcaacaaaatcgatgtgtatgctttcggtgttgtacttctggagctcatctctggcaggaaaccactttgcactggttgtccaaaagggcaggagagcctagtgatgtgggcaaattccatcatacagggaggaaagctcagacaacttgtagatccaaacttgcccactgaaggccatgtcgatgaagttgagaggatgacccttgctgcgtccctctgcatcagacaaacacctcagaaccgtcctgaaattgatgctgttctgaagcttctccacggtgacaatgataccctcaagtgggcaagatcacaagtcgggttgtcatgcgagagcagcgatatcgatgaatttgtgatgacaccgccagcgccgaggagtaacaccaacatccagtcctacatcaacctcgcctttgatgtcgatgacgactcagcctctgtcagcagcaacgacttcattgcagccaacacctccttggaagagtatctgaagggaagatggagccggtcgtcgagctttgactgacggacccatggtcagagttaaccctttattagtgtatagatcgttcttgttcttcttctaatttaagtttcaattttgcgccttggatgagagttggcacctgcaatgccctccaccaggaaatcctttgattatgtcttagttatttttttccttttcttttgggggtccctcttactctctgaagaggcaccctgttgttttactgtctgaagagacttatcatactcaggtagtctcatccaaagaggtgacaaataaagtcgggatcatacgaaactgtggctttctttccatacctaaatcaatcatcttttgttctgcacacgttgttattgttcaggactttgttttat

SEQ ID NO: 124598 - DNA, 2973 bp, Zea Mays
atatatttaattagatagtgattaatcagttgcggtatgcgttagctacggagaaaaaaataccgagttgcagaggtgttggatcgaagcaaggtagcggcaggcgcaaccgggctggagacgagcagaaaagaaaagaaaaaaagccgcgagcagacagcagacaggaaacgggaccggacgggacgtttttcaccgcaggggaggaggcaggagggcccaacgtcaaagaaacaggaggccgcataaaacgcagcctcccgcggatccccctacttttctttcttctttctcatctcagttgcagttcccctctctctcctctgccgtagcgaggcaggcaagccaccaagtccgagcctcggaggcatcgaccaacgccggcggcagcggcgccatgaggctgctcgtccccgacggcgcgcgccgccagcggttgctccagtgcgaggcgcccccgtcgccctcgccgccttccccgtccccgtacccgtcgtcgtccccgtccaggacggtcgtggtggggatcaggcgcgacgccgccagccgcgagctgctcacctgggcgctcgtcaaggtcgccaatgctggggaccgcgtcgtcgcactccacgtcgccaccgcggccgccgccgacggtttgctcgtgagactggatgagcgcagcagggccgcggactcgctcgcctccgtgctcgccgtctacgacggtttctgcaacctcaagcagattaatttggagctcaaggtctgtggagggtcatctatccggaaaactctggttaaagaagcagctgcttgtggcgcagcacatctcatccttggtgtcacgaacaattcccggtccttcggatcctccttgacatcagttgccaagtactgctcaaagagagttccagccagctgctcggttcttgcagtgaacaatggcaaagtcgtttatcataaagatgctggtcacgggttgcaacatgaactgtaccaaagcaataccacgatacctgagacaccaaggaggagctaccggaagctcttgtcgaccatgataggggataaactctgggatgagaatggaaaagacagaaggtgtgtgtctcgtgccgtcaccatgccaatgaggtctcccgcacggccaaaagaattttcactggcattagtcccggtgaagggttgccaacacgaatcgccagcggtagcaactggctggcccctacttaggaagaagttcttgccagaccggaaagcttctgcgcctgacaagtccaagatgtctgtggtgcagtgggcaatgcggctcccaagcaggtattcagcagtatcgccagtccattcagaatacagaaccacaaaaccggactccacgagcgccagccatatcctccgtgaccgtgtgattgttccctcaaggagcaattctggaaagtcttgtgtagtgattgaagaattggagaaggaaactccagaggaactgacgttgctcaaagagaaattctcatccatttattcttcattcagttacagtgaacttgcaaagatcacctctgacttctcaccagagtgtgtagttggacaaggaggcactagtcaagtttacagaggctgtttggcaaatggcaaggagctagcagtgaagatcctgaagtattctgatgaggtactgaaggagtttgtatcagagattgagattgtcagttctctcagccacaagaatgtgatatccctcgttggtttctgcttcaagaatgatgaccttctgttagtgtatgagtatttgcaacgaggcagcctggaagagatactgcatggtaaaaaagaatgcaagagcatatttggttggactgagaggttcagcgtggctatgggagttgctcgtgctctggattatctccatagtgataacaacagtcgtccagtgatccatagggatgtcaagtcatcaaatatcctcatttcaaaatgctttgaaccaaagttatcggactttggtctcgcagtctgggctgctgatgtgacatctcagatgacatgcaatgatgttgcaggaactttcggatacttggctcctgaatacttcatgcatggcaaggtgggcaacaaaatcgatgtgtatgctttcggtgttgtacttctggagctcatctctggcaggaaaccactttgcactggttgtccaaaagggcaggagagcctagtgatgtgggcaaattccatcatacagggaggaaagctcagacaacttgtagatccaaacttgcccactgaaggccatgtcgatgaagttgagaggatgacccttgctgcgtccctctgcatcagacaaacacctcagaaccgtcctgaaattgatgctgttctgaagcttctccacggtgacaatgataccctcaagtgggcaagatcacaagtcgggttgtcatgcgagagcagcgatatcgatgaatttgtgatgacaccgccagcgccgaggagtaacaccaacatccagtcctacatcaacctcgcctttgatgtcgatgacgactcagcctctgtcagcagcaacgacttcattgcagccaacacctccttggaagagtatctgaagggaagatggagccggtcgtcgagctttgactgacggacccatggtcagagttaaccctttattagtgtatagatcgttcttgttcttcttctaatttaagtttcaattttgcgccttggatgagagttggcacctgcaatgccctccaccaggaaatcctttgattatgtcttagttatttttttccttttcttttgggggtccctcttactctctgaagaggcaccctgttgttttactgtctgaagagacttatcatactcaggtagtctcatccaaagaggtgacaaataaagtcgggatcatacgaaactgtggctttctttccatacctaaatcaatcatcttttgttctgcacacgttgttattgttcaggactttgttttat

SEQ ID NO: 124599 - DNA, 291 bp, Zea Mays
atgcaacttagggcctctggggccgaaatttgcttaggactgttgctgctgcaggtgctggttcctcctctcagacacaaacctatgttagaaacagaaaacgacctagaaatgcagcagctacagctcaacacatacgtgaagaagatgacaatgctcctgctgaagatgaacaacaagaacaagagacagcaagatacaataaacgatgatgaagatgaaggcgaacatgaatcaggtggaaagggacctgctgttgatgaatttcagttggacgaagatcttctttag

SEQ ID NO: 124600 - DNA, 105 bp, Zea Mays
atctcccacagcggttctccctaaattctctctttataccccactacaaccataaaatatcattttctatacatacttttcatccactattaatttttctactaa

SEQ ID NO: 124601 - DNA, 747 bp, Zea Mays
gtttttttttctttttttaaacacacacgtccaatgcagccaattcatattattccgagacattaaaccaaacaaacagctttgcaaagccaccgtaacagaataccagtcaaatataggtcattctaaacaacaacgctgcaacaagggcaggtctttttttccctggaagaagcagcaggcttggagcacgaaaaccagcatccagccatcatttatcaactttgagaatcgaaacatagcatgcgggcataacatctagagtgtgtgcttaattaaaaacagcggcaatggcaatggcaggcagcttcagcgcacacgcaccggcgccgtgacgaagagaacaacacgaggtgtactagaagataagctatcagaaatcaagaacggcacagtcctggtaaactccccgacatcagcagacacgcatcaggtcgggagatcggatccgtcttactggccctcgggggcggattctttgggggcagcagctgcttccttgatctcatctccggcgtcctcctggtgaggaaagaaagagcaaggtcacatgagaaccatgacagccaatgagcaaagatggtcaggtcacatgcttaacgatgatgctctgtgtggaaagaagctcacgttggtgtcggaagtccatagggtcaagttgtcacgcaggagctgcatgatcagagtgctgtccttgtaggactcctctcccaggctgtctagttcggagattgcctcatcaaaggc

SEQ ID NO: 124602 - DNA, 2367 bp, Zea Mays
cccttttctgccgctcttcccgcgcctataaaaatcaggggcagaaatatctcccctacctggcagcagaatctgatctccattttcctcccgcacccaacccaaccacggacgcacgccgaggagggagaaagcgggtgtggaggggcgggcggccggcctcgcatgtttgacgacgcgggggccgtggcggtgaagcggatgaggctgtgggaggaggacgaggtggaagtggaggaggaggggatggaggtggacgcggagccgggatggccgtggggaacgccggcggcggggctctccagggctgcggcgatcgtcgtggcggacgcggcggagcccgacttccccgtcatatacgtcaacgccgcattcgagtccgccacggggtaccgcgcccacgaggtgctcgggcgcaactgccgattcctgcaatttcgggatccacgagcccagaggcgacatccccttgttgatcccatggtcgtttcagagatccggcgatgcctcaacgaggggattgaattccatggcgagctgctaaatttccggaaggatggcgctccactttacaacagattaagtctcattccaatgcacggggatgatggctacgtgacacatgtgattggaatccaactattctccgaggcaaacatcgatctcagcagcgtgtcgtatccggtgtacaagcaacagaccaacaacaggcccagcattcaagatctgaactcagcttcccatgagcatgctccgaaagtccagagtgcagaccactgcggtatacttcagttgtcagacgaagttctcgcacacaacattctgtctcgcctgtcacctagagatgtcgcatccattggatccgtctgtaccaggatgcatgagcttaccaagaatgatcacctgaggaagatggtctgccagaacgcgtggggaagggatgccactgtcaagcttgagatgagcaccaagatggtaggatggggccgtcttgcgagagagctaactactcttgaggccgcctcgtggaggaagttcacggttggagggcgcgtcgagccttcccgatgcaacttcagtgcctgtgctgttggtaaccgcttggtccttttcggaggggagggtgtcaacatgcagcctatggacgacacctttgtgcttaacatggaggctgcaaggccggaatggcgccgcgtgaaggtttccgcctccccaccaggccggtgggggcacactctgtcgtggctgaacgggtcatggctggtggtatttgggggctgcggacagcaaggtttgctcaatgatgtcttcgtccttgaccttgacgctcagcagccaacgtggagggaggttgcaagcgagggtcctccactgccacggtcctggcacagctcatgcaccttggatggttcgaagctggtcgtctccggtggctgcaccgagtctggcgttctcctcagcgacaccttcctgcttgacctcaccaaggagaagcctgcgtggagggaaattcccacatcttggtcacccccatcccgcctcggccacaccatgtccgtctacggtacgactaaactgctcatgttcggtgggctggcgaagagcggctcgctccggctgcgctccagcgacgcctacacgatggacgtcggcgaagatagtccgcagtggaggcagctggcgacgaccggattcccaaacgtcggcccaccgccgaggctcgatcacgttgcggtgagcctgccctgtggacggatcatcatattcggtggctccatcgcgggactccactccccggcgcagctgttcctggtcgatccagcagaggagaagccgacgtggaggatcctgaacgttcccggcaaaccccccaagttcgcctgggggcacagcacctgcgtggttggcggcactagggtcctcgtcctcggaggccacaccggggaggagtggatactgaacgagctacatgagctctgcctggcaagcaggcccgacgacgacgacgatgaccgctactgactagtttcgttgcacatggttcatctgttttatatgctatatgctattgttcgtaactacttccagtatgttgttgggtaatcggtatgagaaaaaatagtggaaaattaattaaaaaagttagactagaagattttagtgtattttgttttcatcggagaagtttccttttatcggtctagatagattctatggtctatatatttgtatattttttgtctaaaagatcaaaaaaaactgaaacaactgcattgtagattcgcatggcaaagtcgccagttccaatgtcttgtactcttatttttaatcatatgtaaaatatagcgctgcttcagtttgtaggta

SEQ ID NO: 124603 - DNA, 743 bp, Zea Mays
cccttttctgccgctcttcccgcgcctataaaaatcaggggcagaaatatctcccctacctggcagcagaatctgatctccattttcctcccgcacccaacccaaccacggacgcacgccgaggagggagaaagcgggtgtggaggggcgggcggccggcctcgcatgtttgacgacgcgggggccgtggcggtgaagcggatgaggctgtgggaggaggacgaggtggaagtggaggaggaggggatggaggtggacgcggagccgggatggccgtggggaacgccggcggcggggctctccagggctgcggcgatcgtcgtggcggacgcggcggagcccgacttccccgtcatatacgtcaacgccgcattcgagtccgccacggggtaccgcgcccacgaggtgctcgggcgcaactggtcagtgctatgctatgctatgctcctggcctccgctctgttttctgctctgtttttctctgcttggggactgacagatttgggctgctgcggaatgccgcttgcttgacgaagagggagagcatgttgatgattacctatgatatattttgcttgatatttaggttgcacttctaaagttggccacatgcacatagagaaaggaattcttcaagaataataatacctagaatatatgggtgtacaaaaagtatttgttggccatgacttgcaggtggtagactcaaaacctggttgtgattatgttctctgaaactggat

SEQ ID NO: 124604 - DNA, 1251 bp, Zea Mays
gagaaactggcagcgcggcactcgctcgtctgcccattgccctgccgtgtcgccgcagattgatccggtccgatccatcaccgtggcgtagcccagctccgccttgtcgtcgtgggcgcgttcatggcggtccggctggaccctggctctttgaggatagcagtcgctcctgctgaattttgcacatcatcaccgtcagcatcggcatcgtcatcaccacagctctgcacttccccaaactggaccatcgatgtctcggacgtccgaactatcaaggtgaccaacgtgcctctctcggcgaccgcggagaacatgaaggagttcttctccttctccggcgagatcgagtacgtcgagatgcgaagggactcggagacgtctcaggttgcttatgtcaccttcaaggagttccatggagccgatacagctctgctgctctctggatcaagcatgtgtggcgatgtttccgtgaacatcgcgccggtggaagactacgaactgccaccggaagcgtactcccatgcaggagcaaggtctccgggtccgggaacgccgacgggggaggccgtgaagaaggcggaggaggtggtgagcaccatgctggccaggggcttcgtgctgagcaaggacgcgctgcggcgcgcacagtccttcgacggccggcaccagcagctgctgtccacggccacggcgcgggtggcgtcgctggaccgccgcctgggcctcagcgacaagttcagcctcggcacggccgcggcccgcggcgcggcgcgcggcgtcgacgagcgcttccaggtcacggagcgcgcctggggggccttctcggcggccggggaggtcgtggccggcagcccctacgcgtcccgcggcgccgcctgggtgtcggcggccgtcggcgccgtcgcccgggccgcgtccgacgtcggcgccatgaccatggagaaggtgggcagggccgaggaggagggggaggcctcggcggcggagcatggtcactacgcgtcgtcccgtgtcgacgtgcacgacggacagggcggaggtgcagctcagcacggtgaccataataaggcaatgtgataaaagtagcagcgcgcacgagtataaatccataaacgttttttttttttgaaaaataagatagaaatgtaactgcatgcatctgtccgattattttgacacaataaattctatatccttatcggtttgaaataagttcagattaattttggcccaaaaaaagatgtttatata

SEQ ID NO: 124605 - DNA, 599 bp, Zea Mays
ggagaacaaatatagatacacatactcttctccagcgcacacatcactagggaattcgatctatatatcctcttcttctcatggcggtgttcaagacgacaatcgtcctattcctggtttttgcggtcctgtcttcaacgtctccgtgctacgaagccggacgaagctcatgtgcaggcattggtggctgcgatcagcagctagatgcgacaccgtgcgtggaccctctcaagaatgacgcggaccactgcacgaccgcgacatgcgccttgcaatgcctgtccgccaagcacaagaccaagtctgcctactgcaagcatgagggcagcaaatacgagtgctgctgcccgccatgagagcaatcaagctagagcaggggttatgtgatacactcaataaaataaataaacttaacgtttgttcaataataaagagatggaagggatactgactttatcaaacactagctcgatcgcatatgcatggatggctgggcactgagctttttgaaatgaattgtgatatggtttgactatgggggtgtttggtttctagggagtctctctatttgatttcattttagtccttaaattgtcaaa

SEQ ID NO: 124606 - DNA, 590 bp, Zea Mays
ggagaacaaatatagatacacatactcttctccagcgcacacatcactagggaattcgatctatatatcctcttcttctcatggcggtgttcaagacgacaatcgtcctattcctggtttttgcggtcctgtcttcaacgtctccgtgctacgaagccggacgaagctgcattggtggctgcgatcagcagctagatgcgacaccgtgcgtggaccctctcaagaatgacgcggaccactgcacgaccgcgacatgcgccttgcaatgcctgtccgccaagcacaagaccaagtctgcctactgcaagcatgagggcagcaaatacgagtgctgctgcccgccatgagagcaatcaagctagagcaggggttatgtgatacactcaataaaataaataaacttaacgtttgttcaataataaagagatggaagggatactgactttatcaaacactagctcgatcgcatatgcatggatggctgggcactgagctttttgaaatgaattgtgatatggtttgactatgggggtgtttggtttctagggagtctctctatttgatttcattttagtccttaaattgtcaaa

SEQ ID NO: 124607 - DNA, 575 bp, Zea Mays
ggagaacaaacacaaatacacatactcctccccagcgcacacatcagtagggaattcgatctatatatcctcttcttctcatggcggtgttcaagacgacaatcgtcctagtcctggtttttgtggtcctgtcttcaacatctccgtgctacgaagccggacgaagctgcattggtggctgcgatcagcagctagatgcgacaccgtgcgtggaccctctcaagaacgacgcggaccactgcacgaccgcgacatgcgccttgcaatgcctatccgccaagcacaagaccaagtcggcctactgcaagcatgagggcagcaaatacgagtgctgctgcccgccatgagagcaaccaagctagagcagcggttgtgtgatacactcaataaaataaataaactgtttgttcaataataaaaagatggaagggatattgactttatcaaacactagctcgatcgcatatgcatggatggctcgccactgagcttttcaaaatgaattgtggtatgggggtgtttggtttctagggagtctctctattttattccattttagtccttaaattgtcaaa

SEQ ID NO: 124608 - DNA, 541 bp, Zea Mays
ggagaacaaacacaaatacacatactcctccccagcgcacacatcagtagggaattcgatctatatatcctcttcttctcatggcggtgttcaagacgacaatcgtcctagtcctggtttttgtggtcctgtcttcaacatctccgtgctacgaagccggacgaagctgtaggcaccatcaccaaccctactttacttatttctacagtattattctccttctcaagactgactgacgagttactgtatatattatttattaactatgatgtgtaggcattggtggctgcgatcagcagctagatgcgacaccgtgcgtggaccctctcaagaacgacgcggaccactgcacgaccgcgacatgcgccttgcaatgcctatccgccaagcacaagaccaagtcggcctactgcaagcatgagggcagcaaatacgagtgctgctgcccgccatgagagcaaccaagctagagcagcggttgtgtgatacactcaataaaataaataaactgtttgttcaataataaaaagatggaagggat

SEQ ID NO: 124609 - DNA, 1365 bp, Zea Mays
cgcatatatacttcatctcgatcgtgctccattccattccatccacgtatagctagagctgccaatcggagatacatggcccgtgtcgcgtcgctgctgctcaccgtcatcgtggctgcggcggcgtcgctgctgctgctgcttgcgccgtcggcggcggagctggcgcgggtggagcacccgcccaagaacgatggctcgctcgccatccttgcagttggcgactgggggcgccgggggcagttcaaccagaccctcgtggcccagcagatgggagtggtgggggagaagttggacatcgacttcgtcatctccacgggcgacaacatctacgacgacggcatcgccaacaccagcgaccccctcttcaaggagtgcttcaccaacatctacaccgcgcagagcctccagacgccttggtacatcgtcctcggcaaccatgactacacgggcaacgcgctggcgcagcaagaccccgccatccgcgaagtcgacagccggtacctcaacctcgccaagtccttcatcgtcaactcaggaatcgcggacttcttcctcctggacacgtcgccgttctacctcaagtactggaacagcagcaagtacgactggagagacgtcgctcctcgcgacacctacatccaaaacctcctcgatgatttggacgacgccctggtccaatccgaggcgccctggaagattgtcgtcggccaccaccccatcagcagcggctgcgagcatgggaacaccactgagctccaggagctcctcagaccaatcctcgaggcgcgcggggtcgacatgtacgtgaacgggcacgaccactgcttgcagcacatcagcagcagaaacagcccggttcagttcatgacgagcggcggcgggtccaaggcatgggcgggcaagttcaagaccacgtccgacaagatagagttcatctacgacggccagggattcatgtccatgcagctgagcagcacggaggcgcacctcgtcttctacgacgtcgccggcaatgtcctgcacagctatgacagcaccaaaaacgaagaagaggacgatggctggccagctggacaacaagcagctgtgaggggatcaattgatcgaggcaacttataatatgtgtgtgggccggaagcaattcgtttgtgtatcttatgatgtgttgtatgtgctaagtttaaaatgcatgtgcattattgtgtgcataagagaggattattgttgtatcttctagctagttgggtcacttgaggggctcagggctagaaaccaatttcaaatcacaatcattggatagtagctggactctcataatataaactatacatataatatatagatactagccagttgctcgtg

SEQ ID NO: 124610 - DNA, 310 bp, Zea Mays
aaagttcacaagtttgcttttgttgtaataaagatcaaaataagcagcaacaacactaagtttggcttgtgaaagctcagagatactagctagtacaaccacatgttggtttcacaatttaaagttcacttgcaaatttctcttttggagaaaatacaaaacaaaatatctagctgcatccatccaaaagaacttttgatctttcttgttgtagcatctataggcaccaccacgatctgcttgctattgtcatcatggagtaaacaagtgacttactacctctaggatctccctcctgtagcactctggg

SEQ ID NO: 124611 - DNA, 98 bp, Zea Mays
ccatgaatgcaaaaatgatattcatgttatttagcacaagttacgacctatttcaggaacataccggaatttttgagcaccatgctcatgaaacatga

SEQ ID NO: 124612 - DNA, 479 bp, Zea Mays
aatagtatagtcctccacctcgctcctcgcagaaaggaatcgaaaaggagcaagaacaattgtttcctctcatggcacaactcatgagaagctgcatcacagaatttatagccgctcctctcttggttcttttgatcttggcttcaacgtctccgtcctttcaagtgcatgtgaagggcgacgatggccgtcaacatggatcgccggcgcttcggcagcgactggcggcggcgacgtgcttcgagaccactgccggcttctgttgggtgaagcaatgccagagtttctgcgcatcaaaaggcttcaacgccgcgagtgctttctgctataaacggcctggttctggccgtcttcatctctggcagtgctgctgccaaccataagagtacgtagtgcaaaacgtacgcaaatgtatgcatcgatccatatatggttgacatgcaattgtaaactgaataaggtttcgctgttctaatata

SEQ ID NO: 124613 - DNA, 186 bp, Zea Mays
gtacatttagttcgtttatttggatttcttcggaaaattcagatttgaactgcaggtcactcgaaacttggaaaaccgtgcatgcaaaaatgatatccatgctacttagcacaagttacgaccgatttcaggagcggaccggaaacttcgagcaccatgctcactcaacatggccgtgaacttgcc

SEQ ID NO: 124614 - DNA, 157 bp, Zea Mays
ggtcatgaatattcattactacctttgcattctgattatactatgtggattatctttcttttacattatgtataaactttatgttcctctcgttatgctactttcaagggaggtgctgccggatttttatttactttctatctctatttcttttctt

SEQ ID NO: 124615 - DNA, 847 bp, Zea Mays
aataactcaaatgtgttgaatttatgatcgaaaaaatcatcaagtttgagcgtaaaataatggcaaatatagtgtaaatgctattaacataaaaatacaagttagagacgccatattcatcatcataaaatcatctaatggaatatctaaagtactgcagtggttggcataaaaagcaaccatggaggcataaacatggatctgatgagctccatcgctggaggataccccaaagtcgtcgggttggaggagactgtcgccggaggatactcgaaatgcgcaggattggaggatgtcacggggcccgtggtgcggatggtgaaccccgcacacgcctctggggagccacctccgggaagccaccggtgtcgtgccttcggattagggagccgctgtcgttgtgcctccgggtcgaggaaccgacatcgcgccaccggatctgcgagccacagtcgctgcaccaccagatcggagagccggtatcgccatgccttcggatcggagagctaccaccgtcgtgcctctggatcaaggaattgtcgtcgccgccacgcatggtgccgccgtcgcacgcatcccggggtccaccgccatcgcgcactgtcacacccagatttaaggggcaaacccagatttaagatcaacacatataatgactcagtgtatagagacaaatgtcaccaactttattacataacaaaaatgtcttaaaaaataactgataataaataaagcaaaataataatattatcatcccttggcgccatcatgctgactgggagacgacacctagacctcatcgaacttgtcgtagtagtcctcctccggtggcacctgctcttcacct

SEQ ID NO: 124616 - DNA, 321 bp, Zea Mays
atgaccaatagtgatgacgttgtgacatctctgataaaccatgtggtggtgaagataacacttgtggtgattgtggtgacctatgatgatgatggtgtgatgtctcaaacaagctacgtggtgacaaactacatggtggtggcaatggcactgctggcattggtggtgacttgtggtgatgatggtgtgactgctctaacaaactgcgtggtggagatgatggcaccagtaggggtgaagatggaggcgacctatgacgatggtggtgtgacatctctaacaaattacacggcggtggtctatgtggtggcggtggcctag

SEQ ID NO: 124617 - DNA, 1544 bp, Zea Mays
gttcaatgcagaccgtcgaccctctcaccaacggccgtcaattcagcaccgctggtccgccttccccatccccatcccccgccaccggcggcggccgttattcagcaccgccttcctccggcgaccgccgcgccgccgttccctggtctaggttctcgcctcttagcaaccagagcgcgcgcctaaatgaatgcggtggcggaggaggacagggcggcggagctggccggcccgctccgggacctcctcccgcctgtggacttctgctgcgcgtacggctccacgctccttcacgcacgccccgacgggacgtccatggtcgattacatcatcggcgtcgctgaccccctccagtggcactccgagaacctggaaaggaaccccgcgcactactcccgctggatggccggcttcggtgcaggcgccatcactggactggcggatcatgttggggtcggggtgtacttcaacccatttgtggaatggagagacaagaggataaaatatggggtggtaaggatgagggacctggcaatggatgtcttgacctgggacaggttctacctcagtggtcggctgcagaaaccggtccatgttcttgttgacaactgggatataaggaaggtcaactcaattaacctagaaatggcaacttcagcttctctactccttttaccagcggagttcacggagtacgacctatatgctcaaatctgcagtctatcatatatgggtgatttgagaatgctgtttgcggaagacaaagataaggtgaagaagattgttgagggtagttttcagtcgttccaattgatgtacagccccctcttgcaagagtatattgctgaaggcctattgaagacatcatcccatggacaatataaaactttccggcaggattgcggtccatgtacaacaaatgaactgttctctgttcttccgtggacgatccaaagccaaatgcaaggaaggcacacattgcacggaaaagaagtaccaccacgcaccgtagtttcttccaaggagatggcagcaaactgtgtccggagggccctgaggcaccgagtaatggtttcaagcgtgcggcaagcagtgtgtggtctgctcgcctctggcggtgcagttgctgctcaatacctcgggaagaagatggcgaaggcttggcgatctagagtgccttaagccaatgctgcccccccccaccccacacaccaacaccccaatggtgtacgctaggcttttgccagttctgggtttcatgcagtgtatggcaatcagtatcgtatgtttttcaccgctgaaagcctgataccggctgaaattttgtaggaccagaaacgtcaatgcttcagaatcaacaccacgcatatattagttataggcaaattcgtcttcactcagagctagtttggaaattcaaaccatctttaaaattgaaggagatttgagcttccaaaccaacccttagcacttcattgcaccttgtgtagcgaaagattggttcttggggcagcattttctttatcacactcccgttctaaaat

SEQ ID NO: 124618 - DNA, 600 bp, Zea Mays
gttcaatgcagaccgtcgaccctctcaccaacggccgtcaattcagcaccgctggtccgccttccccatccccatcccccgccaccggcggcggccgttattcagcaccgccttcctccggcgaccgccgcgccgccgttccctggtctaggttctcgcctcttagcaaccagagcgcgcgcctaaatgaatgcggtggcggaggaggacagggcggcggagctggccggcccgctccgggacctcctcccgcctgtggacttctgctgcgcgtacggctccacgctccttcacgcacgccccgacgggacgtccatggtcgattacatcatcggcgtcgctgaccccctccagtggcactccgagaacctggaaaggaaccccgcgcactactcccgctggatggccggcttcggtgcaggcgccatcactggactggcggatcatgttggggtcggggtgtacttcaacccatttgtggaatggagagacaaggtaccatgaatcgtggtgccttgtgttcgatggcattgtgttccactggctgtgcgtgaattgagtacttgatgaagaaatctgtcttttggtggcgcagaggat

SEQ ID NO: 124619 - DNA, 319 bp, Zea Mays
agttgtccatgtaccagtagaagattccgcagctcctgcagctcctgcttcttcgggcggtgttctcgtcgaaacacgcaagcatactccttgcttctggggacattgattggaagctcgagtacagtctgtgcgttgtttgtcttctctagcatgacgaatcaattgattttttgtatgcatccctctttcctatgtcctcccccctagccctttcactagtggttactcccgatccaaatcaccccttttccattcatagagagatccagttgtcaaaatcaataaaaaggactctagttacgagtataaagaggcc

SEQ ID NO: 124620 - DNA, 857 bp, Zea Mays
agatccccacagctgccgccaagcgagcccggtccgacttggcctctcccccgccaaacaacgcctcgacgcgacgacccagcccagccccgcgccgcgatggccatgaccgtgatccgcctcgccgccatccgcccgccgtcggcctcttcctccgccgcgtccccgtcgctgtggccgcccgcgcggctgcgcctccgcgtgaggtgccgcgccggcggggacggagggatgaagaaggaggagggggaggccgaggcgcccgagtcgctcttcgccagggagctccggcggcgtgggatggcgccgggggccgccgcgcccgcgggcgctagcaaggaggccgaggagggggcgccggaggccggggccaagcgcggggtggcggccaccgagttcgagcgcggcgccgcggcggacggccagcgggagcgctccatggcgctcaacagcgagggcctcgagggtcttgttcctcgggcgaagttactgctatcacttggcagcaccttctttctggcgtttgggcccctgattcttgtcaccgtctcccttttcgctgttttatacgtgtactttggaccgagttttgtacacgatgcaagcaagacgccggtgtcgccgccaccgtacattgatccatacgagctactggaggacgagaggctcagccggccctccccagatgtgttctgaacatgaacagtgcaagaaccagtgcataattgattacaagaaatagtcatacatagcccaaaacttatcttttttactagacgtatagttgtaaatgcaactataaccatagagtgttataatcacttaatcagaagttttagcacgtagtattccatcca

SEQ ID NO: 124621 - DNA, 759 bp, Zea Mays
caaatcccgcaatcacaaaacccaatccgaaacagtcctcctcccatcttatcccaaacacaacccacactactaccctacccgtccgcctctctcgaaagcgcagcaccagcgagcatgtcgcctgtcaccgcactcctggcgggcacggtggtgccgccggcctcggccccgtcgccagcgaggcacgcccgccattactccgtcggcttctccccgctccacggcggcgggcgcgcggcgctggcggtggagtgctcgtcgcggccgcagaagaaggggaccaagcaccacatgaagacgcggcccaagaagacgcagccgtgggacatcaagcgccgccccacgcagtacccgccgctgccgccgctcccgccggactggacgctcgtcgcctccggcgccacggtggacgtggaggaggcggaggccccggcacccgccgcgactctcgtcctcgacgtggccgcggccaccgactgaggccgccgcggcgtgtcgccaaagttgttcccttgaacctccgcataagctgtttttctttgagatttattatataataacaatggctgcccagattttgtgattataaattaagaatctttcattgctgtccagattgtggctgtcaccgcgtccaatttagtgcgttgctagatgatttcttggttgcatgctgtgtgcaacgcttattccatgccgtcagtggcagtgcagactgcagagtgattagctactccatctccatagtttgccagt

SEQ ID NO: 124622 - DNA, 1516 bp, Zea Mays
gctcaaccatttccagcctcaattagccgaggcccggcccattccttgcccacgtcatctttctgtctctccctctcatcgccgcgtcacgcacagccgccgccgtcgtgcgcgtgtgccggaacggccgcgtggatcctccgccccgtcccagcggcgacttgtccgtgcgaagatgctggggttctcgaccggacagctgctggtcgtcctcggggcctgctccgtcatgatgaagcccagtgatatggtgaagattgcgaggacggccgggcggatgactggaagagcggttgggcggctcatagtggctcgccggcagctggacgagattctgggccagtctgcagccacccaggttcataaggagcttaaagacgctatgacacaattagactcgatccgttatgaagtccagaacttatcaagattatctcctgggcagtttatgttgaagcaacataacgctggcatggctgaagcagggaaatctgactcctctgatggtcctacaaccaaccaagaagaatttcgtcaggaaattcgcagtataattcgcgatgaatttgaaaaatactgtagaacacagcccattcaaaactctgtgagcacaactgaacacagaaaacttcatgtggctgatgaaccaacggcactgaaatccaaggacatgaagatggctaattcaggattgacaaatctgcacaaccaagcaatgacgtatgcaaggctatctgaagccccaggacttaagatggattcttccttgagtgggaactacaaagatcaatctaaggagatggatgggctgctaactgtactgccaatatcagctgaaagtgctggattacttccaagccgcccagataaaccaacaggctcagatctagtccttgaggctgtgcttgaagcggaagttgcggagaacgctaaactgtttgtgtcgcagcctcatgatcagctacctaaggaatgaagacgaagatgatgtgcttgaagacgttgcaaacaggaccaaactgttcagctgacagccgcatggtcagttgcctacggagcgatgatggtagtttttgatccttaacaggatttggcatactaggcctgtttggtagagctctagaagttgatataccgatctggcgtccagcaccagcggtgtagcttgtagtcttgtaccctcaggcctcaactagccagctaggattcggatgccatggtagaaactggcgacatagcttgtagcctcaactagccaggtaggtttggctgccatagttgaggtaaagctgtggccggtgggcacgtagcttgtggcctcaaaaggagcaagaaagaaaaatagagtaaattagttgtggttatcaatgtgcatggtgattttaaagcttttaaggatgtcatctgtattctgtgtcctcgcaacactgatattctttgcaactctgagtagagagatacacggaatgttcagcttttcagatccattgatggtagtgttgtttttaatgttccc

SEQ ID NO: 124623 - DNA, 955 bp, Zea Mays
ctgtttgtcaatatttttccctgaaccaactgtttgacaatacatggctaattagatctttacaactatttcagtgagcacaactgaacacagaaaacttcatgtggctgatgaaccaacggcactgaaatccaaggacatgaagatggctaattcaggattgacaaatctgcacaaccaagcaatgacgtatgcaaggctatctgaagccccaggacttaagatggattcttccttgagtgggaactacaaagatcaatctaaggagatggatgggctgctaactgtactgccaatatcagctgaaagtgctggattacttccaagccgcccagataaaccaacaggctcagatctagtccttgaggctgtgcttgaagcggaagttgcggagaacgctaaactgtttgtgtcgcagcctcatgatcagctacctaaggaatgaagacgaagatgatgtgcttgaagacgttgcaaacaggaccaaactgttcagctgacagccgcatggtcagttgcctacggagcgatgatggtagtttttgatccttaacaggatttggcatactaggcctgtttggtagagctctagaagttgatataccgatctggcgtccagcaccagcggtgtagcttgtagtcttgtaccctcaggcctcaactagccagctaggattcggatgccatggtagaaactggcgacatagcttgtagcctcaactagccaggtaggtttggctgccatagttgaggtaaagctgtggccggtgggcacgtagcttgtggcctcaaaaggagcaagaaagaaaaatagagtaaattagttgtggttatcaatgtgcatggtgattttaaagcttttaaggatgtcatctgtattctgtgtcctcgcaacactgatattctttgcaactctgagtagagagatacacggaatgttcagcttttcagatcc

SEQ ID NO: 124624 - DNA, 1484 bp, Zea Mays
actcccagctcaaccatttccagcctcaattagccgaggcccggcccattccttgcccacgtcatctttctgtctctccctctcatcgccgcgtcacgcacagccgccgccgtcgtgcgcgtgtgccggaacggccgcgtggatcctccgccccgtcccagcggcgacttgtccgtgcgaagatgctggggttctcgaccggacagctgctggtcgtcctcggggcctgctccgtcatgatgaagcccagtgatatggtgaagattgcgaggacggccgggcggatgactggaagagcggttgggcggctcatagtggctcgccggcagctggacgagattctgggccagtctgcagccacccaggttcataaggagcttaaagacgctatgacacaattagactcgatccgttatgaagtccagaacttatcaagattatctcctgggcagtttatgttgaagcaacataacgctggcatggctgaagcagggaaatctgactcctctgatggtcctacaaccaaccaagaagaatttcgtcaggaaattcgcagtataattcgcgatgaatttgaaaaatactgtagaacacagcccattcaaaactctgtgagcacaactgaacacagaaaacttcatgtggctgatgaaccaacggcactgaaatccaagatggctaattcaggattgacaaatctgcacaaccaagcaatgacgtatgcaaggctatctgaagccccaggacttaagatggattcttccttgagtgggaactacaaagatcaatctaaggagatggatgggctgctaactgtactgccaatatcagctgaaagtgctggattacttccaagccgcccagataaaccaacaggctcagatctagtccttgaggctgtgcttgaagcggaagttgcggagaacgctaaactgtttgtgtcgcagcctcatgatcagctacctaaggaatgaagacgaagatgatgtgcttgaagacgttgcaaacaggaccaaactgttcagctgacagccgcatggtcagttgcctacggagcgatgatggtagtttttgatccttaacaggatttggcatactaggcctgtttggtagagctctagaagttgatataccgatctggcgtccagcaccagcggtgtagcttgtagtcttgtaccctcaggcctcaactagccagctaggattcggatgccatggtagaaactggcgacatagcttgtagcctcaactagccaggtaggtttggctgccatagttgaggtaaagctgtggccggtgggcacgtagcttgtggcctcaaaaggagcaagaaagaaaaatagagtaaattagttgtggttatcaatgtgcatggtgattttaaagcttttaaggatgtcatctgtattctgtgtcctcgcaacactgatattctttgcaactctgagtagagagatacacggaatgttcagcttttcagatcc

SEQ ID NO: 124625 - DNA, 1536 bp, Zea Mays
actcccagctcaaccatttccagcctcaattagccgaggcccggcccattccttgcccacgtcatctttctgtctctccctctcatcgccgcgtcacgcacagccgccgccgtcgtgcgcgtgtgccggaacggccgcgtggatcctccgccccgtcccagcggcgacttgtccgtgcgaagatgctggggttctcgaccggacagctgctggtcgtcctcggggcctgctccgtcatgatgaagcccagtgatatggtgaagattgcgaggacggccgggcggatgactggaagagcggttgggcggctcatagtggctcgccggcagctggacgagattctgggccagtctgcagccacccaggttcataaggagcttaaagacgctatgacacaattagactcgatccgttatgaagtccagaacttatcaagattatctcctgggcagtttatgttgaagcaacataacgctggtaatgataatcttacttggcaataaagtcacatttttctatggcatggctgaagcagggaaatctgactcctctgatggtcctacaaccaaccaagaagaatttcgtcaggaaattcgcagtataattcgcgatgaatttgaaaaatactgtagaacacagcccattcaaaactctgtgagcacaactgaacacagaaaacttcatgtggctgatgaaccaacggcactgaaatccaaggacatgaagatggctaattcaggattgacaaatctgcacaaccaagcaatgacgtatgcaaggctatctgaagccccaggacttaagatggattcttccttgagtgggaactacaaagatcaatctaaggagatggatgggctgctaactgtactgccaatatcagctgaaagtgctggattacttccaagccgcccagataaaccaacaggctcagatctagtccttgaggctgtgcttgaagcggaagttgcggagaacgctaaactgtttgtgtcgcagcctcatgatcagctacctaaggaatgaagacgaagatgatgtgcttgaagacgttgcaaacaggaccaaactgttcagctgacagccgcatggtcagttgcctacggagcgatgatggtagtttttgatccttaacaggatttggcatactaggcctgtttggtagagctctagaagttgatataccgatctggcgtccagcaccagcggtgtagcttgtagtcttgtaccctcaggcctcaactagccagctaggattcggatgccatggtagaaactggcgacatagcttgtagcctcaactagccaggtaggtttggctgccatagttgaggtaaagctgtggccggtgggcacgtagcttgtggcctcaaaaggagcaagaaagaaaaatagagtaaattagttgtggttatcaatgtgcatggtgattttaaagcttttaaggatgtcatctgtattctgtgtcctcgcaacactgatattctttgcaactctgagtagagagatacacggaatgttcagcttttcagatcc

SEQ ID NO: 124626 - DNA, 891 bp, Zea Mays
actcccagctcaaccatttccagcctcaattagccgaggcccggcccattccttgcccacgtcatctttctgtctctccctctcatcgccgcgtcacgcacagccgccgccgtcgtgcgcgtgtgccggaacggccgcgtggatcctccgccccgtcccagcggcgacttgtccgtgcgaagatgctggggttctcgaccggacagctgctggtcgtcctcggggcctgctccgtcatgatgaagcccagtgatatggtgaagattgcgaggacggccgggcggatgactggaagagcggttgggcggctcatagtggctcgccggcagctggacgagattctgggccagtctgcagccacccaggttcataaggagcttaaagacgctatgacacaattagactcgatccgttatgaagtccagaacttatcaagattatctcctgggcagtttatgttgaagcaacataacgctggtaatgataatcttacttggcaataaagtcacatttttctatggttagtacctctcactacattatttaagttaattggctccaaagttcatcattgatttacacatgagcaggcatggctgaagcagggaaatctgactcctctgatggtcctacaaccaacgtatggtggtatatcattttatttcagttttagtccaagtacttgaagggcctggtgcaatgcaggtcgcgggttcgaagcagtctcctcatttgcggagaaggcttgtcttggttgattcgttccccaaaccccactcatatgggagcctccgtctgtccgccactgggtctgcccttttaatatgagtatttgaggtctaatggttgatatttcaacagatttaaaatgcttaaatgtgaatttgctat

SEQ ID NO: 124627 - DNA, 701 bp, Zea Mays
gctcaaccatttccagcctcaattagccgaggcccggcccattccttgcccacgtcatctttctgtctctccctctcatcgccgcgtcacgcacagccgccgccgtcgtgcgcgtgtgccggaacggccgcgtggatcctccgccccgtcccagcggcgacttgtccgtgcgaagatgctggggttctcgaccggacagctgctggtcgtcctcggggcctgctccgtcatgatgaagcccagtgatatggtgaagattgcgaggacggccgggcggatgactggaagagcggttgggcggctcatagtggctcgccggcagctggacgagattctgggccagtctgcagccacccaggttcataaggagcttaaagacgctatgacacaattagactcgatccgttatgaagtccagaacttatcaagattatctcctgggcagtttatgttgaagcaacataacgctggcatggctgaagcagggaaatctgactcctctgatggtcctacaaccaacgtatggtggtatatcattttatttcagttttagtccaagtacttgaagggcctggtgcaatgcaggtcgcgggttcgaagcagtctcctcatttgcggagaaggcttgtcttggttgattcgttccccaaaccccactcatatgggagcctccgtctgtccgccactgggtctgccctttt

SEQ ID NO: 124628 - DNA, 1675 bp, Zea Mays
aagtgcctctcatcagcatcacccatcggccatctactccagtctcccactcacctatctcgcagcgcccgagcaatcgccacgcccacgccccaatggaagacagcgccaccaatggccatggggtgtgacggctgtcccggcctcgtggaacttcgagccaaacgagaccctcctgggtcttccggcgctctcggttcgcggcgtgctgaccagagtcatggccgggatgttgcccgacggtgggcgggcggtggtccggttgggcagcggcgacccgacagcgttcccgtgcttccggacggtgccagaggccgtggacgccgtcgccagcgcggtccagtccgggcagtacaactcctattccactagcgtcggccttgagctcgcacggaggtccattgctcagtacttatcctgtgatttgccatataaactgtcacctgatgatgtctacctcacaagtggttgcactcaagcaattgagatactctgctctgcgttagctcgtcctggtgcaaacatcctgcttccaagacctggatttatgttctatgaggcgcgtgctatcttcaatggcatggaagcccgttacttcaatcttctacctgggaacggctgggaggttgacattgatggcgtccaagctcttgccgacaagaatactgttgccatggtcattgtgaacccaggaaacccatgtggcaatgtgtactcctatgagcacctggccaaggtcgctgagaccgcgcgaaagcttggcatattcgtcatagcagatgaggtttacgcacacttgacatttggagagaggaaatttgtgccgatgggtgtgtttggggctgtggctccagtgttaacactggggtccatatcaaagagatggatggtgcctggatggcggcttggatggattgttaccaatgatccgaatggtgtatttcagaggactaaggtagtgcacagcatcaagagctaccttgatatctcctctgatcctgcaacatttgtccagggagcaataccaaaactcgtggagaacacaaaggaggaattcttcgaaaaaactatcgaaattctaaaacgatgtgtagatatatgctgtgaaaagctgaagggcatcaatgcaatcacgtgcccaagcaaaccagagggatccatgtttgtaatggtgaaactggatctgtcctgcctggagggcatcaaagatgacatggacttctgctgccggctggcaaaggaagaattagtggttgttctgccaggatgtgctgtcggatacaaggattggcttcgcatcacctttgcgattgatccatcttctctggaagaggggcttgacaggctcaagtccttctgcttgcgatacagaaagccaacaaagtgataagataaagtcaccagttctatgcaacagagacaaaaattgttatgaacttctgcacagatatatgatattgtatcatcttcactcgaagatgacatgtttgatgctctttgtctatagtaaataaatgatgtctcttctctgtcatctacttatctactgtttgtaggcgcaacacaaattttaggggatatgaagtgtagaagactctgcctcttgcacgaaaccatcatgcaagtttggcataataactttcgaaatgaaatcaccacattgattctgctccca

SEQ ID NO: 124629 - DNA, 403 bp, Zea Mays
tgccattttccttgtttgtctctgttcttttgctacattggcttaatgttattcgtgtgttttcttccatattttgttgcttgtggcattattcgttatttggttggttgaagatatagagcatgcattcatcatatctaagtgatcggagtgatattgattggcttattagatggatattggcccagtttatctttcattttttctatagctgttagaaatttactttgctcatagttcatactataattaatatgagactcttgttttgtggtccaagtgttcaacgctcagggtgccttggaagtacgctagcttgttgtcatgaagaagtcattcaagttccttccagggagttattagttcatatgtatatttctgtttatatcttatcttgtttatg

SEQ ID NO: 124630 - DNA, 521 bp, Zea Mays
ggagaagaaattacagatccactctcctcatcacgagaagagaagtttcacagcttctctccccatggcactcatcatcaagagcgcaatcatcgctgtgttcttggttcttggagtcatgtcttacacatccgtatattgcatcggtgcaatcggcacggaggacacccctgctcccaagccaaaacctgggatgccgtgcttccacgccggaacttcacagtacccctgcacaacggacgggtgccgcaggttatgcgagcaccaacaccacaggagcgacaaggcctactgtaaaagtatttctccaggagaatgctgctgcccaaacgaatagaggatgttttcgtgtgtttgatgacgacattaataaaataaaacatgcatgattgcgtttgtgttactctcgtcatatgaagttttctatccataactatatatatatagtatcagagaaaattcaccaagaaattgtatacaatatatatcagagaaaatatgtgctcataaatctttactag

SEQ ID NO: 124631 - DNA, 3385 bp, Zea Mays
agaccccaaccgaaaaccccagctgccccaaacccccgaatcccgttcgatacttcgatcccaatggtggcctcctccgccaatgcgccaccgggcgccggcgcacggaggccgcgcagccgcccccgcgggagcgtgcgctcgcggagcctgaggtggagcacgcctccgcgcagccccctgccgtcgtcgttgtccgcgtcgccccggcggcattgctcgctccccgcgctggacccgatcacgcccttacctgtcggcaccgaggtcgaggtccgcgtcgacgacgacggcttctacggctcatggttcgaggccaccgtcctcgacttcgcgcccgcgcgcggctaccgccaccctgcgcggtacaccgtcaagtacgtgcacctcctcgccgaggccgacgacgaaggcgtcctcgcggagcccttcgcgccgtcccacatccgcccgcggccgccgctcccgtcttcgccgccgcgcttccgcccccaccacatcgtcgaggcgttccacaacgaggggtggtggtcgggcatcgtcgtgtccgccgccggagccggggtcaccgtcgcgttccccgtcacccgtgaggtcatcgagttcccgtcgggcctcgtccgcccccgctgcgactacgttgacggtgactggatcccgtcccgggtcgcgatggttgtccgccccagccgcaccgtcagggtctacgaggtcggggacaaggtcgaggtggtgaggaaccgggacgtgtacggggactcctggtttcccgccacggtgaaggtcgtcatcgacaacctcagctacgtcgtcgagtactttgatctggaggaggaggagggcgggctggagaaggccaccgagtatctgcattggcggttcatcaggccggcttttgagcatacaccgggggagggtgagttccagctccagcctggtgatgccgtggaggcctactgtgatggggcatggtcaccgggagtcgtccatagggtcgtcagcgagggtgagtatgacatcagtattgttggcaagaaggcggaactgctggtgaccaaggtggtggaattgctcaagccgcggtataagtggaatggcaaccgatggagaattgcaactgctaagagacagactaacttgaggtggcattctaagtctggagaaagtccaatctctccagttgatttgacatctagtgatgaagaacacagccatgatcctgattcttcttccataaaaaagtctaggaaaaaactaaagcagctagatgccacattagctgaaggttctgaacacgcttcagtctctgagatggacattcctttgtcagctatgtgcaagtcaccagaaagcacacattcgccgaattctttgctctctgagaagagcagtcctcaaggttcacatgtgatagtgaatttggttccaatgaatggacttcattgtgcttcttcagggcattcagcaccagtggacaaccaagcaatcctgtctgatatgggtgtttttgatggtgagcttcatgaatctgtatctgggagaagcgttgatgcatatgatatgcttcccattgctgaactaagaaagaaaatggcttcagctagaagaaattgtgctgtccaacatacagaggaacaacatgtgaaatcgctcagagtgaagaaatgtatatcgaatagtaaagacaaaaaaacgcgccctattcaagagcttatgggagaaattcagttgaagggaaacaagaatttctctagggactttgttttagctttgggcgtctctagggatggcccgactactttatctccagatagactggtgtcaatagggccaaaaaggtgctcaagtacaaaggttcttgcctgtaagaaattggctaagaggagaggatccaaagaactgtgcagtccaaatagctcattggatgtgactaggactgaccagcagggaggaagaaaggaagtggcagaagcaatgaaagaatgttccttagcattggagtgtccgaaatctgatgctcaagggcagcttgacagaactttggaggatgcaaagaatataactgaattatcaaatcaggagaacctcttatccatgctgcctcctggctttaaatcagtgtctaacaggaaaggtactaacatacatgatgctcaacttggggaagaaccagcggttatgaccaacaacagccttattgaaccgaatggaaatgatgacatgtgcacagaccatgctgctactaccaagttagctgaaaactacaatgtgatggaaacagctatcatgtctattgattgtccggctcaacaaccctgtggggaagtggatgagaggtcagttttaggtcttaagaatgctgggagtacacagtgcatcatcgacagttctccatcgagtgagagcttgttgccttcaccgcaggctttgttcgtcaagagctcacctgtgtggcatatagttgaagcaatgcatgtgtttaaagagttacctcaacaaccacatttcattccactccaagaagtccccccgacactacgcgaaggaatggcattaggtatgatggtgtcattcgcggacttggtgaaggttacaatggaagcaagcataggcaacgacatggaatggtttgaggacaagatcaggacaatctcccatctagaggcaaatggatttagtgtgcaatctatacagagcgccatgaccgaaatggtcaaggtcaaaactgagcacaccagttatcattgcgaaatcggcaagctgagttcaaagttagtggagaatatggcttcctcctccagagccggtgcactgcttgatgaaaaagatgaagctgcagcacggctcgaggaagaacttgtgagtattcgccaagaaagccagaaaatcgcaaaggagaaggaaaaaatagatgcagaggtcgtgagtatcaagacagcatgtagcgggtatgaggatttgtgcagcggtgtggaacgcaagtttaaggaagtcttggctgggctgcagcggaagaggctaacctgatgcgcaaggtgttgatgtcatttcgctgcttcaaagttctaattctgaccactgtttctgcttttgggctgtaggtcatctatgtatcacggtaggttcagatcgatgtgctgtgcttagtttgtgcaagtcattcggtaccttttatatatctgtatggtgatcatgatggcttagggagcctgatgaagatcgactcttgataattgttactgctatattagttggaccgtatttatttgcctgcggcataattagtttgagggcaatttgtttccgttcttgtcaactttgattctcctgacttctatcgtctgatgttatttgatccaacttgacataggattgtcttatccga

SEQ ID NO: 124632 - DNA, 1345 bp, Zea Mays
ctcggttcgctcattcttcttcagagttcatacctcctcagactccaccgcctctcttcttcctctcggcgctacacacaactctccgtccctctactacacccgcaatggcgtgcctgtcgccgtcgccgtccggccggcgcctgtcggagctgctggaggagaagcaggagccgttcgtcctggacctgcacctgctcgagaggggctgcgcatcctcgcgcctcctactcaacggctacgacgccgcgccgtgctggcccgccgccgccggcaccgacgccgccgccgcggcgctcaggcgcctcaccagcaagaggaacaacaagccggccgccgccgccggcaacaagcagcagcagaagcctgccggcgggctcctccgcctcctgctctccaagatcctccgcggcggcggcggcggtcgagcggcgcccccgccacggaagcccgccgcgctgcagctctccggctccttcaagctggcgcccaccaaccccgccgccgtcgcgcctgcgccgtgctgctccgaccgtcgcctggagctggacgccgtcaagactaccgccgccgacgacgacgacgacgagaagcagcagctgagccccgtctccgtcctggaccacccgttcgacagctccccggtccacggcaacctgctgtccccgacgtctaaggacgtcttccgggacctcctggacgcggcgtacagccccgcgctgctggcccagctgctcgccaagtccgagcacctcctcatggacggtgacgttgacgccgacgcagacgaccgctactactgcggcggcggcggctaccgctcgagccccaagaactgccgcgacgacgagcccgccgccgcctactgggacgcgcacagggaggagctggcgcgggtgtcggggctggtcgcgtccgagctcccggcctccaggctcgacgccgccgacgtgcggcccgagcgccacgacgtcggcgccgcggtcgaggccgccgtgttcgaggcgctgctgcgggagctcgtcgtggatctcgggacatgctgttgctgactgcccgtgcgggaacgccgtccgtggcggtgcacgtctgcttgtccttgcgaccaagacagaacagagcggtgctctgcttcgctctgtttcgggtccgccgcacatgcatgatgtgatggaaaacgttttgttttcttgctctttttttttttttggagtttcgatgggtacccgctggtagatgggtccctatggctccgcgtttccctggcattctgtcagtgccaggtggaggctgtagagtaatcaagtaactagccgtaataatattattaattattttaacttgg

SEQ ID NO: 124633 - DNA, 87 bp, Zea Mays
atgcagtcttctgtaacgcatgtcttagtacaaacaaccaaacaaagtttatgtatagcctacacgagcatgtataaacaatcaaat

SEQ ID NO: 124634 - DNA, 1332 bp, Zea Mays
cgacgatcgagtgcgagctgaattcagacagaccgccgccgcaaagccaagcaggacacgcaagcactcagccatggagggatccgcagcagatgggccgctccgcacgcgcgtatgcatcatcgggagcggccccgccgcgcacacggcggccatgtacgcggcccgcgcggacctcaagcccgtgctgttcgagggctggatggccaacggcgtggccgcgggcgggcagctcaccaccaccaccgtcgtggagaacttcccgggcttccccgcgggcatcatgggccgcgacctcatgaagcgctgccgcgaccagtcgcagcgcttcggcacccgcatcctcaccgagaccgtcaccgccgtcgacctctcggcccggcccttccgtgtcgtcgcctccgacaagtccacgaccgtgctcgccgacgccgtcatcgtggccacaggagccgtcgcccggcgcctcgacttccccgggtccgacacgtactggaaccacggcatctccgcctgcgccgtgtgcgacggcccggccccgatattccgcgacaggccgctcgccgtcgtgggcggcggcgactccgccatggaggagtccagcttcctgaccaagtacggctcccgcgtctacatcgtccaccgccggagcacgttccgggcttccaagatcatgcaggacatggtgctcaagaaccccaagatccaggtcgtctggaactcggtggttgtcggggccttcggcggcgcggacggggacggtggccggccgttgttggctggcgtcaaggtcgagaacctggtgagtggcgaggtcaaggatctccaggtggctggcctcttcttcgccatcgggcacacgccggcgacggagttcctcggtgggcagctccagctggactcgccttctggatacgtggtgaccaagccggactccacccacactagcgtgaagggggtcttcgctgctggcgacgtgcaggacaagaagtatcgccaggccattactgccgccggatctgggtgcatggccgctttggatgttgagcactatctgcaggaggtcgcggtcgtcggtgcacaggagggcaagtctgttcagccgttgacgatgctggaataagccgcaggcttagggctagtttggtggatcgggaaatggagggaatctatgggagagagattctcttaatatttatttaattttgaataataagggatccgttcctatggatcctatccattttcatatccaacaaaccagtcattaggagtggcacgccatgggttgtcatgatgattggaaataaaaaatagaataatcacgcacgc

SEQ ID NO: 124635 - DNA, 278 bp, Zea Mays
aggaaatagaccagagaccgacgatgagtgaagtggcagagcaccttcggatcattacgaggtcctggaagaagtgttcttcgtcagagggagctacggcgctggtatctaaagccatggctaaaaagtcccatgtcgccgccgaggctgaagccactaaacttgattggccacctggttcggacattagagactgaccaccgtaaggaatcgtgtacatactgtgaatgatgtattgtattgtataatcatcatcagcaatctttcatgcgctgcaa

SEQ ID NO: 124636 - DNA, 121 bp, Zea Mays
ttttttttttgcagaagaatacaaacctgtggctttgtgttataaattgctttacatactgtagttttgtgagatttgttttttctttcctatcaaaataagtgtagaacaactgattcta

SEQ ID NO: 124637 - DNA, 105 bp, Zea Mays
ctttgtgttggcactcaatcaccaaaatacttagaaatggcccaagggcacatttccctttcaaagacacagtgtcttagctctatgttcgagacagaagactag

SEQ ID NO: 124638 - DNA, 1298 bp, Zea Mays
gtaggcagcagccagccacacagacacagcttcgttcccatctcttctcgttcttcatcacctacttgcctactatatctactagccacgctagctagactagccttagacgtggctagctcactagctgcttgctaggtgtgtaccgatcgtccgaggtaggagacacagcacgcagcaggggtatggggaggccaccgtgctgcgacaacggcgtcggcgtcaagaaagggccgtggacgcccgaggaggacatcgtcctcgtctcctacatccagcagcacggccccgggaactggcggtccgtgccagagaacacagggttgatgaggtgcagcaagagctgcaggctgcggtggaccaactacctgaggcctgggatcaagcgtggaaacttcactcctcatgaggaagggatcatcatccacctccaggcgttgcttggcaacaagtgggcagccatagcctcctacctccctcaaaggactgacaacgacatcaagaactactggaacacacacctcaagaagaaggtgaagaggctgcaacagccggcagccgactccttccagacaactgcctccaatgcagtcacctgcagcccaaactactacagccccagcagcagtcaccacagcctccaaggaatgcagccgatgagcagctacccccacaccacctgcagcggcggagccccaagcaacaatgaggcgatgactgatactactaccggcgtcgtctccaacctcttccaggcatggatgaggccatcaccagcagcagcgacagctaactgcaaaatcgccatgcaggagttccaggaagaacaaggcgctgcagcagcagcctcaatagtctgcaaggaacagatggtgacctgcggtgatgttaacaggccgccggcgctggagatggtggtggcgccggtgatgggtgcgagcactgccaccttctcgctgctcgaggactggctgctcgatgacatgccggggcaggccatggatgggttcatggggatctccgccggttgctgtgcggatcccatcatgttctagttgctgtatcgtcgtcgtcgtggctgtctgtcatataggcttcgttctcaatggttagttcttgcacttgtaatgttggttgatcgaatgacatgatcaggtcgatcggccctatgtttccggtaataagccgttaatttgtttcctcggggaaaaaatcctggagatgctccagtaatttggagatattaatggtaccgacggatacgaatatattataataaaatggtttcagttcagtat

SEQ ID NO: 124639 - DNA, 423 bp, Zea Mays
gtcatctcactcttgcattgtctgatgcaggcacctgatctttgctttgggaaagaagggttgtagcagcacggccaccacattttttaaataaaagaaccactgcttaataatgatgttaaacagggagggtcaagtctagaggattattacattctaatctttcatggtagttgaactgtttagtttggtgggcttagttgtctatcttttgtctcgtcatgaatgttcatttctacggttgcatttcgattatactatgtcaattatctttcttttatatcctgtataaactctatgcttcccttgttatgctactttcaagggaggtgttgccggattttgcaatactttctttctctatgtgttgcataagttttgtagaaaggtttttttggtaacatccattgtgtgggatcagtg

SEQ ID NO: 124640 - DNA, 2110 bp, Zea Mays
gaaaaggaatggcaccatcgcacagacacaccaacaatgggagcgaggcgtagtagcacttggccgcaccacctcccgctgctgttcttcctcgtcctcgtcaataccagccatactaccaccatcaacatcaccaaccgatgcccctacacagtgtggccggccgccacaccagtgggcggcggcatgcaactggagccagggaagtcttgggtgcttcaagtgcctggtaacacccaaagtggcctcgtgtgggcgcgcacgggctgttcattcgacggccacggcaacatgtcctgtgagacgggtgactgcggcggcgtgctggcatgcgcgagcagcggccagccgcccttcacgcgtgcagaattcagcctgggtggcctaaacaacacggatttcttcgacatgaacctcatcggtggcttcaatgtgcccatggacttcctgccggtgccatccaatggatcgtcagggtgcagcagggggcctcgctgcccagccgacatcacgtcgcagtgccccggtgagctcaaggtgccagggggttgccgcggcgcctgccagcactgcaacggcagcacggtaaacagtaacacggtgttctatgtgcggatgtgccccgatgcctacagctactcgctggatcaagggcccatcatgtatgtgtgtccgtcaggaacagactaccagatcattttctgccccccagtcgaccttgtgtcattgtctccccctccaattacaccattgtctccccctccaacaccaacttcacctactgcgaatggaacaagcagcatcacatcctcatcaaaatccaagaaccgaagcttatttggttttgttctaggtggttctttagctggcttcatttttatcgcatcattggcccttttctttatcttgcatagacgacgattgcagcgacgccaagagatgcaggaagaggaggaagcagagtttgggaggctaccagggatgcccagaaggttcacatttgagcagctacaagatgcaactgatcagttcagagagaagctcggggaaggaggattcgggtccgttttcaaaggacgttttggtgaggaagcaatcgccgtgaaacgcttggatagatctggtcagggaaagagggaatttttggcggaggtccagaccatcggcagcattcaccacatcaatctggtgagggtaatcggtttctgcgcagagaaaacgcacaggctcctggtttatgagtacatgcccaaaggatcactggaccagtggacctttcaccggcagggtgatgacgaaactcctcgcctgcactggcaaacgcgacgcaagattattgctcatatagcaaagggcctctcctatcttcacgaggagtgcatgaagagagttgctcacttggatgtgaaaccacaaaacatcctcttagatgacaacttcgatgctaaactctctgattttggactctgcaagctcatagaccgggaaaagagccaagtggtcactagaatgagaggcacgcctggatatctagctcccgaatggttgacatcgcacatcacagaaaaggctgatgtatatagctttggtgtggtggtaatggagatcgtcagtggaaggaagaacctggacacttctcggtctgaaaagagcattcatcttattaccttgctggaggagaacttgaagaatgatcggttggtagatttgattgatatgtgcagtagtagtgacagtcaggcacaggagcaagaagcaattcagatgataaagcttgcaatgtggtgtttgcagattgattgcaaacgaaggcctaaaatgtctgaggtcgtaaaagtcttggagggcaccatcagtgccgaaactgatatagatcataactttgttgtgacacatcgaccaagctttgacgctcctggaattgcgggcatgtcagctgcacctctggcctcagaagtgtcaggcccaaggtgaagactgagaggcactttataatttgtatgggtagagaatttagcattcctatctaatgaaaatctgttcagcggttgaatttgtggaatatttatattacaccattgtaaagtgtaaaccatccacgaaaagaata

SEQ ID NO: 124641 - DNA, 825 bp, Zea Mays
caactcgatcggatgacaagagaagttggacaaggatcaggatcctcggagcgcatgggagggtatgatcaattcagttcattacagttttatattctgcatattatatatgtcgtatgtagctttgctctatcgtattataatatgttatatctgtctgtcttaagtttacagtcatcctgtttatattgttatctgtttatttccagttgttccgcaataaaccatgaaccatgcttatatacttattttatttgtatgatttacatgcttcatatgcttggtgttctcatgatccatattgttatggatatttttgagatcacgatttctatggttaattatcttttatatgtcatcatcataatattaatttatggaattaaaatggtacggaaaatgcctataattctaacacccctaacaagctagtgattcgagatgagaaggttcaggcgaatacggaaggagctccctcaccacgagttaagcagcgtaggggcatgacgttgatgagtggcgggtcggtggcgagggagttcccctggcaagaaattcctgccaccttccaccccaggacgctagtaatccaccgcgcacgggtcccgtgggtctcggcgaacacccgcgcatggtcaagtgctccgaatcctgctaatggcaaagaatcacgtcggtggtccacggtcaccgccgtaggagatcctctccctcactcacggtttcgtggtgcttgggcgagatagatgagggtcgaagggtcccaatgtctctcttatactccacgaagaagtcagattgagggcgacatgggtgggattttcg

SEQ ID NO: 124642 - DNA, 2640 bp, Zea Mays
gatctcaaactaggcaggggtggcattggtttgcacatgacatagctcattcaggaaatcccgcgggcactgaaagggacgcaacgcaactgaatagcccgaaacgaaacacgaccggcgcaccaaaccatgcatgtgtgatgaacccctgaaccatgtgtgcgagcgtagcgttgcggccttgcccagttctgtactcactagggcacaaaagcatgttatgtgcctttctttttcctccaaacatgtcacgccctatagcctctcatccctgtgagtgttactgggttttgcactggccatcgagtggttagcaaacgacagagggcattgactgcaggagaaataaagataacggttgttagctgttacccaagcactagcagaccagggaggaggaggagtatgtaggaagagtggtctactgtctacatgcaggtggccacaggagcggtgccaggtgccaccgttggcaacgccaagtggaagggatgtgttgggagtttggaaagccatgtccctttgtggctgatgctctgcctgccaccgcccgcagccatggcacgctacccacacgccgctccccgtcgtcgtccctgccgtctcctcgtctctatatatacatcccctccccttctcccccgttccccacacatcacaagagagccaagggctagccgatcaacaacaccactagcctctcctatcctagctagctagcttccaccggccggaagaaaaaaaaaatggtggcgagcaaggccgccccgttcgacgaggtgtcctcggtggaggcgggggcctacgggggccgcgacgacgacgggcggccgcgccggacgggcacggtgtggacggccagcgcccacattatcacggccgtcatcggctccggggtgctctcgctggcgtgggccatcgcgcagctgggctgggccgcgggccccgccgtcatgctgctcttcgccgtcgtcatctactacacctccacgctgctcgccgagtgctaccgctccggcgacccagtggcggggaagcgcaactacacctacatggacgccgtccgcgcaagcctcggcggcgccaaggtcaggctctgcggcgccatccagtacgccaacctcttcggcgtcgcaatcggatacacaatcgccgcatccatcagcatgctgtaatatacaatcaatctccagtgcttcttatatatctccgtctcaatttctgacgaattaacactgatgctgcatgaccgacgacggagcagcgccatcaagagggcggactgcttccacgccaagggccacaagcacgcgtgccgcagctccagcaacccctacatgatcctcttcggcgtcgccgaggtcgtcttctcgcagataccggacttcgaccagatttggtggctctccatcgtcgccgccgtcatgtccttcacctacgccaccatcggcctcgtcctcggcatcatgcagaccgtcgccaacgggggcttccagggcagcctcaccgggatcagcatcggcgccggcgtcaccccgacggagaaggtctggcggagcctgcaggccttcggcaacatcgccttcgcctattcctactccatcatcctcatcgagatccaggcaagccgagctgctctgttctgttctgttcaacagttttactctgttcctgacccgtacggccgttcaggacacggtcaaggcgccgccgccatccgaggccaaggtgatgaagagggcgaccatggtgagcgtggccaccacaacggtgttctacatgctgtgcgggtgcatgggctacgccgccttcggcgacgccgcgccggacaacctcctcaccggcttcggcttctacgagcccttctggctgctggacatcgccaacgtcgccatcgtcgtgcacctcgtcggcgcctaccaggtcttctgccagccgctcttcgccttcgtcgagaagtgggcagcggccacgtggcccgacagcgccttcatcgcccgggagttccgcgtgggccccttcgcgctcagcctgttccgcctcacctggcgcacggcgttcgtgtgcctcaccaccgtcgccgccatgctgctccccttcttcggcgacgtcgtcggcctgctcggcgccgtctccttctggccgctcaccgtctacttccccatcgagatgtacgtcgtgcagcgcgccgtgcgcaggtggagcacgcactggatctgcctccagatgctcagcgctgcgtgcctcctcgtgtccgtcgccgccgcagcgggctccatcgccgacgtcatcggcgcgctcaaggtgtaccgcccgttcagcggctagttcagataggggcccaacgaggcgtgtgccgtgcacatgagtagtgccagtggtatctctactggtcggggtgctacattgactgtggggtcccgggttgttgtaacttgtaagatatagccaaatgaaaaacaaagctactgaactcgtgtggagttttgtcatgtagcaacttatacagttctcgtattttctgcaaaactttatttgataggtttatccaatagctatcatatcttatctcatattttatatactattttaaattttactatataaacaataaaatctatagattaaatctattaattt

SEQ ID NO: 124643 - DNA, 1577 bp, Zea Mays
acacatcacaagagagccaagggctagccgatcaacaacaccactagcctctcctatcctagctagctagcttccaccggccggaagaaaaaaaaaatggtggcgagcaaggccgccccgttcgacgaggtgtcctcggtggaggcgggggcctacgggggccgcgacgacgacgggcggccgcgccggacgggcacggtgtggacggccagcgcccacattatcacggccgtcatcggctccggggtgctctcgctggcgtgggccatcgcgcagctgggctgggccgcgggccccgccgtcatgctgctcttcgccgtcgtcatctactacacctccacgctgctcgccgagtgctaccgctccggcgacccagtggcggggaagcgcaactacacctacatggacgccgtccgcgcaagcctcggcggcgccaagcgccatcaagagggcggactgcttccacgccaagggccacaagcacgcgtgccgcagctccagcaacccctacatgatcctcttcggcgtcgccgaggtcgtcttctcgcagataccggacttcgaccagatttggtggctctccatcgtcgccgccgtcatgtccttcacctacgccaccatcggcctcgtcctcggcatcatgcagaccgtcgccaacgggggcttccagggcagcctcaccgggatcagcatcggcgccggcgtcaccccgacggagaaggtctggcggagcctgcaggccttcggcaacatcgccttcgcctattcctactccatcatcctcatcgagatccaggacacggtcaaggcgccgccgccatccgaggccaaggtgatgaagagggcgaccatggtgagcgtggccaccacaacggtgttctacatgctgtgcgggtgcatgggctacgccgccttcggcgacgccgcgccggacaacctcctcaccggcttcggcttctacgagcccttctggctgctggacatcgccaacgtcgccatcgtcgtgcacctcgtcggcgcctaccaggtcttctgccagccgctcttcgccttcgtcgagaagtgggcagcggccacgtggcccgacagcgccttcatcgcccgggagttccgcgtgggccccttcgcgctcagcctgttccgcctcacctggcgcacggcgttcgtgtgcctcaccaccgtcgccgccatgctgctccccttcttcggcgacgtcgtcggcctgctcggcgccgtctccttctggccgctcaccgtctacttccccatcgagatgtacgtcgtgcagcgcgccgtgcgcaggtggagcacgcactggatctgcctccagatgctcagcgctgcgtgcctcctcgtgtccgtcgccgccgcagcgggctccatcgccgacgtcatcggcgcgctcaaggtgtaccgcccgttcagcggctagttcagataggggcccaacgaggcgtgtgccgtgcacatgagtagtgccagtggtatctctactggtcggggtgctacattgactgtggggtcccgggttgttgtaacttgtaagatatagccaaatgaaaaacaaagctactgaa

SEQ ID NO: 124644 - DNA, 2168 bp, Zea Mays
gatctcaaactaggcaggggtggcattggtttgcacatgacatagctcattcaggaaatcccgcgggcactgaaagggacgcaacgcaactgaatagcccgaaacgaaacacgaccggcgcaccaaaccatgcatgtgtgatgaacccctgaaccatgtgtgcgagcgtagcgttgcggccttgcccagttctgtactcactagggcacaaaagcatgttatgtgcctttctttttcctccaaacatgtcacgccctatagcctctcatccctgtgagtgttactgggttttgcactggccatcgagtggttagcaaacgacagagggcattgactgcaggagaaataaagataacggttgttagctgttacccaagcactagcagaccagggaggaggaggagtatgtaggaagagtggtctactgtctacatgcaggtggccacaggagcggtgccaggtgccaccgttggcaacgccaagtggaagggatgtgttgggagtttggaaagccatgtccctttgtggctgatgctctgcctgccaccgcccgcagccatggcacgctacccacacgccgctccccgtcgtcgtccctgccgtctcctcgtctctatatatacatcccctccccttctcccccgttccccacacatcacaagagagccaagggctagccgatcaacaacaccactagcctctcctatcctagctagctagcttccaccggccggaagaaaaaaaaaatggtggcgagcaaggccgccccgttcgacgaggtgtcctcggtggaggcgggggcctacgggggccgcgacgacgacgggcggccgcgccggacgggcacggtgtggacggccagcgcccacattatcacggccgtcatcggctccggggtgctctcgctggcgtgggccatcgcgcagctgggctgggccgcgggccccgccgtcatgctgctcttcgccgtcgtcatctactacacctccacgctgctcgccgagtgctaccgctccggcgacccagtggcggggaagcgcaactacacctacatggacgccgtccgcgcaagcctcggcggcgccaaggtcaggctctgcggcgccatccagtacgccaacctcttcggcgtcgcaatcggatacacaatcgccgcatccatcagcatgctcgccatcaagagggcggactgcttccacgccaagggccacaagcacgcgtgccgcagctccagcaacccctacatgatcctcttcggcgtcgccgaggtcgtcttctcgcagataccggacttcgaccagatttggtggctctccatcgtcgccgccgtcatgtccttcacctacgccaccatcggcctcgtcctcggcatcatgcagaccgtcgccaacgggggcttccagggcagcctcaccgggatcagcatcggcgccggcgtcaccccgacggagaaggtctggcggagcctgcaggccttcggcaacatcgccttcgcctattcctactccatcatcctcatcgagatccaggacacggtcaaggcgccgccgccatccgaggccaaggtgatgaagagggcgaccatggtgagcgtggccaccacaacggtgttctacatgctgtgcgggtgcatgggctacgccgccttcggcgacgccgcgccggacaacctcctcaccggcttcggcttctacgagcccttctggctgctggacatcgccaacgtcgccatcgtcgtgcacctcgtcggcgcctaccaggtcttctgccagccgctcttcgccttcgtcgagaagtgggcagcggccacgtggcccgacagcgccttcatcgcccgggagttccgcgtgggccccttcgcgctcagcctgttccgcctcacctggcgcacggcgttcgtgtgcctcaccaccgtcgccgccatgctgctccccttcttcggcgacgtcgtcggcctgctcggcgccgtctccttctggccgctcaccgtctacttccccatcgagatgtacgtcgtgcagcgcgccgtgcgcaggtggagcacgcactggatctgcctccagatgctcagcgctgcgtgcctcctcgtgtccgtcgccgccgcagcgggctccatcgccgacgtcatcggcgcgctcaaggtgtaccgcccgttcagcggctagttc

SEQ ID NO: 124645 - DNA, 2004 bp, Zea Mays
acactacgcagaacttcgccgccgtcgcctttctcagtttctcctgggagcttgcctgtgtcgaacatggcggtggctgcgacgacggtgctggacatcgcggagctctccttctccgacttagtcgccctcctatctcccgagactcttgctgacgacggccgctgccgacgtgttgtggacaccgtcgcaaccgagctcggccgaggtgggtccgggttgctggctatcgacggagtgccgcgcgtgggcgccctccggcgacgactcctccccttggcccgacgcgtcgccctcatggatcacctgacccgctcccaactcctcaagaagcacggtttgggcagcgacgttcctttgaagaagctcgatcggtccgtatcctcgttcgcgcagcttctaaggcattcaggtgaactcgtcttgctagagtcggtgaacaacaatgggttcaattcttctgatagggtacaggattgtaaccaatccgaggatgttaatgatgatgatgatgctgatgatatggataatctgggtgacctcattaaggagcttggtttgtacatgatggagcttggaatcttgattgcacgagcttgcgatattgtcatcggtagaggtcagctagagcagagcatcactgactttgggacagcaaaggctaggctcattcactaccactctgagctggataacattgtgatcagggataacaatgcaaagaggaaaggttcggcaagtaaagtggcagtacaaccttaccagtcatgctctggaaataggtccgggtcagtgtgcccgtgctgtattaagtcagaagatgggactactgtaatggcaatagaagaaaataattctaatgatgcctcgattcagggtcaggctgctgaaatttccctgttaaacctatggcaggaatggcactatgactatggaatcttcactgttttaacagcaccgttgttcatgagcgtctctgaggatgaaaaaagtttggtcaatctggaatatcatcctcctgatggccacacacacctacagttatgcaatggaaggaagatattctctgttagatgctctcctgagagcttcattgttcaagttggagaggcagcagacatcttgtcccaagggaaattgaaatctacacttcatgctgtgagtagaccttcgagttccacagacatcagccgtgagacttttgttgtcttcctacagccctcgtgggacaaacttttagcttatcctggttactctttagatgctgaaggtgaacccattcttagcaagcagacttcaatcatcagtgatggatcagcagggccttgtaatgaagatgcatttatgcaagaaattctgaaaaaagttccacctctatcatcaaggctaaaagaagggatgacatttgcagaattttctcgtcagacaacaaaacagtattatggtggcaatggcatccaacagaacaattgagcacttgcaatacaatggcaatgcatgtagcacacaatgaactgatgtattgacttacattttgatactgatttggatgcacaaaactaaagcatcctggcaaacaatgcatacggctgatcctccttgatgactaagttttgcaattgtttgttgggaatagtcccacattgtgagttgtgggtgggcaaacatgatttatatggttgaggttataaccttctaataggctaactttttggtgagtattgaatcaacagacctgaacccgttgttgtgtgttcgaacgtgtgtgtcgcggcccgacggccttgggtgcgtgttcgggtgcactgtgtgtgggtgatatggtgggcgtgctatgtgttggtggtccggtccaacaattggtctcggagatcaggtcgatattgtacattctcaaacaaatcttggctcaacatgtgagaaggaaattgttaggaatagtcccacattgtaagttgtgggtgggcaatcatgatttaataaatcatatggttgaggttacaa

SEQ ID NO: 124646 - DNA, 1224 bp, Zea Mays
atggcggtggctgcgacgacggtgctggacatcgcggagctctccttctccgacttagtcgccctcctatctcccgagactcttgctgacgacggccgctgccgacgtgttgtggacaccgtcgcaaccgagctcggccgaggtgggtccgggttgctggctatcgacggagtgccgcgcgtgggcgccctccggcgacgactcctccccttggcccgacgcgtcgccctcatggatcacctgacccgctcccaactcctcaagaagcacggtttgggcagcgacgttcctttgaagaagctcgatcggtccgtatcctcgttcgcgcagcttctaaggcattcagcttgcgatattgtcatcggtagaggtcagctagagcagagcatcactgactttgggacagcaaaggctaggctcattcactaccactctgagctggataacattgtgatcagggataacaatgcaaagaggaaaggttcggcaagtaaagtggcagtacaaccttaccagtcatgctctggaaataggtccgggtcagtgtgcccgtgctgtattaagtcagaagatgggactactgtaatggcaatagaagaaaataattctaatgatgcctcgattcagggtcaggctgctgaaatttccctgttaaacctatggcaggaatggcactatgactatggaatcttcactgttttaacagcaccgttgttcatgagcgtctctgaggatgaaaaaagtttggtcaatctggaatatcatcctcctgatggccacacacacctacagttatgcaatggaaggaagatattctctgttagatgctctcctgagagcttcattgttcaagttggagaggcagcagacatcttgtcccaagggaaattgaaatctacacttcatgctgtgagtagaccttcgagttccacagacatcagccgtgagacttttgttgtcttcctacagccctcgtgggacaaacttttagcttatcctggttactctttagatgctgaaggtgaacccattcttagcaagcagacttcaatcatcagtgatggatcagcagggccttgtaatgaagatgcatttatgcaagaaattctgaaaaaagttccacctctatcatcaaggctaaaagaagggatgacatttgcagaattttctcgtcagacaacaaaacagtattatggtggcaatggcatccaacagaacaattga

SEQ ID NO: 124647 - DNA, 321 bp, Zea Mays
atggcgacaggttctacgtcagacgccactacggtggtcggactcgccttgaagcttcagctagctgccaacctctgttctgacctgacctctggatgcctctccctttcagagatcagcatcggcgtaaaaatgactggcacaggagagagccgcactgccagccacggaactgtcgatctatcattgctggacatgaaaaatgccacggaaaattcccttcgtaggagttgcattggatacaaggaagggcaaagatgctggtgcttatgcgtatatccgtttcttctgcctgctaatttgttggccttagccgattag

SEQ ID NO: 124648 - DNA, 3193 bp, Zea Mays
ctctctctctctcttttctctctctaaaagactttgctaattggcctgctagccggtctccctcccccggcctctttccctttcagctggaggagatagatgagagagaggatcagaggaagcaggaaggagagagggatatataggccggtgtcttctgtagagagagagattgagagcaaaagggaaataaaggagctctcgcaggcactcggtactgacatgagtgatctcatgctcttgataccttggtactcttacatcaccccttcttcaccttcttcttgttcttgctcatccctcctctccggccctctcttcctcctgcctctctctagctaggacgatcttcaacaaccctctccccctctaattctctttccccatatagagagaataaaggagagagagaggcgaaggcaggcagctaattttcttttgttcaagggaaaggacagcacgtgccggagctcataagctggtagctgcatcagttcctgaggcaaaaccacctgcttacgatcttgcagtcatcatcacgctattagttgaggataatttcgcgcacaagagcacgacaagccgagatttttgggggcgtcggcgtcgacctgtaggcgatggcggcgtactaccacggtggcgccggcacggacatccaggccagcaccgacggcctgcagacgctgtacctcatgaacccgagctacgccggcggctacgctgacgacggcggcgcgtccacgccgggggcggccaacatgatgctcctcaactcggccgtgaccaccatgacgccggcgtccttcgcgcaccaccaccagcagcagtcgccgccggccgcgcagcagcacttcgtcggcatcccgctccaggtccaggcgccgccgccgtcgggctacaacctgtggaccccggccatggctggcggcgccgcggacatgtcgccgcaggcgcaggcgcagactcccggcgccgcgggtgctgctggggtcagcgccgtgctcagcctgtcgtcccgcgaggcgccgccggtcaccgtggccgcggtggccgcctgcaccgacgagggcaagtacctgggcgtgtcggccacgccgcaggggcagatggtcatgagctccaagtacctcaaggccgcgcaggagctgctcgacgaggtggtcagcgtcagcaagggcgtcgaggacgctaagacggccgctgccgccgcgaccaagagcctggccgcggtgaagaagaaggaggactcggagggcgcgtcaggtggcggcaccgacgacggtgccggcgcaaagagcggcggtggtgccgcgccagagatgtccacggcggagcggcaggagatgcagatgaagaagagcaagcttctcaacatgcttgacgaggtggagcagcggtaccggcagtaccacgggcagatgcaggcggtgtcgtcgtcgttcgaggcggcggcgggggccgggtcggcgcggacgtacacggcgctggcgctgcgcaccatctcgcggcagttccggtgtctgcgggacgcgatcgcgtcgcaggtgcgcgcggcgagccgggcgctgggcgaggacgcggacgccgccgtcgccgggggccgcaccgtggggtcccgcctccgctacatcgaccaccagctccggcagcagcgcgcgctgcagcagctcggcatgatgcagggcggcgcctggcggccccagcgcggcctccccgagcgctccgtctccatcctccgcgcctggctcttcgagcacttcctgcacccataccccaaggattcggacaagatcatgctcgccaagcaaaccgggctcaccaggagtcaggtgtccaattggttcatcaatgcgagggtgcggctgtggaagcctatggtggaggagatgtacctggaggagacaaaggaccaggacgctggaggcggcggcaacgacgagggcaagtccggtggcggcggcagcaagagcagcgacaccgtcgacggcgtcatgccgagggcggacgtgatgtccaagtccgcggtgcgcgtgggaggcggcggggcgggggcggagagcgcgtccaccaacaagggcatccatggctcctccctgctcgagctcggcggcggcgatcaccagcagtcccacgcggggttctacgacgacgatgaagacgacggcgacgacgtgatggggcggaggctcaagaaggcgcgcggcaacgagccggcgccggcgttccaccacgtgcacgacatagccacgctgcacgcgcaggccgcggcggccgcgaggcagcagcacgaggaggtcagccaccgggagctcctcatgaagttcatggagagcggcggcggtggcggcgtgagggaccaccaccaggacggcggcgggtactcgctgttcgcgccggggccgtacgggcagttcaccacggagcccttcgcgttcgctgggaacggcggggtgtcgctgacgctcggcctcccgcacggcgccggaggcagcgccgagcagaccgcgtcgttcctcatgggcagcaccacggccggcgacagcggcagccacggcgccgccaccagctacgacatgaacatgcagagcaccaagtcgttcgcggcgcagctcatgagggacttcgtggcctagctcccttaggacgcatagcatagcagtcgtccacgcaattaatcaaatcatctctccatcgatcaattaatttagagcttgtatagaaataaagggttcaagcctaaatatgctttgcgtatataaagcagttaagcttggactcataggtcttgctgggaatgtaaagatgggatatatatcatggggccatgtatatataggtataggaggataggtaactagttgatacccaaacattgtacaagattttatatgtagatcatagggattggggggtatacagtaaagtatgcgaaaagggtatattggaactggacttagtgtatgctgtagaaattggcctactagtattatctgcagcaattcagtatttgttttgcttactgtaaacatagcacattgtgattcattggcagcaccatgtgctgttagatgacattgtggataatgctgctccagtgagatgtttgttggtggcctcagctagaatccagtgatctagtacctctgaatgttgccagcagtatctgttcggagcaatgacaaatctgctc

SEQ ID NO: 124649 - DNA, 2615 bp, Zea Mays
gggctgtgtgaggataatattggaagtgggaggcaaaaccacctgcttacgatcttgcagtcatcatcacgctattagttgaggataatttcgcgcacaagagcacgacaagccgagatttttgggggcgtcggcgtcgacctgtaggcgatggcggcgtactaccacggtggcgccggcacggacatccaggccagcaccgacggcctgcagacgctgtacctcatgaacccgagctacgccggcggctacgctgacgacggcggcgcgtccacgccgggggcggccaacatgatgctcctcaactcggccgtgaccaccatgacgccggcgtccttcgcgcaccaccaccagcagcagtcgccgccggccgcgcagcagcacttcgtcggcatcccgctccaggtccaggcgccgccgccgtcgggctacaacctgtggaccccggccatggctggcggcgccgcggacatgtcgccgcaggcgcaggcgcagactcccggcgccgcgggtgctgctggggtcagcgccgtgctcagcctgtcgtcccgcgaggcgccgccggtcaccgtggccgcggtggccgcctgcaccgacgagggcaagtacctgggcgtgtcggccacgccgcaggggcagatggtcatgagctccaagtacctcaaggccgcgcaggagctgctcgacgaggtggtcagcgtcagcaagggcgtcgaggacgctaagacggccgctgccgccgcgaccaagagcctggccgcggtgaagaagaaggaggactcggagggcgcgtcaggtggcggcaccgacgacggtgccggcgcaaagagcggcggtggtgccgcgccagagatgtccacggcggagcggcaggagatgcagatgaagaagagcaagcttctcaacatgcttgacgaggtggagcagcggtaccggcagtaccacgggcagatgcaggcggtgtcgtcgtcgttcgaggcggcggcgggggccgggtcggcgcggacgtacacggcgctggcgctgcgcaccgtggggtcccgcctccgctacatcgaccaccagctccggcagcagcgcgcgctgcagcagctcggcatgatgcagggcggcgcctggcggccccagcgcggcctccccgagcgctccgtctccatcctccgcgcctggctcttcgagcacttcctgcacccataccccaaggattcggacaagatcatgctcgccaagcaaaccgggctcaccaggagtcaggtgtccaattggttcatcaatgcgagggtgcggctgtggaagcctatggtggaggagatgtacctggaggagacaaaggaccaggacgctggaggcggcggcaacgacgagggcaagtccggtggcggcggcagcaagagcagcgacaccgtcgacggcgtcatgccgagggcggacgtgatgtccaagtccgcggtgcgcgtgggaggcggcggggcgggggcggagagcgcgtccaccaacaagggcatccatggctcctccctgctcgagctcggcggcggcgatcaccagcagtcccacgcggggttctacgacgacgatgaagacgacggcgacgacgtgatggggcggaggctcaagaaggcgcgcggcaacgagccggcgccggcgttccaccacgtgcacgacatagccacgctgcacgcgcaggccgcggcggccgcgaggcagcagcacgaggaggtcagccaccgggagctcctcatgaagttcatggagagcggcggcggtggcggcgtgagggaccaccaccaggacggcggcgggtactcgctgttcgcgccggggccgtacgggcagttcaccacggagcccttcgcgttcgctgggaacggcggggtgtcgctgacgctcggcctcccgcacggcgccggaggcagcgccgagcagaccgcgtcgttcctcatgggcagcaccacggccggcgacagcggcagccacggcgccgccaccagctacgacatgaacatgcagagcaccaagtcgttcgcggcgcagctcatgagggacttcgtggcctagctcccttaggacgcatagcatagcagtcgtccacgcaattaatcaaatcatctctccatcgatcaattaatttagagcttgtatagaaataaagggttcaagcctaaatatgctttgcgtatataaagcagttaagcttggactcataggtcttgctgggaatgtaaagatgggatatatatcatggggccatgtatatataggtataggaggataggtaactagttgatacccaaacattgtacaagattttatatgtagatcatagggattggggggtatacagtaaagtatgcgaaaagggtatattggaactggacttagtgtatgctgtagaaattggcctactagtattatctgcagcaattcagtatttgttttgcttactgtaaacatagcacattgtgattcattggcagcaccatgtgctgttagatgacattgtggataatgctgctccagtgagatgtttgttggtggcctcagctagaatccagtgatctagtacctctgaatgttgccagcagtatctgttcggagcaatgacaaatctgctc

SEQ ID NO: 124650 - DNA, 2881 bp, Zea Mays
gtgcgctgctggggtgatgtgtatgtgtgcgtgcttgtgttgacatctgcgcaccccgtttttttctttgttaaatcacttgatgaagatgggatgatgcctgccttttcctttccttattaatatattttttctctctctctgatactgatgcctattccacatctctctcaagctatctcctctcgagctgctagatatagctagcttagtgtgttcttccttttccatgcatatatacatgctggcatgctgcaccctagctagctacacatctccctctcccccctgcaaccttcactcttcatggatccagtttcacttctcacgccacatactcctcaaatcattgctttggcaaaaccacctgcttacgatcttgcagtcatcatcacgctattagttgaggataatttcgcgcacaagagcacgacaagccgagatttttgggggcgtcggcgtcgacctgtaggcgatggcggcgtactaccacggtggcgccggcacggacatccaggccagcaccgacggcctgcagacgctgtacctcatgaacccgagctacgccggcggctacgctgacgacggcggcgcgtccacgccgggggcggccaacatgatgctcctcaactcggccgtgaccaccatgacgccggcgtccttcgcgcaccaccaccagcagcagtcgccgccggccgcgcagcagcacttcgtcggcatcccgctccaggtccaggcgccgccgccgtcgggctacaacctgtggaccccggccatggctggcggcgccgcggacatgtcgccgcaggcgcaggcgcagactcccggcgccgcgggtgctgctggggtcagcgccgtgctcagcctgtcgtcccgcgaggcgccgccggtcaccgtggccgcggtggccgcctgcaccgacgagggcaagtacctgggcgtgtcggccacgccgcaggggcagatggtcatgagctccaagtacctcaaggccgcgcaggagctgctcgacgaggtggtcagcgtcagcaagggcgtcgaggacgctaagacggccgctgccgccgcgaccaagagcctggccgcggtgaagaagaaggaggactcggagggcgcgtcaggtggcggcaccgacgacggtgccggcgcaaagagcggcggtggtgccgcgccagagatgtccacggcggagcggcaggagatgcagatgaagaagagcaagcttctcaacatgcttgacgaggtggagcagcggtaccggcagtaccacgggcagatgcaggcggtgtcgtcgtcgttcgaggcggcggcgggggccgggtcggcgcggacgtacacggcgctggcgctgcgcaccatctcgcggcagttccggtgtctgcgggacgcgatcgcgtcgcaggtgcgcgcggcgagccgggcgctgggcgaggacgcggacgccgccgtcgccgggggccgcaccgtggggtcccgcctccgctacatcgaccaccagctccggcagcagcgcgcgctgcagcagctcggcatgatgcagggcggcgcctggcggccccagcgcggcctccccgagcgctccgtctccatcctccgcgcctggctcttcgagcacttcctgcacccataccccaaggattcggacaagatcatgctcgccaagcaaaccgggctcaccaggagtcaggtgtccaattggttcatcaatgcgagggtgcggctgtggaagcctatggtggaggagatgtacctggaggagacaaaggaccaggacgctggaggcggcggcaacgacgagggcaagtccggtggcggcggcagcaagagcagcgacaccgtcgacggcgtcatgccgagggcggacgtgatgtccaagtccgcggtgcgcgtgggaggcggcggggcgggggcggagagcgcgtccaccaacaagggcatccatggctcctccctgctcgagctcggcggcggcgatcaccagcagtcccacgcggggttctacgacgacgatgaagacgacggcgacgacgtgatggggcggaggctcaagaaggcgcgcggcaacgagccggcgccggcgttccaccacgtgcacgacatagccacgctgcacgcgcaggccgcggcggccgcgaggcagcagcacgaggaggtcagccaccgggagctcctcatgaagttcatggagagcggcggcggtggcggcgtgagggaccaccaccaggacggcggcgggtactcgctgttcgcgccggggccgtacgggcagttcaccacggagcccttcgcgttcgctgggaacggcggggtgtcgctgacgctcggcctcccgcacggcgccggaggcagcgccgagcagaccgcgtcgttcctcatgggcagcaccacggccggcgacagcggcagccacggcgccgccaccagctacgacatgaacatgcagagcaccaagtcgttcgcggcgcagctcatgagggacttcgtggcctagctcccttaggacgcatagcatagcagtcgtccacgcaattaatcaaatcatctctccatcgatcaattaatttagagcttgtatagaaataaagggttcaagcctaaatatgctttgcgtatataaagcagttaagcttggactcataggtcttgctgggaatgtaaagatgggatatatatcatggggccatgtatatataggtataggaggataggtaactagttgatacccaaacattgtacaagattttatatgtagatcatagggattggggggtatacagtaaagtatgcgaaaagggtatattggaactggacttagtgtatgctgtagaaattggcctactagtattatctgcagcaattcagtatttgttttgcttactgt

SEQ ID NO: 124651 - DNA, 2826 bp, Zea Mays
ctctctctcttttctctctctaaaagactttgctaattggcctgctagccggtctccctcccccggcctctttccctttcagctggaggagatagatgagagagaggatcagaggaagcaggaaggagagagggatatataggccggtgtcttctgtagagagagagattgagagcaaaagggaaataaaggagctctcgcaggcactcggtactgacatgagtgatctcatgctcttgataccttgggaaaggacagcacgtgccggagctcataagctggtagctgcatcagttcctgaggcaaaaccacctgcttacgatcttgcagtcatcatcacgctattagttgaggataatttcgcgcacaagagcacgacaagccgagatttttgggggcgtcggcgtcgacctgtaggcgatggcggcgtactaccacggtggcgccggcacggacatccaggccagcaccgacggcctgcagacgctgtacctcatgaacccgagctacgccggcggctacgctgacgacggcggcgcgtccacgccgggggcggccaacatgatgctcctcaactcggccgtgaccaccatgacgccggcgtccttcgcgcaccaccaccagcagcagtcgccgccggccgcgcagcagcacttcgtcggcatcccgctccaggtccaggcgccgccgccgtcgggctacaacctgtggaccccggccatggctggcggcgccgcggacatgtcgccgcaggcgcaggcgcagactcccggcgccgcgggtgctgctggggtcagcgccgtgctcagcctgtcgtcccgcgaggcgccgccggtcaccgtggccgcggtggccgcctgcaccgacgagggcaagtacctgggcgtgtcggccacgccgcaggggcagatggtcatgagctccaagtacctcaaggccgcgcaggagctgctcgacgaggtggtcagcgtcagcaagggcgtcgaggacgctaagacggccgctgccgccgcgaccaagagcctggccgcggtgaagaagaaggaggactcggagggcgcgtcaggtggcggcaccgacgacggtgccggcgcaaagagcggcggtggtgccgcgccagagatgtccacggcggagcggcaggagatgcagatgaagaagagcaagcttctcaacatgcttgacgaggtggagcagcggtaccggcagtaccacgggcagatgcaggcggtgtcgtcgtcgttcgaggcggcggcgggggccgggtcggcgcggacgtacacggcgctggcgctgcgcaccatctcgcggcagttccggtgtctgcgggacgcgatcgcgtcgcaggtgcgcgcggcgagccgggcgctgggcgaggacgcggacgccgccgtcgccgggggccgcaccgtggggtcccgcctccgctacatcgaccaccagctccggcagcagcgcgcgctgcagcagctcggcatgatgcagggcggcgcctggcggccccagcgcggcctccccgagcgctccgtctccatcctccgcgcctggctcttcgagcacttcctgcacccataccccaaggattcggacaagatcatgctcgccaagcaaaccgggctcaccaggagtcaggtgtccaattggttcatcaatgcgagggtgcggctgtggaagcctatggtggaggagatgtacctggaggagacaaaggaccaggacgctggaggcggcggcaacgacgagggcaagtccggtggcggcggcagcaagagcagcgacaccgtcgacggcgtcatgccgagggcggacgtgatgtccaagtccgcggtgcgcgtgggaggcggcggggcgggggcggagagcgcgtccaccaacaagggcatccatggctcctccctgctcgagctcggcggcggcgatcaccagcagtcccacgcggggttctacgacgacgatgaagacgacggcgacgacgtgatggggcggaggctcaagaaggcgcgcggcaacgagccggcgccggcgttccaccacgtgcacgacatagccacgctgcacgcgcaggccgcggcggccgcgaggcagcagcacgaggaggtcagccaccgggagctcctcatgaagttcatggagagcggcggcggtggcggcgtgagggaccaccaccaggacggcggcgggtactcgctgttcgcgccggggccgtacgggcagttcaccacggagcccttcgcgttcgctgggaacggcggggtgtcgctgacgctcggcctcccgcacggcgccggaggcagcgccgagcagaccgcgtcgttcctcatgggcagcaccacggccggcgacagcggcagccacggcgccgccaccagctacgacatgaacatgcagagcaccaagtcgttcgcggcgcagctcatgagggacttcgtggcctagctcccttaggacgcatagcatagcagtcgtccacgcaattaatcaaatcatctctccatcgatcaattaatttagagcttgtatagaaataaagggttcaagcctaaatatgctttgcgtatataaagcagttaagcttggactcataggtcttgctgggaatgtaaagatgggatatatatcatggggccatgtatatataggtataggaggataggtaactagttgatacccaaacattgtacaagattttatatgtagatcatagggattggggggtatacagtaaagtatgcgaaaagggtatattggaactggacttagtgtatgctgtagaaattggcctactagtattatctgcagcaattcagtatttgttttgcttactgt

SEQ ID NO: 124652 - DNA, 2771 bp, Zea Mays
ctctctctcttttctctctctaaaagactttgctaattggcctgctagccggtctccctcccccggcctctttccctttcagctggaggagatagatgagagagaggatcagaggaagcaggaaggagagagggatatataggccggtgtcttctgtagagagagagattgagagcaaaagggaaataaaggagctctcgcaggcactcggtactgacatgagtgatctcatgctcttgataccttggcaaaaccacctgcttacgatcttgcagtcatcatcacgctattagttgaggataatttcgcgcacaagagcacgacaagccgagatttttgggggcgtcggcgtcgacctgtaggcgatggcggcgtactaccacggtggcgccggcacggacatccaggccagcaccgacggcctgcagacgctgtacctcatgaacccgagctacgccggcggctacgctgacgacggcggcgcgtccacgccgggggcggccaacatgatgctcctcaactcggccgtgaccaccatgacgccggcgtccttcgcgcaccaccaccagcagcagtcgccgccggccgcgcagcagcacttcgtcggcatcccgctccaggtccaggcgccgccgccgtcgggctacaacctgtggaccccggccatggctggcggcgccgcggacatgtcgccgcaggcgcaggcgcagactcccggcgccgcgggtgctgctggggtcagcgccgtgctcagcctgtcgtcccgcgaggcgccgccggtcaccgtggccgcggtggccgcctgcaccgacgagggcaagtacctgggcgtgtcggccacgccgcaggggcagatggtcatgagctccaagtacctcaaggccgcgcaggagctgctcgacgaggtggtcagcgtcagcaagggcgtcgaggacgctaagacggccgctgccgccgcgaccaagagcctggccgcggtgaagaagaaggaggactcggagggcgcgtcaggtggcggcaccgacgacggtgccggcgcaaagagcggcggtggtgccgcgccagagatgtccacggcggagcggcaggagatgcagatgaagaagagcaagcttctcaacatgcttgacgaggtggagcagcggtaccggcagtaccacgggcagatgcaggcggtgtcgtcgtcgttcgaggcggcggcgggggccgggtcggcgcggacgtacacggcgctggcgctgcgcaccatctcgcggcagttccggtgtctgcgggacgcgatcgcgtcgcaggtgcgcgcggcgagccgggcgctgggcgaggacgcggacgccgccgtcgccgggggccgcaccgtggggtcccgcctccgctacatcgaccaccagctccggcagcagcgcgcgctgcagcagctcggcatgatgcagggcggcgcctggcggccccagcgcggcctccccgagcgctccgtctccatcctccgcgcctggctcttcgagcacttcctgcacccataccccaaggattcggacaagatcatgctcgccaagcaaaccgggctcaccaggagtcaggtgtccaattggttcatcaatgcgagggtgcggctgtggaagcctatggtggaggagatgtacctggaggagacaaaggaccaggacgctggaggcggcggcaacgacgagggcaagtccggtggcggcggcagcaagagcagcgacaccgtcgacggcgtcatgccgagggcggacgtgatgtccaagtccgcggtgcgcgtgggaggcggcggggcgggggcggagagcgcgtccaccaacaagggcatccatggctcctccctgctcgagctcggcggcggcgatcaccagcagtcccacgcggggttctacgacgacgatgaagacgacggcgacgacgtgatggggcggaggctcaagaaggcgcgcggcaacgagccggcgccggcgttccaccacgtgcacgacatagccacgctgcacgcgcaggccgcggcggccgcgaggcagcagcacgaggaggtcagccaccgggagctcctcatgaagttcatggagagcggcggcggtggcggcgtgagggaccaccaccaggacggcggcgggtactcgctgttcgcgccggggccgtacgggcagttcaccacggagcccttcgcgttcgctgggaacggcggggtgtcgctgacgctcggcctcccgcacggcgccggaggcagcgccgagcagaccgcgtcgttcctcatgggcagcaccacggccggcgacagcggcagccacggcgccgccaccagctacgacatgaacatgcagagcaccaagtcgttcgcggcgcagctcatgagggacttcgtggcctagctcccttaggacgcatagcatagcagtcgtccacgcaattaatcaaatcatctctccatcgatcaattaatttagagcttgtatagaaataaagggttcaagcctaaatatgctttgcgtatataaagcagttaagcttggactcataggtcttgctgggaatgtaaagatgggatatatatcatggggccatgtatatataggtataggaggataggtaactagttgatacccaaacattgtacaagattttatatgtagatcatagggattggggggtatacagtaaagtatgcgaaaagggtatattggaactggacttagtgtatgctgtagaaattggcctactagtattatctgcagcaattcagtatttgttttgcttactgt

SEQ ID NO: 124653 - DNA, 3524 bp, Zea Mays
ctctctctctctcttttctctctctaaaagactttgctaattggcctgctagccggtctccctcccccggcctctttccctttcagctggaggagatagatgagagagaggatcagaggaagcaggaaggagagagggatatataggccggtgtcttctgtagagagagagattgagagcaaaagggaaataaaggagctctcgcaggcactcggtactgacatgagtgatctcatgctcttgataccttggtactcttacatcaccccttcttcaccttcttcttgttcttgctcatccctcctctccggccctctcttcctcctgcctctctctagctaggacgatcttcaacaaccctctccccctctaattctctttccccatatagagagaataaaggagagagagaggcgaaggcaggcagctaattttcttttgttcaagggaaaggacagcacgtgccggagctcataagctggtagctgcatcagttcctgaggtaactgacatagagaaatagatagagatggtgaggaggaagatagatgtgtgcgctgctggggtgatgtgtatgtgtgcgtgcttgtgttgacatctgcgcaccccgtttttttctttgttaaatcacttgatgaagatgggatgatgcctgccttttcctttccttattaatatattttttctctctctctgatactgatgcctattccacatctctctcaagctatctcctctcgagctgctagatatagctagcttagtgtgttcttccttttccatgcatatatacatgctggcatgctgcaccctagctagctacacatctccctctcccccctgcaaccttcactcttcatggatccagtttcacttctcacgccacatactcctcaaatcattgctttggtattctttttcattttttttttgttcatctgaggtagtgttatgtgtttataacctcttcgattcttgttcttcctctttgggcttgcaggcaaaaccacctgcttacgatcttgcagtcatcatcacgctattagttgaggataatttcgcgcacaagagcacgacaagccgagatttttgggggcgtcggcgtcgacctgtaggcgatggcggcgtactaccacggtggcgccggcacggacatccaggccagcaccgacggcctgcagacgctgtacctcatgaacccgagctacgccggcggctacgctgacgacggcggcgcgtccacgccgggggcggccaacatgatgctcctcaactcggccgtgaccaccatgacgccggcgtccttcgcgcaccaccaccagcagcagtcgccgccggccgcgcagcagcacttcgtcggcatcccgctccaggtccaggcgccgccgccgtcgggctacaacctgtggaccccggccatggctggcggcgccgcggacatgtcgccgcaggcgcaggcgcagactcccggcgccgcgggtgctgctggggtcagcgccgtgctcagcctgtcgtcccgcgaggcgccgccggtcaccgtggccgcggtggccgcctgcaccgacgagggcaagtacctgggcgtgtcggccacgccgcaggggcagatggtcatgagctccaagtacctcaaggccgcgcaggagctgctcgacgaggtggtcagcgtcagcaagggcgtcgaggacgctaagacggccgctgccgccgcgaccaagagcctggccgcggtgaagaagaaggaggactcggagggcgcgtcaggtggcggcaccgacgacggtgccggcgcaaagagcggcggtggtgccgcgccagagatgtccacggcggagcggcaggagatgcagatgaagaagagcaagcttctcaacatgcttgacgaggtggagcagcggtaccggcagtaccacgggcagatgcaggcggtgtcgtcgtcgttcgaggcggcggcgggggccgggtcggcgcggacgtacacggcgctggcgctgcgcaccatctcgcggcagttccggtgtctgcgggacgcgatcgcgtcgcaggtgcgcgcggcgagccgggcgctgggcgaggacgcggacgccgccgtcgccgggggccgcaccgtggggtcccgcctccgctacatcgaccaccagctccggcagcagcgcgcgctgcagcagctcggcatgatgcagggcggcgcctggcggccccagcgcggcctccccgagcgctccgtctccatcctccgcgcctggctcttcgagcacttcctgcacccataccccaaggattcggacaagatcatgctcgccaagcaaaccgggctcaccaggagtcaggtgtccaattggttcatcaatgcgagggtgcggctgtggaagcctatggtggaggagatgtacctggaggagacaaaggaccaggacgctggaggcggcggcaacgacgagggcaagtccggtggcggcggcagcaagagcagcgacaccgtcgacggcgtcatgccgagggcggacgtgatgtccaagtccgcggtgcgcgtgggaggcggcggggcgggggcggagagcgcgtccaccaacaagggcatccatggctcctccctgctcgagctcggcggcggcgatcaccagcagtcccacgcggggttctacgacgacgatgaagacgacggcgacgacgtgatggggcggaggctcaagaaggcgcgcggcaacgagccggcgccggcgttccaccacgtgcacgacatagccacgctgcacgcgcaggccgcggcggccgcgaggcagcagcacgaggaggtcagccaccgggagctcctcatgaagttcatggagagcggcggcggtggcggcgtgagggaccaccaccaggacggcggcgggtactcgctgttcgcgccggggccgtacgggcagttcaccacggagcccttcgcgttcgctgggaacggcggggtgtcgctgacgctcggcctcccgcacggcgccggaggcagcgccgagcagaccgcgtcgttcctcatgggcagcaccacggccggcgacagcggcagccacggcgccgccaccagctacgacatgaacatgcagagcaccaagtcgttcgcggcgcagctcatgagggacttcgtggcctagctcccttaggacgcatagcatagcagtcgtccacgcaattaatcaaatcatctctccatcgatcaattaatttagagcttgtatagaaataaagggttcaagcctaaatatgctttgcgtatataaagcagttaagcttggactcataggtcttgctgggaatgtaaagatgggatatatatcatggggccatgtatatataggtataggaggataggtaactagttgatacccaaacattgtacaagattttatatgtagatcatagggattggggggtatacagtaaagtatgcgaaaagggtatattggaactggacttagtgtatgctgtagaaattggcctactagtattatctgcagcaattcagtatttgttttgcttactgt

SEQ ID NO: 124654 - DNA, 2556 bp, Zea Mays
gggctgtgtgaggataatattggaagtgggaggcaaaaccacctgcttacgatcttgcagtcatcatcacgctattagttgaggataatttcgcgcacaagagcacgacaagccgagatttttgggggcgtcggcgtcgacctgtaggcgatggcggcgtactaccacggtggcgccggcacggacatccaggccagcaccgacggcctgcagacgctgtacctcatgaacccgagctacgccggcggctacgctgacgacggcggcgcgtccacgccgggggcggccaacatgatgctcctcaactcggccgtgaccaccatgacgccggcgtccttcgcgcaccaccaccagcagcagtcgccgccggccgcgcagcagcacttcgtcggcatcccgctccaggtccaggcgccgccgccgtcgggctacaacctgtggaccccggccatggctggcggcgccgcggacatgtcgccgcaggcgcaggcgcagactcccggcgccgcgggtgctgctggggtcagcgccgtgctcagcctgtcgtcccgcgaggcgccgccggtcaccgtggccgcggtggccgcctgcaccgacgagggcaagtacctgggcgtgtcggccacgccgcaggggcagatggtcatgagctccaagtacctcaaggccgcgcaggagctgctcgacgaggtggtcagcgtcagcaagggcgtcgaggacgctaagacggccgctgccgccgcgaccaagagcctggccgcggtgaagaagaaggaggactcggagggcgcgtcaggtggcggcaccgacgacggtgccggcgcaaagagcggcggtggtgccgcgccagagatgtccacggcggagcggcaggagatgcagatgaagaagagcaagcttctcaacatgcttgacgaggtggagcagcggtaccggcagtaccacgggcagatgcaggcggtgtcgtcgtcgttcgaggcggcggcgggggccgggtcggcgcggacgtacacggcgctggcgctgcgcaccatctcgcggcagttccggtgtctgcgggacgcgatcgcgtcgcaggtgcgcgcggcgagccgggcgctgggcgaggacgcggacgccgccgtcgccgggggccgcaccgtggggtcccgcctccgctacatcgaccaccagctccggcagcagcgcgcgctgcagcagctcggcatgatgcagggcggcgcctggcggccccagcgcggcctccccgagcgctccgtctccatcctccgcgcctggctcttcgagcacttcctgcacccataccccaaggattcggacaagatcatgctcgccaagcaaaccgggctcaccaggagtcaggtgtccaattggttcatcaatgcgagggtgcggctgtggaagcctatggtggaggagatgtacctggaggagacaaaggaccaggacgctggaggcggcggcaacgacgagggcaagtccggtggcggcggcagcaagagcagcgacaccgtcgacggcgtcatgccgagggcggacgtgatgtccaagtccgcggtgcgcgtgggaggcggcggggcgggggcggagagcgcgtccaccaacaagggcatccatggctcctccctgctcgagctcggcggcggcgatcaccagcagtcccacgcggggttctacgacgacgatgaagacgacggcgacgacgtgatggggcggaggctcaagaaggcgcgcggcaacgagccggcgccggcgttccaccacgtgcacgacatagccacgctgcacgcgcaggccgcggcggccgcgaggcagcagcacgaggaggtcagccaccgggagctcctcatgaagttcatggagagcggcggcggtggcggcgtgagggaccaccaccaggacggcggcgggtactcgctgttcgcgccggggccgtacgggcagttcaccacggagcccttcgcgttcgctgggaacggcggggtgtcgctgacgctcggcctcccgcacggcgccggaggcagcgccgagcagaccgcgtcgttcctcatgggcagcaccacggccggcgacagcggcagccacggcgccgccaccagctacgacatgaacatgcagagcaccaagtcgttcgcggcgcagctcatgagggacttcgtggcctagctcccttaggacgcatagcatagcagtcgtccacgcaattaatcaaatcatctctccatcgatcaattaatttagagcttgtatagaaataaagggttcaagcctaaatatgctttgcgtatataaagcagttaagcttggactcataggtcttgctgggaatgtaaagatgggatatatatcatggggccatgtatatataggtataggaggataggtaactagttgatacccaaacattgtacaagattttatatgtagatcatagggattggggggtatacagtaaagtatgcgaaaagggtatattggaactggacttagtgtatgctgtagaaattggcctactagtattatctgcagcaattcagtatttgttttgcttactgt

SEQ ID NO: 124655 - DNA, 945 bp, Zea Mays
agagattgagagcaaaagggaaataaaggagctctcgcaggcactcggtactgacatgagtgatctcatgctcttgataccttggtactcttacatcaccccttcttcaccttcttcttgttcttgctcatccctcctctccggccctctcttcctcctgcctctctctagctaggacgatcttcaacaaccctctccccctctaattctctttccccatatagagagaataaaggagagagagaggcgaaggcaggcagctaattttcttttgttcaagggaaaggacagcacgtgccggagctcataagctggtagctgcatcagttcctgaggcaaaaccacctgcttacgatcttgcagtcatcatcacgctattagttgaggataatttcgcgcacaagagcacgacaagccgagatttttgggggcgtcggcgtcgacctgtaggcgatggcggcgtactaccacggtggcgccggcacggacatccaggccagcaccgacggcctgcagacgctgtacctcatgaacccgagctacgccgtcgggctacaacctgtggaccccggccatggctggcggcgccgcggacatgtcgccgcaggcgcaggcgcagactcccggcgccgcgggtgctgctggggtcagcgccgtgctcagcctgtcgtcccgcgaggcgccgccggtcaccgtggccgcggtggccgcctgcaccgacgagggcaagtacctgggcgtgtcggccacgccgcaggggcagatggtcatgagctccaagtacctcaaggccgcgcaggagctgctcgacgaggtggtcagcgtcagcaagggcgtcgaggacgctaagacggccgctgccgccgcgaccaagagcctggccgcggtgaagaagaaggaggactcggagggcgcgtcaggtggcggcaccgacgacggtgccgg

SEQ ID NO: 124656 - DNA, 4043 bp, Zea Mays
caggaatccaaatttctcccagtggaacggtggaagtgtggaaccatcgcataaatgccccactcgtcagcgtggagcgtggctatatggacccacatggcattcggctacacgcattcgctaggtgggcctcacaacagagcacacaggctggttcgagaccccgggcacgtttctacaaatcctaagaaaactccaaaaaaagacaaaataacccagaaataaaaatcgccgtggaggcgagtcgccgccggcaccgcccggcacggccttcttctccggcgaaggcggagctcgttacggggattccgcatccgttaatcggtcccaccggatccctcgccgcctcccacgggccgggccgcgccgtggcgcgcgcgcaggccgagatgcggaagaggatggagagcgtcgacgatctgatcgaggaggcaaagctgcgcaccgtctggtgggcgctctgcatcttcgccgtctcctacttcctcacgcatacaagtaaatcaatgtggacaaatgtgcccatgtcaatccttatacttgcatttctgcgatatctctccttcaaagtggagttccgttggagggaacaccctgtacgtaagcagacacatttgtctcaagcctcaaagagacagttgtctgcaaatgatcatcgcctttcgactgtaccaccagtctccagatggagaaggaaagttggttcaccttctgttgaggctgcttttgaaagtttcattgagaaaattttacgagactttgttttagacttgtggtactcagatattactcccgacagagaggcaccagaactgatacgtggcttagtacttcatgctcttggtgaattatcaggcagggtgaaagagatgaatctagttgacatgctaacaagggatatggttgatttgattggtaatcatttagatatttttcggaaaaatgaaattctaattggcgttgatgtcatgaggactttgtcttcagaggaaatagatgagagactgaagcagcacctaatagtttcacaggaacttcatccagcactgttatcttcagagcatgagtacaaggttcttcaagaaattgttgggggcattatggctctagtgttgagaccacaggatgctcagagtccgctagttcgctgtttctccagggaattgatgacctgcctaatcttgcagcctgttatgaacttcgcaagccctgtctacatcaatgagttggttgtctaccttctaaatgccaaagatacaggtagcgctggaggtacaaacatggctaatacaggaacagtaacactagtgccttacaaaggaggctcacaaggttgtcaaatggaatcaaggaatttgactgtagaaactagcggtttagttccaccaaataattctgggatgagatcacttgttacttctgaatgtggaaagtcaaaagtgtcagaggatgacaatgatggtaccatccaacctcgtcagccagactgggcggcggtattggatgcagctactaaaagaaggtcagaggttcttgcccctgagaatcttgagaacatgtgggcaattggaagaaattatcaaaagaaaatggttaaattagaccactcatcaagacagaaaggctctgaaggttcagataatagtacaagtgcaggggcagttggtaaagagctatcctctaacttcaacgacagaattgcatctgttgatgataaatacatggtcaatttgatgcaaagtaaaaataggaatgctcaatctaccttcgtcacaggtagtcatccacttgctctacaaaatatgaatgaagtgaaaccaaaagaggggagtcaagttaattttaccagcaaggaaaaaccacatgaaaccagcaacagagtaaaagcccaactaaaacggtgtaatagtactcctgatattgagaaaagatatttggcaaaaagtaaccagcccatggtttccagtgaaaggctaaatgtgaggataaatcaggatgagagaggtgttggtcctgcctcacatgttgaggtgctaatgcatgttccgaagataagatgtcgggttgttggtgcatattttgagaaacaaggttcaaaatcttttgcagtttattctattgtggtgactgatgcggataacaagagctggtttgtgaaaagaagataccggaattttgaacgtcttcatcgacaactgaaggagatacctaattattcattacatctgcctccaaagagttttctttcatctagcgttgatgattatcttgtgcaccaacggtgcattctcctggacaaatatcttcaagatctcttgtctatagctaatattgcagagcagcatgaagttttggattttctgagtgcatcctcaaagacttactctgctggaaagtcctcctctgttatgaaaaccttggctgttaatgttgatgatgcaatggatgacattgttcgacaatttaaaggagtttcagatggtttgaaacgggcggtcggcacatcaccttctagtgcaactgcccaatttgcagataataggatgtctctatcttggaaccaggaagagaaagataaccacaacttgcatcaaagaaacttggaaagggctcatagcctttcagatggtgatagtaactatgaagatcacatctcttctgtgaatagtggatgccattcagacaatgaggtcaataatagaggacatacttcaaatgatgttgagcacatcgaaacatgctctagtttggataaacaagccagcgaccaaataggaaaacctgcaaaggaatattctgattcttcaaacatgtcatctctaaatgcatttgaggatccaacaggaattcctcctgagtggatgccaacaaatgttagtgtgcctttattgaacctggttgacaaagtattccagctaaagcgacggggttggatacggagacaggttctttggatatcaaaacaaattttgcagttggtcatggaagatgcaattgatgaatggatcataagacaaatcaattggctccgaagagaagatgtcatcgtacaaggaatacattggattcaagataccctttggccaaatggtatattcttcaccaagttggatgaatataaagggaatgcaggcacaagtgaatttgacaagcagtcattagggagtcccacactggctgttggcaataaaaagggccgcacaagctcttttgaacttcatcttgaggcatccagaaatgccagtgaggtcaaaaaacttattttagatggaactccatcggccttggtcagcataattggatacaagcagtaccggcgcagcgcaagggacatgtactacttcctccaatccaacgtctgcatcaaacagctcgcatatgcaatgctagagcaggtcctcgtgacagtcttcccagagcttcgccagctaatagaagacatacatgagaaaggccgcaaagagcaagcctcattcacataccaactctgacccaagagaaaacatgctaattcagagaggagtcgcaacaattttgaacgcacttgcattgctccacggtgagttactgaaacacaaagcctttgcaattatattttgatgatgcataagttggattgaggaagtgcttggtgcttaagaatgatctgtacagatgtatatcagaggttatgtaaattatccccctgatgtagtcaaccagaacaacttacagtgagatcttgtaggtgttgaatgtaatgtatcattctttaattcccccccccccccccccccccaagaattaagttattctcccccctgacttatgctgaggcttgtaaagttttgaaagttccaagtgtatagctgtactgtttgtgttgctgagtaaatcaaaatgttgcgcgagatgccatctctgtttcccaatatttgtccggtcgcacactcaggaggcagaaggtatgtaaattttttaaccaaactaagtgattccttgttgttttggatgaaatataataacatactataatacccaaacagcgcaaattcacgtggata

SEQ ID NO: 124657 - DNA, 1423 bp, Zea Mays
attcaacgtagggtacattatataataataagctaatagcagcgccacgcaccgacaccaatacgccatgggttccatcatggagcaacgctgcaacaacgatcagcaggcgctgctcgacgctcagctcgagctctggcacagcacgttcgcgttcatcaagtccatggcgttcaagtcggcgctggagctcggcatcgccgacgccatccactgccacggcggcaccgccacgctcacccagatagccaccaaggccgcgctccacccgtccaagacaccgtgcctgcgcaggctcatgcgcgcgctcacagtcgccggcatcttcagcgtcgccaagaactcgtccgacgatgacggcgatcagcacgtctacggcctcactccggcctcccgacttcttgtcggctcgtcacagaacttggctccaacactgagcctcatccttaacaacgtcttcgtggccccgttccttgacctcggcacgtggttcgagagcgcgctgccggccacagacctgccgctcttcgagctgtcccaccggaagaacgtgtgggacgtcgtcggccacgacccgtccgtgagccagctcttcaacgccgggatggtcgcggatacccgcttcctcatggacatcgccgtcagggagtgcggcgacgtgtttcaggggatacgctccctggtcgacgttggcggcggccatggcgcggcggcgcaggccatctctgcggcgttccctgccatacagtgcaccgtgctggaccttgcacacgtggtcgcaaccgctcccgcttgcgctgggctcagcttcgttgctggcgacatgtttgaggccattccgccagcgaatgctgtcttcctcaagtggatcatgcacgactggggtgacactgagtgtgtcacgatactaaagaactgcaagaaagctatacctccacgagatgcaggcggcaaggtgataatagtagataccgtggttggtgcagggcctccaaaccttaagaacaaagagacacaggtcatgtctgatctcttctttatgatcgtcaacggccttgagagagatgagcaggaatggaggaacgtcatctttgaagctggtttcagtgactacataatcataccagttttaggtgttcgatcaatcatcgagctatacccctgaaatataatccagcttcctcagccggcggccagctcatcacctacatgttgaatgctttggcgtgtggatctgtgtgtgtgttttttcctttaagaacagtgtgcatgtgtgtttaataaattggtatatatagttatatactcactaaaaggatggtttatgtatgcatgtatgcaagtgttccaaccattattatgtctccaaagtgaagaagttgcgtttttcaattttaaggaatgaactccaggattttcagaa

SEQ ID NO: 124658 - DNA, 427 bp, Zea Mays
tcggctgttcctatcagagctagtccagctcaccagtcgtcgcgccctctttacccgttgagccgtgtgttgccgcgttcacctcgttgtgttgtcgaggctttatcggcgtactgctgtggtacttggatcatgctcacctcaactcaaacgagtcgtactgctatcatcatcgtcaaatggaaattgtcacgctggcacgtcgatatcgtcgatcaccatcctcgtctacgccaagtcccaagccgtgaagacgctcttgtgctggccacgcatcactagctcgacaaaaaggaattccatgagtatctggtcaaaagtagaagttgtgtgcatcgttcgccagacatgtgtgatcgaagatatcaaccgaaaaccgtcatcgtgcttccgactatctcgtcgaattagtcagggtaagcaaatt

SEQ ID NO: 124659 - DNA, 821 bp, Zea Mays
cccatctccttcctctccctcctctacgcagcgcacgcctggcttgcctctcttgtgcgctgagctccctggtgttttctcctctccagtgccgcgccctggcttctctctccctccatctctctctagcgcgcgctcttcttcctccccgcgctgtgcgtccggttgagtttttccccagccgcagtcgagctcccagcctgtgcgctctgcttctccttgctgagcgccgctcgcccagccatctcccatggcgcttggcttcctccctccctccccaaagctccgagctcctccctcaccctggtcccggtcctcggcgcgcctgctccctggagctcgcccatgccgctcgctcctccgtgccggcgttctctgctcgaccatggcgtggacagccaccgagccccctccacccgtcttccctctgttcagagcgccgtcacctaaagtccttacgcgctccctctccgcccggccatggaactcgcccctggctcggattccagcgccccgctccctgtttgccccagctagcctggccgctgcgtagccccatcagcttctcctccctcagctcgtctctctgcccgcgcgcgtccttcccatggctgtctgctagagctgctccttgcgctcgtctgaccgccgaatctgctcctccatttaaggtctgcgcaggtccgaccatggaactctctgcgtcgcgctcggtcctgcctttcttgccacgctctgattctgtctccttgcgcgcactctcagattccgtctccctcgcgcgtccctgtaccatacttgtccccagccctcgcgctggc

SEQ ID NO: 124660 - DNA, 1020 bp, Zea Mays
ctattacgataaatggttattagtgccgctatatgcataacttcagtttgtttccaaattcactttttaatgttcaccaattttcttcatgtgaaccttttgcagactagatcatgctcacttcaaggttcagtgaagttaaggaacctatttgctgatcagccacacagaaaatttggtgacttcattaaaggagtatttactctcttccacagatttaggaaatgtttatttgcctgctgtagtgaattaagaaattttcatgtccctatattttcttatttgccatgtttataataattatgctccatctccatacggatttctcatttcttgagatgaatccgttcgccgtggtcaacagggagccatatcctctggacatcagaggagaactagatgacacaacagccttcaaaaacttcaagaagtgaatcagatttcccagggataccatttcttgttgtcattgttggatttactcttgtcaattgtgcaggtggggaggtatagaattccctctaccttttggaagagtactcagccctatagaaagtttcatccatgaactagatgagaaggcaatggaggacacagatattgcagttgaactttacaaactcagtgtttccaccctagatctattgaaactagcatccaaagaggaacagggtgcttatgtcggtgcatggtacaatatgcttttgtcctgtgctcaagaattgaagcatggtgtggcactttggcaagagttttatcatgcaaatgtctgcgacagagtagtttctgaaggacccaaattaaaggcgatgcaacttcttcttgctgcgatgtcagctagccagatcagtttcttgaggccattatattataatataatatgaagaatacagattattgtatatgtcatgggtatatttcatcttcagatgcttatcctattatcttttatcatttaaatgtatctgtcatgggtatattgctggaaatgcaacattcaaagtcatttagacaggaata

SEQ ID NO: 124661 - DNA, 1934 bp, Zea Mays
gcagcctcacgtgatcccgttcctaagttctaactacccgcggcgctgtgcccgtggaacttggaacgagtatttactgtattttgagtcacaactcacaagggtagttcaaagtccggaactccagactcgcgttcgcacgccgcctttcgcgctgcgttagcgccttagcctgctagggctcgtcgattcatcgccggctcgacttctgatctcgcgggcagagcagcgcgccggcgcgatggcttcggatccggatgtgtccggcggcgagcaggcggagccgcccgacgatgtggacgaccccgacgtcgacgaggtcgaccccactggccgctacttcaggtacaaggaggtcgtgggatcaggggccttcaagacagtctacaaaggtttcgacgtggtcgaaggcatcgaggtggcatgggctaaagtggagataaccggccggaccatgggatcccccaaggagctccagcggctcaagacggagatccagctgctgcggtcgctccatcacaagcacattctcaagctctacgcctcatgggtcgacaacaagaagagggcggtcaatataatcactgagcttttcacgtccggcaacttgagagagtaccgtacgaagcacaagaaagttgacatgaaggcaatgaggcgatgggccaaacaaatactgacagggctagcctatctgcatagtcagaagccaccaatcatacacagggacttgaagtgtgacaacattttcatcaatgggaaccatgggaaagttaagattggagacttcggtttggcaatggtgatgcagcagaggaaaacacagagtatacaaggcaccttagagttcatggcaccagagctgtttggtgaaaactacaacgagttggtggatatatactctttcggcatgtgcatgcttgagatggtgactggtgagtgcccttacagtgaatgtcagggctttgttcagatatacaagaagatatctgaaggtgtaaaaccagttgctctctccaaggtcaaagatgcagaagtaaggagtttcatagagagctgcctagcttcagctgctgatagattgccagcaagtgagctcttgaagagcccttttctcatgatagatgacatcatcatcaatgataaaacctctaatcctgtgcaagaacctatagcattcccgccaaatttggatctggatcttgaagccacaccaatttttatatctttgctaccaaatggaaccgttgataatgggaagggatctttcagcctagtgcttcgaaggggtggattcgtactagaaggagatatgagtggtagcaaccctgttaatttattactaaggattcctgtccccaatggtaaatgtaagaacattgagttcgcgtttgacctggagaatgatacaagtcttttggtggctacagagatggtgcaagagcttgaactaccttcttggagcatgcctattgtggcaaagctggtagatgcgttcctgctcaaaactgttcgtggttggaggccgtgtgttcaggtcggtcagatgattcaggcagtgcaaaacactgcatccgtgaatggaaaaagcatctgaatcaatgtttgtagctgatgcattattctgcaccttatgtaaatatatcatgcccgaatgcaacgccaggccttgctgactaagcacatcttcttttatctgatgctggttaaagtttgggcatgattcctaattagaatagtggtatgtttcgtattttttttggttcgtattgttagaaagaggttcagagataagagaaattaagaatgctgtaacagccatccttgctttttttcagttttttttaaaagccttaccatgtgtctatttggtactgctcaacttcatgatttgcagcttagctttacaagaagtctgttgttcacttgttacc

SEQ ID NO: 124662 - DNA, 161 bp, Zea Mays
gataaaggtgtcattgatggaattaccaatggagtaggtcttgctagtttttgtataggagaagaaatcaaatatgtagggggaatagatttgttgctaaaatatcggtattaagcccgaaactcccagcgaatggccagtgagctaaaaaaacaaaagaa

SEQ ID NO: 124663 - DNA, 180 bp, Zea Mays
ccattttctggaggagcttctccaaggtctgtggtggcttccttgcaaaatattgtgctgtgggtcctggtcgaagccccttaatcatggcttcgatgacaatctcattgggtactgtaggtgcctgagctctcagttgcaacaacatttggacgtacgcctacaggaactcctcatggt

SEQ ID NO: 124664 - DNA, 732 bp, Zea Mays
atgggtttcctggatgatgaggccacggccacgccggcgtcggcggcgggtggaaatggaacggtgccagcggcggccagttgccccctgccgggagcggcggcgggtggaacgggaacggcggcagaggcggccatttgccgcccgggccggggtgcggccacgccgggaacggtggcgattggaacggcggcagcggcggccacgggttgtttcttcggtgcggctgcggccacgcagggagcggcggtgggtggaacgggaacggcggcagaggcggccatttgccgtccgggcctgggtgcggccacgccgggaacggtggcgggtggaacggcggccactggccagtgccagggcgcggccacgggaatggccacggcgggttctggccgtgggggctgtcggccggcggcacacctggtgtcggctgcccgtcgtccggctccggcgcaggtggcgaaacgtccggctccggcggcgcgtggtgcccgtggtgtttgggcggcgccttcgggtggtggtgcttcggcttgggtggcgctttctcatggtcctggtgcttgctcttcacgtgctgaccgtgtccagtcaacggcggcggcgcgccagcgacaggagcgtactccggagttcccaccggcggggctgcagcatctgcagccggcggctgcggctctagcaccgccgccggcgctggggcaccggcttggctgccttccggtgcattag

SEQ ID NO: 124665 - DNA, 459 bp, Zea Mays
atgtatgcaagccgtgctttcttcgtcttccaagaaggcattgaaatccaacccacacctcaaggtgctcctatacttcaaggctccagccaggttttcctcggcgtcgaggtcgtccatggagctggcgggatgtacgaggggcggcgagatgctcctgtggagccggtggtaggattttccaaggagcggcggcgtgggatgtatgagggtttacaagggcgatggtggtatggatacctgggctggggctggggctggggagcggtcacctgtgctggtgctggcgagccatcaccttggttggggagcggtggcagtatagattaccagggaggcgcgtgggatgctaatctccaaggggcggacagtggttttcgggaggcggcgtgggatgcttgtgaggggcggcgggatggcttgagagacgaacgggtaaaaaataggatggcagattaa

SEQ ID NO: 124666 - DNA, 1198 bp, Zea Mays
atgggggtctctgtcctatggggcccatctaccagaactttcttcctcggctcaacgaactcgtccgtagtaccattgacgcccaaacccacagtaagaatgcttccccgtgctttgcaattccctcttaggccttgttcgcttcgaccgggatcagtctggattggaaagaatcctcccgggatcagacctccgtggttgaaataccggcccacgcaaaaacaacgttcgtttaagcctgttcgggcatcaaccccggcccatcccggacgattcccacatcatctcgaccgggttacaaccctcgtcccatcggcgtggaaagaatctgcgcttgttggcggcgcgggaggctgcggcggctccgggacgaaggcgactgcggcggcgtccacaacatccacgagacggcagcaacaggacggagacgaaaatctggtgcgccttgcggctgggatcagaagacatgtacatagcatggttactcctttctacaattctccactggagattattcctgcaccggttcgagttggagaagaatttccaccgtcttgggatctagaaattagaagcaaacaagttgaagatgaagcgacacaattggcaagagaaagggaggttagaggaagtgatgatttctcaattaagaattgcatagcagttctaaacacattggaagtcacaaaggaggagaaggtcaaagcctataaggtgtttaaggactctgacaatcgacagatttcttgagtgcctgtaatgatgatagagaggctgcattgatgtggttgagggatgagatggcttagtagttctagacttccaggggtcgagttatgtacgaagtagctccaatctttagaggaagattgtcttcttgacgggttttatgtacttgttctatcaaagagtgagatgaatcattatctagatctatgatctcgtcatgtttagtacactggaaatgtaatcttttgcaacttattagtgttaacagaccatgagataattgtgcaggttgtttgaaaaggcattaatattgagctgactgaaaatttttattttggtattattgtggtacggttgtttaaaatcgcatgttcagtgcacctgtttgaaacgtgtactgaacgttagggcacctgtttgagttattttgaggctagtattttctctatccctggattaagcgaacaac

SEQ ID NO: 124667 - DNA, 1128 bp, Zea Mays
attcatttatatcccattcagattcaatttctagaaccagatactcgttcgcttatttttttggtaaaaaatgagcaaatagaaaaaatctaaaaaagaaaaaaaatatctgtcgccgcttcctctcccagattttcccaccgctctctgaaaattcactgccacgcgcatgccttatcctgtcgccgttctcatctagtcatctcccaggattcattttctcccacgcgcgtctctctcccctgcttccatggctgccgtaccctttgctcctcccagccagccgaggtctcttccgaagcaccgccggccatctcgagggagatctggcgcccggccaccctcacctcatccacttcctggcgttcgtcctcggctccctcacgccgtgtgctcctccctggtactcgagatcgcccatggagcccagccccatgcggcgctccgctcgctcttgtctggtggctggtgcgcgcaggcgccgggctcagggagccccggcaagagctggcgttgtggcgggccaccgacagcgatggaggtgcttgctgccactccttgtaggcgtcgccttccttgtcgagatcacctccctttgccgcctcgacatggcgaagaacgccgaggtggtcgagagctagaccagctccttttaccactgctcctcccattggggtgaagccgtgggtcggggcgtggtcccgaggtcaggcagcgatggcgaggatgaagagatccgatggtgcgagcagcggttcgagagggaggatgtcgtgccctatgagtctatgaccgcgacgttgacagggatcccgtgcttgtcggtggcgcagccaaggactggagtaaatgctacgtaggttgtggatttgttttttttctgccagtaagacacttgatgctacttttggaattgcaccagatttttctgtagagggtatcctcggatcaatggaatcatctcaatattattcaaaaaatagtattgatgtggctcgagggagagggtacaagattgtgatgacaatcagcctttcttgagacgtcccagttggctactcttcatgggctgaatatgattgtaacaccctcaatttgaggtataaaattttttttctaatatccacc

SEQ ID NO: 124668 - DNA, 876 bp, Zea Mays
atggcgactaggttcatcgacagcggcaagcagctcgtgttcgaccacgcgacacagttcttcaccgcgagcattcgcaccgctgcagaggcagtcgtgaacaactatatatgcgcaagattgagcctaaggtataggcatctgatggaggacgtgttgtctctactcccgcatgtgaagaaggacaaccaggacaaggtcgagtccaagcagagcaaggggaacacgttgaacaagctgcttgagctcaggagctgcttcagttgcctttcttcgaggagggaggtcaagaagcctaagaagcccaaggtgaagaagcccaaggtgaagcaacgattctcgcggatgctgcacatgttctgtaagacgctcacggcctccgacaccagcacgcatgtcggcttctccgtgccgcaccgcgccgccgaggactgcttcccgcctctggactacagccagcagcgaccgtcgcaggagcttgtggccaaggatttgcacggaaccgagtggaggttccgccacatttatcgagggcagccccgcagacaccttttaaccactggatggagtgcctttgtcaacaagaagaagcttgtctcaagggacgccgtactatttttgaggggtgataatggggagctaagacttggagtgcgccgtgcagctcagcttaaaaatggatctgcttttccagctctttataaccagtgctcaaatcttggttcactacctaatgttgcacatgttgtggccaccaaaagtgtgttccacatctactacaaccccaggtctggtggtaatgcttatgtgattggtgattctgcaaagcttgagcagaagtggcacgcctactatgccactactgagcacccttga

SEQ ID NO: 124669 - DNA, 5149 bp, Zea Mays
atggtgcatgtaggggagatgctggcctcggccgtcattaaggaagttgttcgcaggctgcctgcgctgctccaggctcccgtcaaaggtccggcaaagatgatccggagcttcagggaggacctcgacgagatgaaaatgacgctcgagtccatcaaggcaaccatggcggaagcagagcagcggtctatcaacgacgagaccgcgcggctgtggctcaaacggctcaagagggcagcctatgatatctctgatatgtttgatgagttcgaacacggcagcccaccgggcaagaagctgcagggccctagttggttcgagataatgtttagccgtgacatggctaagaaaatgaagaaaatgaataaaaggctgaaagaaatagcagagcaatggaaaaattacggcgggattggccgtgtatcatgtgagcccaaaaatgatgctgctgaggaacaagaaacaacttcaagttcatcatcagccgtggttgttggtcgtagagctgagaaacaagcagtcattaatatactgcttagctccaataacacataccctcaagaaactattagtcactgtactgttatccatggacttggtggtgttggtaagagcgaactggcaacatcagtgttcaatgacgaaagaatcaaggaggcctttcctcaacgggcatgggtttggttgggccaaaatttccgcgaaaaggatattggaagagctataatctctatagttgaatgtggatcttgtaatctcgagattcttgaatctatataccaacatctcagaaaggtgctcctgggtagatgtctcattgtattggacaatctctgggattcagttcacttagccaaactgcagggtgaactaggaagcaatgtttcgatcttagttacttcacgcagagaaattcaattgaatatgcccagatcgacattattccgcttggatccattgtcagaaagatttagccttgatttagttaaggaagttgcatcctcatattttcctgcaggtgatattccagaaactgcaatggaagaaattgtaaagatgtgcggaggtgtacctttggcccttaaatctgttgcgtcacaactgagaccagaaagaagcgttaaagagctgttgagtttaataagagctatctctccgcccaaatcagattatggaacaacggatatccaggaccgtgttcttgcatcccttaagctgacatatcacttaatgtccccgagtctcaagttatgctttgcttactgtgcaattttcgctaaaggcgatgaaattgatcgggaaggcttatgccaccaatggatcgctcttggactaactgaaaagatgtatgcagaggacagagtccgtgacttattgaccatgtcatttcttcgggatccagagccacctgcgatcacgaggagcagttctggtggttcatccaaacttaagatgcatgatctggtacacgaccttgctatgttagttgctgatgatgaattgctagttatcaatcaggagtgtgtggtatttaaatctgattcacctcgttatgccatggtttttgcatgtaagttggaaaacttgcataagaataaattgctagccgggttaagggctcttcatataaaagattctgatggactgaaatttaaatggtacaatttctcgtttgtcaaatgcctgcggatcatggatattagtgggctatgcactgagaagcttccttcctcgattggaaatatgatgcagctgaggtaccttaatgcttcaggaatacaatgcgaagtgctccccaaagccattggcagtttatcaaaactgcaatatctcaatctacatggcagtagaatttcagcactaccagactcagttaccaaattgggccagttgatgcatctggacatttcggactgtgtgcatctgcagacattgcccaactcgttctgcaatctcgaaagcctgtgttttttgtccctaaagaactgctgtcgactaagttcattacctgacgatcttgccagactagagaatttagagaaactaaatttgtcaggatgctcctgtcttgacactttgccaaaatcccttggtgagctggactccttaaaactattggacctatcaggttgtatgaaactcaccatgctcccgaaatctttcattagccttactagtctacaatacctgaacatctcaagctgttctgagttagacatacctgtcgatgctcttaacaagctcacaaaattgaactatatagacatgtcatgttgtccaaaacttgtaggcctccctcaagaattttgcagccttaaacatctccacacactgaatctctcagactgttctaaattagcatatttaccagagaagctgggccaaatggaaagcatcaagttcattttgcttgatggttgtacggaatcggtgaggaaacctattctaaaacataggctgggtgctggtctgcagtccttaccagcatttgtcgttgaaagaaaggctgacagcatacggagcaacattttccaactcgaacaggagaagttctctgagctggaactgtatcgcctcgagaatatacatacagttgatgaggctaaagcactgaagatgcctgatagatcaggactacgtagtttgggacttatgtggacattaaatgttgatcgattcgtggaagatgaagcactgcttcaggcgcttgagccacatgagaatcttaaaaaacttacggtgcaaggctacatgggcgaaaggtttcctaaatggaaactagaacttggttcctcccgccagggccatcttcacgaagttggattaatgcattttccaatgtgcagcagtttgccacagcttgggcagcttgcaaatctcaagaagctttacctgtccaggatgccaaaaataaggagactgggaagagagttgtctgataacactggagggctcaggaatttgcaaatcttcactttggaatatatggagaacctggaagaatggtgcacaactatgacatcagctacgggccagcagcagcaggaagaattcatgtttcccgcgctccaagaactgaccatataccattgccctctgttaacgatgcgtccctgccctccaagaagcatagattattgggaagtaagagcaagcagtggtgcagcacaactgcttcttcagaaggacggcatgatgcaatccgtggcagactatatgggcttgcagtgtccctttgcttacaccagcgagctgcatgttagtggctccagcagcagttccacactacttcctactgacggatggaaattcaatggttctctcatcactctaaaggatttgacaagtgattgctgcagtttgatagacagattgctagccaaaggtaacagcatgcaatgtttagttaacctagaggtttcaggcatcaaaaatacaaatagcttactggaagaagttgaatcagttgcatactacacccgatcgagcctcgctaaatcatggccagattggtttttacaggaacaaggcataaacagagcatcaccacattttatagtaacaggttatgcaaattgtggagtcgatggctggattcataaggtgacctcctttcttggcaaccttatacggatcaacatggagaaccttcctatgtgcgactgcctaccaccacttggtcagttgccaatgctgcaggaactgcgactaaaagggatgcctaaaataagaagtattgatcgagacttctgtgggagtgggagtgggagtcagcaatcgtcacacacattgtttttcccaaggttaacaaggtttgttttgaatgatatgccaaacctagaagattgggtcactaaggtgtcaggtgcaagtgatccgtatggccaggaggaattcatgtttcccaagcttgtcaagttgacaatttggaactgccccaagcttaagctgaagccatgccccccaagagcaatggagtgggatataaataacagcgatcaagtaatagcgtcaaactatgatataaacagtggtggttatcttgtgactatgctgcaagtattgttatgcaaagttccacccagcaattggaaattgcttcatcaactccctgggatccaaagcttggctattgtaagctgccacgggatggaagctttgccagatagcattcaatacctttcctcactccactcgctaactgtaagcaaatgtcatggcctgaaacacctacctgattggttgggggacctcacctcccttgagaggttgatggttgtgagttgccccctggagttcttaccagggagcttgaggcgcctccctttccttcggtcgctcactctgagccgttgtgaccgactggcagcactgccagggtggatgggtgatctcaaatcactcgtgacgatcacaattgaagaatgcaagagccttaaatctttgcctaagctttatcatctggaacatctacacattcagtgtaatgacgaactagaacgttggtgcaaatcagaggtgaatcagcataagttttctcaaactctaaggaagggtttcttcctggagagtcctatggggaccaacagctgcatcttaccagctagatcgttgagtatactttggggacaggatgacagatactggaggttgaattctattcctgagtccaggttcgcattatcgatggagctcatagcagtctggtggctcgagattgagggatgggtccctttcgagttcctctccaccgacactagctatgatatattccttgtctacaagctggcagatgagcatgatggcctcagatggggggagtcctacgtagcagtggatggagtacacaccactgatggcgttgtttcctttgtagacgaagatgccgtgcgtgtagatcgcgtggcttacccggttacccgttcagaaggttggatggagctctggcttggtgagttttacaataagtatgttgatagagaggtaaaagtgagtgtctgggagaaaaccgatacctatgccaagatagggctcatcattgagggcatggagatcagaaagaagagcgggagtattagctaggtaggtacatgttagtaatgaacctgatcttggggaacttgtcacatacttaggttttgcttttgca

SEQ ID NO: 124670 - DNA, 2255 bp, Zea Mays
ggagcaagatccatttagccatggtgctgccgcagttcgcttttcagaagttttgggtcttcaattgaacccttgagtttaagtccgagcagccacacaaccatggctgtggctgccggcgtgtcggaaccaccaattgtggagcaagtgatcactgaattctttgccaagagcctccacatcatcctggagtcgcgctcaccctacgactcatcgcggaacttcatacgaccctccccaccgtcgtcaccactggctggcagccagccgcgtgaccggtggttcaatcttgctctccgggactgccctgccgcacttgagaattttgacctatggagacagagcaaccttgagcctctggtcattgacattgtcctccttcaacgtgacaataccaaaaccaccagtgtcggggccagcaggatcattgagaggtggataataaagtatgaaactagcagatctggaaatattatcaagaacagtggcaagaaagctagaagcggctcttctcaggatcatagcttgtacaggagggcatacagtgggtcaacagtgttattccggtcattatatctggttgtcaggctcttgccagcataccatctttttcaggagctcaattcatctggaaggatctgtcccttgaacctctcacacaagatttcatcatttgttgagccattcacccgcgcagaggacgcagagatgaaacactatgcatttgctccgattgaaactctgtttggttccttaagcttgtcagtttcgtatgtgccagtgctggacttggctgcagtaccagagcaatcctcaccgatgccaccagagcttataaaggattatgttggaagccccacaacagattttcttaggaagcttgattccctaccttcagatggcattgcacctggatgttttccaatgaccaggaggcacagttggagcactgagcatggagttagacagtcggcatcaccatttcctatgagttcagaaccccatggatgcctacagccacgtatgcctactgataattctccaacagcatactcacatccacataacacaccatcatctgggaaggagagaaatacagtaaatgaagagtattatccatcaccacctctatcaccatcaccatcccattcgccttctagctacccaagaaatcctttcttccgatatgagagtcctccttcaagtattcccacagtgatggccggtggaggttgtagcagactgcctccttctccacgtaggaatgataagcaacaatgctcatctcaaaatgagaatttgtcacattctcccaacaataaatcaatagtatcaaaggatctggtcaagcttagtgggtttcggaatgagaagtctttgcaaaaggttttatcttttagtaatgatgatttggtgtattttcgtggactaaagttgacccgtacctccagcaaacttttcatcatggatgagctggatgagcgggagttggtttttgcatgggaagataaagacaccatcattgatcagcttaacagggttgatctttctgacagggaggaccatgagtcgagtcaggatcttggaggctcgttaacgaggtctccagatgcagcaatcggtattctcatgcgcatcctaaagaacgctccaggcctcagggaaaggctactgacaggccctagcgccccggttcctcaagaaccttcttcactccagagggtaatgaccgaggaacatggcagcggcgcatcaagctctgcaggggtgccttcttctcttctgaggtcaaggacagcggcggacacgctggaggagctgaacaagtacaaggagattagagaatcaatactgaaccgcgacaaagggcattcctgcagcaccaagctgctggaggagaaacccgcggatggagatcggtagcaatatacgaaagcctgctgtacataagtagtagaagctagctgaccgtccttaagttgctggtgtctgctgagatgattttggaaactaggtagctgttaggagtgaccaataactcttatatatttacatgatactatatatataaggtatggaagacatatatcgccaatgcatccatccatccaggtgccctgagatgatgacccacttgctgggttgtgtaaagtcgagatgtttaactgaagttcatgcagtgaaaatgtgacacgcaatcaaatcagctcagaaatgcttgtcagctggttaagcttggttctgttctgtcgacc

SEQ ID NO: 124671 - DNA, 107 bp, Zea Mays
ggctttgttcagttcgtgtccgtggtcgagtcgtgttgctggtttaggttgtatcttcgtcgtagttcaactgcaccttcgccgctatcccatccaccattacccag

SEQ ID NO: 124672 - DNA, 90 bp, Zea Mays
agatctcaaatttgaattcaaattttgttgtgagtttcacacttagattatatgcacaaataaaataccaacatgaagaagtattttcac

SEQ ID NO: 124673 - DNA, 1689 bp, Zea Mays
aaccgcccacttccccaaaacctgccacgcttgaacggctctcaatcccaaccctaacagcaccgtctctcggatctgatctgatctgatcctccaattcgttcgtccacgtctcgccatggaggacgaggaacttgttgatcagaagaaatatcttgaggaacgatgcaagccgcaatgtgtaaaatcactttacgaatatgaggtctgcctccttggaagctcaaaatttggcacagtgttggccaatgatttgacatattcttcagttgacagtttgacacaagggtttctatatgatactgtttatttttcttcaagaaagttcaagaagtagctgattaaggataccttaccaaattagtcgggacatgatactggtattagtcatgtttttttttgtctgtgtgatcaactgatcatgtgcaacctatttgccatgtgaaaatatgaaatttagccaatgcatggtttcacttcccaaagatgtgcgagcagtattgcagtaacattgctttgccttatattatgcttattcttagtggcaaataccaagaactaacatcgtcaagtgataccccctattgtcctcagtcatgccattctgagagttgtgcgcagaatctttagctgtagtcatgcatacatcatactagtgatttactgatcaggtcaaaagtgatgaaacaatgagatgctctgaatgtcaacttttgattacctgttcaaccaatgtaatatttacttgtttagcctgtacactgatcgaaacattataggttcctatgtggtcctgttttggacatgcatattatttgggtgcttgccaaactcctataggtttctcataagctgtggaggtttggaattacataaatcttcattgcaattccctatatatgatgttgtagacccataataatcttctataaactaggaagactctgagccggaggttaggtcatgacctaatctcctataaattgaattttaatagtagccttcttatagttttgttttaccctagggtgctaatagtattccattttttaatatgcatgcctggcacatgagtatttttgttcaaactttaacggtggctgtctgttatcagaaatgcgtcaagagagttgagaatgatgatactggtcacaaacactgcactgggcaatactttgattactggtcatgcatcgacaaatgtgtagcatcaaagctctttaagaagctcaaatgatttgtgcgatgtgatgcgacttctgacaaagtgaatcgaatttgcataccttacacctttggaaagtgtatgagctcgtacatcttggaataaaacatcaatttttctttgctagcatgtggactggactgtgcataaatttcatgtgcatgcatctggtgtcaatcttgctcatttacgtgctgttttgtgagaaaacatattatcaaatggtttttcagtaaggagaacgaacctgagtcttttctagtttggcttcacggcctctcgatccggcatgttgtgttagatcatgctggcatctgtgatcaccaaaggaagatagcagcaggcaggagatcgctgagtggctgcgtgttccagtattgttaataaataaattgttaatgataaacgaaaacgaaaaattatcaaagatgaatacagtaatatttttagaaaagaattagaaa

SEQ ID NO: 124674 - DNA, 780 bp, Zea Mays
aaccgcccacttccccaaaacctgccacgcttgaacggctctcaatcccaaccctaacagcaccgtctctcggatctgatctgatctgatcctccaattcgttcgtccacgtctcgccatggaggacgaggaacttgttgatcagaagaaatatcttgaggaacgatgcaagccgcaatgtgtaaaatcactttacgaatatgagaaatgcgtcaagagagttgagaatgatgatactggtcacaaacactgcactgggcaatactttgattactggtcatgcatcgacaaatgtgtagcatcaaagctctttaagaagctcaaatgatttgtgcgatgtgatgcgacttctgacaaagtgaatcgaatttgcataccttacacctttggaaagtgtatgagctcgtacatcttggaataaaacatcaatttttctttgctagcatgtggactggactgtgcataaatttcatgtgcatgcatctggtgtcaatcttgctcatttacgtgctgttttgtgagaaaacatattatcaaatggtttttcagtaaggagaacgaacctgagtcttttctagtttggcttcacggcctctcgatccggcatgttgtgttagatcatgctggcatctgtgatcaccaaaggaagatagcagcaggcaggagatcgctgagtggctgcgtgttccagtattgttaataaataaattgttaatgataaacgaaaacgaaaaattatcaaagatgaatacagtaatatttttagaaaagaattagaaa

SEQ ID NO: 124675 - DNA, 776 bp, Zea Mays
aaccgcccacttccccaaaacctgccacgcttgaacggctctcaatcccaaccctaacagcaccgtctctcggatctgatctgatctgatcctccaattcgttcgtccacgtctcgccatggaggacgaggaacttgttgatcagaagaaatatcttgaggaacgatgcaagccgcaatgtgtaaaatcactttacgaatatgagaaatgcgtcaagagagttgagaatgatgatactggtcacaaacactgcactgggcaatactttgattactggtcatgcatcgacaaatgtcatcaaagctctttaagaagctcaaatgatttgtgcgatgtgatgcgacttctgacaaagtgaatcgaatttgcataccttacacctttggaaagtgtatgagctcgtacatcttggaataaaacatcaatttttctttgctagcatgtggactggactgtgcataaatttcatgtgcatgcatctggtgtcaatcttgctcatttacgtgctgttttgtgagaaaacatattatcaaatggtttttcagtaaggagaacgaacctgagtcttttctagtttggcttcacggcctctcgatccggcatgttgtgttagatcatgctggcatctgtgatcaccaaaggaagatagcagcaggcaggagatcgctgagtggctgcgtgttccagtattgttaataaataaattgttaatgataaacgaaaacgaaaaattatcaaagatgaatacagtaatatttttagaaaagaattagaaa

SEQ ID NO: 124676 - DNA, 673 bp, Zea Mays
ataatgggttcttgggaggagcatgttaggcatttttttgttggaggaggaagaagacgatgatgaatgttctttgttattctcccttctataatcccatacatctcggaagagaaaaggcccatccacacatcctcactcaccggtgctaaaaaggttaaagaaattcttgaagggcatgagagctggtgcaaatctgagttcagaatagagaaggaaatattcaaagccacatcaaattttcttagaagagagaatttactacgtgacacgcgcggagttagcgttgaggagcagcttaggatgttcatgtatatgatctcccacaacgccagtaaccaaatgctacaaaaggcttttcaacacagtggagaaactatccatcgaaaaatatccgaagtttttgagatagttcccatactaactcaatgatttgtgaagcttcgtagctcagttcaaactcatgctaggattgcaacagattctaggttcatgcccttttttcaggtgagctacaacttcaaacacacaattatcctatgctaattgcaacatgtcctcaacatatttccatatttgttcctttaatgcataattgccttggtgctattgacggcacacatgtacccatcactatcgcagaagacagggcccctccatatagaaatagaaa

SEQ ID NO: 124677 - DNA, 249 bp, Zea Mays
atggtggctccccgatccagagggcaagcgacagcggggcccttgtgcgggcaagcggccgcgtccccggggccccgaggcggcgacacttctaaggccggcgagcaagcggcgcccctcgacgtgcgagtagtgatggcgacgcacgaggcgcaaggttcgagcggcgtcacggaaggtgtgaggtgcacgcaacaacgatcgcacaagacatcctccgatccggcgcagttcgggtggcccgagtga

SEQ ID NO: 124678 - DNA, 802 bp, Zea Mays
tttttagaatttcttgattggtacaaacaaaggaataaagaggtgagaagagcttttgatgagttgtgtccaaaaatgctaagatgacttcggggacgattcaaaaagaacttgcaaactgttgtgcagaatgagtcacacgtgcaattaaagaagaaatggggaattgtttattctctattcttgttgattgtgtgtttttctcaaaaatgctaatatgagctatctcaagagttgcttgtgtgtttttcttgtcttgactcaagggattcgttctctaagtttgatgtggataagcttgctcggctcgcagatatctattatgatgatttttcttttgatgattgcaagactataaaagatcagctaagaacttttattattcatgtatgaagaattgaagagttcaaagcttgttgtgatcttgctagtctattgaagacaatggttcagcttgagaggcatattgtgtttccactagtatatcgacttattgagttagcattgttgttaccggtggtgactgcaacagtggaaagggccttctcagctatgaagattattaagactgagttgtgcaacaagatgtctgatggttggttaaatgacttgatggtgtgctacattgaaagaaaaaaatttaaaggactggaccttcagaaaatcaagaaggcatttcaaaataagaaaactagacaaatgcaattgcctagatctcctagaactagactcaactaaagattttattcgctatatggcatttggttgtaaatggattgtaatcaagatgactattaaataa

SEQ ID NO: 124679 - DNA, 1786 bp, Zea Mays
agagcctgtcaaatgctccgtcgccaaccgcgcctccctgccgcaccctcgccgccgctggctgtgctccggcgagccttccgctcggaagctgccctcgaggccatccgatcgcacttgcactcacccccatcaaagtccacctcaacatcctccgatgcggacggggacgacaaggcggcccccgccagcctcgcgctctacaactaccccaccttcgctggcgcttatgccgcgctcgccgcccgcctcttccatcaacgcgtccgccgccgcctcctcgttctccctttctcctccgtcgtacccttcagagccgaagactttaaggatgcggggttccagacgtgctatctcttggacttcattgggcccaagaagtttgctttcgagctcgcccgattcatccccagtgtgaaagcatttgatcaccggcaaagtacgcttgcaagaatccccaagttgggtcagtgcccaaacaatgtggagcttcatattgacatctcaataggcagtgcccggtctgtatttgactatttctccaaggaactagcaggaacaaagtctgattctcgaatgtgggaaaacttgttggagcaagaacatgttgagcgagtttcaaatgttcttgaatgcatagaggatgcagacctgcgacggtatcagctacctaacaccaaggaatttcagacagcacttagggatgaacgcgcaaagttaaactgtgtcacaaatcctcatgtttttgaacagcttctacaacttgatgttggcgatctgcttactagggagaaatcgcgtgttcgtggcctcctgcagtctgcaggggcgttcatacagaagcctttcaggattcagcttggaagagggtcatatggtgaatgcttggcaatcagagcagatggacagacacaattgagccatgaaatagctttggagctaagtcagaggagtgctgctgctggactaaggccgattggagcagtggtcttcatgcaacggggtgtcctgaaggtttgcttgaggactactgacagtacagttaatacatcagagattgcaaaggcatatggcggaggtggaaaacgaagttcgagttcattcactctaagaatggatgagttcaacatctggacttcagtgaactcatgaattgaactggagaggtcacatagtgttcatactgtgggaactcgcaaccagctcatctgggcatggattccctcagtggtgaacatgtgaagatggggtggtctttttgtgctccggtatgagaggaaggaaaacaaaatcttagtctaacctaccatattgatatgagcttacaggagaataatctcttcgatatgaatgactggagagcaatttggaggcataatgcttaagccgttcgagagaagatttgatgcctttaaatgaaaggtttgctggtacatcaaaagacgtattttatgctctttctaatctttctccagtagacctatgcgcttaattttagagatgataagggtggtgcgggccgaagatctgtcatactcctaggggccaattatagcttacacttatgttgttattagttttaaatgctgaaaatacatggagatgcttagctcagctcagcttggatataacttggtttctatccaaactagtactttgctccgtagggaatgcatctggcaacggaaattgttaacaagctccagtagcagaaaggatcatcttcaattattgtaatcctgctccttaataatacattcttggatcttgctctgggcttaaaaaa

SEQ ID NO: 124680 - DNA, 1005 bp, Zea Mays
aaatctttaattatctccactctccacttctcctgttctccagcagtccagtgccattcttccgtgtcgtcttctccaggtgtgaggtgtgtcgcggtggcttcagccttcgattactctctataagctgggagtttcatcgatcatcatcagttcgtcaccatgagattgccgtggccgtggcggcggaagcccgcgccgcagcatgatgatgtgccggtggcggtgagcacccacctccacgtcgcagccggtgacgacgacgacgacgacaacggcgttgactccgagtccacggcgtcgtcggagcgcagccacctcacgcttccggtggaggagccggtccacgtccacgacgaggctgatccccaggacggggtccacgctcactacgaggtggctggttccgtttcggatgaggacacactgagcggcagcggcagcgacagcgatccgaacggcgccgggcaccggtcgagagcagccaagagacaccacaacccaagaggggggaggaggcggcgatctgcccgagtgccggcgttcacggtcgctggcaccgccgcggcggtcatgctgctcgtgctcgcggtgctcgtcgcctggaagaggaggcagcgcgccgccggctgctagctggatggcgcgcagttactgcggtaacgttcttatatgtggtgtggacgtgtggctgccgtacggtacgagcagtgtgtacgtgggcccgggcgtgtaaaaattcaacggtgaacttttctttactgtacttttttttgttggagagtgggcttctcatagcgtgtttggttttagagactaatttttagtctctctattttattatattttaatctttaaattgataaatacaaaaactaagatagagttttagtttccgtttttaataatttatagcctaaatttttataaattggagggactaaaaattaatccctataaactaaacaccccctcaagctataaaccgatttgcagaatcaaaga

SEQ ID NO: 124681 - DNA, 965 bp, Zea Mays
atgtcaagcatctccttcccttccttgccccccatccttccccatcgccctcctccccctacaatctgaccaccttcctccaatctcctcgccatcgaagacctccacggggacctctacaggtctatctccgcgctctaccttgccggctgctgcagggtctcctggagttctttgcctcgacagattggtaccacccggggctcgacatcaagcgccgctgcggcgagcacctcgacccacaattaatgaaccccttcgtcagagtgcccttccgtggcgtcaagccggagttctgagatgggatctggtctcgcgtcgcacccgaagagctcgatatcaagcgctgtagcggcaagcacctccacctgcagctatggaaccctttcgtcaatgtgaccaggtccttccctggcgtcaagcgagagttctaagatgcgatgtggtcccacctcgctacccttccccaatggccacattacatgttggctcctggctgacctccgtaccatgcagctcccttgcgtggtcgcgcgtgaacattgtcgcttcgctcccggatccttatctggggattgcagctacttcagatacatgactactaggctatacaatctgaatctgtattgaacatgactaggtcgctcacactgctcagttctaccgaactgatgatactatacacctcttacaaatcttacaaaaacagccttagtagctgccttctagttatttcaatgtcgacatctcaagtaaaggatgacggtgccttagctagcagaaaagaaagaaaaaagcatgtaagttctttactaaaagtatagtttttattagttttctcaattgagattcttttctgctatgtatgtgtgtttatgtttcgtcttatttacctttttgggaagaaggtagttcaactataaatggtcgagcagatcaaacaagataactcctcttttacacca

SEQ ID NO: 124682 - DNA, 839 bp, Zea Mays
atgtcaagcatctccttcccttccttgccccccatccttccccatcgccctcctccccctacaatctgaccaccttcctccaatctcctcgccatcgaagacctccacggggacctctacaggtctatctccgcgctctaccttgccggctgctgcagggtctcctggagttctttgcctcgacagattggtaccacccggggctcgacatcaagcgccgctgcggcgagcacctcgacccacaattaatgaaccccttcgtcagagtgcccttccgtggcgtcaagccggagttctgagatgggatctggtctcgcgtcgcacccgaagagctcgatatcaagcgctgtagcggcaagcacctccacctgcagctatggaaccctttcgtcaatgtgaccaggtccttccctggcgtcaagcgagagttctaagatgcgatgtggtcccacctcgctacccttccccaatggccacattacatgttggctcctggctgacctccgtaccatgcagctcccttgcgtggtcgcgcgtgaacattgtcgcttcgctcccggatccttatctggggattgcagctacttcagatacatgactactaggttcatactctcatctccctgtccaggatttgtattagcttcgtttcttcaattgttgcaggaaggtgtctgattcgagcgcatatttgaggatttgtggattgtgctgttgtatttgttcgctgttgttcatgttcaggtttaggatcgtagttttattgtcacttttttgtgagcccgaacgcatttaccaaaaatttatttcaataagcgttgccttatgttatttctcta

SEQ ID NO: 124683 - DNA, 1519 bp, Zea Mays
ctaccgtctgcgtctgcccgtcttcctctctctctctctctcctctccctcattctggatccaccgccgcagccttagctgggtccgtcgctgtcgctccgcctcccgctcgcttgccgggcccgacacgcccgccaccgcctccgctttgtctctccggcgatccgacgccccacccggcgtctgtgcagagcagtcgtgaggagttctctgttgtgggctgcccggcgatggaccggggcgagcgtctcggccgcgcgctggacgccttcgggggcaacctgtgggcgctggttgacgcagcgctggacgcggccgctcgcgaccgccccgacgagcttcgcgcgcgccgcgatagcatcgtcgagcgcctctacgctgccgccgcgggctgtagcaactgcgccgggcgtccgccgtctgttgccgctttagcggccgcggggctggaggaagaggacggcgaggaggcggctccggcttctccgtgggcggaggctgacgcgcaagccggtggcgcggaggcacagaccgaggtgctcggcgccggcgagcctgatctcgagagcaagatcgtggccatcagggacttcttggaggaccctaatcagcccgagaacgagctggtgagcttgctgcagaacctggcagacatggatgttacctacaacgcactccaggagactgacatcgggcggcaggttaatggtctgcgcaagcatccttcggccgaggtcaggcggctggtgaagcagctcatcaggaagtggaaggagatagtggacgactgggtgcgcctggacaattccggcggtgacggcagtgcctctgttatgacagctgatggtgactccccacataaaatccaaggcagaagccaccaaagccctcgggtttcggggtttcagtattctccaagcccacagaggtttaatggttcaacttcagagatggctaacaatgggtttgagtcaacaatggatgcgaagcgtagggccagccctgtaccagcacatcataactccaggcagatgaacaacaatcatcattctactactattaccaccagcacgtcatctgctccagctaaagtgacaagggagcaaaagcagagtcttgtggaccttgacaggcttgattctgccaggaagaggctccaggagaattaccaagaagcacaaaatgccaaaaagcagaggacaatccaagtgatggacatcaatgacataccaaagccgaagagcagaaacgctttcatccgcaagagcggcagcggtgggctcccggcgaggcaccgatagcctaacctccttcgtcggctggatatctgcgacacttgcgaagttgtgccctagaaccgcaacgggaaagaaaaagaagcaaacggtttcttgttctttttttccctgtaccttgactgcctaggtttacctccagtgtaatattgtcaggtacataagggtgaaatgatatgatgtttctcgaggaaaaagaaagaaattagtcactgtttttgcta

SEQ ID NO: 124684 - DNA, 1516 bp, Zea Mays
ctaccgtctgcgtctgcccgtcttcctctctctctctctctcctctccctcattctggatccaccgccgcagccttagctgggtccgtcgctgtcgctccgcctcccgctcgcttgccgggcccgacacgcccgccaccgcctccgctttgtctctccggcgatccgacgccccacccggcgtctgtgcagagcagtcgtgaggagttctctgttgtgggctgcccggcgatggaccggggcgagcgtctcggccgcgcgctggacgccttcgggggcaacctgtgggcgctggttgacgcagcgctggacgcggccgctcgcgaccgccccgacgagcttcgcgcgcgccgcgatagcatcgtcgagcgcctctacgctgccgccgcgggctgtagcaactgcgccgggcgtccgccgtctgttgccgctttagcggccgcggggctggaggaagaggacggcgaggaggcggctccggcttctccgtgggcggaggctgacgcgcaagccggtggcgcggaggcacagaccgaggtgctcggcgccggcgagcctgatctcgagagcaagatcgtggccatcagggacttcttggaggaccctaatcagcccgagaacgagctggtgagcttgctgcagaacctggcagacatggatgttacctacaacgcactccaggagactgacatcgggcggcaggttaatggtctgcgcaagcatccttcggccgaggtcaggcggctggtgaagcagctcatcaggaagtggaaggagatagtggacgactgggtgcgcctggacaattccggcggtgacggcagtgcctctgttatgactgatggtgactccccacataaaatccaaggcagaagccaccaaagccctcgggtttcggggtttcagtattctccaagcccacagaggtttaatggttcaacttcagagatggctaacaatgggtttgagtcaacaatggatgcgaagcgtagggccagccctgtaccagcacatcataactccaggcagatgaacaacaatcatcattctactactattaccaccagcacgtcatctgctccagctaaagtgacaagggagcaaaagcagagtcttgtggaccttgacaggcttgattctgccaggaagaggctccaggagaattaccaagaagcacaaaatgccaaaaagcagaggacaatccaagtgatggacatcaatgacataccaaagccgaagagcagaaacgctttcatccgcaagagcggcagcggtgggctcccggcgaggcaccgatagcctaacctccttcgtcggctggatatctgcgacacttgcgaagttgtgccctagaaccgcaacgggaaagaaaaagaagcaaacggtttcttgttctttttttccctgtaccttgactgcctaggtttacctccagtgtaatattgtcaggtacataagggtgaaatgatatgatgtttctcgaggaaaaagaaagaaattagtcactgtttttgcta

SEQ ID NO: 124685 - DNA, 112 bp, Zea Mays
tctggttctagatctcacattccaaattaaatgcaacagaaagaaaattaaactacttaagtacacaaaagttctctatgacttaaccaacacaaccacgacatcacgagta

SEQ ID NO: 124686 - DNA, 2241 bp, Zea Mays
atggacaggatccccgtcgcgccgctcaagtccagcagcttctcgacggccacctcccgcgaagagaagctcgcccgcaacttctccctcggccctattaagctcaccgaacatatcaaggaggcgcagaaggagaatgccggcgggcccgacgccgtgccggaggaggccgcggagccggacctcgccgccctgtcggcggagatcgacgcgttccttgcggctcccagggacggtgacgcaccgcccgccgtctcagaggtgacgctggacaagttcgcaagcgccgtcgagcaggagattgcgcagtcggagggcacggacgacaagtgggcgccgaacgaggccggggatgcgccgccgctcctcgccgcgatcaggcggctagccgcgctcgcgtccacgctcacagcggacaacgcgccgggcggcgccaccacgtacaccatcggggtgcaccgcatcacgggcgtgctgcaccgtgccatgacgttcgtggaggatgagttccatgggacactcgaggacccccgtgtcgccaaagtggcgccccaggccaccgacacgggcagcgccacaggcaagtccttgaagcggccgccgtcattcgggcacggcgccgagctcgaccgctgcgtcgtcccgaccctcatcgccgacgcctcgccgccgttccctcccgagaccgtgggccggctccgcgccatggtggaggccatgttcgccgcggggtacgagacggagtgcacgcaggtgttcttgatagcgcgccggaacgcgctggatgcgtcgctgcagagcctcgggtacgagaaggcgagcatcgacgacgtggtgaagatgccctgggaggcgctggagtcggagatcgccacgtggataaaggcgttccagcacaccgtcgaggtggacctccccggcgagcgcgacctgtgcgcccgcgtcttcgccggcgggcaaaggtgcctagggcgcgacatcttcgcggacctcgcgcactgcgccatactgcacatgctcaccttcacggaggccgtggtgctgacgaagcgcgccgcggagaagctcttcaaggtgctggacatgtacgaggccatccgcgacgccgtgccccgggtggacgcgttcctcgtcccggacgatgacggcggcgagcgtggcccttccccagctgacgaagacggcggtagcagcgcgtccagcgccctggttgacctcaagcacgagctgtcctccgtgcgcacccgcctgggtgagtcggcggcggccatcttctgcgacctggagggttccatccgcgcggacgccgggaagcagccggtgcccggcggcgcggtgcacccgctgaccccggtacctgatgaactacctcaagtacgcgtgcgagtacaagaagacactggagcaggtgttccaggagtaccggcgcaccgacgacgacgcggagcacgaagtcggcggggacccgtttgcggcacagctgatggaggtgatggagctgctgcacggcaacctggaggccaagtcgcggctgtacaaggacccgtcgttgagcagcatcttccttatgaacaacgggcggtacatgctgcagaagattcgtggctcgccggagattaacgccgtggtaggcgaggcgtggtcgcgaaagcggtcgacggacctgcggcagtaccacaagaactaccagcgggagacgtggagccgcgtgctcaacctgctgcgtgacgatggcgtgatcaccgtgaagagccacgtgcagaagcaggtgctcaaggaccggttcaagcaattcaatgccgccatagacgagatccagcggacgcaggggagctgggtggtgagcgacgagcagctgcagtcggagctccgcgtatccatcgccgccgtcatcgtgccggcgtaccggtccttcctgggaaggttctcgcagcacttcactgcggggaggcaggcggagaaatacgtcaagctcagtggcgaggacctggaggccatcatcgaggagctctttgacggcaacgccgtgtccatgccgaggagaaggacgtaattaacaaggaaccgccgccccgtgctactaatttggtttttaaagccattgtcacagtatctttttttcttctgtttttcttaattctgattgttcttgagagttgatcttctgcatagctcttgctcaatcacgtcagatagttgtgtaatcgtcgattaatcaatacatatacatgttcatatata

SEQ ID NO: 124687 - DNA, 138 bp, Zea Mays
atgaagccattatataggcaaaacagccactatattggcaagtcgacgactagtcgactgatttatcgactagtcaccaagtcggtaccttgtcgactcgactcgacttatcgacttgaaaaccttgatttccatggt

SEQ ID NO: 124688 - DNA, 702 bp, Zea Mays
gtttggcctatcatcaaaatggattttatgtcagccttgaagaaagtttggcagggggatgcttctagattatatctgctcaactcagcctatgttactttgttgccaaagaagagtgaggccgttgaggtgaaggatttcaggccaataagcctaattcacagttttgcaaaaattgttaccaagattttggctaatagacttgctcctaagttccctgacttggtctctgtgaatcaaagtgcgtttgtgaaaggtagaagtatacatgataattttgtcatggtgcagcaaacagccaaggctatttatgggcaaaaaatgtctagaatcttattgaagttggacattggaaaggcttttgactctgtctcttggaccttcctttttgaggttcttagacatttgggttttggtcctctgtggtgtggaatagtctcaagggtcctgagttcttccactactagggtcttggttaatggagagcctggggatattattcatcacagaagaggtcttaggcagggggaccccctgtcccctatgctctttatcattgttatggatgtcctcaactcgctgatactgaaggcgcaagatctgggtttgttgcaacctcttctaaggcgcggtaggagccaacgcatttccttatatgcagacgatgtggtgctgtttttaaagcctgaaatagatgagctc

SEQ ID NO: 124689 - DNA, 249 bp, Zea Mays
atgcctcgggaagatttacgcctcattcgagctagggctctgatctcgatgaacgcagtagggaatctcaatgtcatcccgtgcaaggacgccgacgcacctcataagcagtctttagccaagaccccagcgctgttacaacaactacggcatgggaagcctctccctcgggggcttaggcgtatggacgacccctctgccttggcctcggctctctacgggaaaccagcgggcgcaagtcaacaataa

SEQ ID NO: 124690 - DNA, 2421 bp, Zea Mays
agacttgaacaaggcggcctccggtcttcccacttccacacgagaaggaaacgaccacctcctttcctgtgtcccgaatcgggagtagtagtagtagtgcatccaatcgacacacacacaaaaaaaaaggttagttagccatggcgccgccaacagaggactgcggctggctgctgtacctttccctggccgccaaatgcggcgaccctcagcgcctgctcggcttcgccgcggtcttcgtcgcggcctgcgtagtcacgtcgctcctgcactgggcgtccccgggcggccccgcctgggggtggtactggtggaccaggcgggccgggctgggcatcgtccgtgccgccatcccgggaccccggggcctgccggtggtcggcagcatgggcctgatgaccggcctggcgcaccgcaagctctcggcggcggccgagagacaggccagcaggcgccgcctcatggcgttctcgcttggcgagacccgggtggtggtcaccgccgaccccgacgtcgcgcgggagctgctcgccagcgccgccttcgccgaccgccccgtcaaggagtccgcgtacgggctcctgttccaccgcgccatcggctttgccccgcacggcgcctactggcgcgcgctccggcgcgtcgcgtccgcgcacctcttctcgccgcgccagatcgcggcctccgcggcgcagcgcgcggccatcgcgcgccagatggtggacgccacgacgaccgccgcggcccacgcccccgtcgtcgtggcgcgccggttcctgaagcgcgcgtcgctgcacaacgtcatgtggtcggtgttcggccgcaggtacgacctgatggcggacagccgggaggccgaggagctcaaggccctggtagacgaaggctacgacctgcttgggcagctcaactggtccgaccacctcccgtggctcgcccgcttcgacctgcagaagacccgggccaggtgctgcgcgctcgtcccgcgggtgaaccgcttcgttggcaacatcatcggcgagcaccgtgcccgcctcggccgcggcgtcgacaccgccgtcatggacttcacggacgtcctgctctccctccagggcgacgacaagctctccgacgccgacatgatcgccgttctgtgggagatgatcttccgaggcacggacacggtggcagtcctgatcgagtgggtgctggcccgtctggtgctgcaccaggacgtgcagagcaaggtccaggaggagctggaccgggtggtcgggctgggccaggccgtgacggagtcggacacggcctcgctgccctacctccaggcggtcatcaaggaagtgctacgcctgcacccgccaggcccactgctctcctgggcgcgcctcgccacctcagacgtgcacgtaggcgggtaccttgtgcccgcgggcaccaccgccatggtgaacatgtgggccataacccatgaccccagcctgtggcctgagccaatggagttcaggcccgagaggttcatgggccctgccgccgaggacgtcccgataatgggttcggatctccggctcgcgcctttcgggtccggcaggcggagctgccccggcaagtcactcgcggtggctaccgtcggattctgggtcgccaccctgctgtacgagttcaaatggctgccgccgtccgacgagccacgcggcggcggcgtcgacctatccgaagtgctgaggctgtcgtgtgagatggctgcaccgctggaggcgagggtggtgccacgtcacgcggtgtgctgagggggctgagacacgtggcctgcaggggtggggatcagaggaggaaagctcgaccgatcgtcttctagcttctactactacgtaataccttaccttgtagcagaacgtaacgtggtcgatatgagatgtgtaaagaaagaaaaaaaaagaacgcccagttgcaccatgcatgctagctgctggtgtggagtcagtacgtagtagcagcacccggtttgatcgatgcttatgtgtgtaatgtaatacctacctgcagttgcaagtaaatgtgtgcctgttattagtctagctaggtagtgtagtgtagtgtaccggatggtgagcgagcgtgacagttacctttccttttcagtactgcctagctagctagacctagatgtattattatatattgtgtactcccttcttacgtacgtgcgttccataataaatgtattctgtagttgtctttttctactatttctttatttcgttccagagtacaatattttttataagagttagtagtaacttgtatgctaggagcatatataatatatttctattaaaatatataggcctaatgcaagcgtgcgtacgcgcgtgtaagcgtgttggtggataaatgtgcgcgcgtacgtccttgtcgcgagcaaaaataaaacaataa

SEQ ID NO: 124691 - DNA, 1061 bp, Zea Mays
ggtcctttgttgggttaccagcccaacggtgcatctcgattgccgactgcgggtgaagcagaagcaccggccgggtgaccgccgccgccggccgtttcgattcatttgcgggccgctgcgcgtccctcatacctcaccgccggcgccgcgccgtcctctcacctatcgccacgcgcgttcccgcccgccccttcgacctccatctactgcctcgcggcgttgcttcccgatgtcgttccgaggtcgtggaagagggggccgagggcgagggagaggtgggggcttcgggtacgaccacccggccaagcacgtgccacacgaggactttccggacatcgctctgcctgagatgaagtgcgccaaggcgagcaacgaggagaaagcgctgattgtgtccaccttgaaactcgaggagttctggaggagttcctgctactacctggaggaggatgctcccaagaaaaagaatgaagacaaagagattgaaagattttctgataggaaacgtaagacacaaagcaaacgtgaaggtcttgcgtcatatctcaaactagctccttcaaatttcccttctgaactggtgcaaggatctagaagagggcaagcaaccaacaagaaactccggtgggataaggagtcagatgagcaggcatttgaagcatttgagaagcttgaacaaaagcacaaggatggaagcaaggtggagaaggaaggtgatgacgaggatgagcaagaagaggaagtacaagaggaggaggaaaattcagacgatgactataatcaaaatatcgagtttgatgacgatgatgatgactggaaccaagaggatgaagcacaggaagacttctacgattaattatggatgagcatattttttctccttttttcctctccttttcacttgtgacttcacccagcaaaattattagagagcaatctttattctggtatttctagtcacgatggtcacgtgctttgttagaaactcaggaatatcagaacagtgaaagacgacgttgctaacttgcattactacgcatgacttcagacagccactaata

SEQ ID NO: 124692 - DNA, 477 bp, Zea Mays
atggggaactcggctagggggcggtctggtcgttcgccatgggtgggcacaggggctgcactcgatcggctcagtctgatgctgtatcctaggggtcgcaccctggccgactcgactgctggctcgggctcgcgcacgcacgggagaagaggaggggacgagggggccacggctagggactactcactggagggcacagggacaggggcggcttggttgcgcccatgctgctggccgtcgtgcccaggccaccgagctgctaggccaccgcgctggcgcacgcaagggcgggggaaactcttgccgagacccaagggaaacgagcggttcgtcgggcggcgttgcagcggcaccggcggagcatggggcagggacgggtgtgagacgaggtggggagaggagaatgggcctgttctaggctcttgggcggtttgtttttgcgacgtgggtgctagagggtggggagagatggtttga

SEQ ID NO: 124693 - DNA, 249 bp, Zea Mays
ttttttactacccgaacagactatattaccctcactctctgttttgttgcagaattacctcgctctctgcaactatttcctaaggctttgtttggttatagtgggattgaagtggattgaggtgtattgaaggggattgaaatatattagatcatattacactccaatacaccatataccacctcaatccacttcaatatcagattatccaaacaagtcctaaaagagttctgatatcaccaatccatc

SEQ ID NO: 124694 - DNA, 3865 bp, Zea Mays
cgcagacacgccaaaattctagggaacccccactacgcctgcacgcgcccactagctagccaccttagatcggtcgatacagctagctatacccgctagctgcacctctcgctgccgccgcccggccgggccgcgcgagaccgctcaaaattcgcgcgcaccgccacgcggcgcggacatgctgcgggcggcggggagcagctagcaggtagccgagcacggcagggcgacccggcgcgcgatccgccgctgcccgcgtgggcggccgcctatggatctggccgcatggcgggcttccctctaggcggaggaggccacggccgcggcgaccaccaccaccctcacgtgaacccttcctccggctccggctccgactccgcggccgccgcctacctctacacggccgccgccgcgccgcgcggcggcttccagctatggccgcctcacccggcgcaggagcaccaccaccacttctacgcccccaacataatccgcttcgccgatgaccccgccgcgggctcctcgcgcggcggcaggggctccgccagcggcgccggcgcgggcaccatcagctgccaggactgcggcaaccaggccaagaaggactgcgtccacatgcgctgccgcacctgctgcaagagccggggcttcgactgccccacccatgtcaagtccacctgggtgcccgccgccaagcgccgggagcgccagcagcagcaggccaccggcgccgccgagccctccaagcgccaccgtgacgccgctaccggtgcccagccctcctctaccaccgccacaaccacttcctcgggtgagcagcagcagatggcggtggtggcggagcggttcccgcgggaagtgagctcggaggcgctgttccgctgcgtccgcctgggcccggtcgacgagcccgacgccgaggtggcgtaccagaccagcgtcagcatcgccggccacgtcttcaagggcatcctgcacgacgtcggcccggagccgtcgacggtcgctgcgggcggcggcttccgccacgccaccgaggggtcctcccctagcacggccgcggcgggcgaaggcagcgtcgtggggcccgtctcgtcatcggctgtggtcatggacccgtacccgacgcccggcccgtacggcgccgctcatttcttccacggccatccgaggtgatgatcaaacggccaccatgattgacacggctagctagcctagctgatgggtttcgttctctttggacatgccatgcatctttccatccactgcttcaatatttgctttactggagggattatcgatcgtcaccaaattgttactagtagtttttatttgtctccgtcctccatccctcttctctcttacattctcaatgatcgatgcataaactgatgagcaccattcatcactgtttctttcggatcagttcttactgtcgcagtagctagcccatcaggttgttgctagaagtaaatataaagcttggagtagctagctaggaaactgtgttcatcatgattcaaagtttaaaacctgacagttaggtaatcttgattgatgctcttgtcattgcttcttcatcctttcatctttgttcaatggtcgtgatgatgctgtccccctggtggtgtcaggaagatatatagaatgttggggcttaagaaggcttcttcgcatatttgctcaagtatatacagtactactgccctcttccttctactactcctgtgtgtgtgtcacacctttgcagctttgctttagcttttctcttcaaaagctgaaccctagtttcctagctagtggcaactgctagatgattcttagttggaaaatttggtagtatgaatgataggagtacctgtgtatgtcatggtcggtagagagagggggagtgagaggagagtggagagaggagagataaatgatttcttccagtcatcatatgctcaaggaagaaggcaggtggagtcagatatctatgtctcgagaagaatcaaatgacgagacgcttggggagaaaaaaaagaataatgctagtcactatgcgcttgtaccagttctgattagagcgttaccgatgtttcctagtttggtatttggaaacagcttctccactgtgggactgggatcccaacctatattccgatccatcatatttcatcacatctccaatccaattgccattgccagtgtcatttcaaccagttacattttctatacgcagttgcacttgttgaagttctgtcagcacataactaattaatttagtacataatgtaattgtaataatattatcatggcccaaaaagccatgctggtcattctctctttttcctgaaatcatgggagattcaaatatctgggaacgtcgttctcccttttccacattttttttcctgtttttttaggattagtggagttaactgaaaaaaaatcaaagtcaaacattgttttgatacaccactaaaaagattgcaaacattgttctcgatacacaccaccactaaacattgtgatattatttttaccttgcaatgttttgaaaacattacattttgccttcagtttcctaaaaaacatattcttagtacaatgacggcaatcaagtattattggtctctcaggctctaccttgcaccgcaaatatgcgtagtgtagagtatttgtgagaactcaatcatcatacgattatttaatgtgtatggttaaccgatttgcatatgcaataatactgataaaatttcaaacttcatcaacaaaagattcattatgtttgattaaggacttactgcttcaaaataatgtgtatttctgtatgtgctatatttatgtttttgatgatatggtattgtgtgcatatatatacatctgaactatatttatttttttctacatttgcatggcatcaatgtctgattatgggttgttcattatgaataaaaaggttagcgcgggtgtgccctactttaagatagtatttgtcttcttaggattttagaactgctggtagtagatgtatttattttcctttccaaggttaccaatgcaacgttgaatgttctgaaaattgtcttcgttaatgctcttgcagtataaaagcttatagtctagaattctctgacatgggcattttcccttctgttgatactatgcatttgttgcgttattaatatgcggtattgaacttgtagataggtcggatttgtatgaagatagctgcgttaacctattattctcagctttgctaagaagataatattaattttcaaaaggctgcaactttttggcgagattcgttccaatttaataagcgcaattgctcccatatatttatttggactacctagattcaattggttctaaaacacgtactggaacttgatagtacagctgctcccttaatttacaggagatatatatatgaatttagaggttgtttggtttttgtgaactaatttttaggcactcgattttattctatttttaggtcctaaattacccgatacgaaaactaagaactttattttagtttccatatttagtaatttaataactaaaattaaataaaattgagggactaaaaaatagtccctgaaaactaaacaccctcttagtttgatgagccttctatatatattcaatgctaaaaaaacttagagatgttttatgttttgtgacacacactgtagtgtgcttatgtttacatttctgtcaaattgatggtcgtcgattgtgtttactgctggtggtctataattttaagaaacactgacaggaacatgaagcaatagtttggacaagacattatttgacctccaggcacactatggtggccgacctttatttcgctatcctgttaatattt

SEQ ID NO: 124695 - DNA, 1546 bp, Zea Mays
cgcagacacgccaaaattctagggaacccccactacgcctgcacgcgcccactagctagccaccttagatcggtcgatacagctagctatacccgctagctgcacctctcgctgccgccgcccggccgggccgcgcgagaccgctcaaaattcgcgcgcaccgccacgcggcgcggacatgctgcgggcggcggggagcagctagcaggtagccgagcacggcagggcgacccggcgcgcgatccgccgctgcccgcgtgggcggccgcctatggatctggccgcatggcgggcttccctctaggcggaggaggccacggccgcggcgaccaccaccaccctcacgtgaacccttcctccggctccggctccgactccgcggccgccgcctacctctacacggccgccgccgcgccgcgcggcggcttccagctatggccgcctcacccggcgcaggagcaccaccaccacttctacgcccccaacataatccgcttcgccgatgaccccgccgcgggctcctcgcgcggcggcaggggctccgccagcggcgccggcgcgggcaccatcagctgccaggactgcggcaaccaggccaagaaggactgcgtccacatgcgctgccgcacctgctgcaagagccggggcttcgactgccccacccatgtcaagtccacctgggtgcccgccgccaagcgccgggagcgccagcagcagcaggccaccggcgccgccgagccctccaagcgccaccgtgacgccgctaccggtgcccagccctcctctaccaccgccacaaccacttcctcgggtgagcagcagcagatggcggtggtggcggagcggttcccgcgggaagtgagctcggaggcgctgttccgctgcgtccgcctgggcccggtcgacgagcccgacgccgaggtggcgtaccagaccagcgtcagcatcgccggccacgtcttcaagggcatcctgcacgacgtcggcccggagccgtcgacggtcgctgcgggcggcggcttccgccacgccaccgaggggtcctcccctagcacggccgcggcgggcgaaggcagcgtcgtggggcccgtctcgtcatcggctgtggtcatggacccgtacccgacgcccggcccgtacggcgccgctcatttcttccacggccatccgaggtgatgatcaaacggccaccatgattgacacggctagctagcctagctgatgggtttcgttctctttggacatgccatgcatctttccatccactgcttcaatatttgctttactggagggattatcgatcgtcaccaaattgttactagtagtttttatttgtctccgtcctccatccctcttctctcttacattctcaatgatcgatgcataaactgatgagcaccattcatcactgtttctttcggatcagttcttactgtcgcagtagctagcccatcaggttgttgctagaagtaaatataaagcttggagtagctagctaggaaactgtgttcatcatgattcaaagtttaaaacctgacagttaggt

SEQ ID NO: 124696 - DNA, 795 bp, Zea Mays
atggggagacagccgtgctgtgataagcagggggtgaagcgagggccatggacagcggaggaggacaagaagctcattagcttcatcctgacacacggccagtgctgctggcgggcagtgcctaaattggcagggctgcttcgttgcggcaagagctgccgtctgcggtggactaactaccttcgccctgacctcaagcgtggcctactcagcactgccgaggagcagctcgtcattgacctccatgccatgctcggaaacagatggtccaagatcgctgccaagttacctgggagaacagacaacgagatcaagaaccactggaacacgcacatcaagaagaagctcgtcaagatgggcatcgacccagccacgcaccagcctctagccaactcgaaggaggctgcttcctcgcagtccactgttacagatgaatctgctaaaaccagcaactccagagaggagctgagcttgaagaatgatggtagccgtagggaggctccactgtccaccgattcgtcggagcagtccagctggccagagtcaggctcaggcagcaacgtctgtgatcaaggccctgaactgctggagaactggctctcggagactggcctgtcgatggatgagccatggctggattttacgagcagaaacgacgagcttggcaatgtcgaggggacgttgccgtgggatggaacaaccgactggctgctggactaccaagattttggcatgtgcagctcgaactcagtcgacaattcagtgttccatgcctcaaacggatcgaacttctaa

SEQ ID NO: 124697 - DNA, 276 bp, Zea Mays
atggttcatatcttctgctcccttttcagaactgaaagacaagcccatggaacgctacttaataagcatgttgaggatacaaatcttgtttctgttttcctattagaattggttcatgacgttttctgtttgaagaaactcgtcttccttttcaactcatcaatccagcttgcatttacactcattttccacattctgaagcttcctgtgaatgtcatttttctcctcttattcaacagaaatcacatccatcaattcctggatctcattttcatc

SEQ ID NO: 124698 - DNA, 214 bp, Zea Mays
gggtccaaatatggaattatttcatctgaggataggttatggcgccgagatgtgcaatttcgatgtcgtgtgccatggtgctgacctaggatacaaagatgggattagttcctctaggggtctgttatggcgttcggctccatgcgccaatgatgttgaacctgggaggccaaagatagaattaatttctctgagatataaatatgatttttaa

SEQ ID NO: 124699 - DNA, 1329 bp, Zea Mays
gtttccgttccagtccacgtccacccacacccagagccacccaacctggccagtggccaccaaccttcgtcatctcctcacaccgcgaccaaccaaccaaccgcctagaaaaagaaagccccgcgcccactcgctgccttctcaaatccaaacgcgaagtagcaacaagcaaaagcccagatcgataatacgatggggcggtcgccgtgctgcgagaaggcgcacaccaacaggggcgcgtggaccaaggaggaggacgagcggctggtggcctacgtccgcgcgcacggcgaagggtgctggcgctcgctgcccagggcggcgggcctgctgcgctgcggcaagagctgccgcctgcgctggatcaactacctccgcccggacctcaagcgcggcaacttcaccgccgacgaggacgacctcatcgtcaagctgcacagcctcctcgggaacaagtggtcgctcatcgccgcgcggctcccggggcggacggacaacgagatcaagaactactggaacacgcacatccggcgcaagctgctgggcagcggcatcgaccccgtcacgcaccgccgcgtcgcggggggcgccgcgaccaccatctcgttccagcccagccccaacaccgccgtcgccgccgccgcagaaacagcagcgcaggcgccgatcaaggccgaggagacggcggccgtcaaggcgcccaggtgccccgacctcaacctggacctctgcatcagcccgccgtgccagcatgaggacgacggcgaggaggaggaggaggagctggacctcatcaagcccgccgtcgtcaagcgggaggcgctgcaggccggccacggccacggccacggcctctgcctcggctgcggcctgggcggacagaagggagcggccgggtgcagctgcagcaacgggcaccacttcctggggctcaggaccagcgtgctcgacttcagaggcctggagatgaagtgaacgaaacgaagcccacacgtcctttcttctccttttgttgtcggttttagtcttggcttgttggatttggatagagctagttggttactagttgttagttagaagatagtgcaggatgatcactagctactggctacctcaacacagtagctgctcccttcttctcttccattctatgtaaaaaagaaacaaaaatacttagtacctggttgatgaactttaggaataatcatgtgtactttcttctgactccgggttgcttcccggattctttgtgttgtaatgtaactactactactacaagtagtaggaaaagacaaggaaagagcaagggggacagttagcgtggtgaag

SEQ ID NO: 124700 - DNA, 712 bp, Zea Mays
atgacggatccacaaaacaaggtgtcgcgtgttcctttgcttgtcacaactacatcatcatacacgttcaggaccaaagaggcagagtaccatcaatcagtcttgagggaacaattggagtaccagaggcaacaatctgaataccagagacaacaagccgagtaccagaagaagagggacgagtattatgcaagcctccaggcccaaaatcaagctcttctctcgcaactagcccaacaagcgggcgtcccgatgccgacatatgggatgccgcctccggactttgcactgccaatgccaatgttggcgcctccacctccgcctccgcctccgtcacaattccctatgggatttcagacaccactcgcttcagttgccgcacctggagatgggtctggtcaagacgacacaacacattcgtgggtgaacaaccttttcaacacgcagagtccagccggaggaggtggctactcgaaccatccagacgatggatatgattgatgtgtcgtgatgtttatttatgaaacactttgcaacacttgtttgtgagacacaatttcagtttgcaacaaccgtcgaacctatatgttggtcgaacctatatgttgatgttaaatttgtgaatgttaatatttatgtgagaatatttgtgattgtgaatacttattagaatgtgtatatttgtgattgtgaatgtgaatgtgtatatgtg

SEQ ID NO: 124701 - DNA, 1630 bp, Zea Mays
caactggaggccaatagaatcgctcgcttgcgttatcttgttcgcctcgtcagttgttgtttcctcccttcccatcccccactgctcagcagtcagtcagcactcgccacccacacgcctccgctccgcccacggttccactccaactctccgatctccaggaatccgcggctgaggcgccggcgatggcggctcccatggtcgacgccgaatacctgcgccaggtcgacagggcgcgccgccacctccgcgccctcatctccaacaagggatgcgccccgatcatgctccgcctcgcatggcatgatgctggaacttatgacctgaagacaaaaactggtggtgcaaatggttcgattagatatgaagaagagtacactcatggttcaaatgctggtttaaagattgctatcgatctccttgagcctatcaaagcaaagaatccaaagataacatatgcagacctgtatcagcttgctggagtggttgcagtcgaagtgactggggggccaactgttgaatttattcctggcagacgtgattcgtcggtgtgcccccgtgaagggcgtctgccagatgctaagaaaggtgcaccacatctgagggacatcttttatcggatgggcttatcggacaaagatattgtagctctatcagggggacatactctgggaagggctcaccctgagaggtctggattcgatggtgcctggacaaaggagcctcttaagtttgataactcatactttcttgagctgttgaatgaggaatctgagggacttttaaagctcccaactgacaaggcactgttatcagatcctgaatttaggcgctatgtggagctctatgcaaaggatgaagatgcgttcttcaaagattatgctgaatcacacaagaaactctctgagcttggcttcacgcctcgcagcacagcaccatccaaatcagatcttccaaccgccgccgtgcttgcacagagtgcctttggggtagcagttgctgcagccgtagttatcgctggctacttgtacgaggcttccaagaaggccaagtagagggcgaagttcttctccacatggctttgctttagtaagtctgaagatcgaataacaggaccatatctgaagatcgaataacggatcatataaatgagttactcggaaaatgttctgaaatccttacgaacagaacgttgccttcatgtttacactgtactcatgagtcacagtgatatggagatggcatagcctactattggaagtatatgcattctgtgtaatctatgcatcggattgcagctggaacttccgtggaaattgacagtgatgtgtcgacataggaactgcgatttggttcaatgaccacgtagagggaatgtactggcgggatccttttatttatagcagatagtgttggtgagggaggcctatgtcgcgttttcttgactgagcaagtacagccgactgctggctataaagatgcttccaacgtacccctctgtcccaatatataattcttttagccttttacttttgtgtctatatttaagtagatgataataaatctaaacacataaataatatacatatactaaatattgtataaatccttaacacccttaactgaatac

SEQ ID NO: 124702 - DNA, 1310 bp, Zea Mays
ctggaggccaatagaatcgctcgcttgcgttatcttgttcgcctcgtcagttgttgtttcctcccttcccatcccccactgctcagcagtcagtcagcactcgccacccacacgcctccgctccgcccacggttccactccaactctccgatctccaggaatccgcggctgaggcgccggcgatggcggctcccatggtcgacgccgaatacctgcgccaggtcgacagggcgcgccgccacctccgcgccctcatctccaacaagggatgcgccccgatcatgctccgcctcgcatggcatgatgctggaacttatgacctgaagacaaaaactggtggtgcaaatggttcgattagatatgaagaagagtgcaccacatctgagggacatcttttatcggatgggcttatcggacaaagatattgtagctctatcagggggacatactctgggaagggctcaccctgagaggtctggattcgatggtgcctggacaaaggagcctcttaagtttgataactcatactttcttgagctgttgaatgaggaatctgagggacttttaaagctcccaactgacaaggcactgttatcagatcctgaatttaggcgctatgtggagctctatgcaaaggatgaagatgcgttcttcaaagattatgctgaatcacacaagaaactctctgagcttggcttcacgcctcgcagcacagcaccatccaaatcagatcttccaaccgccgccgtgcttgcacagagtgcctttggggtagcagttgctgcagccgtagttatcgctggctacttgtacgaggcttccaagaaggccaagtagagggcgaagttcttctccacatggctttgctttagtaagtctgaagatcgaataacaggaccatatctgaagatcgaataacggatcatataaatgagttactcggaaaatgttctgaaatccttacgaacagaacgttgccttcatgtttacactgtactcatgagtcacagtgatatggagatggcatagcctactattggaagtatatgcattctgtgtaatctatgcatcggattgcagctggaacttccgtggaaattgacagtgatgtgtcgacataggaactgcgatttggttcaatgaccacgtagagggaatgtactggcgggatccttttatttatagcagatagtgttggtgagggaggcctatgtcgcgttttcttgactgagcaagtacagccgactgctggctataaagatgcttccaacgtacccctctgtcccaatatataattcttttagcctttt

SEQ ID NO: 124703 - DNA, 868 bp, Zea Mays
cagtataattatttgtttcggatgcgatttcaattggaggggatagtgttggaatctcagtactacagggctgtttggtttgttgccttagctgccacaaaatgcctaacttttatgcctaagcttagttcttaaatttgagcgcctaaggttaggcaaattgtggcaccttaggtaggaaaccaaacaagccctacatctcatggccttgattttggtcacacaacaggtcaaatattcattcttcttcatgttttaactgtactttcttgaattgcaggcaatcaactcaaattctctagccttctccccggtgaggaagggtaacacattcctccgcctgcaaccagtgcctatgagatctgtttcctgcgctgccaagaaggatacggtggacaaggtttgtgaaattgtgaagaagcagcttgctcttcctgaccacactgaagtttgtggtgaatcgaaattctctgaacttggtgcggattcgctggacacggttgagattgtgatgggccttgaggagcacttcgacattagcgtggaggagtccagcgcgcagacaattgccaccgttgaagacgccgctgacctcattgacaagcttgttgctgtgaaggcataggccgcatctcttctatcattgtcttaccactctaggtttctatggtctgaagacttgtgattttctccgcactgctgttgctattcccgtgtcgtaataatacgagatgttttaagcggctgaacacacggtggtgtaatctgttactggtaaggtgcattgttgtatgaattgtttctcacccagaagaaccagaccatcggggattctagcatcatatataagaaatgaaataaaaaaata

SEQ ID NO: 124704 - DNA, 794 bp, Zea Mays
tcacttcggacaggtcactgctctaactccaacctacccagcctcggccagccacctccccgtcgctctcacgctcttcgtgcccgccgcctcccctcttcccctccacctcactcctcccgtctgacgcacatggcatccatcgccggatcttccgctctctccttcgccatgcctgtcaaggcaatcaactcaaattctctagccttctccccggtgaggaagggtaacacattcctccgcctgcaaccagtgcctatgagatctgtttcctgcgctgccaagaaggatacggtggacaaggtttgtgaaattgtgaagaagcagcttgctcttcctgaccacactgaagtttgtggtgaatcgaaattctctgaacttggtgcggattcgctggacacggttgagattgtgatgggccttgaggagcacttcgacattagcgtggaggagtccagcgcgcagacaattgccaccgttgaagacgccgctgacctcattgacaagcttgttgctgtgaaggcataggccgcatctcttctatcattgtcttaccactctaggtttctatggtctgaagacttgtgattttctccgcactgctgttgctattcccgtgtcgtaataatacgagatgttttaagcggctgaacacacggtggtgtaatctgttactggtaaggtgcattgttgtatgaattgtttctcacccagaagaaccagaccatcggggattctagcatcatatatagtgttgaaaagatgagcaaagccgagtgcgttttttttaaatc

SEQ ID NO: 124705 - DNA, 859 bp, Zea Mays
tcacttcggacaggtcactgctctaactccaacctacccagcctcggccagccacctccccgtcgctctcacgctcttcgtgcccgccgcctcccctcttcccctccacctcactcctcccgtctgacgcacatggcatccatcgccggatcttccgctctctccttcgccatgcctgtcaaggcaatcaactcaaattctctagccttctccccggtgaggaagggtaacacattcctccgcctgcaaccagtgcctatgagatctgtttcctgcgctgtgagttttatacttggccttacaatgcacaaatatatttggcgagggttttctgtatcataacaatgctagtgatttacctgagttattgcttctgtgcataattatgacaaagctattgatttcctaaatcaactgtgtctctggatctcaactgaactagtaatctgtatatactatcggtcaagtttcaccaaagctccttattgtttatagaagggctctgttttcttcccttacctttgttctggaagtcaaggaaacttatacgtgctcctagtgttgttgcagtgctcttgatctagcaagataaccatactcccagtgacacctttttcaatatatattctcttatactgcaaacataatgaaatttcaaaatatggattatgacaggccaagaaggatacggtggacaaggtttgtgaaattgtgaagaagcagcttgctcttcctgaccacactgaagtttgtggtgaatcgaaattctctgaacttggtgcggattcgctggacacggtaaatcacaatatttcttttcgctgatgtcatctacatatgtcacttgtaaaatgatttt

SEQ ID NO: 124706 - DNA, 351 bp, Zea Mays
gatccctactacccccactgccaccccgaggacgcttccaagcagctgaccttcactgagttctttgacaacgctcctcagcgcttctattttgcgcggacgagactcaatgcttcctcctccgtgccgccactactccgcccgttccctagcgacgatagcgggttagggtttctgtacctggagccaccacctcctctgtcgtgtcctctgccgcctccaccttatggttggtgctcaggccttcgggacttctgtcggcatcgcgcacccaccaggtattggcgctacacattagcaccaatttttggatggtttgtcataagacactgtgaggaccacttcttttaa

SEQ ID NO: 124707 - DNA, 3014 bp, Zea Mays
ggtctctccccttcccccgttcgctgtcccgacaggtcctccccactcctggagccccggtctaccctccccgtacgcatgcatgtcgacatgtcccaccgcgtccggctcgccgcggcggcgctcgtcgtggtcgccgctctggcgcttgcccccggcgccgcggcggcgtggcagctgacgaagaacggcaccgtggtcagctacgaccgccgctcgctcatcatcgacggccgccgggagatcttcttctccgggtccatccactacccgcggagcccgccggacatgtggccggagctcatcgccaaggccaaggagggcgggctcaacaccatcgagacctatatcttctggaacatccacgagcccgagaagggtcagttcgacttcgaggggcggtacgacattgtgaggttcttcaagctgatccaggagcacaacatgtacgccatggtccggctcgggcccttcatccaggcagaatggaaccatggagggctgccctactggctaagggagatccctgacattgtgttcaggacaaacaacgagccatataagatgcacatggagacgtttgtaaagatcataataaaaaggctcaaggatgccaaccttttcgcgtcacaaggagggcccattattctagcacagattgagaatgagtaccagcatttggaagcggcgttcaaaaatgatggcaccaagtacattaagtgggcagcaaatatggccatctccaccaacgtcggcataccatggatcatgtgcaagcagaccaaagctcctagtgatgtgattcctacctgcaatgggaggaactgtggagatacatggccaggtccaatgaacaagagcatgcccctcttgtggactgagaactggacagcacagtacagagtattcggtgacccaccatcccagcgttctgctgaggacattgcatttgccgtggcgcgcttcttctccgtgggcggtactatgacaaactactacatgtaccatggtggaacaaactttggaaggacatctgctgcctttgtgatgccaaaatactacgacgaggcacctctcgatgaattcggtctgtacaaggagcctaagtggggccatctgagggacctgcacctggcgctgaagctgtgcaagaaggccctgctctgggggaagacatcgacggagaagctgggcaagcagttcgaggcgagggtgttcgagatcccggagcagaaggtgtgcgtggcgttcctctccaaccacaacaccaaggacgacgtgacgctgacgttccggggccagtcctacttcgtgccgcgccactccatcagcatcctcgccgactgcaagaccgtcgtcttcggcacccagcacgtgaacgcgcagcacaaccagaggacgttccacttcgcggaccagacgacgcagaacaacgtgtggcagatgttcgacgaggagaaggtgcccaagtacaagcagtccaagatcaggctgcgcaaggccggcgatctctacaacctcaccaaggacaagaccgactacgtctggtacacctccagcttcaagttggaggcggacgacatgccgatccgccgcgacatcaagacggtgctcgaggtcaacagccacgggcacgccagcgtggcgtttgtgaacaccaaattcgtaggatgtgggcacgggaccaagatgaacaaggcgttcacgctcgagaagcccatggacctgaaaaagggcgtgaaccacgtcgccgtcttggcgtcgacgatgggaatgatggacagtggcgcttacctggagcaccgtctggccggcgtcgacagggtgcagatcaagggcctcaacgcgggcacgctggacctgacgaataacggctggggccacatcgtcggcctcgtcggcgagcagaagcagatctacaccgataagggcatgggcagcgtcacatggaagccagccgtgaacgacaggccgctcacctggtacaagaggcacttcgacatgccgtcgggagaggacccgatcgtgctggatatgagcacaatgggcaagggcttgatgttcgtcaacggccagggcatcggccgctactggatctcctacaagcacgccctcggccggccatcgcagcagctgtaccatattccacggtccttcttgcggcagaaggacaacgtgctggtgctgttcgaggaggagttcgggcggccggatgcgatcatgatcctgacggtgaagcgcgacaacatctgcactttcatctcggagaggaacccggcgcacatcaagtcgtgggagcgcaaggacagccagatcacggtgaccgccgccgacctcaagccccgggccacgctgacgtgctctcccaagaagctcatccagcaggtggtgttcgcgagctacggcaaccccatgggcatctgcggcaactacaccatcggcagctgccacacgccgcgcgccaaggagctggtggagaaggcctgcctcggcaagcgcatctgcacgctgcccgtgtccgccgacgtctacggcggcgacgtcaactgccctggcaccaccgccacgctcgccgtgcaggccaagtgctccaagaggtcgcccagagccgcgcagtaattcggtagtcgtcggcttcggcctcggcttgctacctcccgtcgtctttcattcttcattgctgatgctgctgctgtaccatgggaccattatctgaccggagacgtcgattcggatttcggacccatccatgcgtggctgggtggggaaacagattgtcggtactgtcactgtatgctttattatacacaaatatattatctataggaatagattgttaatttgatgagcaaacatatatgcagatatcaatttggtgattaataatggcaataatatatagcctagtggcctaactgacagattacactgttgtacctgacgtactcctactttgcttctgaatctgagtttgtgacgtacaatatttgaaaacgagaagcagggaaacgccc

SEQ ID NO: 124708 - DNA, 2988 bp, Zea Mays
ggtctctccccttcccccgttcgctgtcccgacaggtcctccccactcctggagccccggtctaccctccccgtacgcatgcatgtcgacatgtcccaccgcgtccggctcgccgcggcggcgctcgtcgtggtcgccgctctggcgcttgcccccggcgccgcggcggcgtggcagctgacgaagaacggcaccgtggtcagctacgaccgccgctcgctcatcatcgacggccgccgggagatcttcttctccgggtccatccactacccgcggagcccgccggacatgtggccggagctcatcgccaaggccaaggagggcgggctcaacaccatcgagacctatatcttctggaacatccacgagcccgagaagggtcagttcgacttcgaggggcggtacgacattgtgaggttcttcaagctgatccaggagcacaacatgtacgccatggtccggctcgggcccttcatccaggcagaatggaaccatggagggctgccctactggctaagggagatccctgacattgtgttcaggacaaacaacgagccatataagatgcacatggagacgtttgtaaagatcataataaaaaggctcaaggatgccaaccttttcgcgtcacaaggagggcccattattctagcacagattgagaatgagtaccagcatttggaagcggcgttcaaaaatgatggcaccaagtacattaagtgggcagcaaatatggccatctccaccaacgtcggcataccatggatcatgtgcaagcagaccaaagctcctagtgatgtgattcctacctgcaatgggaggaactgtggagatacatggccaggtccaatgaacaagagcatgcccctcttgtggactgagaactggacagcacagtaagtcccttcttcctgcaacagtaatccattaacttgcctttgttcaactagatagatcactgtccatataccacttcgtcgcagaaaccttcatcgcaaaccaatcatttccttggtgtgtgcaaacaggtacagagtattcggtgacccaccatcccagcgttctgctgaggacattgcatttgccgtggcgcgcttcttctccgtgggcggtactatgacaaactactacatgtaccatggtggaacaaactttggaaggacatctgctgcctttgtgatgccaaaatactacgacgaggcacctctcgatgaattcggtctgtacaaggagcctaagtggggccatctgagggacctgcacctggcgctgaagctgtgcaagaaggccctgctctgggggaagacatcgacggagaagctgggcaagcagttcgaggcgagggtgttcgagatcccggagcagaaggtgtgcgtggcgttcctctccaaccacaacaccaaggacgacgtgacgctgacgttccggggccagtcctacttcgtgccgcgccactccatcagcatcctcgccgactgcaagaccgtcgtcttcggcacccagcacgtgaacgcgcagcacaaccagaggacgttccacttcgcggaccagacgacgcagaacaacgtgtggcagatgttcgacgaggagaaggtgcccaagtacaagcagtccaagatcaggctgcgcaaggccggcgatctctacaacctcaccaaggacaagaccgactacgtctggtacacctccagcttcaagttggaggcggacgacatgccgatccgccgcgacatcaagacggtgctcgaggtcaacagccacgggcacgccagcgtggcgtttgtgaacaccaaattcgtaggatgtgggcacgggaccaagatgaacaaggcgttcacgctcgagaagcccatggacctgaaaaagggcgtgaaccacgtcgccgtcttggcgtcgacgatgggaatgatggacagtggcgcttacctggagcaccgtctggccggcgtcgacagggtgcagatcaagggcctcaacgcgggcacgctggacctgacgaataacggctggggccacatcgtcggcctcgtcggcgagcagaagcagatctacaccgataagggcatgggcagcgtcacatggaagccagccgtgaacgacaggccgctcacctggtacaagaggcacttcgacatgccgtcgggagaggacccgatcgtgctggatatgagcacaatgggcaagggcttgatgttcgtcaacggccagggcatcggccgctactggatctcctacaagcacgccctcggccggccatcgcagcagctaaggacaacgtgctggtgctgttcgaggaggagttcgggcggccggatgcgatcatgatcctgacggtgaagcgcgacaacatctgcactttcatctcggagaggaacccggcgcacatcaagtcgtgggagcgcaaggacagccagatcacggtgaccgccgccgacctcaagccccgggccacgctgacgtgctctcccaagaagctcatccagcaggtggtgttcgcgagctacggcaaccccatgggcatctgcggcaactacaccatcggcagctgccacacgccgcgcgccaaggagctggtggagaaggcctgcctcggcaagcgcatctgcacgctgcccgtgtccgccgacgtctacggcggcgacgtcaactgccctggcaccaccgccacgctcgccgtgcaggccaagtgctccaagaggtcgcccagagccgcgcagtaattcggtagtcgtcggcttcggcctcggcttgctacctcccgtcgtctttcattcttcattgctgatgctgctgctgtaccatgggaccattatctgaccggagacgtcgattcggatttcggacccatccatgcgtggctgggtggggaaacagattgtcggtactgtcactgtatgctttattatacacaaatatattatctataggaatagattgttaatttgatgagcaaacatatatgcagatatcaatttggtgattaataat

SEQ ID NO: 124709 - DNA, 1992 bp, Zea Mays
aggcagcccagaaatgtctgctgcagggctgctgggtttctgatgccaagtggagcgggacacgaggacaccacaaagcggtgaaggagaaccaaggtaatcgaacccggaagcgaccttcttgagcccgaagcaaaaggcactgctcatcgatccgccaccacgccacaaaatcctctcctactccggcagttctgctcgccgccgcctccacgatgacggaagacgtgcagatgaacgactcggagccccagcctgcggcctcagctcccgccgtcggggcgccggcgctctccacactacaccatctgaaggagatcgcgtccgtgatcgaggccggttctctgtccaaggaggtccgccggatctcccgcgccttccgcctcaccgtcgcgctccgtcgccgcctcgccgcgcgggacgtctccgccttcctcgccttcgcgctacccgcgtcctccgaagcctacggacgcctcactgccctggtgcccaaggaagatgatactgagatggatgttgatgctgcagctccagcaactcagatttcaatcaaacatggtctccctgagattgaaatatattgctacttgctcgtactgattttccttattgatcataagaaatatgatgaggctaaggcatgcgcaagtgtgagcattgctcgcctgaagaatctaaaccggagaactgttgatgttttggcatcacgactgtacttctattactcttatgtgtatgagcttaccaacagccttgctgaaatccgtgggaatttgcttgctctacacagaatggcaactttgcatcgtgacgagcttggccaggaaacactgctcaatctcctccttcgcaattacctccactacaatttgtatgatcaggcagaaaagcttagatcaaaggcacctcgttttgaagcacactccaatcaacaattctgccgatacttgttctacttgggtaaaatcaggacaatccagttggagtacaccgatgctaaagaaagcctcctgcaagctgctcgtaaggcaccaataacagcctgtggttttcggattcagtgcaacaaatgggctatcatagtgaggctgctgcttggagagattcctgagaggactgttttcatgcagaaaggaatgaagaaagctctgataccttattttgagctcacaaatgctgtcagggttggggaccttgaactgttcagggctgttgcagacaaatttgcaagcacattcagcgcagacaggactcgtaatttgattgtgaggctgcgccataatgtcattcgaactggactgcgcaacatcagcatttcttactcaaggatctcccttgctgacattgctaagaagctaagactagactctgagaaccctattgctgatgcggagagcattgtagccaaggccataagagatggcgccattgacgccaccatagatcatgcaaatggctggatggtatccaaggaaactggtgatgtctactcaacaaatgagccacaaattgcattcaactccaggattgcgttctgcctcaacatgcacaatgaggcggtcaaggcgatgagattcccccctaattctcacaaggaaaaggagagtgctgagaagcgccgagagaggcttcagcaggaggaagaactggctaagcacatggctgaggatgatgacgacgacttctaagttagctgccttttgagcaactacttgcaatgtggagtttgttcgatttgtgaacgcctggttcaaagcaattcccctacctctagttactccagtcatgcaaacactgaagttcatccactgtaatgttgtgtcgatcaggattttgtattaattctatacttgatttttagtccccctgaattgttgaaccagggaatttactcaccattaaacggctttgtttatttctttaatcccagttcggcctcttttgaaattctgtattctgtgtttattatttctgtgtcttaatttaata

SEQ ID NO: 124710 - DNA, 2059 bp, Zea Mays
aggcagcccagaaatgtctgctgcagggctgctgggtttctgatgccaagtggagcgggacacgaggacaccacaaagcggtgaaggagaaccaaggtaatcgaacccggaagcgaccttcttgagcccgaagcaaaaggcactgctcatcgatccgccaccacgccacaaaatcctctcctactccggcagttctgctcgccgccgcctccacgatgacggaagacgtgcagatgaacgactcggagccccagcctgcggcctcagctcccgccgtcggggcgccggcgctctccacactacaccatctgaaggagatcgcgtccgtgatcgaggccggttctctgtccaaggaggtccgccggatctcccgcgccttccgcctcaccgtcgcgctccgtcgccgcctcgccgcgcgggacgtctccgccttcctcgccttcgcgctacccgcgtcctccgaagcctacggacgcctcactgccctggtgcccaaggaagatgatactgagatggatgttgatgctgcagctccagcaactcagatttcaatcaaacatggtctccctgagattgaaatatattgctacttgctcgtactgattttccttattgatcataagaaatatgatgaggctaaggcatgcgcaagtgtgagcattgctcgcctgaagaatctaaaccggagaactgttgatgttttggcatcacgactgtacttctattactcttatgtgtatgagcttaccaacagccttgctgaaatccgtgggaatttgcttgctctacacagaatggcaactttgcatcgtgacgagcttggccaggaaacactgctcaatctcctccttcgcaattacctccactacaatttgtatgatcaggcagaaaagcttagatcaaaggcacctcgttttgaagcacactccaatcaacaattctgccgatacttgttctacttgggtaaaatcaggacaatccagttggagtacaccgatgctaaagaaagcctcctgcaagctgctcgtaaggcaccaataacagcctgtggttttcggattcagtgcaacaaatgggctatcatagtgaggctgctgcttggagagattcctgagaggactgttttcatgcagaaaggaatgaagaaagctctgataccttattttgagctcacaaatgtaagtgacttgtcatgcagaaactccggtataataggtgaaatactttgaacttgaattatacgtttgtgtcctccaggctgtcagggttggggaccttgaactgttcagggctgttgcagacaaatttgcaagcacattcagcgcagacaggactcgtaatttgattgtgaggctgcgccataatgtcattcgaactggactgcgcaacatcagcatttcttactcaaggatctcccttgctgacattgctaagaagctaagactagactctgagaaccctattgctgatgcggagagcattgtagccaaggccataagagatggcgccattgacgccaccatagatcatgcaaatggctggatggtatccaaggaaactggtgatgtctactcaacaaatgagccacaaattgcattcaactccaggattgcgttctgcctcaacatgcacaatgaggcggtcaaggcgatgagattcccccctaattctcacaaggaaaaggagagtgctgagaagcgccgagagaggcttcagcaggaggaagaactggctaagcacatggctgaggatgatgacgacgacttctaagttagctgccttttgagcaactacttgcaatgtggagtttgttcgatttgtgaacgcctggttcaaagcaattcccctacctctagttactccagtcatgcaaacactgaagttcatccactgtaatgttgtgtcgatcaggattttgtattaattctatacttgatttttagtccccctgaattgttgaaccagggaatttactcaccattaaacggctttgtttatttctttaatcccagttcggcctcttttgaaattctgtattctgtgtttattatttctgtgt

SEQ ID NO: 124711 - DNA, 835 bp, Zea Mays
cgggatccccgcccttccctcgaaaccccgccccgcgcccctccctgagctctgtcgcgtcatccctgccttgtccccttcctcccactccgacgcacacgaggaagctgttaaccagcgccgccacttccaccgagtccctcgtggcgcttgaggcccgctgtctctccccccgctgtcgaggctcgcgccggctagaggtccacgctccccccccccagagatagctccctccccgaggagctgaaggcagcggcgtcacgggggctgcggtaggagctcgacaccgagcgggagttcgcggagacggcagccagatccggatcgaccctcttcgccttattcgagctcctggggctcgcagataaaggggccgaccgggtcgctggagccctcctacgacgaggccctgtggccggatgaggaggccggcgtcgacgcggcggaggccgcgccggcggaagcggacgatggcatcgaggtctgctgcttcgacaatcgcggtgtcggccacagctccgtgctccccaacaaatcctactactcgacggcaatcatggcgacggatgccttggccttgatggatcatttggggtggaagaaggctcacgtcttcggccactccatgggtgccatgattgcttgcaagctagatgtgatggcacctcacaggctatgttcgctggcattgcttaatgtcaccagaggtggctttcagtgcttcccaaaggtagacgcgcagatgctatctcttgcattccgtttcttaagggcaaaaactccagaggaaagagcccttgtggacctggaaacacattatacaaaggtaaagaac

SEQ ID NO: 124712 - DNA, 1865 bp, Zea Mays
ggcttctagtagagagcacagctagcaaaacagagctccagaaactgaccgattggtttcacaccagagttagcgggatggcggggacgagcggccacagcgaacgagcagacgagcctctgaaggaggcgctgttggctgcccgcaacggtagcggcagcgacggcgacggcgagaaggacctggaggagatccggagcgtggggtcgttcctgcggcacgcggcggaggagaaccggaagctctggtaccttgcgggccccgccatcatcacgtccatcacgcagtactcgctcggcggcatcacccaggtcttcgccggccatctcaccacgctcgagctcgacgccatctccaccgagaacaacgtcatcgccggcctcgccttcggcatcatgctggggatgggcagcgcgctggagacgctgtgcggacaggcgtacggcgcgaagcagctgcacatgctgggcgtgtacatgcagcggtcgcttatcatcctcaacgccatggccgtgctgatgctcccgctctacctcttcgccacccctatcctgcgcttcttccaccaggacgccgagattgccgcgctcaccggccgcctagcgctctacatgatcccgcagctcttcgcctacgccttcaacttccccatccagaagttcctgcaggcgcagagcaaggtgatggccatggcggtcgtgtcggtggcggcgctgctgctccacgtcgccatcagctggctcctcgtcgggcccatggggatggggatcgtcggcctggccgttgcgctcaacgcgtcctggtggctcgtcgtgctgggccagctcgcctacattctcatgggctactgccccggcgcctggaacggattcgactggctcgccttctccgacctctccggcttcgcgcgcctgtcgcttggctccgccgtcatgctctgcctggagttctggttctacatgttcctgatcgtcatcgtcggcaacctggagaacgctcaggtcgccgttgctgcagtctccatttgcacgaacctgttcgggtggcagatcatggtgttcttcggattcaacgcggccatcagcgtgcgggtgtcgaacgagctgggcgccgggcggccccgcgcggccaagttcgcgatcctggtggtgctcatgtcttcggtggccatcgggttggccttcttcgtcctcgtcctggccttccgcgacgtgtacggcgcgcccttcacggaaagccccgaggtggtgcgcgccgtggccagcctcggcgtcgtcttcgccttctcgctgctcctcaacagcgtgcagccggtgctgtcgggcgttgccgtcggggccggctggcagtggctggtggcgtacatcaacctcggctgctactacctcgttggcatccccgtcgggtacatcatcgccttcccgctgcgcggcggggtgcaggggatgtggggcggcatgctcacgggcgtcggcctgcagaccctcatcctggtcgccatcacgctgcgcaccaactgggacaaggaggccagcgaggcccattccaggatacagaaatggggtggatcggcggcggccaaagtttcacatgcatgactagtctgaatgacgcgcgccaccatgagaatacaatacaacagatgccatgcgagcagaatggcatgctgcggtgcgtaagcttgattgtacgtgcaggttgcgttttgggctgcttaataagtagttggagacaaagtcatacttaggttgttttgtttccagcagatatatgcttgtaaaacaccgtattgtgccatagactgcatgattcttagcagagtttgaaatagaaaataatatatctctactactacttaattacct

SEQ ID NO: 124713 - DNA, 966 bp, Zea Mays
atgggcggcgacggcggagcagcacagggcggggagagggccgcctaccggcggtgttgcaggggggctgcacggggtaggggcgcgacggctgggcgcggttggccggagcagcagcaaaggctagaacgaggctgcgaagcctgcgaggggctggtgcagcggtggccgatgcgggcttgcggcatgcctaggggggtgaagacacacaggcagcgccagtgccggccgcttggagcgctagagtggacgagcaggttggacagaaagctgagcaaagggagtaatgaaaatatggataagagaaagttgcaacctgagaataatttatctgatggtgcaagacctcttatttctgaagggtcggatgggccaccctcaagttcatatgcatatgaaccctcatcttctggccaaggattcaaatctccagaaacacctgatttgacagtatctgtcaaacatccttctaagacggaacatgtgattaactctcaaagacctggtagttcaacatcgtcaacatcagagcgcattgctgcaaactcagctgcgagtgctcttggcttgtcaccaagctcttcaataggatcccttacctctgaaaaatcaactttgaaccctaatgctaaggaattcaagctaaatcctaatgccaagagtttcactccgtcagcatctttgaggccaccacaccctgcatcatctgatgcatcatattactatactaataacattccagcagcaccacttggacctggtttgccagtgggcatggggttcccaccggcatatggcacccagcctgtcatgtataatgctcaacctggagcatcacagcagggttacatgcatcctgttggtctacagcagtatgggcagcagatgatgatgggaggagggcagaatcgtcctgtttattattatgcgcctgagatgcaacaatacagaggaagaaacttctag

SEQ ID NO: 124714 - DNA, 2197 bp, Zea Mays
tttgtctgcgagcgtgtcgccgttgggatgtgcgtgtacttcatgtcctgactgcttctcagttcgccggcatcttcaccaagggcctctctatgtcggtgtttgaggaatttcggtctagtcttaacatctgccgtggctagagtttcgactgcggggggtgttagttgtgctgtgtgcatactgatgtgtgtttgtccttgtattgggcctaagcccacctaccactattattaatgcatcacccaaccttggtttagggttagggttttacttatgtctctcatgtactatatatcccttaaggctatctccagcagcttacttatccgcatctcctatttcaaactccaccctgtaaagcctaagcggtggttgacttttgcatttaagcattttttaattgtgttatatcgttcagtcagtctcattaaataaatggactacaactaatgttgtttctttttgcagaatatatgattcatgcatgtgtgcaaatgctcccatttttactggcattgagcaattgccacaattttcacatctacaagaattaattggtctaacagctactgattctgttgaacttggagatatcgtggaccctcctgttatccgaactgctacttctatccttcctcttggatggactggactccctggtggtaaaaatgctgagccactgaaagttgatataattgggcatgacctacaaatgtgcactcttttccaggcacaaataaatggaaactggtattccacagtaatagagactctaccatcagctacttcatactcaccaaatggagaactgcaacccacattacagaaaatgcggattcttgttggacaaccactaaagcagcctccaaattacattagtggggatttcatgattcctgtgatggcaggtgctgattcaacacccgactttggatttgaatcattttttgaagataaagattgctgcaagggtttgagtggatttctaatatatgggacaagtgattttgtaactgtacgtaaagaggtccacgttaggactcggagagtgcgattgcttggattagagggggctggcaaaacatccctgcttaaagcaatgttaggacaagttaaagaaagaaatagcactgttcttgaatgcatacatgtcgatttgcatggcaagggaatatcaaatggattgtgctacatagattcgacaacggtaaacttgcaggagctacctttggaggttgggcggttcaaagaagaactgttgttaggactccatgatatcagcaggaagactgaccttgttattgcggtgcataacctagcacaccgaattccacagtatcaacggtccaatacttctcagcctcagcctgctctttcacttctcttggatgaagctaaggcgctaagcattccttggattcttgcaataaccaacaaattctctgttagtgcgcatgagcagaacagattgatcagctcagctatggaagcatatcaagtttctcctgagatgacaaaagttgttaactcttccccatttctgatgccaagtgctagaaacagtttgcagcagatcagatcagctactgggaagttgaagaaggatccagcaaatagatctggttatcttcctgtaaactttggattgtcatcatttcagaggaaggacattgttatgcatgtggagggtgttagttcccttcgtcaacttgtacatcaagtagtcctcaacaatgaagaaacagcatttgaggaacttgctcgtgagagattgttgaaggagctagcgtcagagaaagcagcgtccctgcaagtgaagcagaagccccggaaaagagatggctctgttacagctgctgctgtaggtgcatctctgggcgcgggcctgggaattgtaatggctgtgataatgggggcagcatcagcccttcgaaagccgtgattcatgtattcttttgatccattatttacttcttgatttaaggatgtctgaacaaaagcactagtgtaggcatgaaaaatgaaattttagggcagaatagttagctgataccgtagtgccacattttggctgtgtatagaatgtaggttgagccttttttttgctgatctgaattttgttgtgttactggagtatggcttggatatgttctacatcatgttttaatttagttataaatctgtatcatgtcta

SEQ ID NO: 124715 - DNA, 3346 bp, Zea Mays
ccgacctcacgtcctcaccccacgccaatggcggccgctctggcgagccgcgtggagagttgggtgcgggaccaggcggcgcggctgcagccctgggcggcggcgctgccgcaggcgccgcggtggccctggcccccgccgcggcccgcctggccgtggcccggggaccgcagacgccagcgggaacgcatgttccgggaggagtacgaacgtcgtagcagacagctccgcgagctctgccgcgctgtccgcgtcgacaccgtagccgagctccaggagttgctctgcgccatggtactcgccgagtgcgtctacaagagacctgtttctgagatgatgagatatatcaacaagtttaagtctgattttggtggaaatgttgtgtccctggagcgtgttcaaccatccttggatcatgtaccacatcggtatctgttagcagaggctggtgacaccctatttgctacatttattggcacaaagcagtacaaagatattattgctgatgtgaacatattccaagggaccttatttcatgaagatactgctcatgatttagctcctgatgttgaccctgaacaaaatgatacccaaaagggtgaggaaagccatgggaaatcttaccgagaaacatcaaagaagctaagaaaaccaaaacctgcagtgcaccgaggtttcttggctcgtgctaatggaattccagcactggacctatacaatcttgcacagaaaagaaacaggaaacttgttctttgtggacactcacttggtggggcggttgctgcattggctactcttgcaattttgagagttattgctaccacttcatctgaagaggataacaggcttcatgtgaagtgcatcaccttctctcagccacctgttgggaatgctgctttaagagattatgttcacaaaagaggatggcaggactacttcaaatcctattgtattccagaagacttggtaccacgcattctatctccagcttattttcaccactacaatgcccagacacctgaagcatcttttacaaataaaactgatgtgaaatctgaagaagttatggaggcaagtggggaaaggcccagaggaaacaacagggaacacctcgttctcggtgttggtccagtgcaaaagtcattttggaggctttcaaaacttgttcccttggaaggggtgcggaaaagcttaagtgcaattcaaaaacaaacaaatgtttttgggaaggcaccatcacaattggatagctatttgcaatcaaaggttgatgaatcagaagaaccacctcaatctcttgagattcaagaaagttcacaaggaattgctcttacccctttatcggataaagatggagggaacactgaagataataataggactgagaaaataaatgcatctgaagcaggggggtctaaacgctggagcagggtaccttctttgccttcatatgtgccatttggtgagctttacctattgggagattcatcagtcaatacactttcagattcagaatactccaagatgacgtcggcatgtgcaggtgcagtctgttatatcggagttaagagagcgtttgcagtcgcactcaatgaagtcctatagggctagatttcaaaaaatatatgattcatgcatgtgtgcaaatgctcccatttttactggcattgagcaattgccacaattttcacatctacaagaattaattggtctaacagctactgattctgttgaacttggagatatcgtggaccctcctgttatccgaactgctacttctatccttcctcttggatggactggactccctggtggtaaaaatgctgagccactgaaagttgatataattgggcatgacctacaaatgtgcactcttttccaggcacaaataaatggaaactggtattccacagtaatagagactctaccatcagctacttcatactcaccaaatggagaactgcaacccacattacagaaaatgcggattcttgttggacaaccactaaagcagcctccaaattacattagtggggatttcatgattcctgtgatggcaggtgctgattcaacacccgactttggatttgaatcattttttgaagataaagattgctgcaagggtttgagtggatttctaatatatgggacaagtgattttgtaactgtacgtaaagaggtccacgttaggactcggagagtgcgattgcttggattagagggggctggcaaaacatccctgcttaaagcaatgttaggacaagttaaagaaagaaatagcactgttcttgaatgcatacatgtcgatttgcatggcaagggaatatcaaatggattgtgctacatagattcgacaacggtaaacttgcaggagctacctttggaggttgggcggttcaaagaagaactgttgttaggactccatgatatcagcaggaagactgaccttgttattgcggtgcataacctagcacaccgaattccacagtatcaacggtccaatacttctcagcctcagcctgctctttcacttctcttggatgaagctaaggcgctaagcattccttggattcttgcaataaccaacaaattctctgttagtgcgcatgagcagaacagattgatcagctcagctatggaagcatatcaagtttctcctgagatgacaaaagttgttaactcttccccatttctgatgccaagtgctagaaacagtttgcagcagatcagatcagctactgggaagttgaagaaggatccagcaaatagatctggttatcttcctgtaaactttggattgtcatcatttcagaggaaggacattgttatgcatgtggagggtgttagttcccttcgtcaacttgtacatcaagtagtcctcaacaatgaagaaacagcatttgaggaacttgctcgtgagagattgttgaaggagctagcgtcagagaaagcagcgtccctgcaagtgaagcagaagccccggaaaagagatggctctgttacagctgctgctgtaggtgcatctctgggcgcgggcctgggaattgtaatggctgtgataatgggggcagcatcagcccttcgaaagccgtgattcatgtattcttttgatccattatttacttcttgatttaaggatgtctgaacaaaagcactagtgtaggcatgaaaaatgaaattttagggcagaatagttagctgataccgtagtgccacattttggctgtgtatagaatgtaggttgagccttttttttgctgatctgaattttgttgtgttactggagtatggcttggatatgttctacatcatgttttaatttagttataaatctgtatcatgtcta

SEQ ID NO: 124716 - DNA, 6222 bp, Zea Mays
atgcaggaggggctagggcaaaggatgcatgtacctcatggtatcaatctgtgtatcgcaacttcttccatgccctttcaggcgcaatctttcattgagcccagtaccggacaagtgaaccctcctgtaacatctgaaaacttatctgctaactcacaagctgttaatgatgctggagcagttgaaggtactgacatgaacgaaaaatcggttcaaaaacctaagaggaaaaaacataggccaaaggtcattaaagaaggacaatcagcaaagctgcagaagcctaaaactcccaagcctcccaaggaaaatgggaatcagcctactggaaaaagaaagtatgtcaggaggaagggactaagtgcaccagctgaacaaattccactatgtgctgatacacacactagagctaaaccaggagtagtccaaagatgtttggactttgatgtggaggaccagcatggacatttggatctggtaccgcaaacccaggaaacagagatacagactggtcctgcggacacacaaccatcaatatctggagttgaaagaagtaatgttcaaatatcataccattggggtggtacaagcagttctattagttcagttgacccaatagctggtatacacggattacaggcagactgcaattctaaaagagtcagttttgatctgaacaattctatagtaagtcagctgccaaccaattattctagtccaatggacagctctgaacaatttttcaattttgatttaagagaagaagttcgaacaaaccagttattgcctcatctaaccagctcggtagatcacacacgacacccctcggtcaattttgaccaatacataagcacatctcaagattgtccagaaaaatcacccagacattatcagatggtcagtagttatagaattctagaaaatatgacaacagcttctcagtataccgaaagggtgtctatggggggcaatttcaaccctgaagcttgtatgggcgaagatgcaataatcaaacaaatggcccaaagctatagacctctagaaagtccatttgtacctcccaatcataatgaaagggatatgatgaacggaaatctgaacgagtttcctgtgaagaatgattacttgaagttttctaccaatagtaactaccaaactggagcaggttttgatcattgttctccagactattcagatgttcttgcaatgggtacaaaaagagaacatgatgctatcagtggccatcagatttctcttggcattgactttattaactcaaatagaacaaggaagttctgtagtgatgaccccctttccactagctctcaaacatcttactgtcctcaatcatgcaaaaggatgaggccagaggatcatagcaatcagctccatggaactatgggtaagctttcttccgcatcagcattttctgatggtttgaacacaaataaagtttcagctatgaaccctagaattggtaccttggctgacgtacaattgttgatggcccttgagaaatcaaaagcttcacaacaaatgtttgagtttgactatgttacgtcacaaaataacatgatccatgaacgtactgggcttgctctgcaaaatattgctgacaaaggatttattgctctacctaataaacagttcccaagcttcgctgcacagaacatacctttgcctggcagtactgtgaaccaattgggagaaagtaataccttgaggaatggagtgcatcaaattcaaccttgggaaattacatataggctacatgactctagagacaatttttctttaccagggaacacacagttctcgaatggcacagtgaatccatcctcagaaaactatattcagagtaatgctattcatgaacatcaatgcttagaaaacgttgtggctaaggtgccagttttgtctgaaacacaaaatacttccactcaagagggccataaccactgcactgctgctactactgatgagcatatcagaactacaagtgatgaagttgttagatccctcacccgacgtgcaagccaaccaactacaaatgggaactacaatattaaatcttctagagtaactgcagaagcaaactgcactgagaagccaagaaaaaggggtcgtccaagaaaagtagtaaaccccaatggggagccaaaagaaagaggtactaaagggaaacaaaatgttggtcatgcagaacttatatcaccaaaaggttcatgtgctgactttttaaaaactaatggtattacttatgcttctgaatcttccactggaattactcctaggatgtcaactgtggagttgaaaagttctgaccaagataaggagattcatggaggtgccatgcctcaagctacagcagcatcagttgatcctttagatggcataattgaaaagattaagctcttaaccataaacggaccagacaagggtgtgtcagaggtacctaaaaatgctcttgttccttatgaaggtgaatttagtgcactgattgcatttgaggggaaggcaaagaaaagccgtcctcgggccaaagtgaacatcgatccagtcaccactatgatgtggaacttattaatggggccagatatgggtgatgatgccgaagggttagacaaggataaagagaagtggcttgatgaagaaagaagagtgttcagaggacgggttgattcattcattgctcgtatgcatctagttcagggggataggcgtttctctcgatggaaaggatcagtcgtggattcagtcgtgggtgtatttcttacccagaatgtttcagatcatctttctagttctgctttcatggcggttgctgccaaatttcctgttaagatagaggtccctaaaaaacctgtggctgagatgtctcatactcctgaacagaaggatagttgttctggactgtttggtgattctatcaaattgcagggcaatatatacattgaagagataagtgacattaaatcgttaattactacagaagataatgaagaaagtaataataacgaattgattggaaactctgctgggaatggagtaaactgtgcaactggaggatgccatgtctcttatagtaagtcactaactggatcccatggaaatgggctatcaggatctgtttttccaactaccggcttttcaggtgtggtagaaactgaagatggatcactggaggatgttatttcttctcaaaattctgctgtttcttcccagaattccccagattatgttgttcgtagaaccgatccaataggttctagttcgttacaaaatttcactgaagagggctgtattatgagaaatatgtccaatgggactggcatctctactgactatacattgtttctgccaattcaagatccaaaaggcatgctcggattatcagaatattgtggacttaatcctcttccagtttcaggtgtgaacaaggacatgttgcttgatctaaacagatcatatcagccattacatacttatatgccctatgatcagaatagtgagtctgatttcacaggtgtgtcatgtttgaaccatatgggtaaatcattccacacaggccctgataaagtgaatctttccagtgttacacagtctgaggctagtctttaccctattgatcctttagaacaaggcgacttttcaccactaattaaacaaaacttccaaccattacatagttcagacgaagtgccatttttcaaggagcactcttcatgtaatgattttttgaggaacaaaactgaagctcattttctggaaccacttgtctgttcaaatcctcaagaggtgtacacaacctcaacagatcaaatgggtgctgaacaatctcaatcaggatgtggccaaaagtacaatgatgccagagttcagacagcatcacatgaaaggcatcagtcttcaaccttgtgtgataaccagaactcttgttcggtggtgttgcaaggagttgcttcagactcaacacagaagttcgttgatactcaaaaggggccgtcaaaagctcgacaaaatggatcaaaagctaaggtacggggccgacctaaaaagaaaactgatgactgggacagtttacggaaaaaagtgctttctaatggtggggacaaacaaagaagtcatgatgcaagggatactgttgattgggaggcagttaggcaagcagaagtacgggaaatatctgaaaccatcagagagagaggaatgaataatatgctagcagaacggataaaggaattcttgaaccgattggtgacagaccatggaagcattgatcttgaatggctaagagatgttcaaccagacaaagcaaaggacttccttctaagcattagagggcttggactcaaaagtgttgagtgtgttcgcctcttgacactacatcatatggcttttccagtggacacaaatgttggtcggatatgtgtgaggcttggatgggtgccacttcaaccactgccagagtctcttcagttgcacctcttggaaatgtatcccatgctggagcacatacagaagtacctctggcctcgactatgcaaactagatcaacgtacattgtaagattagttcaatcgatacttttcgcactatatttagatggctagattcaatgacgccttccaatatgcaggttttctgcacaaaaagtaagcctaattgcaattcatgtccaatgagagctgaatgtaagcactttgctagtgcatttgcaagtgctaggcttgctcttcctgcacctgaagaaaaatgtttggttacattggaagatccaaatgttgtagagttttctcaccaaacatacataaactcagggagtgttggccaacttgagtggagtgcaaattatcctaaacatgctgtttctggtaatcatcagccaatcatcgaggaaccactgagcccagaatgtgaaactgaaaatatagaggcacatgagggtgcaattgaggatttcttttgtgaagaatctgatgaaattcctaccattaatcttaatatcgaggagttcacacaaaacttgaaggactatatgcaagcaaacaatgttgagattgaatatgctgacatgtcaaaggcattggttgccatcacgcctgatgctgcttccattccaactccaaagctcaagaatgtcaatcgtctgaggacagaacaccaagtttatgaactgccagattcacaccctcttctggaaggattcgaacagagagaaccagatgatccctgtccatatcttctttccatatggaccccaggtgaaactgcacaatcgatcgatgcccccaagacattctgtgattcaggggagacgggtagactatgtggaagttcaacatgctttagttgcaacaatatacgagaaatgcaggctcagaaagtcagaggaacacttttgataccatgccgaacagcaatgagaggaagcttcccacttaatgggacgtattttcaagttaatgaggtatttgctgaccattgctcaagtcaaaatccaattgatgtcccacgaagttggatttgggacctcccaagacgaactgtttactttggaacctcagttcctacaatattcagaggtttaacgactgaagagatacaacgatgcttttggagaggatttgtttgcgtgaggggctttgataggacagtgagggcaccaaggcccctttatgcaaggttgcattttcctgtcagcaaggttgttagaggcaaaaagcctggagcagcaagagcagaagaataatagtacattgaagaaatataggggtgctaaccagacgaggatggatagcccgaaatgagatgctgacccaataggtcgccaaatcacctccaaattctaacccaatgacttccatctgtaatgaatggcaataccttgaaaacctgtgatggagatgttttgtggcgacatgatctcttaaattagattccgtctttggtaacagcctagctgttcttgttgagtcgcatattctttattctgaagatcaatatagcaaatgggagaaaaaacatagtgcacagtcgagctgttctaattgtacctcttgtgagtggaatcagttgttgtacaacaggaagatggacctatctgtacaatggtcgtacatgttctttgatcatagtataaacaatgtaagcctcatcagccgttatttgattgtttcaaaacaaaggaaaagcattttcaattcatctgttcaaagacta

SEQ ID NO: 124717 - DNA, 6183 bp, Zea Mays
atgcaggaggggctagggcaaaggatgcatgtacctcatggtatcaatctgtgtatcgcaacttcttccatgccctttcaggcgcaatctttcattgagcccagtaccggacaagtgaaccctcctgtaacatctgaaaacttatctgctaactcacaagctgttaatgatgctggagcagttgaaggtactgacatgaacgaaaaatcggttcaaaaacctaagaggaaaaaacataggccaaaggtcattaaagaaggacaatcagcaaagctgcagaagcctaaaactcccaagcctcccaaggaaaatgggaatcagcctactggaaaaagaaagtatgtcaggaggaagggactaagtgcaccagctgaacaaattccactatgtgctgatacacacactagagctaaaccaggagtagtccaaagatgtttggactttgatgtggaggaccagcatggacatttggatctggtaccgcaaacccaggaaacagagatacagactggtcctgcggacacacaaccatcaatatctggagttgaaagaagtaatgttcaaatatcataccattggggtggtacaagcagttctattagttcagttgacccaatagctggtatacacggattacaggcagactgcaattctaaaagagtcagttttgatctgaacaattctatagtaagtcagctgccaaccaattattctagtccaatggacagctctgaacaatttttcaattttgatttaagagaagaagttcgaacaaaccagttattgcctcatctaaccagctcggtagatcacacacgacacccctcggtcaattttgaccaatacataagcacatctcaagattgtccagaaaaatcacccagacattatcagatggtcagtagttatagaattctagaaaatatgacaacagcttctcagtataccgaaagggtgtctatggggggcaatttcaaccctgaagcttgtatgggcgaagatgcaataatcaaacaaatggcccaaagctatagacctctagaaagtccatttgtacctcccaatcataatgaaagggatatgatgaacggaaatctgaacgagtttcctgtgaagaatgattacttgaagttttctaccaatagtaactaccaaactggagcaggttttgatcattgttctccagactattcagatgttcttgcaatgggtacaaaaagagaacatgatgctatcagtggccatcagatttctcttggcattgactttattaactcaaatagaacaaggaagttctgtagtgatgaccccctttccactagctctcaaacatcttactgtcctcaatcatgcaaaaggatgaggccagaggatcatagcaatcagctccatggaactatgggtaagctttcttccgcatcagcattttctgatggtttgaacacaaataaagtttcagctatgaaccctagaattggtaccttggctgacgtacaattgttgatggcccttgagaaatcaaaagcttcacaacaaatgtttgagtttgactatgttacgtcacaaaataacatgatccatgaacgtactgggcttgctctgcaaaatattgctgacaaaggatttattgctctacctaataaacagttcccaagcttcgctgcacagaacatacctttgcctggcagtactgtgaaccaattgggagaaagtaataccttgaggaatggagtgcatcaaattcaaccttgggaaattacatataggctacatgactctagagacaatttttctttaccagggaacacacagttctcgaatggcacagtgaatccatcctcagaaaactatattcagagtaatgctattcatgaacatcaatgcttagaaaacgttgtggctaaggtgccagttttgtctgaaacacaaaatacttccactcaagagggccataaccactgcactgctgctactactgatgagcatatcagaactacaagtgatgaagttgttagatccctcacccgacgtgcaagccaaccaactacaaatgggaactacaatattaaatcttctagagtaactgcagaagcaaactgcactgagaagccaagaaaaaggggtcgtccaagaaaagtagtaaaccccaatggggagccaaaagaaagaggtactaaagggaaacaaaatgttggtcatgcagaacttatatcaccaaaaggttcatgtgctgactttttaaaaactaatggtattacttatgcttctgaatcttccactggaattactcctaggatgtcaactgtggagttgaaaagttctgaccaagataaggagattcatggaggtgccatgcctcaagctacagcagcatcagttgatcctttagatggcataattgaaaagattaagctcttaaccataaacggaccagacaagggtgtgtcagaggtacctaaaaatgctcttgttccttatgaaggtgaatttagtgcactgattgcatttgaggggaaggcaaagaaaagccgtcctcgggccaaagtgaacatcgatccagtcaccactatgatgtggaacttattaatggggccagatatgggtgatgatgccgaagggttagacaaggataaagagaagtggcttgatgaagaaagaagagtgttcagaggacgggttgattcattcattgctcgtatgcatctagttcagggggataggcgtttctctcgatggaaaggatcagtcgtggattcagtcgtgggtgtatttcttacccagaatgtttcagatcatctttctagttctgctttcatggcggttgctgccaaatttcctgttaagatagaggtccctaaaaaacctgtggctgagatgtctcatactcctgaacagaaggatagttgttctggactgtttggtgattctatcaaattgcagggcaatatatacattgaagagataagtgacattaaatcgttaattactacagaagataatgaagaaagtaataataacgaattgattggaaactctgctgggaatggagtaaactgtgcaactggaggatgccatgtctcttatagtaagtcactaactggatcccatggaaatgggctatcaggatctgtttttccaactaccggcttttcaggtgtggtagaaactgaagatggatcactggaggatgttatttcttctcaaaattctgctgtttcttcccagaattccccagattatgttgttcgtagaaccgatccaataggttctagttcgttacaaaatttcactgaagagggctgtattatgagaaatatgtccaatgggactggcatctctactgactatacattgtttctgccaattcaagatccaaaaggcatgctcggattatcagaatattgtggacttaatcctcttccagtttcaggtgtgaacaaggacatgttgcttgatctaaacagatcatatcagccattacatacttatatgccctatgatcagaatagtgagtctgatttcacaggtgtgtcatgtttgaaccatatgggtaaatcattccacacaggccctgataaagtgaatctttccagtgttacacagtctgaggctagtctttaccctattgatcctttagaacaaggcgacttttcaccactaattaaacaaaacttccaaccattacatagttcagacgaagtgccatttttcaaggagcactcttcatgtaatgattttttgaggaacaaaactgaagctcattttctggaaccacttgtctgttcaaatcctcaagaggtgtacacaacctcaacagatcaaatgggtgctgaacaatctcaatcaggatgtggccaaaagtacaatgatgccagagttcagacagcatcacatgaaaggcatcagtcttcaaccttgtgtgataaccagaactcttgttcggtggtgttgcaaggagttgcttcagactcaacacagaagttcgttgatactcaaaaggggccgtcaaaagctcgacaaaatggatcaaaagctaaggtacggggccgacctaaaaagaaaactgatgactgggacagtttacggaaaaaagtgctttctaatggtggggacaaacaaagaagtcatgatgcaagggatactgttgattgggaggcagttaggcaagcagaagtacgggaaatatctgaaaccatcagagagagaggaatgaataatatgctagcagaacggataaaggaattcttgaaccgattggtgacagaccatggaagcattgatcttgaatggctaagagatgttcaaccagacaaagcaaaggacttccttctaagcattagagggcttggactcaaaagtgttgagtgtgttcgcctcttgacactacatcatatggcttttccagtggacacaaatgttggtcggatatgtgtgaggcttggatgggtgccacttcaaccactgccagagtctcttcagttgcacctcttggaaatgtatcccatgctggagcacatacagaagtacctctggcctcgactatgcaaactagatcaacgtacattgtatgagcttcactaccaaatgattacttttggaaaggttttctgcacaaaaagtaagcctaattgcaattcatgtccaatgagagctgaatgtaagcactttgctagtgcatttgcaagtgctaggcttgctcttcctgcacctgaagaaaaatgtttggttacattggaagatccaaatgttgtagagttttctcaccaaacatacataaactcagggagtgttggccaacttgagtggagtgcaaattatcctaaacatgctgtttctggtaatcatcagccaatcatcgaggaaccactgagcccagaatgtgaaactgaaaatatagaggcacatgagggtgcaattgaggatttcttttgtgaagaatctgatgaaattcctaccattaatcttaatatcgaggagttcacacaaaacttgaaggactatatgcaagcaaacaatgttgagattgaatatgctgacatgtcaaaggcattggttgccatcacgcctgatgctgcttccattccaactccaaagctcaagaatgtcaatcgtctgaggacagaacaccaagtttatgaactgccagattcacaccctcttctggaaggattcgaacagagagaaccagatgatccctgtccatatcttctttccatatggaccccaggtgaaactgcacaatcgatcgatgcccccaagacattctgtgattcaggggagacgggtagactatgtggaagttcaacatgctttagttgcaacaatatacgagaaatgcaggctcagaaagtcagaggaacacttttgataccatgccgaacagcaatgagaggaagcttcccacttaatgggacgtattttcaagttaatgaggtatttgctgaccattgctcaagtcaaaatccaattgatgtcccacgaagttggatttgggacctcccaagacgaactgtttactttggaacctcagttcctacaatattcagaggtttaacgactgaagagatacaacgatgcttttggagaggatttgtttgcgtgaggggctttgataggacagtgagggcaccaaggcccctttatgcaaggttgcattttcctgtcagcaaggttgttagaggcaaaaagcctggagcagcaagagcagaagaataatagtacattgaagaaatataggggtgctaaccagacgaggatggatagcccgaaatgagatgctgacccaataggtcgccaaatcacctccaaattctaacccaatgacttccatctgtaatgaatggcaataccttgaaaacctgtgatggagatgttttgtggcgacatgatctcttaaattagattccgtctttggtaacagcctagctgttcttgttgagtcgcatattctttattctgaagatcaatatagcaaatgggagaaaaaacatagtgcacagtcgagctgttctaattgtacctcttgtgagtggaatcagttgttgtacaacaggaagatggacctatctgtacaatggtcgtacatgttctttgatcatagtataaacaatgtaagcctcatcagccgttatttgattgtttcaaaacaaaggaaaagcattttcaattcatctgttcaaagac

SEQ ID NO: 124718 - DNA, 99 bp, Zea Mays
ctataatggatgaaaagagccttgtcctttggcatggtaatggcctggatcttataattcgaaggatcaatctccccgccatactagctcccacgtgtg

SEQ ID NO: 124719 - DNA, 479 bp, Zea Mays
aaaacatgttttatagtaatggctaatatcagattctctcgtctctagcacgtctccgcctcctctgtcactccatgcgattcctcctctgtcgtcggtgtcatttcggatcgatgcgcaagcaactcggcatcaggtcaggggtgagccaccttcgctcggggctcgcttcttcatgcccctgctactaggttttctccgtttttcatcgctcagtttcttttagatcttgaggaaaaagggcgcggacagaagcagtttcttgtagatctaatcagactatgatccgtgtagcctaccggcgacacgccgaagctagcatatttcatgccctctaatatgatgtgtgtggctgtggcatctctactttcgcgtcttcttccttccacaccgcagctcaggagcctagtcactgccgctgctctcgttaggattcactgccttgccccgccggaacgccagcttgcgaggcggctgcg

SEQ ID NO: 124720 - DNA, 105 bp, Zea Mays
gatggacgaagaaatcgtcaaattataggaatagagactacggaggagtatgcctctggtgggtgtgtgtgtgaaagagaaatagggtcaaaccttttcctaaat

SEQ ID NO: 124721 - DNA, 2449 bp, Zea Mays
atgtccgcggcaacggccaaggaggaggaggaggaggaggaggaggaggaggaggaggaggaggaggcgcccgcttcggtgccggccacggcgcccggaatgggcggcgaggaggccgccgcgcgcgccgccaagaagcgctacgaagccctcctcgctgtgcggtccaaggcggtcaagggcaagggtgcctggtactgggcgcacctcgagcccgttctcatcccgcccaccgacaccgccatgccgcccaaggccgtcaagctgcgctgcgccttgtgctccgccgtcttctccgcctccaacccgtcgcggaccgcatccgagcacctaaagcgtggcacctgccccaacttcgctgcccgtccgcagggactcgccggcgcctcgggctcgcagcagcagcagctctcgctaccgtccaactccaccgcatcgtcgcctgtccccatctcctcaattgcgccctcctcgcctcgccgccgccatcaacaccaccaccaattccgcaatcgcaagcgcaactccatgccccccgcgtacacgacagcagaccccgggtcccaccatcaccacctcgtcgttgttgacccgccctcggtccactcaccggcgttgcccgcgctgccggcgccccctccgccccaccagtcggcactcgtgctctccggtggcaaagacgacttgagcgctctcgccaagctcgaggacagcgtgaagcgccttaaatcacccaaagcatcgccggtcgccatgatgcccaggccgcaggctgacgcggcgctcgctctgctgtcggactggttcctagagtcatcgtctggcgtatcgctctctgccgctggccatcccaagctccgggccttcctgcgccatgtcgggctgccggacctgcagctgcagcacgccgacctctgtggcccacgtctcgacgcccgcttcgctgaggcgcgcgccgacgccaccgcgcgggttcgggacgcactcttcttccagcttgccgccgacggctggcgggagcaggtggtcaccttctctgtcaacctcccaaatggcacgaccgtgttcgatcgtgctgttccggtacccgccatggcgccctcagactacgccgaggagctgatgctcgaagccgtggcttccgtctcagcctcaggttcctccaacgacctccaccgttgcgcaggcataatttctgaccgcttcaaatcaaaggcgctgcgtgatctcgaaaacgagaactacttgatggtgaacctatgttgccaaatccatggcttcacccgtttggtgcgggacttcgcaagggaactctcgcttttccgctccgccacagccaaatctgccaagcttgctgcctacttcaatgccaaacagacgccgcggtccttgctgcacaagcatcaaacgcaacagctcggacatgcctcgctctttcgagtcgcacatgtgccgttcaacggcagtggcgccaactgccgcgcggcctttgagatgctcgaggaaattctgaactctgcacaccccctccattgcgctgtgcaagaggacttgtacaagctcttgtgcatcgatgactcagctgcccgggagattgaggagatggtgcacagtgaggctttctgggtagaggttgatgctgtgcactcgctcgtgaagctgataatggatatggtgaaggagatggaggctgaccgacctcttgttgggcaatgcctgccactatgggaggaattgcgtagcaaggttagagactggtgtgagaagttcaacgtcgatgaaggcactgtcctgagtgtgcttgagaaacggtttagaaaaaactaccatccagcctggtcggcagccttcgttctggatccgctgtaccttgtcaaggatgccagtgggcgttacctccctccattcaggcgcttgacgcctgatcaggacaaagatgtcgacaggttgatcacgagaatggtgtcccgggaagaggcacacctagttttgatggagctgatgaaatggcggtcagatgggctggacccgctgtacgcacaagctgtgcaggtgaggcagcctgacccctccacagggaggatgaaggtcgcaaataagcagagcagcaggcttgtctgggagacatgtctgggtgagctcaagtccctcggcagggtagctgcgcggctcatcttcctccatgcaacctccaggggtttcagatgcacgccatcaatggtgcgctggctctctgcacctcggagactggcaggtggcaatggtagagcacaccggttggtctttgttgctgcaaattcgaagctagagaggggggacttctctaacgatgaagacaaggatgcagagttactcgctgacggagacgatgatgtagcgaatatacctggcactgtggaaccataatcagtgtaacaaacctccctgcttaattgtttcttgttccttt

SEQ ID NO: 124722 - DNA, 580 bp, Zea Mays
tggagggtccgaatccatctctagtccgagcgctcctccctacttctctgctgcgcgctctcatcttcttccccagcaccaccgctcagctcgcccccatgttcgaaggcagcagtccctgctcggatttcgccatggtcgcgcccaactccctgcacgccgcgggctcgcttcacccggccgcgtcgagctctctgctccagctcactgagttttccctctgttcggtgtttcgcctagccgccatgcgccgtgaagctccctggctgcgcgcacgcgtgcttcactgtttggttgtcgtcgcgcccagcctggattccagcgtccctccgtgctctgattttctatcttcgcgtcgatgtgcaagcgccttcgtgttcgcatcccttgggcctgtttcgccttcgcgcgacaccggctgcgagttgaagttaatttcgccgagttactcggatgaagtccgatcggtgttgagaattcgtcatgtggtggtgtgcgtgaaactcatatagtacctaccaagcgctcgacaaattgcctagatcggaaaatcattaccgatctcgcggattcgagtcat

SEQ ID NO: 124723 - DNA, 1163 bp, Zea Mays
atggtgggcgggaggagatggggaggatcggaggaggaggtgaagctcaacatcgacaacatgttcgtgacgcttgagtccctcaagaagaagggcaacaaggacagggcgggcccttcctcctcaaccaggcgtgtgacaccatggtattgggtgagggcgacggcgccgcgtgtgcttgagttcgtcgagcgcgccccgagggtgctcgagcgatgcggtgagggcgccgagctcgagctcgccatgagtctccacgtcgctgctgccatccactgcgggctcggccgccacgctggcgccatcctcgtcctcgagcgtgttgtgacagtcgtgacgccggcgcaagaaccttctgccaacagcgaggctgaggccggtgcagcaggcggcgtcgatgaccagcaatggcattctgccgagtccggctagaggggccagtcagcagtggcgaaggcgaacacgatgactgtgggatgaagtttgggttactcatggacgtgcaacgtgtggcgcacatcatgtttgataggttttatgggttactggggcttccctgttgatttcgagccaaaattctctatcgtgctcccagtgcgagttgtagaagccgcaatggaggggagtacgtcgatgtttgttggtcccactgtcgcattaatggacatttcgaccacccacccctccacccaaactggcatctctttgctccctggtgagttttcctcttgctctatcttctctgtttgttgttttcggcgttgtcaaaatctcaggtgccccaatggatggaagaacaacatgaagaattgaattccaaaggacttgagggctacttcatcacaacctgtaactgaagatcttgaataactgtgactacatcaccatgcaagactaaattttttattttattaagaaagtgaccccaaagaagaagaaacaagatgttgtagtgcactctacacagtcatatgatgtatgttagtttctggaaaaaactagattgttcattgtggtatgtgtatgacagaagtctatatgtgtttcttttagtttgttaagtgatctcggcaaggactaggtaactgtgtgtttgtcttagttgcagtgaactttctgtgttcttgttaagtgaactcggcaaatgaagtatgtgcttgtct

SEQ ID NO: 124724 - DNA, 1357 bp, Zea Mays
gtagaaacaggaggagaccctcctccccctctccggcgcgcgacgctcgccgccgcgcctcccctcccctcctccgaacgacgtggctgccgtgcgcccgaccggccggtgacggacacggcagctgctacgagaggaggaggatatatactagtatatagctagagcaattattagctggtcgtaagcatgaatcgacgattggacatgatagacaacatcgacggccgtcgggtaaccaagaacaaggcgcgcatccaagttggcgactcctcttcgtcggacgaaagcgacagggagaaggaggaagatgaagaagaagcacatgaggaagtggccaaggcgcccccgctgggttggaatcatcacaatcaccacgaagcggccggcggcattggcagcaacagcaacaggaggcggcttctgtcgaagcagctgtccatgaaggagaccaccagggagatcaaatgggagaagcgccggcggcagatactgcggcgcagcagcctggtggtgtcgttaaacgacgacggaggaggaggatgctgcggcagcatgaagagcgccgccgaggaaccggaacggcactgtcatcatcacgttacgaggtcttcgtcggagcgcgtaatgaggtgcctgaccgacgaggacctggacgagctgcggggctccttcgagctcgggttcgggttcgacgaggagtccggcggcgcccacctccgcgacacgctccccgccctcgacttctacttcgccgtgaaccgtcagctgtccgaccccgccaagctgcggacgctgtcgtcggcggcgagcctcacgtccacgccgtcggccgtgtcctcgtcgtccacgctccccgacgtcccgaacgacccacgcagccccaaggtcggcgcaaccgccgcgtctggcggcggcgccgacgcatggaagatttttacgccaggtgacaaccctcagcttgtgaagacgaggctgaggcactgggcgcaggtggtggcttgctccatcaagcacggctgataagacgacgcgcggacggacgatgtcctgtgtagtcgagagcaatatgttatataggtgggtggccaaattaaaatgtgaaactcttgatgaatgaattaataaccagcaaccaccaagaatgatcgatgtctaaacacgcgtggtcgccgttgtcgtctgtcattcctcgtgtacagaagaagcttagtgcctaacacatgaattaacggtacactgaatctatcacatgtctcgcctatatatgttcctgttgggccgtccatcgactttggacattttggaacccacaaaccacacagagcaatactgaaaaaaatgtgggtttacagag

SEQ ID NO: 124725 - DNA, 357 bp, Zea Mays
gacagggtgttcactgatcagaaggataagattgaggtggtctgggatttttacagcaatttgttgggatctgcgggacagcgtaacttcactcttgatcttcaatcctttcatcgatcagctgttgatcttaccgagttagaccggattattgacgaggaagaaatttggaacaccatcaaatccatgccttcagataaagctcccgggccagatggctttacaggtagattctacaagatggcgtggcaaattatcaaagtagattttatggctgctgtgaatatactgtttcagggtgatgatagtagagtttttctcctcaattctgcttatattaccctgctgcccaagaaa

SEQ ID NO: 124726 - DNA, 1436 bp, Zea Mays
cagccccacaacacaagctgagagaggccatcgctatggtagacgaggtcgggccgccggagaagcctgcaatggagccagcaccggccgcgaagcagatcatggtgccggagaagccagaggagatgctgagagctcagcatatgttgaccactctggtggacgaggtccggccaccggagaagccagaggagacgccggagaacacctccgcaggatgtccaactccatcctacccccgcccaagaatgttgatgtcgagcgctccgcctgttccgctcccgcgccgccaacgagcaccgccgagctcctccctggcgccacgtcccgacagacgtcggcgccgagcggctggctccaccgtgctgagttgaccaaatgggtctgatggaaagaggagcatttgctgcttcttggcttgcaaaaggcatcctgacctacatccacccagcataaaaacgtgtattggtcacatcatcaagcaaataggtgatacgatgctttatgtcttattcttacaagcatctgagtcttatggtttctttggttttcttctttcttaattcttatttgttttttgtgaagttacgtccaaaaattgacagaaggaatagctcatacacacttgataacacactttcttctttttatcagcatacttttcagtcctttctaagttctaacgttgtcactttccaaatcctgttgtcacttataaaacttgcacattgatattttatttagtatcagtacaatttatatggatgcatatgtttagatgaaacttgatatttgattttgtatcggtacaatttatatggaggcatatgtttagatgaaacttggtgaagcattgttcaatattcatcacaacttcaggaataataacaacgacaccatgtggaccattacttcgattttggcaaatctagtttcaaaacattcgagctaaacaacactaaggacaatagttcatacaacctcatgaaagaacaatgccaacatagaggtgcacaacatatgtcatactttcaatttttcattgtcctaaaaacacagcaatatgtgccatctaatactcatgatacgaaggtaagtggaagacaataaatttgtagcaagcttctatgaaatagtacacagaggtgatgaatacatttagttccatgtctcaagcactacatgtcaacctttttactaatacatttttatagcaggcaaatctagcttgcttttgtatgataggtcactaggtcagtaaagacaaattaagcattatgtgccagaacatctacctgtatagaaataccttccttcatgcaaaggaacactaaaatcataccacatatagttacttataaaaatcacttataaatgtttttgaaccacgacgccgcacgcgccctgcgcgcgccagctactagtaaattaaaatg

SEQ ID NO: 124727 - DNA, 2678 bp, Zea Mays
atcgctccagttcgcgctcatggcccccactgctgtggatcccggtcccagcgaccaccttctagcgccggcgccggctgccatggctggaggaggggatggcggtgatggacagatggaggtggtgttcaatgtgagcagcagcgacaccgactccgatgacctcggcgccggtggtggaaagaggtcgcggcccgtggcggggcaaggtggtggcagggatcgagaggacaagaaggccagaatcttggccgctgccgccacggtcccagccggattcctagagccgctttcgccggtgaggttactccccccgccggcgccgggaaggagcgtgacgaagcagttctggaaggccggagactacgtcggcaagccggatcacctgcttgccgtagtggcggctcagcattctgattctggaatggatcacgttcgtgtgcatcccaaatttctacattccaacgcgacaagccacaagtgggcactaggagctttcgccgagctgcttgacaactctcttgatgaagttgtgcatggagcgacatatgtgaacattgacatgatagaaagtaagaaggatggaactccaatgctgcttgttcaagacaatggtggggggatgaacccagataagatgcgtcattgtatgtccttgggttattctgcgaagagcaaagtcaagaataccattggacaatatggaaatggttttaagacaagtacgatgagacttggagctgatgtcttagtgttttcatgtagtcgtggtattgaaggaacaaggcctacacaaagcgttgggatgctatcatacaccttcctaaggagcaccaacagagatgatatcattgttcctatgattgactatgaaaaagagaatgaatggaaaaggaaggcacggacaacattgactgattggtgtatgagcttagaaacaataatacaatggtctccttattccacagaagcagaacttattcaggagtttggctcaataggggaacaaggaactcgaattatcatatacaatctgtgggaggatgatgaaggagagctggagcttgattttgatgctgacgcaaatgatattcagattagaggtgttaacagagatcagaacaagatcaagaaggcaaatcagtttccaaactccaaacacttctttacttatagacattctctaaggagttatgcatcaattttatatcttatgctcccggataacttccaaatgattttacggggaaaaaagattgaccaccataacattatcaatgatctcatgctaaagaagcaacttacttataatccaacagtgggcgatggacttccaaaggatatgcatgtggcagctaaggtgacaattggttttgttaaggatgcgagacaacatattgatattcaagggtttaatgtttaccacaagaatcgcctaataaagcctttttggagagtatggacttctgctggagttgctggccgtggtatcataggtgtactggaagtaaattttgtagaaccagctcatgacaagcaggactttgaacgcacaaattgccttgcaagactcgaagcacgattaaaccgaatgcagaagaaatattggtctgataatcgccatcgaattggctatggaaccaatgatgctagcacagattctgtaaaaaggaaaacaggactgtcgttgcgtccatttggccaaggttcctggaagtcagggtatctgcaaacgatcagaagtgatggcagatcatgttctaatacaacaaataatattatgaatgcaagcatgtcatccccagaaacttccaagcttagtggtcccaatagagagttctcttcaacaacagtgtgccagcacagagctgaaaagtctgcaaataccataagatctgaaagatcagttttgcatggcttgtcaaatacagatggtggaaagactgagactgccaacgccccatccaaatcaacttcccctatcctaaggactagtttgccaccaactcccaatgaaggaaaacgaagtgagaggattgctgccaaataccaatcgaagcaagtaaatgcaacaactaatggagacagggaatccattgttgaccctgaagctatcatcaagaagttgaaggaagaaaattcatcgctaaaggagagaatcttgatggtgcaggaatcattatcaagggaactgcaaatcgagcgggataagaacaagtctctgaccgagaggtttgaggatgtggagaggcaactcgagttggcaattaaagagcaagaagcaacggtagaactctttgcagaagaaaggaagtgccacgaccaagaggtggaaaacctgaagcggaagctcacggaggcctcttccaccattcaggatctgatggagcagctcaatgctgcccggaactgctgcaagagatgaagcagcagacgaagcaacttcaccccccagtaatacgttagtacgtgtatgtcaccagcatgctcttagcataaataatgcccagatggttgtggagctgttagcagtagcagaccagaatgctctatgtatgtttcacgtcctgttgttagatgtgtggtagcaagtgtaagatgattgaatgagactaacgtgatgaattccctaggccctcatggttcctgatttagtgtaataataattagagaggata

SEQ ID NO: 124728 - DNA, 1432 bp, Zea Mays
ggttttgcattggctgattgcatcccgcctccgccttaaaccctaaacaatgacctctcgcgccgccgcggaggccgccctcctccttccgctccgcctccactctgccccgctccgcctgcgcttcttctgtacctccgcctcccggctccgatgggcgtgttccgcggcggcgctgcttgccgtcgtttcgctcgtcaccgccatctgcgctatgcccgacgccggcgccggcaccaacgttgaagccgatgccggcgccttgcggttggagattgaagcgctcaggctaaaggtcgcgcggctggaatctcttctagaggcaaattcgaaggcattagacattaaggctagtatcttggaggaggacaacaaactcaatgaagcaatggaacgtgaaatccagcttttaacgaatggaccagacagaactaagaactcccaaagcaaatcatattctgctggcaatattaaatctatggaagatgaggtgcggcaacttcagcacgagatcattaagataaacagcaattcttacaccgttgaatcattagcacatgatactgagaaaagggtggaagctttgagcttggaggtaaaaaagatagaggatatgactgcagaacaatggatccaaattcgacaacttgaacaagcatttgtgttaaccaagatgatgacgtcaaaagttcatgagagaagtaggccatcagatacagtttataagtggcctggaaaagaaataattgttaagtatgtcaggaatatcaagcttgatggtatttatattagaggggcgtcatacgtgaggtcctgtttttcacatacatataaacagtccagaagttttgtacaagcaataagcagatgctaccatgagacttctcggttccgcaaagcaattcgtcacaggtatacatctgatattaacaagcctgatgtgttctttttgggtggtaccatttcaagatcaaacatttctcttccatataaccaattcaagattttcatctcattggcacggaagtttcattacaaggcccaaggttttatacgtgatgtgatggaatccaacaaatatagttgtggtttgtcgaacgagccagttacatttatcttggcatatcttgttgtcatttctccattgtggatcgcttggttcctttattcaacatggttcagctcaaggaagtgacaacttgttggaaaacaggaacgttgcagtcatgggttcttttttcttcttttttaggttcaaaaggtatacacgtgtgacggaagacaaatatgtggaaaatttgcaatcaccaggacttctaagaaatataactgtcggcgtttcgaccccggggttcctggactgatgagtaaattgtcgctgcgtgtcccagcctagatgggtagacgcgagatggaacacaagggggaaaaa

SEQ ID NO: 124729 - DNA, 541 bp, Zea Mays
aagcttattgtatttgcagatgtatagtgctcagatgggatctcaaatgggaccccagttcacccgtccgtcacaatctggacagacaccaaacaccaatgaaacacagggttctgagaccggacaaggaaacccacagatggacatacattggtcgatgccccctagaggacagattcttcctcctccacaaccaggcatgggatattggccgccaccaccatggggatatcctacacatccaatggggccttggggacgccccccatggccaacacagccacttccgtcaccagcggattccacaactcatcaagtgactcctccccctcacgataactttgcggatagatgtcccaattctagtggtggagctacaaacaacaatccgatgtcctgatcgagagcgatggagctaatgtttgaacttgtatatttgaacttgtgaactacaaatgtgaactatggatgtgaacttatgtatttggacttaattatgtgaatttgtgaacttatgtatttggacttgtgtgaatttgtg

SEQ ID NO: 124730 - DNA, 781 bp, Zea Mays
ctcgatccttcctcttcctcaaccgtgcgggcgatcgatcgcaccgccccctcgcccgaccccatgccttccacgtcgcggtcgctcgtctccaaggaccgaaaaccgccgccctctccccttcctctcccccattttctctgccacgaaaccgacaccattaatggcttttgaagccgtcgaccggctctccctctcccccggcgttctctgtcctcccttctctctataaagctgacgccaagccccatggatccggttcccgtgcctcctccctctcccgcgccctctcctctctcgcggcgctcgccgctgaccggagccgcgccgtcgtccgaagctcgctggagcccctgctcgccgccggagttgcccgccgtcgaggacgccggagacctcgacgccgcgcccacgtcgaccgtctcccctgttgtcgtgaccgcgcccctgctccctggccgaccccccgctcttcgatttcgtcccagcgcaagaactagtggagcaaggttgaagatgacacaaattttgtgttctattttcaaaactatgtttgatttagtttaagatttcctgcaacaaatttgttgtttaaatttatatatgtcgtgaaatcgaaatcatgcgaatgttaaacaattaatatcaagtgtatgtgaaggattattgtttctattatctatcacattgtgtatgttaatttgattatatttgttcaaaaattatttaaaagatagttgtttagaataaagaataaaagcatagggtagattagagatgt

SEQ ID NO: 124731 - DNA, 2464 bp, Zea Mays
atctgaccgccgcccatgaccgaaccgaacaaaccagcggagcgtgcggtgggtgatgataattcccacatccgctgctcggggtgcggtcggcgcgtgagaccgtgcgagagagccagagagggcacgcaggacaccaccgcggcccctgccccacgcccacatcggctcccgcgtcggccccgcgtccatccggccgcctttccgctcaccgtccgccgcttcttctcccctgtgggcccgtgacctggcctccctcccacctcgccccgccgattcagctccccttcctcgacgcaggcatcggggccactcatgcataacgttcgcacggtgttccgcttccgcccgtcttgagaaactaaaacacacagagagagcagtagcggtagcgcggacggagtgggtgcccgggccgggcaccagcggaaggaagaggttgccggcggctgtagacctcacggcgatggatatcacggaggtaacggtggtgcaccacgcagcgctcgtgctggcggcgctctgggtcgccgcggcatccggctggacgcacccggcgctcttcctcgtcgggctcctgtacatatttgcggtgaatcaacgatacacaatgaggctgtggaggcggatacagtatgaggaaaggaaatgtgccaatcagagaaagcttctctctgatgcagagactgtcaggtggcttaattacgctgtggaaaagatttggccagtttgcatggagagggttgcatcccagcagttccttttacccatattcccgtggttcctagagaagttcaaaccatggacagcaaggaaagcagtaatccaaagcctttacttgggtaggaacccaccgatgtttacagatattagggtagttaaccaatcaaccgatgatgaccacttggttctagagatagggatgaattttctttcagctgacgatatggatgcaagaatggctgtgcaactaaggaagagattaggatttggcattacaacaaacatgcatataactgggatgcatgttgaaggaaaggttctggtaggggtgagatttctgcggcagtggccatttattgggcgtgtaagagtatgctttgttgagcctccatacttccaaatgacagtgaaaccgctgtttggtcatggacttgatgtaactgaactcccaggaatttctggatggcttgacaggatgctggatgttgccttcggacagacacttgtggagcccaacatgctagttattgatctggaaaagtttgcctctgaatcaacagataactggtttagtgttgatgagaagccacctatcgcatatgctcgagtggagatcctggaaggtgctgatatgaagccatctgatcctaatggactagctgatccatatgtgaaaggacaacttggaccctaccgttttcgcacaaagatccataagaaaactcttgatccaaaatggctcgaggagtttaaaataccaataacttcatgggaagcactcaatcttcttcatcttcaagtccgagataaggatcccatttttgatgacgctcttggcgattgttccataagcatcaacaagttaagaggtggaataaggcatgatatatggattgcactgaagaacataaagacagggaggattcacgttgctgtaactgtacttgaagaagaaaatgaaaaggtttctaatgatgaagaggaacagtgtggaatacacaaggttgacaaggctagcacaccgaggtcaagtttctcctccaggaccaaccatgaaagtgaatgttctgatgaattccggaagatgtctgatgaatttgagccagttgacatagaaggatcggaaaagcccgatgtttgggtgcatcgccctggcagttatgtcaccagtacatgggaacctcggaaaggccgtgcccggtgccaggattccagaattcaccgggagaatgattcttgtagtgatagtccaaggtcatcagtgtcaggatctcatagaagtgactccagcactgaagaacccacgagcagtaaatcgcatcgccaccttcaaaaggtcaagaagggtttgggcaagctagctggagcagtgctccaccggagcccaaaggagaatgatgacgaagcttccccatgtgtaactcctcaccaaaacattcgaccggtcggggaaagcagggtttcagtaacatatgtggtcgatcaagatccagcaggggttgacggatcggggtcgagacgagatgaccaccagcaaagccctgagagagaggagctggacagcccgagtaaaaggcatctgaggaagaaggcggtgcacatggtgaaacatgctgggaaaaccgctcataacctaaagagcatgttcagcaagaagggccttgacaagagcaaagaagaacaccgcagtgatgaggaatgcgacgaggaaggcgacgttgttgctgctagaagagtgtag

SEQ ID NO: 124732 - DNA, 2347 bp, Zea Mays
tcagttttcacccatcccttcccagttctgtccctctcgaaccctaactccaaaaaccctcgctctcctctcatggccgccgccgcagctgacgacgcagccgaggtggagcggctttacgagctcggcgagcgcctctcctccgccaatgacaagtccgagcatgcggcggactacgaggcgattattgcagcggtgaagggacagagtgccaaggcgaagcagctcgcagcgcagcttatccccaggttcttccggagcttccctgcactcggcacgcgcgccatgtcagccatgttcgatctcgtcgatatggaggagctcgcgatcagaatacaagctattcgtggctttccacttcttggcaaagatactgaatttgtgtcaaaaattgcagatgttttgggtcagctccttacaagcgaggaaaatgttgagcgtgatgctgttcataaagcgctcatgtcccttatacggcaagatgttaaaaattcattacaacctttatttaagcatgtggagcaaggatcagagattcgtgagaagattatttgttttcttcgagacaaggtctttcctcttaaagcagagctgctgaaacctcaagcagaaatggagagatttataacggatttgataaagaaaagtgtgcaagatgtaactggttcagaattcgaactattcatggggttcttgcgaagcttgagcatatttggggattctgctcctagagagtcctttcaagaactaattgaaattattcaagcacaggctgatctgaattcacaattcaacgtttctgacattgaccacattgagaggtggatttcatgcatgtatatggctcttccgatcttcatgagaggagcatcagcaagcaagttcctcaattacttcgttaaacaaattgttccagcatttgagaagattcctgaagaaaagaaactggatttgctaaagactattgcttcaagttcaccatatgctgcagcacaagattcacgtcagctgcttccatctgttgttcagttactcaagaagtatatgcctgggaagaaggtggaagatatcaaccataattatgttgagtgcttgctatacacttttcatcatttggctcacaagactccaaacacaacgaacagtctatgtggttacaagattgttactgggcaaccatcagatagacttggagaggacttctcagagcattacaaagatttcacagagaggttaactggaacagaagagacggtacgagcagcctccaagcgactaactcaggggatggcagatttcaacaaggcaatatcttcagcaaaaactgacgaggaaaagactaaaattaaaggcgatcagcaaacttcaacaaggacaatgaggtcatataacaatatattggcaatgacacagtcattgcattcaaaatcccctttatttatcggtgataagaaaatcactctgtcatggatggagcagcccaacaaagcagcagctacgaaagcaggggggaagaggtcacaacctagtacaaatgggaatgaccctgcaaacaagaaggggagaggaggaatgcaaaaccagctagtgaacagagcttttgaaggactgtctcatgttggaagaggcagtggaagagggcggggcaggggtggccgaggaagaggaagaggatggagtgggtaccactgagatgacctggaaattctgttcaaacctgacaagggatgagctttctgcttccaccagagagtaaactccaaggtcgatgttttattggtgtgcattactgcaacgcgttgaaatggatcaaggcacacaacagcagaaatgcgtacacagagaaaggatgctaagaaatgtctgcaagtttgtgcatctttcttattcatttaccatctcatcgtgttctttgccaccctaaccgtcgtgtcacttgcgttggctggctgtttgatgaactgggcagttcgatatctttgttctttattttattttacagtgtttgaagagacgaccaagcttgtgctgactttgtttgagttcgttttatgtttcgtccttgtactgacacagatgtattagtgatgtttaacttttatgtaacgattgatctagctgtaatataagttaagcatttaatgagatataaaaatgaaaagaaatatttggtgtcaatcaatacaaatttaacaaatcatgatttccatttgagaaaaataactgaatcagatcatccattagcagggaaccaatgaacatcctgatcaacactaatgtgtctggttcagctataaactatgaaaaaaactgtttttgagttgtctgctttgaaaaaaaaaatata

SEQ ID NO: 124733 - DNA, 612 bp, Zea Mays
tcagttttcacccatcccttcccagttctgtccctctcgaaccctaactccaaaaaccctcgctctcctctcatggccgccgccgcagctgacgacgcagccgaggtggagcggctttacgagctcggcgagcgcctctcctccgccaatgacaagtccgagcatgcggcggactacgaggcgattattgcagcggtgaagggacagagtgccaaggcgaagcagctcgcagcgcagcttatccccaggttcttccggagcttccctgcactcggcacgcgcgccatgtcagccatgttcgatctcgtcgatatggaggagctcgcggtatatgcctgtatctctctagattcccctgcccgttggcagagcggtatgtttgggcattattctgtgtaactacctgttgagagcaaacccactagcagtttatgctatagattggtccactgtttttgagcgaaccaaaaataactgaattgggtttcctttgtgtttaggcagctccattttggaaattaaatttaaaaaaaaaccagagtcatttgcttattgtactgtacattgtattatttttctgccatttattactctattcctatgagacgaaca

SEQ ID NO: 124734 - DNA, 552 bp, Zea Mays
atggttgattcgtgtatatgccggcattggatcctcgggggttgtctagggagcttcgcggagtccgctggatggtgctcgtggccttctcaggcgaggagaaccatcaggctcgctaggattgctcatcggacttcgtgtcctacggccgatccgcctcaggttgtggtcgtcatcgtcgtcgctttaataggcggtaagaagttgtcaactgagttttccatcttcaattcatcaattgtatgtgtgtagcgcgctccagattaaagagtagtgcgccagagcattggtttgaatgttgtcggcgagctaccccactgcgatgagaaacctgctctacttattagtccgtcgtcgttggtcgtcgggtaagggagggaggagatgagtcgtggatcaggccaggaacagctgagatttgattgtaatatttttgaatcaatttcttttgtaacaaactctgatgatatatattgtaatcttgttataacttgtgaatgttgtaacttgtaaccattttgtaataaagaatttccgctgcaaatgttgata

SEQ ID NO: 124735 - DNA, 190 bp, Zea Mays
tttttttgtctacatataggttgagtgtcagtcatcttgttcttccttatgtttgtccatgtccttattctacttcagttcaatgcttttctatagtgttgtttgctgttttatataaaataagaagtcccttacagtaaactaaaccaacctaggaggaactaggtacattgcaaaaagaggactttag

SEQ ID NO: 124736 - DNA, 375 bp, Zea Mays
atgcaggctcgtccaatcctgtcccgcgggatacggccaattccccgcgccctgggcatgcaggtgaacgagcgctttttagacctggcctgcacccacgcataccggcttgggtggtgctgtgcagtgtttagtagggagaagctcaagattctacaagatattcatgaaatggagcaagggggaattaacaaaatggccaagtcccagggctatggtcgattgtccccacatttaggagttaagagtcaaggatctatcattctagactcatcagcaagagtctggtatgagtcctcttgtattcctctcctgtgtgacctaaggttattgacactggtgctcaaaagtggctcttatagctcggtggccaaa

SEQ ID NO: 124737 - DNA, 1007 bp, Zea Mays
ataggtagctcactgtactgtaccctagctagtcgcctccagtccagagcgtcccgagactaatggcctgccacaccgtcatcccgcttcttctcttcctcccttccctcttggcagcggctgcggacgacgtcgcccctgctcctgctcctgccccggcggcaccacccgagcccaccaacaacaacctgaccagcatcctggaaaatggcgggcagtacaccactctgctccgcctcctgaacgccacccggataacggaacagatcagcagccaactcaagaactcgtacgacggcctgaccttcttcgcgcccaacgacaacgccttcgccaagctcaaggccgccggcacgctcaacgccctcgcagaccaagaccagatccagctgctgctctaccacgtcctgccccgctactacagcctcgccacgttccagacggccagcaacccgctgcacaccgaggcgtcgggccccgccggcatgtacagtgtcaacgtcaccgccagcaccacgaaccccctggtgaacctttccactggcgtcgtcgacgtgcccatcagcagcacgctgttcgctcgcttcccgttcgccgtctactccgtcgacagcgtgctgctgcccccgcagctattccacacggcttcttctgcgccggcaccaggacagtctgcagaggcgccggtgcctggaaaggcggcaccagggcacaaggggggcgtcccaaagagcggcgacgatgtgccagcgcagccgtccgctgcggtggatggggcacaagacaccagtgtcgccgcggatggtagagggagcgcggcgtggatgacgccggtggttgttttgggtggcatggccctactgctttgcgcgtgagcagtgtgtgcttcgttctgttttgttttccttggcatctctctgatttctctctcgtggccggtttgtatgtactgcccttaaaaatgtaattctgcatttatgataacgatgatacgatggttcacttgt

SEQ ID NO: 124738 - DNA, 1603 bp, Zea Mays
ccacccaaatttgttcctctcctccatttcctcccttcgccatcatcccctcggctccgctctccttccctccccggctcaccccgccgctgccccgcgcccgtggagttcttcgatcgagtcctcggagcctggagcacctcgtccaacaatccgggaccgcacgagaagagagagagggggtggtttgacacaagtcaggcacccgtcaagattcggctcgatctgctgcgggacatggagctggacagcatcgagtgcgtgtcctactccgatggcatggaggacgacgacgacacggccgccgtcacctcgtcccagctccctcgccccttcctcaaatcctcctctaccgccggtgctgccgccgccgccgccgcggccgtcaacgtggtcgtcgtctccgaccgcgccggtgccgccgggacggtagcgggagctgggccgctggtgatatctccggccacgggcgtgcatgagcttctcgagtgccccgtctgcaccaactccatgtacccgcccatccaccagtgccaaaatggtcatactctgtgttccacctgcaaaactcgggtgcacaaccgctgcccaacttgtcgacaggagctcggtgacatcaggtgtctggcattagaaaaagtggctgaatcacttgagctcccctgcagatactactctcttggatgtccagaagtcttcccatactacagcaaactaagccatgagtcacagtgtagttttaggccatacaactgtccttatgctggttctgaatgttcagttgttggggatattccttttcttgtggcacatctacgagatgatcataaagtggacatgcactctggatgcacatttaatcaccgctatgtcaagtccaacccaagagaggttgaaaatgcaacctggatgctaactgtgtttcattgttttgggcagtacttttgcttgcactttgaggcatttcagcttgggttggcaccagtatacatggctttcctacgatttatgggtgacgaaaatgattctaggaattacagctatagccttgaggttggtgcaaatggcaggaagatgatatgggagggaacgccccgcagcatccgggacagccaccggaaggttagggacagccatgacggcctaataattcagcgcaacatggctctcttcttctcaggtggagataggaaagagctgaagctgcgcgtcacaggccgtatctggaaggagcagcagaaccctgactcgggggcctgcattcccaatttgttcagctgagctgagtaacaaggatgaatccaggtctgtgcttggtgttttgtccttgccaagctgccattgcagcctgccctaaattagttaggttgttggcaggataatgaaaatacagagttcctcctcctgtgggctggtgaatctcatgataagcaaatttttttctcgacgatacagatttgtgatgttatgtttgcctcggtgtattttgttgtctggaaataaactgttgcgcagtaactgcatttggttggctggtcattagcttgtcactctgagtttgacgtacatcatgtttaatgcgacagtggcaatgggttttata

SEQ ID NO: 124739 - DNA, 110 bp, Zea Mays
caaatatgcatttgaaattttaaatttaggttttaatgcaccaagaaaaacaccagtatgaaattcaccaagttatgtatctaggtattggtttcaaatatgcaatacat

SEQ ID NO: 124740 - DNA, 4416 bp, Zea Mays
atgctgcctccgcccacggtagtagccgcgagccgaccgacgctcgtcgacgcgggtacggggcgagtcggtcatgctcctgacctttctctacatgtgccgtcgaggaggacatggtggcacctgccacacttaggttatcttggcgatgaggagtccagcgggttcagggctgggaagacactcacattctctcgtccgtctcggactgacgcctggtgcgggtgcctctcagtttggagctgctccgactgggcttctttctccgcttgtgtgctctctccctatatatctatcggtataatacatatgtcgcctccagatgccaaggtcttcgtcgtgtccttctccgacaacgaacaggacaaaagaaaagatgtcaatggcatcaaaattttaccagcatgctccaaagaaattttgccagatcatgaggtttctttcacattgagcctctatgagagaggttatctcatttcaaagtcagcacccatggatcctagtcagacctcaattcaggacggcaaaacactgcatccctatgatagagcatcagaaaagttgttctctgctatcgaagctgggaggctacctggcgatatttttgatgagataccaagcaagtactataatggatcagttgtttgtgagatacatgactaccgaaagcatgtgtccaaccaagcgcctgcatcatctgctgagctaggatcaccaattgtgaataaagtacgactgcgaatgacctttgaaaatgttgtaaaggacattacccttctatctgatgattcctggagttacagggattttatggaagctgaggcttgtattttgagagctctacaaccggaactttgcttagaccccacacctaaactggatcgacttcatcaggatcctgttccgcataagttgagccttggtatagggaaaaagaggaggctgaggcaaaatcctgaagttgtcacatccagtcacatgtctcatggtaaaaaggtttgcattgataggttacctgaaagtgccaaagctgatgagatgggcatcactagcagtaatgcagctcagcaggttggtggtaacattaccatccaaaatatgtcagtctcaggtggttctcagacacttagaccaaataattcttcacaagatgctgccagaacgcttttgcctcaatctggtctacagcaaaccttgtgttattctgctgctggtaatgatcatatggcaggaccacctgccaatttttctggaaccagttcatgcatttcatctcatcagagcctgattggttacagtgactctgtggctgccaacagccttctatctgtgaagagggaaatgcaggatgcctcgcttcaagatcctaagagaataaagcgaactggtggtattgatgatgtacagcagcagcagataaggcctcaaccccttggtgggcaggagatgcaatggaagaaccatcaactgcatccacaattagatgttaaggggatgcagtatgcatcttcactgagtggtcagagatatccttcttcgatgatgaacaacatgcaagatccaggatcttccttatattttagtcatcagcaaaatttgagatacgatgctaagcaagagcagatggatggttctgataagtcaaaagacaccttgcagtctatggcacctgaaacttccatgctggatcagcagcaatcccaatctcaacatttaccacaacaatcagtggcaagaaataatgttccaaacatgggacagtggcaaaatactcggttcgcagctgagaaggacttcaaaaaagaagacataattcagagaagaaagttagcacctagctctcgtgcccctactgggcctgtgattcagtctccagtgtcctcgaaatctggagagttatcaggcagttcaatgggtggccagtttggttctgctgtgacatcagctgtaacaggggtacagaaagataaatttgctgcaaattccggtactgcagttggatttccttctgtagcttccagtcctagtgattccatgcaccgaatacaacagcctgctgttgcttcctcaaagaggaaaacaaattctgtccccaaaactcaaccgcctgtgagtgctgttgggtctccagccagtgtttcaaacatgcatgcgctgctgaatgcaagcagtccatcgattgggaccacacctatgggagaccaagcaatccttgataaatttgtgaaaattgataacatttcccatcggtaccagcttttcaataagaagaagtttgataaaatatctcaaaagaaaaccattatcaatcgaaaccaaaatgtagctggttgtctcaacagttgtttccattctgaggattatatagataccacaagacctctttgtaattctatgattagtggaactataaacacatgcaagggtagggtaataaactttgtgagcacaaaagacatgtaccaaggtcattcaaggccattcccggttgattttaacgaactgtctgatgaaactgtaagaatgcaatatggagatataaaagattttgatgatccaaattcatatggttgtgtattcatattaccgacaaagcactatgctgacttgtttgcggggcagcttatttcccttatgttgcaagatggacattctaaagctgacgatgaagttgtgcgtagcaccccttttgctaacatcagtacaccctttggacctttaccaaacaacgtagtgagtgatgtaaagcaagagggaggtgtaagccaacaacttaatgccgcagcccatgcaaatgtggcacctggaacacaaatgcaacagcttcctgtcaataggatgcttccatctgcaaatggcaaccagattctagcaatgcagcaaggttatatgcaaggggcagccatgcctccaaggagccagcatcttgaccaaaatttggttcagcagccgcagcaccaacagccacaacagcaaccactgcagcaaaatgctcaagcccaggtgcagcaaccatcatctcttccactgaaccagatgcaaagacctcaggttctgcctacgagcccattatctcagatgttggggcctggctcaaatctcccaatgggctcaagtcagataggtaagaataaggctcctcccacatctttgcagcttcaaatgctacaggcacaaccccaacaacctatgtctaggaaagtgatgatggggcttggctcagccatgaacatgggcaatatggttaacaatgttgttggtcttggtggcctcggaaatgttatgggaatgggcaacgtgcggccaatatcttcccccatggcatcgatgtcaggcttaggtaacaattccaatccaatgaacatgggaatggcatccaatcttgctgcagctggacttcggccaggcatgaaccctgctgctattgccaaggtgcgtatggggttggcacagcaaagggcagcaggcatgtaccctggaatggttggaatgcctggaagcagctcatcaatccttcctagttcagctggcttgtctatgatgggccagccgctaaacagaggcaaccttggccccctccagagggccatgatgtcgtctatgggccctccaaaaatgccaggaggtaactttcagctgaatgctcaacagcaaatacacctccagcatcagttgcagcagctccaacagaacccacagcagcagctccaacagctacagcaacagcaacaaatacaacaactgcagcagcagcagcagcagcagctccaacaacagcaactgcagcagcaacaacaaatgggatctccgttacagcaggcacaggtgggctcacctgctggctcacagcaatcgccgatgatgcagcagcagcagcagcagcagcagcagataagccctcagcagatgggacagcaggctgcaatgagcccccagttgagctcaggaactctgcagcaaatgagcaataacgtggccaaccctgtagccactccaggccctcctccaagcccgcagctgagctccggtcaacagcatagctaactccccgatggagcagctgcaaggcgccattaagggaggtcctggtagtagtaaccggagtccacttcttgcctatggaaggtgtaaacactgaccaagatcactctgttctcttgtttgctgtggtaaatgaggttaaattaggtgtgttataagttataggccatagaggacagctttaaggaccagctttatgcttggatttttatgctgtacattgtagttagtaggaatggtgtgttggagctcggtaatcagttctatgcaagcattattcaattggacagttttctactcttgtagcttcatgtttaaatttaaattaaattcatcaaaattgtggacttgttacgtaaccattgtggttaccga

SEQ ID NO: 124741 - DNA, 435 bp, Zea Mays
atggacagagcaggcgcgcgcggggaagatgagcaggggaaaggagagatccgtgcgcagggaagcttcagggaggaacttgacggcggccatggcgagcggggcacgagcttgagggcgacggcatcatggggcaggggagctcgcggccaccataggagagggagcaggaaccagaacgtacacagagaactccacggcaagggagctgagagcaggacacggtccgagctgagggcgaggaaggagatggggagggcgctcgaccataggagacgcgaggaagcttggctgcttgcaggctggacgctggagcagagaaacgtcgagcagagcaggcaccgaacgaactggattgctggccggttggagaagagaacgacgcgcgtagataaagatcagggcggccaggaaaaatatcccaccggcggctga

SEQ ID NO: 124742 - DNA, 98 bp, Zea Mays
aaacagagaatcctagatatttcggatcacgttttttagcgataattaaagggtcgataatacttgcgacacagttcggttcgattcaaaatctgata

SEQ ID NO: 124743 - DNA, 249 bp, Zea Mays
atgagatggatagtagctctgttgcttctcaccctcctcgttaccttccacatagcccaagccgatgacaagtcgtccggggataaagaacatggttctgattccaaggatggcaatggtccaaactcacagagggataagggaggtgatgaagagcaaggcaccagcaaaggcgacagcaataatgggggttgggccggtgaaaaacccgcattgccaaaagccagggcgaggcccggatccgcatga

SEQ ID NO: 124744 - DNA, 2310 bp, Zea Mays
tctccggcccggccaacatgcgccgcacgttcctcccccgcttaaattaggcggggccgccgccctcccctttttttagttttcccgcggcccggcctcctccatcgcctcgcctaattcaacccctctcggccgtcgtgcgcgacatactctcttctccagcccgtcccgcccaccgctgctcccttgcctgagctgccgcccgccgtgggatcgatcggtaatcggtccagagcgcggtgcagcgagcgggagagcgcggggggcgtcgtcgacggccgtccggtccgtcgtgccgctcttgcgttcttggccttggtccgcgcgcgtccttcatcaggtgggagccagggtggcgcctcgtgagttggcgcggcggtgcaagaccgccgggtgccgcgcgccaagctcgaggcggtgggctgggtgatggtgcgcctcctccggcgcggacacagccttgaaaagaccggatcgcacaacaggaacatcagcagcagggaggacgccacctcaggagcggcagccacacggccgagatgcacgagtccctttccaatggagccggcggcaccccgccccttcccaacggtcgggcagcggctgccggggcggcgcggtcgcgcctgggccgcgacgggccgccctccgagctggacgtgatgaaggagaagttctccaagctcctgttaggcgaggacatgtccggcaccggcaagggcgtgccgtccgcgctcgcgctgtccaacgccatcaccaaccttgcggcgtccgtcttcggcgagcagcgcaagctggagcccatggcgcccgacaccaaggagcgctggaagagggaggtcggatggctgctctccgtcaccgacctcatcgtcgagttcgtgcccacgcgccagaccgcggagaacggaactacgatggagatcatgtccacggcgcagcggcgcgacctcgccatgaacatcccagcgctacgaaagctcgacgccatgctcatcggctacatggacaacttcgtggaccagaccgagttctggtacgagaagggtggggacaacaagcgcgacgacgacaagtggtggatgccgacggtgaaggtgccgtcggaggggctgtcggacgtgacccgcaagtggctgcagtaccagaaggagtgcgtcaaccaggtgctcaaggcggccatggccattaacgcgcaggtgctcgtggagatggagatcccggagatctacattgagtcgctgccaaagaaagggaagacgagcctgggcgacgccatctaccggagcatcaccgaggaaacgttcgacccgctggagttcttggccgggatggacctttcgacggagcacaaggtgctggacctcaagaaccgcatcgaggcctccaccgtgatctggaagcgcaagatgcagaccaaggactccaagtcctcgtggagctccatcgtcagcttcgagaagcgcgagcagttcgaggagcgcgccgagaccatcctccacctgctcaagctccagttccccggcacgccgcagtcccagctcgacatctccaagatccagtacaacagggacgtcgggtacgccctcctggagagctactcgcgcgtgctcgagagcctggcgtacagcgtcatgtcccgcatcgaggacgtgctgagcgcggacgcggcggcgcagaacctgacggcgagcgaggcggcgcggcgagcgctggagtcgacgtcggcggagctgcccgcggcgcggaagctggacgccaaggaggagctggagaagctgaacgaggccccggcgtcgatgacgctgttcgacttcatgggctggcacttcgaccaggacgagctgatgaagcgcagggaggacggcacactggacgcggacggggaggccatgctcctcaagaaggcgcccagcatggcccccaagaaattctcctacgtcgacagcctctcctccggcggcatgaggagcccctccgcgcgccactgatagtgcgccaccatccactgaccggccgacgtgctaacagcagctcagtcatctacgattcgacaccatggatcgtcgatcgttcagcagcacaagagacgacaatggagacgacagctcctcgggtccggtccgatcgattcttgcttacgtgtacatagctgaggcgcaggcgcagcacctacttacccattaacgtcattgccagtgagagtttcatcataattttatttttattaaacaagatgatacatcacgatatttgatgacatgacacggtattataataagagaggcgaagagaattttatggaaggag

SEQ ID NO: 124745 - DNA, 2045 bp, Zea Mays
acccagcgtttgccgaggcttgtaggtctacccaaagcaattgaaatgatgctgcaaagtaagttcattacggcaaaggaagggaaggaacgtggtttgattgatgccctttgctctcctgatgaattgataaagacatcacgtctttgggctctggaaattgctaattgccgtaaaccttggatgaggtctcttggcagaacagataggcttggaccactctctgaagctcgtgctgtgttaaatgcagcaagacagcaagcaatgaagatcgcaccaaacatgccacaaaaccaggcctgcctggatgtgatggaggaaggcatattatgtggaggccaagctggtgttttgaaggaggccatggttttcaaggagctggtgatagcaccaacatcaaaggctcttgtctatgttttctttgctaacgttccacgacaaaggtgccaggtgtaactgatgttcaactgaaaccaaggccaattagaaaagttgctgttattggtggtggtctgatgggatctggaattgccacatcacttcttgttagcaacatttctgttgtgctcaaggaagtaaaccctcagtttctgcaaaggggagagaaaacaatagcaggtaatcttgagggcctggtcaaaagaggttcactaacaaaggataggatgcacaaggccatggcccttctcaagggtgctttggattattcagatttcaaggatgttgatatggttattgaggctgttatcgagaagattcctttgaagcaatcaatatttgctgacattgagaaaatctgtccaaaacattgcatacttgcaacaaacacatccaccattgatttgaatgttgttggcaagaagacaaattctcaagatagaattataggggctcactttttcagccctgctcatattatgcccttgcttgaaattgttcggacggagaagacatcaccacaagctatccttgatctcatcaccattgggaagataataaagaaagtccctattgtggtcggcaactgcacaggatttgcagtcaaccttacattttttccttacacacagggttctcatcttctagttagtcttggtattgatgttttcagaattgatcgagtaataagcacctttggcatgccaatgggaccttttcaactccaagatgtggctgggtatggagttgccttggcagtaaaggatatctacgctgatgcctttggagaaagaaatttggactctgaccttgtggatttgatggtaaaggatggacgacaaggaaaggtgaacggcaaaggttactacatttatgagaagggtgggaagccaaagccagatcctagtgttaagcatgttatcgaggagtaccgaaagcacgcaaacacaatgcctggtggaaagcctgttactttaacggatcaagatattttggagatgattttcttcccagttgtgaatgaggcatgcagggttatggatgaaaatgttgtaattcgagcttctgatcttgatattgcttctgttcttggaatgggctttcctaaatacaggggtggtcttgtcttctgggctgacactgttggagcaccttacatacattctaagctaagcaagtgggctgaaatttatggccccttcttcaaaccatcatcatatttggaacagcgagctaagagtggtgtaccattgagcgcaccaggagcttcgcagcaaggttcggcgaggtcacgcatgtgaggtgctgtccagcattgagcagaataatgcagaatacttgcgggatgagccattgacggctgcttcgctgatcaaaacacctccgtgaacacaaacatgaggcacagaagaaatgatgaaaaataaagggattgtaacagttttggtgcctttgactgtaactggcagagtttctggggacagagtggcatggattaattgcacctgatcactctgtatgtcgctgtcatgtgtgcaatgttcaatacgtacgtaataaagaatggaaatatatgccgcaatcagtgcgtcgtcttctcgagttaa

SEQ ID NO: 124746 - DNA, 197 bp, Zea Mays
ttggtaactgatgtggatgtgctgccaaatgcccaaatccgtagttccgtacactgcaccagtatacaaaagagtccttttttttgaaacgagattttactctgcttttaagaaagcatataacaatgttcaaacacatactggggataccagtttacaatcatcagacaaccaaccaccagaactaaaggaaccta

SEQ ID NO: 124747 - DNA, 347 bp, Zea Mays
atcagccgagtggttgtgccgtggaagctttcgtttaccgttcccatcccccgtcgtctctcctctccttcccactctcccacccgtcctccattgctcccttcctctctctcgcggagtcgctgcgatctagccaccgagcacgagcgtcctactcgccgcggaccttgctcatggccgcggggtcgatccgggtcaccatggaggtgggcgccgacggcgtcgcgctcatcaccatcgccaacccgcccgtcaacgcgctccaccccatcatcatcgcggggctcaaggacaagtacgcggaggccttgcgccgtgacgacgttaaggcaatcgtgctcactggt

SEQ ID NO: 124748 - DNA, 1496 bp, Zea Mays
agctcttgttttaattttgtttcctgttttaaccatggaccagacaagatgagaactttaaaaaggttttacatcaagagagtacaagatctccataaggaagtacaagtatttgaggaaaaggaccttatgaaaagcttgagcaaatcaacttgcgtgccagaagttctgtctacttgtgctgatcagtcataccttggaatattactgaattgttgcctttgttgctcactggcttcaatacttcatacaccactaaatgagacatctgcaagattctttgcagcctcagttgttgttgctctagaagaacttcatcagaagtccattatctatagaggtgtttcggcagacattcttatgctcgacagatcaggacatctgcagctggtggattttaggtttgcaaagaagttggaaggtcaaaggacatacacaatatgtgggatcgctgactctctggcaccagagattgttcttggtaggggtcatggatttcctgctgactggtgggcacttggagttttgatctatttcatgcttcagtcagacatgccattcgggtcctggagggagagcgagctggaacctattacaaaaattgccaaaggccaccttgttatgccagtgtctttcagtgcagaagttgttgaccttataaccaagctactcgtggtcgacgaaaacgcgcgccttggaaccagtggtgctgaagctgtgaagaaacacccctggtttgatggcactgattgggagcgaatagcatctgggacttgtgcagcacctgaagaaatcactgagcgcatcaactactgtatagaaactcttaatgaggacttatccgcatctccttccgtgccgattgaagacccagatgatctcactgctccagagtggatccaggattggtgatctcaatagttgcatgactgtccaatgatgaattgttctagttgaggaaaacgtctctagtttttcaccgagcattctcatatcaaatggaagaaggtatacataagagttgatcgaactgacaagttgtacataccaaagattattccttctgtgatcatagatcagaatttgagatgccaagcaacagagactttggtctatgtttgctgcatagttcctggtaagaaggatctggatagtttgttggtgatccatgtaattatatatccaatttgtgcactcccttgctgtttcggaaatggatactggtcgggaggaaggtcaataattatcgttgtgaatacggacatttctttcatctgccactgtcaatcgatttgtacaagatcaagttttccaaatataattatgaaggttaccaaaacaagagcttgttatctcatatacacggtgcaaataacctgcgacgcgacatttggcatctggacactacacctacctaaaacaaaacttgatgcataatttaaataaaatacgtaaaatacaaaaaaatacataactcataaaaaagactacataaa

SEQ ID NO: 124749 - DNA, 871 bp, Zea Mays
atggcaacggcaggatggggagtggtgggtggcacgccgagggaggtgctactgtatacggcagcagcaaggttgggaggagcggtggtggctgtcgaggacagcgaggagagcattgaggggaggcccaaggccggggatgaaggaggcacgacgccgcaagaggtcagcacgggccgggccagtgggagctgggtgggtgccataccgctggagggccaggggatagcttccggcagtgggggaaggagaccgagccctgcagggggcagagcggtcgcaccagaggtggtgggagggaccgttggagctcggcgtgctgctgttggcgcgaccaggacgcgcttgagctccatgggagcaggctctgtgtgccgggaaatctcgggtgccgctcgacctcaacagggaattaacagagctgagagcctgtgctctggtgaccaatcctgggttgtgcgtctcttgtcgaccaccaaagcccgctatctggaggcagcggcgtttgacgacctctgcctaaggcacgacgaggtgccggtgcatgtctggtacggaacctcgcggaacgcatcatcggcagcgcgtgctcaatgcagtgcattgacaccaacttgctgcaccttgacgacccgcgtggcatgctctgtgggctcggactttggacgccatccgaatcgccaagatcatgtgggtaacggtcgccagccacaacatggatggattgtcatctcctgtgtacattatcgacatcctcaaggagaccagcatttttggactgtaaagcatcatcaggtcgatgcggtacaggcagttgtaccttgtgagcggagctggaggaacatcgtctcgccatgatgaaatgcaacgg

SEQ ID NO: 124750 - DNA, 2965 bp, Zea Mays
gctgccaccacccacctcctctctcttcacctcccattctctctctccgccccctgcttgcctgctctacccacctcataaacttccccactccttcctccatttccatccattcttctccccaggctgccgccgctggcagccgcatatgctgctgctggtgctctgctactccttcgtcaatctctgctgccgtttggcattagacggattccagtcaactccatccattttgatggttaaactatcaaagatactgccggtgctgtgaatggctgctcaagttcctcagattctttaaattctgagttcatcctcaattcggggctcttggtttaagccgttggacgattcattgtaccgcggaggattttttatggctcatgttgcctcgtgacattgtggtctgaccaaaagctgcttttacatctccttcatgggctgttcagcttccaagtgttgttcacaattgaagtgctctttgtgctcaaatgggtgcctggggcaggcacctgactccccgagggaatccaggggaaagtcaagtcgggggagagggagggtagattctagtggttcagatgattcttctggtgatgatctcggggaagatgacgatgcttttaaccatatgaatgctacaagggaatcaactgctggcatcagccgactgtcaagggtgtcgtcacagtttcttcctcccgatgcttcacgcaaggttcaggtccctttgggtaactatgacctgagatactccttcctgtctcaaagaggttactacccagaatcactggacaaggcaaatcaagatagctactgcgtacataccccatttggacctagtcctgatgaccacttattcggtgtgtttgatggccatggggaatatggagctcaatgctcgcaatttgtgaagcgaagattatgcgagaacctgctcagagataacaggtttcgtaccgatgctgtgctggctcttcattctgcttttgtggcaacgaacacacagctgcatgccgacaacttggatgactccatgagtggtactactgcagtcactatcttggtcaggggtaaaactatttacgttgcaaataccggtgattcgcgtgctgttatcgccgaaaaacaaggggatgacattgtcgctgttgacctttccatagatcaaaccccttaccggtttgatgagcttgaaagggtcaaggaatgtggtgctagggttctaacgttggaccaaatagagggcctaaagaacccagatgtgcagtgttggggtactgaagaaagtgacgatggcgatcctccaaggttatgggtgcaaaatggcatgtacccaggaactgcttttacccgtagcattggagattctgttgctgagtcaattggtgtcattgcagatcccgagatttttgtcctggatctcaattccaacaatccatttttcgttcttgctagcgatggcgtttttgagttcctttccagtcaaacagttgtcgacatggtttctaaatacaaggatcctcgagatgcatgtgcagaaattgtcgctgagtcctatcgtctttggctacagtatgaaactcgtacagatgacattacaatcatactcgtgcatattaatgggttaactgataaggaatctacccagactgttacgaaggtgactttacaaccttcacaacaagtagtaggactggcaggccctgaatcgccactaatagtaagttccaacaccaataatcagcgctccaagcatgatttatcacgggcacgattgagggctcttgaaagttctctagagaatggtcaattatgggtccctccatctccatcgcatcggaagacatgggaagagcaagcgcatattgagcgggtactacatgatcatttcctatttaggaagcttactgactcacaatgtcatgttctacttgattgtatgcaacgagttgaggtgaaacctagggatatagtagtacaacagggcggtgaaggtgactgcttctatgtagttggtagtggtgagtatgaagttctggctattcaggaagaaaatggaaaggaaataaccaaggttctgcatcggtatacagctgacaagttatcttcttttggggagctagcactaatgcacaataagccgcttcaggcttcagttcgtgctgtgaccagtggaacattatgggctctaaagagggaggacttccggggtattttgatgtcagaattttcaaacataccatcattgaagttgctccgatctgtacaactgtttacaagatttacagtgcttcaactaagtcaacttgccgagtcacttgttgaagtatcttttgcagatgggcaaataatagtagataagaatgataaattctcttctctgtatatcattcaaagaggtcgtgtgagacttatattggctactgatcaaatgacttcagatacttgggatctcattagtgctgaaacaaagcaggcacaaagtagtcgggaaaatggtaattatgtgcttgatatagatgagggagggcacttcggagagtggtctctcattggtgagactattgctttcactgctattgctgttggtgatgttacttgttctactatcatgaaggagaaatttgactcaattgttgggccttttcctaaactttcgcaagctgattccaagattaaagaatctctggtaactctggagaatgttgcagatggtgatttcccttttaggagggtgaagctctcagatttggaatggaaaatgtgcatatatgctgctgattgcagtgagattggtcttgtccaagtcaggggctatgaagagaatttttacaatggtttgaaaaaatgtggaccatccatcaatataaattgaatggtgcaaacacgagaggtaccaatagaaaagtactcggaagtactaaaacagtagggatgataccaaaatgtgtgggagcagtac

SEQ ID NO: 124751 - DNA, 882 bp, Zea Mays
tcaagggactatggttttgttcagtttgagatggatgaatctgcttagtcggccattgataaactctatggtatgcttctcaatgacaagaaagtgtatattggattttttgtttgtatgcaggactggaaaaatgcctggaacagtatcaaattcagtaatgtgtatgtgaagaatctgtccgatactgttactgatgatgagttgaaggagatgtttgaaaaatatggaaccataacaagtgatgttgttatgcgggataatgttggaaattctaggtgttttggattcgtcatttttgaaaatgcagatgctgctgctcaggctgttcaagagttgaatgggaagatattcaatgataaggaactgtatgttggaagagtacaacaacctatgatgcctggaaatctatatgcaagtaagtttgttggttttggtgacaaggtcttcagccttgaggagatcagtgccatgatttttggcaagatgaaggatactgctgaggcataccttggcaagaagatcaatgatgccattgtctttgtccctgcctacttcaataacgcgcagaggcaaacaaccaaggatgctgctattacagagcatcatggttccgtaagactctgcgcactcgtcaacacccggctgtcgatctccaccacgcagtgctgcatcggacttaccctgtatgatgttcaccaagcactcgacaaattgcctgaatcggggaaccattaccgatctcgcagattcgagtcagctattggaacgcatggatgcgttgtcgaggtattcaatgtatgtcgtgatgcctcgcttcatgcatcaatggagtgtgtacataagtatgaagtggtcgtgtcacgcgaaactcaagtttaa

SEQ ID NO: 124752 - DNA, 2142 bp, Zea Mays
aacccgccactttgcccactctcctcttccttctttgctacccatttcgtcgcagtagtcggcagtcgaaaccctagtcccctcgctttccttccactcgccgtcgcggcgccgatagagccagagctgaaaggcgtaggaaaagctggtggaggaggggatggaccggatcgtaggcagcaagtacaagctgggtcgcaagatcggaagcggttccttcggggagatctacctcgcgacgcacgtcgacacctacgagatcgtcgccgtcaagattgaaagcagcaaaaccaatcatccacagttgctatatgaggccaaactgtacaatgctcttcaaggagggactggtatcgcaaacataaaatggtgcggcattgacggcgatgaaaacattcttgttattgatttactcggaccaagccttgaagatctgtttgtttattgtggccggagattctcactgaagacggtcttgatgctagcggaccagatggtttatgtaattgacttcgggcttgcaaagagatatcgtgattcagccaccaaccgccatataccttatagagaaaataaaaacttgactggcacagctcgctatgctagccgtaatactcatcttgggattgagcaaagccgcagagatgatttggaatcgatcggatacgttcttctgtatttccttaggggaagtcttccttggcagggcttgaaagcagccacaaagaaacagaagtatgacaaaataagtgagaagaagctttcgactcctattgaggctctatgtaaatcccatcctgtggaatttgcttcctatttccactactgccattctctgacatttgatcagcgtcccgattatagtttcttgaggcatgtctttcgagaattgtttgagcgcgaaggctatcaatttgattatgtgtatgactggactttgttgaagtgtaagcaatcccagaaggctaaggttcagcaaggatgctctcatgatgcaggcgtaagcagccgtccagttgcaacaaacgtggacaagcaccaagttggtgttgcacgcccaattaatgcttcaggtctgcttgaagcagaacaacgcccggcaatcagaatgcaattaaacagccgttccaataatctgcatcctgagagattgggagtgtctgctagtcataataatgtactgctgcaatccacgtcacttgacaatgctgatgctccaatggaccacgcgacacattcaaaagcacaggggtccattgatccacacactcgtggaagttatagtccagggccctctaaccgcacttaaccttttgcattgttcgtaaaagcttgcgggtccatgcagtaaacaattgcttccattgtgttgaacacaaaattacaccatgcaaaacatcgcgaagaggtatctgggaagtttatgattggttagcatgcacattcaatgacatatgcatgcatcagttaggacaacgcctcttcgctaaaagtgaatatccgaccagtattgacctgcagtttccagtgtcttgacaccaaatcgccatacaaaaactacagagtggtggtatacgggaagttcatggttggttagcatacaccctctttgctgaaaggctgtcatattctacttggattggccgcagcttgcaatgtatgacaccaaatagcaccatacaaagactatgaagaggtctgggaagcttatgattgggtagcatccatgtatctataactgtgaccgcaactttgaagaaacacatgctgtggctcatggcctcgagataaaaaaaggttaaattgcaatcgacaacaatctggttgggcagaggtaaatatcatgccgtgctcctgtcatagacatggttgcctgtattttatttgaatgagggttgaatagcttataacattgtgaggaagtcctaccacatattgatttttcatgttggtgttttttttgttggcattctctctccagttgtcataaaaacaatgaactgtacataatttcttagaagggctgttcttaagtgttgaggtggaatgagatgatttacttgataaaagtgtacatatttaggtatccctcatttttctgattgcatcaatatctttcaatgatataacgctggttccgaa

SEQ ID NO: 124753 - DNA, 2238 bp, Zea Mays
aacccgccactttgcccactctcctcttccttctttgctacccatttcgtcgcagtagtcggcagtcgaaaccctagtcccctcgctttccttccactcgccgtcgcggcgccgatagagccagagctgaaaggcgtaggaaaagctggtggaggaggggatggaccggatcgtaggcagcaagtacaagctgggtcgcaagatcggaagcggttccttcggggagatctacctcgcgacgcacgtcgacacctacgagatcgtcgccgtcaagattgaaagcagcaaaaccaatcatccacagttgctatatgaggccaaactgtacaatgctcttcaaggagggactggtatcgcaaacataaaatggtgcggcattgacggcgatgaaaacattcttgttattgatttactcggaccaagccttgaagatctgtttgtttattgtggccggagattctcactgaagacggtcttgatgctagcggaccagatgataacaagaatagaatttatgcattctaaaggctatctgcacagagacatcaagcctgataacttcctcatgggccttggtcgaaaagctaaccaggtttatgtaattgacttcgggcttgcaaagagatatcgtgattcagccaccaaccgccatataccttatagagaaaataaaaacttgactggcacagctcgctatgctagccgtaatactcatcttgggattgagcaaagccgcagagatgatttggaatcgatcggatacgttcttctgtatttccttaggggaagtcttccttggcagggcttgaaagcagccacaaagaaacagaagtatgacaaaataagtgagaagaagctttcgactcctattgaggctctatgtaaatcccatcctgtggaatttgcttcctatttccactactgccattctctgacatttgatcagcgtcccgattatagtttcttgaggcatgtctttcgagaattgtttgagcgcgaaggctatcaatttgattatgtgtatgactggactttgttgaagtgtaagcaatcccagaaggctaaggttcagcaaggatgctctcatgatgcaggcgtaagcagccgtccagttgcaacaaacgtggacaagcaccaagttggtgttgcacgcccaattaatgcttcaggtctgcttgaagcagaacaacgcccggcaatcagaatgcaattaaacagccgttccaataatctgcatcctgagagattgggagtgtctgctagtcataataatgtactgctgcaatccacgtcacttgacaatgctgatgctccaatggaccacgcgacacattcaaaagcacaggggtccattgatccacacactcgtggaagttatagtccagggccctctaaccgcacttaaccttttgcattgttcgtaaaagcttgcgggtccatgcagtaaacaattgcttccattgtgttgaacacaaaattacaccatgcaaaacatcgcgaagaggtatctgggaagtttatgattggttagcatgcacattcaatgacatatgcatgcatcagttaggacaacgcctcttcgctaaaagtgaatatccgaccagtattgacctgcagtttccagtgtcttgacaccaaatcgccatacaaaaactacagagtggtggtatacgggaagttcatggttggttagcatacaccctctttgctgaaaggctgtcatattctacttggattggccgcagcttgcaatgtatgacaccaaatagcaccatacaaagactatgaagaggtctgggaagcttatgattgggtagcatccatgtatctataactgtgaccgcaactttgaagaaacacatgctgtggctcatggcctcgagataaaaaaaggttaaattgcaatcgacaacaatctggttgggcagaggtaaatatcatgccgtgctcctgtcatagacatggttgcctgtattttatttgaatgagggttgaatagcttataacattgtgaggaagtcctaccacatattgatttttcatgttggtgttttttttgttggcattctctctccagttgtcataaaaacaatgaactgtacataatttcttagaagggctgttcttaagtgttgaggtggaatgagatgatttacttgataaaagtgtacatatttaggtatccctcatttttctgattgcatcaatatctttcaatgatataacgctggttccgaa

SEQ ID NO: 124754 - DNA, 108 bp, Zea Mays
tccatccaaacaaacacaatatatatcacataatcaaatatatatcacataatcatcacatatacatcacggatatcacagaatcatcacagatatcacagaatcatc

SEQ ID NO: 124755 - DNA, 876 bp, Zea Mays
atggtgcggttgaggacgatggctctcctccttgttgcagtgaccgctgctgcggtggccggccttgccgctgccaatttccgggacgactgcgacatcccgtgggagccccagaacgccaggtttacgagcgacggcaacggcctctccatggcgctggtcagcaactcctcaggttgcatgctgaggacaaagaagcagtacgtctatgggaccgtgtcaacactcatccagctcgtcccaggcaactcggccggcactgtcaccacgtactacgcatcctctgttggagacaaccatgatgagatcgacttcgagttcctgggcaacgtgagcgggcaaccatacaccttccacaccaacatctacgccaatggcgtgggcaacaaggagattcagttcaagccctggttcgaccccaccaccggctaccacaattacaccatctcctggagcccctgcatgatcgtgtggtacgttgacagcgtccccatccgcgtgttccgcaactaccagcagagctacggcgtggcgtacccgacgagccgccccatgcacgcatactccagcatctgggcggcggaggactgggccacgcagggcggccgcgtcaagaccgactggtccaaggcgcccttcgtcgccaactaccggaacatccacctcgacatctgcgactgccccggcggctacgcctgcagcaccaactgcgcggcggcggcggcgcccaacagtggggcgtgccagctcagccccgagcagcgggggctcatgcagagcctgcagaaagactacgccatctacgactactgcgtcgactccaagaggtgggtcaacggcgtcaagccaaccgagtgcggcctgccgcagtactga

SEQ ID NO: 124756 - DNA, 2311 bp, Zea Mays
gtttcatcttagcacagccagctgcccagctgcccagcttctcttccctcatagtcgaagacgtcgtagccatgtcatcccttctgaagctggtggtgtttcttggcctcacctttgcaacctcgttcgcaagaagtaacgatcccatgttcgcctacaacggtttctccaacaccaacctcgagctcgacggcacggcctccatcacggagaacggcctgctcgagctgaccaacggcaaggtcatgagcaaaggccacgctttcttcccggatccactgcgcttccgcagatcccccaacagcacggttcagtccttctccgcctcgttcgtgttcgggatcatctcggtgtacaacaaccttagcagccacgggctggccatgttcgtcgccccaggcaaggacttctccgccgcgacgccggtgggctacctgggcctcttcaacgcgcagaacgacggcaacggcaccaaccgcgtcttcgctctcgagctcgacacctaccagaacagcgagttccaggacatcgacaacaaccatgtcggcatcaacgtcaacggcctccactccgtcgagtcccacgccgccggcttctaccgtgatcgaaacggcacgtctgagtcgttcgaggacctgacgctctgcagccagcaagcgatgcaggtgtgggtggactacgacagcgagagcgcacggatcagctccaccgtagctcctctcaacacggcgagaccgaagcggccgacggtatcggcgtcctacaacctgtcggccgtgctcgcagatgtggcgtacgtcggcttctcgtcttcgacaggaaagataaactcgagacactacgtccttggctggagcttcgccatgaacggccctgcccctgccatcgacacctccagtctgccgaagctgcctcttgcacgttccaagcctcaccgtccggtcctggaggtcgttctgccagttgcaacggccgcgctgctcgtcgccgctggtgccgtcgttttcctctcggtcaggaggcacatcaggtacgccgagctgagggaggactgggaggtcgagttcggcccgcacaggttctcgtacaaggacttgttccgcgcaacggaagggtttggggacaagaacctgctaggaaccggaggattcggaagggtgtacaggggagtgttgccgaggtctaagctgaaggtggctgtgaagaaagtgtcgcatgactcgaaacaaggcatgaaggagttcatcgcggaggtcgtgagcatcggccgcctccagcaccgcaacctggtgaagctactcgggtactgtcggcgtaaaggcgagctccttctggtgtacgactacgtgcccaacggaagcctcgacaggtacctgtatgggaggaacgggaaccagcaggccatggcggcggcgccggcgacgctggactggtctcgaaggttccgcatcattaagggcatagcgtgcggtctgctctacctccatgaggagtgggagaaagtggtcatccatcgggacatcaaggcgagcaacgtcctcctcgacgacgacatgaacgcgaggctaggcgatttcggccttgcgaggctgtacgaccatggcgtcgatccgcaaacgacgcacgtggtcggcaccattggctacctagctccggaacttgcgtgcaccggcaaggccacgccgctgacggatgtgttcgccttcggtgtgttcgttctcgaggtcgcgtgtgggcgaaggcctatcaaacacagtgaggcgcagcagaaccggctcgtgctctttgactgggtgttccagcatttgcagaatgggtcgctcaccgatgcgatcgacggcaggctcaaaggggactacgatgtcgacgaggcgtgcctggcgttgaagctgggactgttgtgctcacacccgtttgccagtgcaaggcccagcatgcggcaagtcatgcagtacctccatggcgatgtgtcgcctccggaactagcgcccacccaccaaagctttgaggccctggccctgatgcaagaagatggcttcgacccatacatcatgtcgtatccttcgtcaactgcgactgcaagcattggaacagtttcggccacaatgtctcaaggaagatgacatatgcacgatacacgacgtggagtgattattgtgtctttgtctgtatacagtagaagggcctagctttttattagttacagtgcctccccgtttgtaggagattggcaaactgtgatgtaccttttcatctccatcctaattatattcctataaattcaagggacaaattaataatgtcactacta

SEQ ID NO: 124757 - DNA, 414 bp, Zea Mays
gagaaaacggacgccaccgtcacagccgacgaaagctactccaggtccccaaggttctcttggtggaggacaagattaggaactttagatgcaattgcgaagtcaagatttcggggaaacaaatgcccatttccacttcaaagcttcaaagctcgtgcgtgaactaggtccatcacaaaggagatgtgcgtgaacgcattacgcataccactacaaagctcgtgcgctttcaccaagtactatgactgcttgtcagcatccatttacaccaagaacaaggaatgtttctaccaaagcgttagttgtgattattttgaactgtaatgatcaattacagacttaagtatgtcgatgatcatatcatcatcagcggctgacaacagctcatatacgtcagttcgtgttgccgtaaga

SEQ ID NO: 124758 - DNA, 288 bp, Zea Mays
atgcggcgagaaaatcgtcgatccaatgtcccggcctcctctgatgtttcagccctcctcctccgatgcctccgccctcgcctcgggcagggtccctcttgccatggctttcctcgcctgtctctgcgtcaccggatggtccccaaggttctcttggtggaggacaagattaggaactttagatgcaaggcgattagaattaaaattgttgaggtggagatggacctgagtactggccaaggcaaaagcgaggggtacatgtggggcggtggggaaacaggactgtag

SEQ ID NO: 124759 - DNA, 204 bp, Zea Mays
atgaggggtcccaagagggcctccaagatgaggaagcttttcaacctttccaaggatgatgtacacaagtacgtgaacacatacaggacattcactaccaagaacggcaagaagaggaagcgcgctagaatcactgataagaagaagaagatcgctaaggagtctgaggctgccgagtaccaaaatcttcttgccagaggctaa

SEQ ID NO: 124760 - DNA, 178 bp, Zea Mays
gaagtcgccgttggtgccgaagagaagatggagccatcttggtcgactcatgcgtacatcgctgctccaccttcggaggtttgccatggacgatctctagggttcgcgtaacgtatccgtggtggttgcgggagtgatgggctgttggggtggctgggattcatcaccggagactcag

SEQ ID NO: 124761 - DNA, 863 bp, Zea Mays
atatattactcgcggtgtgctcgattattcatcgacaagtcgcttcgcatacactggtgtattgacccaaggagagatgaatgcgatgaggctgacgccgattctcctcgccgttctgatgatgacatgtctcgtgttcgctgcaaactgtggcggccatgacgtggagacgaaaccggctagcggtctccggcggccgccgccggacggagagaagacgatgttgggaagcagcgacataaacatcaaattgtgtttgaaggctcagtgcgctggttacaagagttgttactgctgcttcactttacctggtttgccgtgctggcctgatcagaacacgtgctggcaagagtgtcccaatcgccatcgactctgatccacccgatccatgaagcacgccgacgcgatgccctccataggtcccagcaagttctcatgagaaaggatccggtctcgaattctctggctcggagtgacaatatgtgatatattgtcatgcatggcagcgtgagtgtaggatggtaataaataagcaacattccatgcaatagtatgtcgtatgggaacatcttgatttatgcgattattcagagcttgttcctcataatcttgggcttgtatggcaggatataacatacttactttgttctaaaacaaatatacttactcagttttcttgatttatggtttgtttgagggttgtagtgcatcgaaggggctaaagtatcttgctattcaataaggggctcaaatttagccccttattgaatagcaaaagattttagccccttcgatccactacaatctccttgctctcaaacaagatcttgtgaaccttttttttggggattttatagttcacc

SEQ ID NO: 124762 - DNA, 862 bp, Zea Mays
atatattactcgcggtgtgctcgattattcatcgacaagtcgcttcgcatacactggtgtattgacccaaggagagatgaatgcgatgaggctgacgccgattctcctcgccgttctgatgatgacatgtctcgtgttcgctgcaaactgtggcggccatgacgtggagacgaaaccggctagcggtctccggcggccgccgccggacggagagaagacgatgttgggaagcagcgacataaacatcaaattgtgtttgaaggctcagtgcgctggttacaagagctgttactgctgcttcactttacctggtttgccgtgctggcctgatcagaacacgtgctggcaagagtgtcccaatcgccatcgactccgatccacccgatccatgaagcacgccgacgcgatgccctccataggtcctagcaagttctcatgagaaaggatccggtctcgaattctctggctcagagtgacaatatgtgatatattgtcatgcatggcagcgtgagtgtaggatggtaataaataagcaacattccatgcaatagtatgtcgtatgggaacatcttgatttatgagattattcagagcttgttcctcataatcttgggcttgtatggcaggatataacatacttactttgttctaaaacaaatatacttactcagttttcttgatttatggtttgtttgagggttgtagtgcatcgaaggggctaaagtatcttgctattcaataaggggctcaaatttagccccttattgaatagcaaaagattttagccccttcgatccactacaatctccttgctctcaaacaagatcttgtgaacctttttttggggattttatagttcacc

SEQ ID NO: 124763 - DNA, 759 bp, Zea Mays
gattattcatcgacaagtcgcttcgcatacactggtgtatcgacccaaggagagatgaatgcgatgaggctgacgccggttctcctcgctgttctgatgatgacatgtctcgtgtttgctgcaaattgtgcgattgccggcagccatgacgtggagacgacaccggctagcggtctccggcggccgccgccggacgaagagaagacgatgttgggaagcagcgacataaacatcaagttgtgtttgaaagctcagtgcgccggttacaagagctgttactgctgcttcactttacctggtttgccatgctggcctgatcagaacacgtgctggcaagagtgtcccaatcgccagcgactccgatccacccgatccatgaagcactccgacgcgatgccctccataggtcccagcaggttctcatgagaaaggatctggcctcgaattctcctgctttgagtgacaatatgtgataccgtgtcatgcatagcagcgtgagtgtaggatgataataaataagcaacattccatgcaacagtatgcattgcagcgtgttatatcttaggcttgtatggcaggatgtaacatacttactttgttctaaaacaaatatacttactcagttttcttgctttatggcttgtttgagggttggagaggatcgaaggtagcaagagattttagccccttcgatccactttaatttccttctcttaaacaagatcttgtgaaccttttttaggatttttatagtttacc

SEQ ID NO: 124764 - DNA, 943 bp, Zea Mays
gctcgattattcatcgacaagtcgcttcgcatacactggtgtattgacccaaggagagatgaatgcgatgaggctgacgccggttctcctcgccgttctgatgatgacatgtctcgttttcgctgcaaactgtgcgattgcaggcggccatgacgtggagacgaaaccggctagcggtctccggcggccgccgccggacggagagaagacgatgttgggaagtagcgacataaacatcaaattgtgtttgaaggctcagtgccctggttacaagagctgttactgctgcttcactttaccaggtttgccgtgctggcctgatcaaaacacgtgctggcaagagtgtcccaatcgccatcgactctgatccacccgatccatgaagcacgccgacgcgatgccctccataggtcccagcaagttctcatgagaaaggatccgacctcgaattctctggctcggagtgacaatatgcgatacattgtcatgcatggcagcgtgagtgtaggatggtaataaataagcaacattccatgcaatagtatgtcgtatggcaacatcttgatttatgagattattcagagcttgttcctcataatcttgggcttgtatggcaggatataacatacttactttgttctaaaacaaatatacttactcagttttcttgatttatggtttgtttgagggttgtagtgcatcgaaggggctaaactatcttgcttttcaataaggggctcaaatttagccccttattgaatagcaagagattttagccccttcgatccactacaatctccttgctctcaaacaagatcttgtgaaccttttttttggggattttatagtacatccactagttttggccgctcagttttactcctgctcgactcagttttccctttataccgttaacctatgctcggaaatcacctcatcttac

SEQ ID NO: 124765 - DNA, 934 bp, Zea Mays
gctcgattattcatcgacaagtcgcttcgcatacactggtgtattgacccaaggagagatgaatgcgatgaggctgacgccggttctcctcgccgttctgatgatgacatgtctcgttttcgctgcaaactgtggcggccatgacgtggagacgaaaccggctagcggtctccggcggccgccgccggacggagagaagacgatgttgggaagtagcgacataaacatcaaattgtgtttgaaggctcagtgccctggttacaagagctgttactgctgcttcactttaccaggtttgccgtgctggcctgatcaaaacacgtgctggcaagagtgtcccaatcgccatcgactctgatccacccgatccatgaagcacgccgacgcgatgccctccataggtcccagcaagttctcatgagaaaggatccgacctcgaattctctggctcggagtgacaatatgcgatacattgtcatgcatggcagcgtgagtgtaggatggtaataaataagcaacattccatgcaatagtatgtcgtatggcaacatcttgatttatgagattattcagagcttgttcctcataatcttgggcttgtatggcaggatataacatacttactttgttctaaaacaaatatacttactcagttttcttgatttatggtttgtttgagggttgtagtgcatcgaaggggctaaactatcttgcttttcaataaggggctcaaatttagccccttattgaatagcaagagattttagccccttcgatccactacaatctccttgctctcaaacaagatcttgtgaaccttttttttggggattttatagtacatccactagttttggccgctcagttttactcctgctcgactcagttttccctttataccgttaacctatgctcggaaatcacctcatcttac

SEQ ID NO: 124766 - DNA, 650 bp, Zea Mays
atatattactggtggtgtgctcgattattcatcgacaagtcgcttcgcatacactggtgtatcgacccaaggagagatgaatgcgatgaggctgacgccggttctcctcgctgttctgatgatgacatgtctcgtgttcgctgcaaattgtgcgattgcaggcagccatgacgtggagacgacaccggctagcgttctccggcggccgccgccggatggagagaagacgatgttgggaagcagcgacataaacatcaagttgtgtttgaaagctcagtgcgccggttacaagagctgttactgctgcttcactttacctggtttgccatgctggcctgatcagaacacgtgctgccaagagtgtcccaatcaccagcgactccgatccacccgatccatgaagcactccgacacgatgccctccataggtcccagcaggttctcatgagaaaggatccggcctcgaattctcctgcttggagtgacaatatgtgataccgtgtcatgcatagcagcatgagtgtaggatgataataaataagcaacattccatgcaatagtatgcatgagtcgagccttgattcttgtcaccaccccatgctcatcttgcttgttgcggaacacccacttggttcccacaatgttttgct

SEQ ID NO: 124767 - DNA, 1674 bp, Zea Mays
catgtggttgtgggcactgtgaaagctctttggccactcacagaagccctagaataagaatattgctaatgatgagaagtaactaaaacaatatcatacaattgcagtgctctctccaatagtttggagggtatgctccttggaagatttttggtaggaacagggatgggattgggtccaccagtagcttcactttatataacggaggtttctccttctacagtgaggggtacatatggtagctttgttcagattgcaacctgccttggaattatagtatcactactcattggtacacctgtcaaagatattgatagatggtggagagtgtgtttctgggttgccgttatcccagcaactttacaagctctcggtatggagttttgtgctgagagccctcagtggctttataagtgtggaaaaataagtgaagcagagatgcaatttgaaaagcttttaggtccccttcatgtaaaatctgccatggcagaactttctagatatgaaagagtagatgatggagaaagtgtcaagtactcagagttgttctatggtcgccacttcaatggtacaagctgttctatatcctttttgttgtgtttatggacttctaataacctgagttcagtctgtctgtgaagtttgttcattacaagttccttttttggtacagttgtttttattggcacaacgctctttgctttacaacagttatccggcataaattctgtgttctatttctcatcaactgtattcagaagtgtgggggtgccctctaaccttgccaacatatgcatggggatttctaatctatcaggatcaattgtagcaatgcttctaatggacaagctaggtagaaaagtgcttctttcagggagttttcttgggatggcttttgcaatggggcttcaggctgttggagcaaaccgtcagtatcttggttctgcatgtgtatatctttcagttggtggcattctgttgtttgtcttgtcattttcactaggagcaggccctgtcccaggacttcttttgcctgagattttccctaataaaatccgagctaaggctatggctctctgcatgtctgtacattggatcgtgaacttctttgttagtttgatgttcttgcgtcttctggagcaacttggtccacagcttctctacacaatattttcgtcagtctgtgtggtagcctcaatatttgtgaggcgccatgtgttggagacgaagggaaagactttacaagagatagaggtttcactcctgcaaccacaataaaggtacatatttgacgtggctggaaccttgggcaggctgtttgctgaacagaaacaagctggccctgcagaagttgattcctgaagtcatcggcaacgccctacaaatggtctcagggaagttccagatatgcgcctgcgacagctagggcggtgtttccatagagcatcatgtactgaagttatgcctgtatcgcccgccctagataggatattttcatacttgtgttgtcatctgttctatctatgagtcgtaatatcagaaaaaaaaggtactactgttttaccgttgatgagcacagttgaaaaaaggaactatcatcttcattttacatgtatgtactcagtaaccatactccgaataataacactgcatggagattccttgttagacggt

SEQ ID NO: 124768 - DNA, 1569 bp, Zea Mays
catgtggttgtgggcactgtgaaagctctttggccactcacagaagccctagaataagaatattgctaatgatgagaagtaactaaaacaatatcatacaattgcagtgctctctccaatagtttggagggtatgctccttggaagatttttggtaggaacagggatgggattgggtccaccagtagcttcactttatataacggaggtttctccttctacagtgaggggtacatatggtagctttgttcagattgcaacctgccttggaattatagtatcactactcattggtacacctgtcaaagatattgatagatggtggagagtgtgtttctgggttgccgttatcccagcaactttacaagctctcggtatggagttttgtgctgagagccctcagtggctttataagtgtggaaaaataagtgaagcagagatgcaatttgaaaagcttttaggtccccttcatgtaaaatctgccatggcagaactttctagatatgaaagagtagatgatggagaaagtgtcaagtactcagagttgttctatggtcgccacttcaatgttgtttttattggcacaacgctctttgctttacaacagttatccggcataaattctgtgttctatttctcatcaactgtattcagaagtgtgggggtgccctctaaccttgccaacatatgcatggggatttctaatctatcaggatcaattgtagcaatgcttctaatggacaagctaggtagaaaagtgcttctttcagggagttttcttgggatggcttttgcaatggggcttcaggctgttggagcaaaccgtcagtatcttggttctgcatgtgtatatctttcagttggtggcattctgttgtttgtcttgtcattttcactaggagcaggccctgtcccaggacttcttttgcctgagattttccctaataaaatccgagctaaggctatggctctctgcatgtctgtacattggatcgtgaacttctttgttagtttgatgttcttgcgtcttctggagcaacttggtccacagcttctctacacaatattttcgtcagtctgtgtggtagcctcaatatttgtgaggcgccatgtgttggagacgaagggaaagactttacaagagatagaggtttcactcctgcaaccacaataaaggtacatatttgacgtggctggaaccttgggcaggctgtttgctgaacagaaacaagctggccctgcagaagttgattcctgaagtcatcggcaacgccctacaaatggtctcagggaagttccagatatgcgcctgcgacagctagggcggtgtttccatagagcatcatgtactgaagttatgcctgtatcgcccgccctagataggatattttcatacttgtgttgtcatctgttctatctatgagtcgtaatatcagaaaaaaaaggtactactgttttaccgttgatgagcacagttgaaaaaaggaactatcatcttcattttacatgtatgtactcagtaaccatactccgaataataacactgcatggagattccttgttagacggt

SEQ ID NO: 124769 - DNA, 1973 bp, Zea Mays
gatctctcaccccccgagctgggtcctcattcccgaaccctccaatcccttccccatggtgcactggttctgcggccgaatcgcttaatcgcttattggtctctgtggaatcagcggcgatgcggtggaagcttaactcctccgtctacaagcgcgtgccgtccagggaaaccgccatggaacccgacgtcgagacgccaatgagaatgacggacggcggcggcagcggcgcggggccgtcgtggcgcatgtcgttgccgcatgtctgtgtcgccacgctcacctcgttcctctttggataccactccggggtggtgaacgagcccttggaggtcatctccgctgaccttggcttcgccggcaacactcttgctgaagggctcgtggtgagtatctgtttgggaggagcttttgttgggtgcctcttcagcggctccatcgcagatggtattgggcgacgccgtgcgttccagctcagtgcgctgcctatgattattggtgctgccataagtgctctctccaatagtttggagggtatgctccttggaagatttttggtaggaacagggatgggattgggtccaccagtagcttcactttatataacggaggtttctccttctacagtgaggggtacatatggtagctttgttcagattgcaacctgccttggaattatagtatcactactcattggtacacctgtcaaagatattgatagatggtggagagtgtgtttctgggttgccgttatcccagcaactttacaagctctcggtatggagttttgtgctgagagccctcagtggctttataagtgtggaaaaataagtgaagcagagatgcaatttgaaaagcttttaggtccccttcatgtaaaatctgccatggcagaactttctagatatgaaagagtagatgatggagaaagtgtcaagtactcagagttgttctatggtcgccacttcaatgttgtttttattggcacaacgctctttgctttacaacagttatccggcataaattctgtgttctatttctcatcaactgtattcagaagtgtgggggtgccctctaaccttgccaacatatgcatggggatttctaatctatcaggatcaattgtagcaatgcttctaatggacaagctaggtagaaaagtgcttctttcagggagttttcttgggatggcttttgcaatggggcttcaggctgttggagcaaaccgtcagtatcttggttctgcatgtgtatatctttcagttggtggcattctgttgtttgtcttgtcattttcactaggagcaggccctgtcccaggacttcttttgcctgagattttccctaataaaatccgagctaaggctatggctctctgcatgtctgtacattggatcgtgaacttctttgttagtttgatgttcttgcgtcttctggagcaacttggtccacagcttctctacacaatattttcgtcagtctgtgtggtagcctcaatatttgtgaggcgccatgtgttggagacgaagggaaagactttacaagagatagaggtttcactcctgcaaccacaataaaggtacatatttgacgtggctggaaccttgggcaggctgtttgctgaacagaaacaagctggccctgcagaagttgattcctgaagtcatcggcaacgccctacaaatggtctcagggaagttccagatatgcgcctgcgacagctagggcggtgtttccatagagcatcatgtactgaagttatgcctgtatcgcccgccctagataggatattttcatacttgtgttgtcatctgttctatctatgagtcgtaatatcagaaaaaaaaggtactactgttttaccgttgatgagcacagttgaaaaaaggaactatcatcttcattttacatgtatgtactcagtaaccatactccgaataataacactgcatggagattccttgttagacggt

SEQ ID NO: 124770 - DNA, 2117 bp, Zea Mays
tgcgtgtcacccccgtgttggcctggcagcacgacctcatcacggcacggcgtccttaagcttcccttccggccttcccccacctcccacccgcgatctccgcgaccgcaagcagctcggcaggcaggcctccaccgctccaccacctccactcggtctacgtgctccgtcaccaaacccacccgggccaacgccgaagcaaccccccctccgtcctccccagatccggcgccgcctccgccctcacttacactagcacgcacggcggacacgtcgcctcccccgcgcgatctgatgcaggcgcacgcggtggccagcggcgatgcggtggaagcttaactcctccgtctacaagcgcgtgccgtccagggaaaccgccatggaacccgacgtcgagacgccaagttcgtgccgcatgtttcccccggttcctcttaccaccggttaatttatgggtggtgaacgagcccttggaggtcatctccgctgaccttggcttcgccggcaacactcttgctgaagggctcgtggtgagtatctgtttgggaggagcttttgttgggtgcctcttcagcggctccatcgcagatggtattgggcgacgccgtgcgttccagctcagtgcgctgcctatgattattggtgctgccataagtgctctctccaatagtttggagggtatgctccttggaagatttttggtaggaacagggatgggattgggtccaccagtagcttcactttatataacggaggtttctccttctacagtgaggggtacatatggtagctttgttcagattgcaacctgccttggaattatagtatcactactcattggtacacctgtcaaagatattgatagatggtggagagtgtgtttctgggttgccgttatcccagcaactttacaagctctcggtatggagttttgtgctgagagccctcagtggctttataagtgtggaaaaataagtgaagcagagatgcaatttgaaaagcttttaggtccccttcatgtaaaatctgccatggcagaactttctagatatgaaagagtagatgatggagaaagtgtcaagtactcagagttgttctatggtcgccacttcaatgttgtttttattggcacaacgctctttgctttacaacagttatccggcataaattctgtgttctatttctcatcaactgtattcagaagtgtgggggtgccctctaaccttgccaacatatgcatggggatttctaatctatcaggatcaattgtagcaatgcttctaatggacaagctaggtagaaaagtgcttctttcagggagttttcttgggatggcttttgcaatggggcttcaggctgttggagcaaaccgtcagtatcttggttctgcatgtgtatatctttcagttggtggcattctgttgtttgtcttgtcattttcactaggagcaggccctgtcccaggacttcttttgcctgagattttccctaataaaatccgagctaaggctatggctctctgcatgtctgtacattggatcgtgaacttctttgttagtttgatgttcttgcgtcttctggagcaacttggtccacagcttctctacacaatattttcgtcagtctgtgtggtagcctcaatatttgtgaggcgccatgtgttggagacgaagggaaagactttacaagagatagaggtttcactcctgcaaccacaataaaggtacatatttgacgtggctggaaccttgggcaggctgtttgctgaacagaaacaagctggccctgcagaagttgattcctgaagtcatcggcaacgccctacaaatggtctcagggaagttccagatatgcgcctgcgacagctagggcggtgtttccatagagcatcatgtactgaagttatgcctgtatcgcccgccctagataggatattttcatacttgtgttgtcatctgttctatctatgagtcgtaatatcagaaaaaaaaggtactactgttttaccgttgatgagcacagttgaaaaaaggaactatcatcttcattttacatgtatgtactcagtaaccatactccgaataataacactgcatggagattccttgttagacggt

SEQ ID NO: 124771 - DNA, 2176 bp, Zea Mays
tgcgtgtcacccccgtgttggcctggcagcacgacctcatcacggcacggcgtccttaagcttcccttccggccttcccccacctcccacccgcgatctccgcgaccgcaagcagctcggcaggcaggcctccaccgctccaccacctccactcggtctacgtgctccgtcaccaaacccacccgggccaacgccgaagcaaccccccctccgtcctccccagatccggcgccgcctccgccctcacttacactagcacgcacggcggacacgtcgcctcccccgcgcgatctgatgcaggcgcacgcggtggccagcggcgatgcggtggaagcttaactcctccgtctacaagcgcgtgccgtccagggaaaccgccatggaacccgacgtcgagacgccaatgagaatgacggacggcggcggcagcggcgcggggccgtcgtggcgcatgtcgttgccgcatgtctgtgtcgccacgctcacctcgttcctctttggataccactccggggtggtgaacgagcccttggaggtcatctccgctgaccttggcttcgccggcaacactcttgctgaagggctcgtggtgagtatctgtttgggaggagcttttgttgggtgcctcttcagcggctccatcgcagatggtattgggcgacgccgtgcgttccagctcagtgcgctgcctatgattattggtgctgccataagtgctctctccaatagtttggagggtatgctccttggaagatttttggtaggaacagggatgggattgggtccaccagtagcttcactttatataacggaggtttctccttctacagtgaggggtacatatggtagctttgttcagattgcaacctgccttggaattatagtatcactactcattggtacacctgtcaaagatattgatagatggtggagagtgtgtttctgggttgccgttatcccagcaactttacaagctctcggtatggagttttgtgctgagagccctcagtggctttataagtgtggaaaaataagtgaagcagagatgcaatttgaaaagcttttaggtccccttcatgtaaaatctgccatggcagaactttctagatatgaaagagtagatgatggagaaagtgtcaagtactcagagttgttctatggtcgccacttcaatgttgtttttattggcacaacgctctttgctttacaacagttatccggcataaattctgtgttctatttctcatcaactgtattcagaagtgtgggggtgccctctaaccttgccaacatatgcatggggatttctaatctatcaggatcaattgtagcaatgcttctaatggacaagctaggtagaaaagtgcttctttcagggagttttcttgggatggcttttgcaatggggcttcaggctgttggagcaaaccgtcagtatcttggttctgcatgtgtatatctttcagttggtggcattctgttgtttgtcttgtcattttcactaggagcaggccctgtcccaggacttcttttgcctgagattttccctaataaaatccgagctaaggctatggctctctgcatgtctgtacattggatcgtgaacttctttgttagtttgatgttcttgcgtcttctggagcaacttggtccacagcttctctacacaatattttcgtcagtctgtgtggtagcctcaatatttgtgaggcgccatgtgttggagacgaagggaaagactttacaagagatagaggtttcactcctgcaaccacaataaaggtacatatttgacgtggctggaaccttgggcaggctgtttgctgaacagaaacaagctggccctgcagaagttgattcctgaagtcatcggcaacgccctacaaatggtctcagggaagttccagatatgcgcctgcgacagctagggcggtgtttccatagagcatcatgtactgaagttatgcctgtatcgcccgccctagataggatattttcatacttgtgttgtcatctgttctatctatgagtcgtaatatcagaaaaaaaaggtactactgttttaccgttgatgagcacagttgaaaaaaggaactatcatcttcattttacatgtatgtactcagtaaccatactccgaataataacactgcatggagattccttgttagacggt

SEQ ID NO: 124772 - DNA, 621 bp, Zea Mays
caggcatacaatttttctagagaccataaactagagcttgaggcagagagagagagagaggatatagagtgcaaggggtttcatcctaatggggcgcataaatggaaatctaaacttgtcaagagctatcagagacatgaagttcaaagaaaacaagttcttgccccccaacaagcaaattttgatcgcgaaccctgacataaatatcgtcgagctatgtgacgatgacgaattcgttgttttggcatgcgatgacatatgggactacatatgaagtcaacaattggttgatttcatctatgagcatataaacacagtaagcaccaagttatttaacattatctgccatttcgaaaaaaatgtaaacatcatcctcggatgtcttgggtctttcttagcaaacactcatggaaggaggttacaaaatgcgggaggaaagcctttcggtattatgtgagagtgctcgatagatgcctggctccatcgaccatgggcggcgagtgatactataacatgatgatcctggtgcagttcaagaagccgattgctcgggttggggacaccaacggtgcagagcaaccagctggagatgcagggtgctccgagacccagtggaaatga

SEQ ID NO: 124773 - DNA, 483 bp, Zea Mays
gcgatggggaataagatcgcgcggacgacgcaggcgtcggcgacggagtactacctccacgacctgtcgtccacctacaatctcgtgctcctcgacgtcgtcagccgcggccgcttcctcaagtccgtccggtgcaagcacgacgaggggttgctcctcgtcaaggtctactttaagtgcgccggcgagtccatagacctcaaggtaatccacccgcggccgccactccccacactcgcttcctgtgggctgcgcgggtgaaggagcgcgcgtgtgcgtatgtgcgggtgggtggttggactcggatctgctgctgggtggggcgcgggatggcgtcgttcgctatgtctggcgtgaggctcggggtcgtgaggctcggggtcgtgcggcccggcggctcggcgcgatgtggcggggagcggaggagtgcggtggacttgccgtcggtgctcttcaggaggaaggacgccttctctcgtactg

SEQ ID NO: 124774 - DNA, 966 bp, Zea Mays
tttacacaatctctatcaagtgtttagaaggacaacgacagcagagcgcccgcgcgccgcctgaaacctgccgggaactctgatggcgctggacgttggatgaggaaaggaagctctggatttaatgtgctcacatgtgcacaggagcttgacgcaaaggggagccgtagcctgtagagtgcggggagcaggagccggcggagccatggcgaccactctttcgttatcctctcccctcttcctcggagctccggccagaggcaagggttacacgagtagagttcgttgtcgggagcagcagcgacgaacgacaatagtatctatggttggtcagcaaacttcccagtgcagcctccatttctcacttggaaggaaatcaacggctagagcaactgttgtcccagaccccgactataggttaccaatcgctatacttgggattgctagtgcttttgcatatgccgacaatcttctcgctgctgcacctgtaggactgctggggcttcttcttttgttccagactacaagagtgaggttcgtctttgataacgaggccctggaggtgaaggttggagagcagctgcaggagtcaggtgaaaatgtattcgtcggcggcaagaaccgttggaagtactcaacgttcgtaaactgggagctgtggtggccacagtttcctgtcttggtttacttcaaggagacccaaacgaagcccgaaggacagatccacttcttccctgtgatattcgatggtcgacaattgtacgatgtgatggtggagcgtgctgggccctcgaagacgagtggccctaaatagttgcagctgatcttcctaccgtcgttttgctccctcgggctccctcacatttaaattgtaaaaatggtaaaattatatacaaacggggttcgattccaaccacggttcttagctttaaacccatcttcatacgtacctaaccaacaaaaaca

SEQ ID NO: 124775 - DNA, 927 bp, Zea Mays
tttacacaatctctatcaagtgtttagaaggacaacgacagcagagcgcccgcgcgccgcctgaaacctgccgggaactctgatggcgctggacgttggatgaggaaaggaagctctggatttaatgtgctcacatgtgcacaggagcttgacgcaaaggggagccgtagcctgtagagtgcggggagcaggagccggcggagccatggcgaccactctttcgttatcctctcccctcttcctcggagctccggccagaggcaagggttacacgagtagagttcgttgtcgggagcagcagcgacgaacgacaatagtatctatgcttggaaggaaatcaacggctagagcaactgttgtcccagaccccgactataggttaccaatcgctatacttgggattgctagtgcttttgcatatgccgacaatcttctcgctgctgcacctgtaggactgctggggcttcttcttttgttccagactacaagagtgaggttcgtctttgataacgaggccctggaggtgaaggttggagagcagctgcaggagtcaggtgaaaatgtattcgtcggcggcaagaaccgttggaagtactcaacgttcgtaaactgggagctgtggtggccacagtttcctgtcttggtttacttcaaggagacccaaacgaagcccgaaggacagatccacttcttccctgtgatattcgatggtcgacaattgtacgatgtgatggtggagcgtgctgggccctcgaagacgagtggccctaaatagttgcagctgatcttcctaccgtcgttttgctccctcgggctccctcacatttaaattgtaaaaatggtaaaattatatacaaacggggttcgattccaaccacggttcttagctttaaacccatcttcatacgtacctaaccaacaaaaaca

SEQ ID NO: 124776 - DNA, 814 bp, Zea Mays
tttacacaatctctatcaagtgtttagaaggacaacgacagcagagcgcccgcgcgccgcctgaaacctgccgggaactctgatggcgctggacgttggatgaggaaaggaagctctggatttaatgtgctcacatgtgcacaggagcttgacgcaaaggggagccgtagcctgtagagtgcggggagcaggagccggcggagccatggcgaccactctttcgttatcctctcccctcttcctcggagctccggccagagctagagatgtggttccgtacggagtgacttcggctagtgtatcactgatgactctaaatatgccaggcaagggttacacgagtagagttcgttgtcgggagcagcagcgacgaacgacaatagtatctatgcttggaaggaaatcaacggctagagcaactgttgtcccagaccccgactataggttaccaatcgctatacttgggattgctagtgcttttgcatatgccgacaatcttctcgctgctgcacctgtaggactgctggggcttcttcttttgttccagactacaagagtgaggttcgtctttgataacgaggccctggaggtgaaggttggagagcagctgcaggagtcaggtgaaaatgtattcgtcggcggcaagaaccgttggaagtactcaacgttcgtaaactgggagctgtggtggccacagtttcctgtcttggtttacttcaaggagacccaaacgaagcccgaaggacagatccacttcttccctgtgatattcgtaagttcgtcaattgttgatttaccaagttaatttttcggt

SEQ ID NO: 124777 - DNA, 1050 bp, Zea Mays
ctctcatcccttctcttccctctctcttctctctaccacgacgcgccaaggatcaagcgcacgcgacgcccgacgcccgacgccccgactgcctcgacccgccagcgcccaggaagacccgacgccgccaacgcccaggaagactcgaccgaaccctaacttcttgccgccgccacctcctcttactcgcatgccaccgtcgctcccctgggcgcaaacccgctgtcgctcagcccggcgcacgggatcgggcggtccggggacgccggcagtacacacccgtcgtcggtttccgcaggtggcgcgccctgatgtcacgcggcatgtgcccgatccgctgtcgctgtcgctgtaactgtttccaagattttgctctgcgagcttgctggatcctctgaccgcttccgcgggacgtgttcccgaatttccattttttatttttctttactacctttttctgtttactccattttttctcttaaaaaaataagagctctactatttaaacaagcggggcgtacaaatcgagcactgaaccttgtgagcccaggttcatttcttacgagactaaatatgcactgaaccttgtgtgccttgtagtatctgtagtatctctcttttaaagatcaataggattccaagatcgactatagtagcaccaggcctccactggcctaatcagtctctgacttagcttatattttacctcacatttcattgcatgtctctacaccctaaggtcctaaccactagttttttccacttgcaggtatgttccaatgtttgtggagatagagtacgatccgaactgctagtacacatctgttctaattgaagagcaactggaggctcttggaagagcaatagttgctggcaagacaggcaattgaaaatgagaattgatcttttttatgggcgaagtgttgaagatggctttggtgaaggaaatgtcttgttagcatcaagtaagtggcgacatcacaacccctacaagcttgtgccttaaaacaagaggatacaagaagttggagtgctttttgtgaagacttt

SEQ ID NO: 124778 - DNA, 137 bp, Zea Mays
aatgcatgcatgagtcaaacacgtttccttgcatgcgcgtaaatttaggaaagatatgtgtgacgatttttatttttaaatgctttatttcttccataaatttaggatcgctgcaacagccatgcagctagactcgt

SEQ ID NO: 124779 - DNA, 693 bp, Zea Mays
cgcactggaagaatactggatagacaaggaagggaagtggtggaaaatccaaagttggaggctcaacttaggctcagatctttgtctcataaatttctcaacatggcatataaagcagccatttctctagagtgttgtttgctaatagacaatgcacttgatctccttggtccacaagtagaggataaactcgatgcatcatctagtgttgccaatgaaaaatcatgtaatgaccaagaaaatattagcccaaacatgcaacaaagagatggctttctcagcactgcacaacttaagaaaaaagaggttcagtcgaaaggctcaaagagaaagaaaagttggattggcaagttacgcaaagggaagcgcaaggcgactaaatctgctgtaccaacaaaaaagggagcaaaggtatactgcaatcttgatattttaatattaatgttgtcactcacttctgaactaatttgttgcattttgttggcagcaacaaaagaaagaagatggtgcaccagcacatgtacaagtggagattagaataacagcagcaacaaagaagcaaatgtggacctccatgaatacagggtcattggtgattttaccaggctcctaaaatctatggcttgccatgatgaaaatttttatggtgaagatctgttctatatttgcaagttgattggatagtattttgga

SEQ ID NO: 124780 - DNA, 372 bp, Zea Mays
atggccatgcaccgcgccgccgcgctcgcactccgccgcctcgccgccgcagcgacggtggcggctccgagacccgtgtccctcctcgcccctttccgtccggtggctgcggcggccgccaccaacaccggatttcttctgctgcctacgaccgcggcagcagctgctgctttgttcacccggcgcggttacgcggcacgcggcggcggggaccggaaggcggtgagcgaggaagagggtgatttttatgatgagattgagttcgagactatgggcagcgacgtggagttctacggcgactacgacgacgaggatctcgatgtactcgaggactctgaggatcttgagcacgacgccgggcccagtcgctga

SEQ ID NO: 124781 - DNA, 77 bp, Zea Mays
ggcaaggatggaaatggtatagaaatggaaagaaactttattgattttgttttcatattcgaaaactttggatacgg

SEQ ID NO: 124782 - DNA, 2332 bp, Zea Mays
ccggaccccactggtacaccgacgcgcacggacgctccccattatggccagctgcccagctacgcgtacggcgtaccacaccaccagtgcagcaccacactgactggacacagtagagcagagtagaagagtcctcgagcggccatcaccaattccccaagctatcttttttttttatgagcaagcaccaggcattccattgccagtttgccactacaagtagttgcagcagcagctaatcagtcagcaactaggcaccaaaccatcacttcactcccacctctctgcgccctgcacctgcacataggtactacgatcaccacacgcgcaccaagcccaagaaccgtgcgcgcgccatggccgagaagccgcctctgtcggccaagcctcccctgccgtccaagccgaggcctaaggcggcgtcggcggcaaggccgacaacgacgacgccggcccccggcagcaggccggccgcgtcgcccttcaagaagcccacgctcgcgccgccgcaggtgctcccgctcaagccgccgccggcgcaccagtaccgccagcagcagcagcagcagcacccggcgcccccgggcggtgcccggaagccgcgggcgtaccgccagcagcagccgcacccgcaccgccgcggccgcgggtgctcgtgccgccgcgcgtgctgcctggccacgggcctcgcgctgctcgcgctctgcctggcgctggccgccgcctgcctggcctacctctactaccggccgcgcgcgccgtcgttccacctgcagccgctggcccccgtgcgcctccgcctcggcagcaacgcctccaccgtggacgccaccgtcggcgcccgcgtcgtgtcgtggaaccccaacgagcgggtcgagttccggtacggcgacggcgagggccgcgtcgcgctggccgaccccgacggcgacgtcgcgctcgggtgggcccccgtgcggggctttgcccacgcgccgcgccgcgtcgccgccgtcgcgttcgtggccaccgccaggggcgtcgtgctcgacgacgccgtcgcggcgcgcgtgcgcgacaggtaccggcggcggcggcaggggttcagggtggtcgtggacgcccacgtcggcgtccgcgtcggggcgctgcgcacggggatggtgccgctcaggctgctgtgcgatgacggcgtgatggcgccgcgcgctgtggggtcgtccgatggggccgtggtggggcccatgaccaagtgccaggtgctcctgttcagagtaagatggtttagcctgaactgagggaaaatctggagcaaggcagctatagctgaccatcgagctgatacccagaggcgccggagctgcagacgccgtaaattatctgcatgtgtttgccgacaagatgaaggtgattgatttgctacggactttttgattggtgatggatgcatggtctgaagactccgaagcacacgtagaaaacaaagtttgtaactgtatattacactccaggtcccaattcttttgattgtgtggtgtatacattaatacatagcaggaatggaaagaacgatgggtgtgttcctgtcagtcgaaagttgaaacacatacaattgtttctccattgccttaaaactagtattgagatgacgactctgatctgaatttgagcaatctgccaccaaggtttaaagcagcagcaacaacaacagtcttctaattccaaataagttggagtaggctagaattgaaacctaaccataatttacggttcagacacaatgggtagctcttttttttgtgtgaaattgatttagtactacttgtatatcttcagagatgaggtgaggagagttcctgttctggctgtacatagatattaagatatatttaagtatagaacatgaaccattggctggtcgaaagtcacatgttattcatgcgatatcaaactgccaatgttcagaaacaaggtaaatgtttttgttaaaaaagaaattaagtaaatggtgcttacacatgatgtttcgcatttcaccattcaaacattccaatgtcacaagcatgagtaccgacaacaaaaagccccgcatgaaccttcagatgattggtatagtatcatcagagcacacatagcaaaaaggtttccggtgaaaaatacccacgcaatccaatttggaaaactgctccgacaaaacttcaatactgatttcctggttcatgtttttattagaagccttccttcaaggcataaactctgctacggaaagacggtggcaatttgtttattgccgcatcaatttcctgcaaacagaatagccataactaatgagatttagattttcggggcagac

SEQ ID NO: 124783 - DNA, 2010 bp, Zea Mays
ggtaccaccacgtccaaaacgtttggagcccttttcctaatcttgctgctaccgcgcgctccctctccccggccatttctctcatttcgccctccctccgccggctagggttactgccaccgccttccacccctccccgactgcccgtgggtggaggaggctggttggcgtgcagggtacctcggcggcggagatggagccggacttctcgaccgtgggcgggcccagctttgagttcgctttcaacgaggccaacttctccgaccgggaattgcggatcgaggtcgtcgcgggggattacgacgcgccggggtccactggcggcggttccggaggaggtggcctcgccgactgggcgcgccatcggaagcgccgacgcgaggagctcttcaaggagaaagaatctacaacctacatgtcagaccaaactaattttaatgaagtcgaagcagaagagtgtgatgcatatgaagaaaatcaagaggaacctgtagcaatgatggaaggatctccacctgatgttgatcaagatggtgatgatgagcaaggtattgatccatcttgggctgctgtggttacgccggttttacgagtcaagacaatttatatcagttcggcgattcttgctgcgaagagtcctttctttttcaagcttttctcaaacggcatgaaagaatcggaccagagacatgcaacccttagaattactgactcagaggaaattgccctcatggagcttttaagctttatgtatagtggaaagttgacaactactgagcccactcttcttctggatatcttgatggctgccgacaaatttgaggttgtttcatgcatgaggtactgcagccagttgctcacaagcttgcagatgaccacagaatctgcacttctctacctagatctcccttgctcagtttcaatggcagctgcagttcaacctctgacagatgcagctaaggattttctcgctgtaaagtacaaggatttgattaagttccaagatgaagtgatgaacatccctcgtgctggaatcgaagccatcttgtcaagtaatgacctccaggtggcatctgaagataccatctatgacttcttactcagatgggcccgtgcacaatacccgaaatcagaagagagacgtgaggtccttagttctcggctgctccctcttgtgcgattcagtcatatgacgtgtaggaagctgcggaaggtcctagcctgcacagatatagaccacgagcaagcaaccaagtgtgtcaccgaggctcttctgttcaaagctgatgcaccacaccggcaacgagctcttgcagcggacgcaataacctgccggaaattcgccgagcgggcttacaagtacagaccactcaaagttgttgagtttgatcggccctacccacagtgcatagcatacttggatctcaagcgcgacgagtgctctcgactctttcctgcagggcggatatactcgcaagcgttccaccttgcagggcagggtttcttcctctcggctcactgtaacatggagcagcaaagcgcgttctactgcttcgggctcttcctggggatgcaagagaagggctccacgagtgtgacagtggactacgagttcgctgcaaggacgagaccatccggcgagtttgtgagcaagtacaagggtaactacacattcaccggtggaaaggctgttggatacaggaatctctttgcaatcccatggcagaagttcttggccgatgacagcctcttcttcgtggatgggatgctgcatctgagagccgagcttacgataaagcaaccctagagcaatggtctctgtatagtggtagttgttacgacagatgaaaaagatatcggatgggaaacctcacgagttccagttcgctgcaagtttccagatttgccggtatctcactgccaatgagcttgtttgcctccgtaacggcgcagggtgtataatggcttatttattcctagtatatacaaatacaagttgatgagatgcgt

SEQ ID NO: 124784 - DNA, 1878 bp, Zea Mays
ggtaccaccacgtccaaaacgtttggagcccttttcctaatcttgctgctaccgcgcgctccctctccccggccatttctctcatttcgccctccctccgccggctagggttactgccaccgccttccacccctccccgactgcccgtgggtggaggaggctggttggcgtgcagggtacctcggcggcggagatggagccggacttctcgaccgtgggcgggcccagctttgagttcgctttcaacgaggccaacttctccgaccgggaattgcggatcgaggtcgtcgcgggggattacgacgcgccggggtccactggcggcggttccggaggaggtggcctcgccgactgggcgcgccatcggaagcgccgacgcgaggagctcttcaaggagaaaggtgatgatgagcaaggtattgatccatcttgggctgctgtggttacgccggttttacgagtcaagacaatttatatcagttcggcgattcttgctgcgaagagtcctttctttttcaagcttttctcaaacggcatgaaagaatcggaccagagacatgcaacccttagaattactgactcagaggaaattgccctcatggagcttttaagctttatgtatagtggaaagttgacaactactgagcccactcttcttctggatatcttgatggctgccgacaaatttgaggttgtttcatgcatgaggtactgcagccagttgctcacaagcttgcagatgaccacagaatctgcacttctctacctagatctcccttgctcagtttcaatggcagctgcagttcaacctctgacagatgcagctaaggattttctcgctgtaaagtacaaggatttgattaagttccaagatgaagtgatgaacatccctcgtgctggaatcgaagccatcttgtcaagtaatgacctccaggtggcatctgaagataccatctatgacttcttactcagatgggcccgtgcacaatacccgaaatcagaagagagacgtgaggtccttagttctcggctgctccctcttgtgcgattcagtcatatgacgtgtaggaagctgcggaaggtcctagcctgcacagatatagaccacgagcaagcaaccaagtgtgtcaccgaggctcttctgttcaaagctgatgcaccacaccggcaacgagctcttgcagcggacgcaataacctgccggaaattcgccgagcgggcttacaagtacagaccactcaaagttgttgagtttgatcggccctacccacagtgcatagcatacttggatctcaagcgcgacgagtgctctcgactctttcctgcagggcggatatactcgcaagcgttccaccttgcagggcagggtttcttcctctcggctcactgtaacatggagcagcaaagcgcgttctactgcttcgggctcttcctggggatgcaagagaagggctccacgagtgtgacagtggactacgagttcgctgcaaggacgagaccatccggcgagtttgtgagcaagtacaagggtaactacacattcaccggtggaaaggctgttggatacaggaatctctttgcaatcccatggcagaagttcttggccgatgacagcctcttcttcgtggatgggatgctgcatctgagagccgagcttacgataaagcaaccctagagcaatggtctctgtatagtggtagttgttacgacagatgaaaaagatatcggatgggaaacctcacgagttccagttcgctgcaagtttccagatttgccggtatctcactgccaatgagcttgtttgcctccgtaacggcgcagggtgtataatggcttatttattcctagtatatacaaatacaagttgatgagatgcgt

SEQ ID NO: 124785 - DNA, 760 bp, Zea Mays
ggtaccaccacgtccaaaacgtttggagcccttttcctaatcttgctgctaccgcgcgctccctctccccggccatttctctcatttcgccctccctccgccggctagggttactgccaccgccttccacccctccccgactgcccgtgggtggaggaggctggttggcgtgcagggtacctcggcggcggagatggagccggacttctcgaccgtgggcgggcccagctttgagttcgctttcaacgaggccaacttctccgaccgggaattgcggatcgaggtcgtcgcgggggattacgacgcgccggggtccactggcggcggttccggaggaggtggcctcgccgactgggcgcgccatcggaagcgccgacgcgaggagctcttcaaggagaaaggtgatgatgagcaaggtattgatccatcttgggctgctgtggttacgccggttttacgagtcaagacaatttatatcagttcggcgattcttgctgcgaagagtcctttctttttcaagcttttctcaaacggcatgaaagaatcggaccagagacatgcaacccttagaattactgactcaggtaatgtgacaattttgggaaactagattatcctggttcttttgtatttatttcctaatattttttcttttttaaattaactgttatgattatatatgcaaagaatctttaatgtttccaaagttgtaccttttttttctttgataatgaaatttcctactcttcttccctcgtta

SEQ ID NO: 124786 - DNA, 112 bp, Zea Mays
gccgtccgggatgacgttgaagagaaactcgggcctgtgacgcacgagcactcacctagtagtgtattatacaagatttaacaagacaatttaaaggcaaaaattcaagaat

SEQ ID NO: 124787 - DNA, 2672 bp, Zea Mays
aaaggagataaaaagtccccaaaccgaggcgggagaaaaggcgcgaggagcgaaacaaaccaaaaaaggccgctcacaggtcacgacatgctggccagtgggcccaccacgcactctgactgcccggcggaaaacctttctcgtcctcttctgtcgtctcacctctctctctctctctctctctcacacacacacacacacacagtctcccctcaccagcaaaaggacaagcagaccctcctccggtcctcccactcttccctgtccctctgccagctcaaccctctaccatggactaggaggccctagccttcgccgcgtgcatgtctgctcgggtgcagggacataggcatggaaccgcccgcccccgcagcgccacgaggggccgagcgcgccgaggctgtcgctgcggagccggcttccggggccggggccagagtcgaggtgcaacagacggggcccgagggctccgtgaaggcgagccgcggggggcgggaggtgccgctgcggctgcgcctcgggagggcccgtcggcgggcgggacctgtcacaccgacgccgtcgtggaagatggaggacgacggagtccgggaggggccgtccgcgcttgcgcctgcggccgcttccgccgcggcgaggaggagctcggcctcggcgcgccagctcggcgccagtctctgggagatccacgacgtggcgcgggaggtacgccggagcaggcgacggggtgggagggccatcgccgccggtcgggagcacggcggcggcggagaactggaccagccacagagttcaggtggcattcgtaggcatgttgcagactcgtcgatgaaacatcataagttcgatcaagaaagaagccatagaatacaacctttttctcctgcaagttatacaagctcagttggggattccaatgtgaatctaactagaagtccgactcgttctttgggcatcatgggtagatctatgggggaaggctatagccttaaaacatcaacagaactattgaaggttctaaatcgaatttggagtcttgaagaacagcacactgctaacttgtcagtggttaatggattgaaactggagttacagcaggctcagacacatattcaagaactcctgcaagagagacggcagtacagacacgaagtttcatcactgatgcgacaactctctgaaaacaaacttgttagaaaaaacaaggatcacatgaaggttgacacagctgtgcgttccctgcaaggtgaactagaggatgagaagcgtctgaggaggcattctgaggacctactcaggaagttgggcatggagttgtctgaaataaagtcagcgtttctcaagtcagtcaaggaccttgagaaggagaagaaaggaaatcgcctcttagaagatctttgtgaccagtttgcaatgggcatcaggaattacgaagaggaactcagagtggtaaagcaaagaaatgtcaagaattatgagctcaaatttgataattcggtgctccatatgtcagaactatggcttgatgaacgaatgcaaatgcaaaatacagatgtcaatggggaattggctcataaaaccacaataacagaaaggctcagcggtgaaatacaggcctttcttctttctaaaaaagcaggtagctctatgaataatgaaaaacatatgaatgataatactagattacgacgtcaatcacttgagtctgtccatttgaatggagccaccagtgctccccagtttgctgaagatgatgacgactctattgctagtgatttgaattgctttgaactgaatatgcacgggcatatgggatcccgcagaagtggcacaggagccatgaatgtgcataaaagaagatcagagcatcctcatgttatatctgctgaaggtttatgcatgtccagtgtgccagtttatttacagaaaggcattgcaaggcccagtagcagcaaattgcagcctgccagtaaaataccagaaatcagctcacaaagcaatgccagaatcactccagcagaagagcagaatggaagcacaggcacccaaattattcaagggtccaacaatgggtcaacgatgaacaacccagatgcacatcatgttgattacctggggcaggaatcctttgatcatttctcccgaacaagtctcttttgtgaaggcactacttcgggggatctgggtaatgtcgggagccccacgcggcaactgaaataccaatccacatctttggaccccgagataacggaatgctcacctgaacagccagtaggtgtgatggagaacaccctgaaggcaaaattacttcaagcaaggctagaggggcgacatgcccgattaaaggcatcaggtggctcctcaactagtaggagaaagtgagagtgctgcagattccggggtttgactgtttgaagcccacacgaagaaatcaaaggtgtaatatagctgacttatctatggaacttcctttggccgtatcaattggttcagtatctgtgtacatggactttgtgccatctgaatacatgaatcctattttcatatgtgaatcatcttccatgtcaattatgctgttagttagatgccagcactctttaggctaatagttcagactcagaaggattttggttatggcacctcgtatcttgctacctccgtgatacttcact

SEQ ID NO: 124788 - DNA, 1235 bp, Zea Mays
aaaggagataaaaagtccccaaaccgaggcgggagaaaaggcgcgaggagcgaaacaaaccaaaaaaggccgctcacaggtcacgacatgctggccagtgggcccaccacgcactctgactgcccggcggaaaacctttctcgtcctcttctgtcgtctcacctctctctctctctctctctctcacacacacacacacacacagtctcccctcaccagcaaaaggacaagcagaccctcctccggtcctcccactcttccctgtccctctgccagctcaaccctctaccatggactaggaggccctagccttcgccgcgtgcatgtctgctcgggtgcagggacataggcatggaaccgcccgcccccgcagcgccacgaggggccgagcgcgccgaggctgtcgctgcggagccggcttccggggccggggccagagtcgaggtgcaacagacggggcccgagggctccgtgaaggcgagccgcggggggcgggaggtgccgctgcggctgcgcctcgggagggcccgtcggcgggcgggacctgtcacaccgacgccgtcgtggaagatggaggacgacggagtccgggaggggccgtccgcgcttgcgcctgcggccgcttccgccgcggcgaggaggagctcggcctcggcgcgccagctcggcgccagtctctgggagatccacgacgtggcgcgggaggtacgccggagcaggcgacggggtgggagggccatcgccgccggtcgggagcacggcggcggcggagaactggaccagccacagagttcaggtggcattcgtaggcatgttgcagactcgtcgatgaaacatcataagttcgatcaagaaagaagccatagaatacaacctttttctcctgcaagttatacaagctcagttggggtacgcatatatattcttttgttgcgctttataataaagttggttatggccccatttttttctccaacacgtaagagagttgtgtaacatcatattaaggaggggcaaaagccccaaaacaaacacactcacacatcccatggaaaagagaactgaaaaataaatgcaccgttaggagaacataagcaaccttgacctggacgtgggtgatacgtaagacccaccatctggactgagagcagggaggaaggagatgcccctggccttggccagatgccaacaaaacaactccccagcaagcaacagaacattagctagatcaggag

SEQ ID NO: 124789 - DNA, 1937 bp, Zea Mays
cgagtatcagtctagccgagcactcatcagtcatcactcatcagccccctcttcctctaaagctgaaccgatcctccctctccctccctcgctctgtccatcttattattaattttttttttttgcttgaagcaagcaccttcccctttctctgtcttgcctccttatatacgccattgtggcgctgcgctagacgcgacgcccatgaggggcctgacctaatgtagcgttaggagaaagcctactgttccatctctttcttggagtacgagggcacgaaggcctaaccccctcgcccccaccagattcggggaattcgcgcctcatccgatcgtcaccggccgccgaagcgcaagaaacagcggccgggttaggactctggaggatacggcggctcggcggattcaggaagtgaggatattttcttggatttctgttcttgattgaggagaggatctcgtattagctactgcgttattcactggatgttggcaatggggtcagaagagtgggagctctatccttcttccgacataggttcgcaggtcatagaatacagacctgtgtctgaagacagcgatgacgatcagaatggggatgtggcagtgtcgctggatgttgttctccctgatgatcttctggagaaggttctttccttcttgcctgttgcaagtatcataagatctgggtctgtttgcaaaaggtggcatgagattgtgcatgcccggaggcacgcatggagcaaaatagtgcctcagaagccgtggtacttcatgtttacctgtagtgaggatgcagtttctggttttgcctatgacccgagcctccgcaaatggtatggatttgatttcccttgcattgagaagagcaactggtctacatcctcatctgctggcttggtgtgcctgatggacagtgagaccaggcgccgcattgtggtgtgcaaccccatcactaaggactggaagaggcttcttgatgctcctgggggcaaaacagctggttacagtgctctcgcgttttctgtggacataaggtctcaccattacactgtggctgttgcaagaagcaaccaggttccatcggagtattatcactgggagcttaccatccatttgtacgagtcagtctctggtagttggatgactcccttcactggagtattggttgggtggagaggtggcgacgagtgtgtcatctgtgatggagtcctctactatttgctgtacttcacaggaattctggtgaacaacaatgagcaccgccattgtctcgtaatgtatgatctcacagcaagacctaaccacacttctctgatcagcatggctattccagtgccatgtgttcttacatgtggcagattgatgaacctgagcaagaagcttgtgctggttggtggcattggcaagcaagataggcctgggatcatcaagggaatcggcatttgggagctccataacaaagagtggcgtgaggttgctcggatgccacacaagttttttcaaggatttggcgagtttgatgatgtttttgcaagctgtggggcagatgatcttatctatatccagagctatgggtcgccagctcttctcaccttcgaagtaaaccacaagtcatggaagtggtccgtgaagagccctgtttcgaagaggtttccgctgcagctattcactggattctctttcgagccaaggctggacgttgctctctagtttcttgactgtccacctccaccagaatttttgcattacattttgcctgattctggactggccagagtcaggaggtgcttgcactgcagccatttgaacacagaaaatgttcgtttttatagctctactcttttctttgttgggtctattgggtatattaattgaaatggtcagttaacttcccatcatttttgttgacttggactactgaattatgggggtgtt

SEQ ID NO: 124790 - DNA, 1361 bp, Zea Mays
ctcccgtccttcctcccctcaccgggacccccagacagcgcgcgccggcgcaatgcggtgggacgcgtcggaagcagaggtagcccttgagcggatctgggaactccatgaccgcctcagcgacgccatcctcgccgcctcccgcgcgcacctcttcctgctcgctccccagcctcctcccgtgccgtccgcgccacccgtcaaaggggcccaccgagtcagcggcggtaggaacggctgcgtcttcgtcaagggcggaggagaggcgctggccgccgccgcggagtccgtgtccgaggtcaggagcctgcacgccatccgctctgcgctcgaggacgtcgaggaccacctcgagtttttacacgtcatttggctcacaagtggttggccttgaatggttgaggtgcaaatatctcgctcactggagccacatggccttcattgccctcgggtgcttgctctcttatgtttcatgtcctctcgatgccagttggggccgaatactttataagttgattgttacttcgtgcaaagcgccaatataggagcaccattactatgtaaaaacttccatgtcctgtgctactgttcaatcacgacatcaggcagagcgagattctgcaattgctagactggagcaaagccgtctagtccttgctacgaggttagcagaacatcaagggaagaagcatagaatcatcgatgaggtcttggcatttgttggtgaagtgagtgacaagagtcaatttatctcatttgaagatgtttgtgctacccatagccgatcagaggatgatgcagaggacaacaggggcaacggttcaaggattatgtcaaacatgttatctagcagtttgtctttagccaagaattcatttcgactggacaagattggtggtgctctcggtaacgctgcaatgtttgcagtaagtgtgcttgctttcttccagctgcatcaaattacatttggaagtaaaactccagccatggaatacaggaagagaatcgagtacagtattcaaccaaggagctcacaatcgaatgggaaaggaaaacttctggaggtttacctagcaagaggctgaagaattattagatcattctgtttggctgtacagagttttaaccaaagttcgtttttgtcggttttattagggcgctgatcattctttacaatggactggaccctgttccaggcaattagggaacttactgtctgattcttataaatagagtttgaagggaattgcgtattctatctcaaattgtgaatggctttgtgcttagagatggtcagatggattgtttgtaaaccatgttcaagctaacttgaactgccgttatgcactactttcttgcca

SEQ ID NO: 124791 - DNA, 1665 bp, Zea Mays
agagaccgccaccgcgctgttccgagcccgctaaccgcgacggttaaaaacgcgtacggcatcgtcgcgttccctcctcccagtccccccatctctgtccctgtcccccctcctcctcgccttttaccccgcatcgcctcgccgcctcctgcccgtctcgctgaaaccctcttggtcaccgccgtggtcgatccgacccggcagtagccgcagcatcctacgagggccgttggcggggtcgtcgtcgtcgtcgtgttcggcggcgggaattggatgcgccacggagcgggcgaggggacctagttgagttgaatacggcagcgacgggaggacgtgatgccgggggtggcgtcagcagcgggatcggggatctggtcgcgccggcgggacgagatcacgttcgatcgccttcagaagttctgggatgacttgcctcctcaagcacggcaggaactcctcaaattggataagcaaactctcattgaacaagcacgcaagaatttctactgctcaaagtgcaatgggttgcttctggaaagttttgcaaaaattgttatatatgggaagtcattgcagcaagaagcttcagatatttgtcgcctgaggacagctattgaatcaagagttacgcaaggagagcaagatggggctcaggacccatcaattcatccctggggaggcctttcaaccacaaaagatggcttccttacacttcttgactgctttataaaagcagaatcattatgtgtgcttcagaatgtatttgacaatgcacgggcaagagaaagggaacgggaaatgctttatcctgatgcctgtggtgcaggtggcagaggatggatcagccaagggatggctaactataggggtcatggaataagagaaatgtgtgctctacacactgcccacctttcatgtgatacactcgtggatttctggtcagcgcttggtgaagaaactaggtcatctcttctgcggatgaaggaggaggatttcattgaaaaacttatgtacaggtttgatagcaagagattttgccgagagtgtcgaaggaacgttatccgcgaattcaaggagctgaaggaactaaagcgcatgcgaagggaacctcactgcaccagttggttttgtgttgcagatactgcgtttcagtgtgaggtgtttgaggatgctgtcatagttgattggcgccagtgtttatcagagccagatgaatcttatgaccactttgaatgggctattggaacagatgaaggagaatccgatatttttggctttgaaaatgttggaatgaatgcacaagtccacagaaatggaatcgatcttgatcagtttgaggactacttcataacactgcgagcttggaggcttgatggccagttcacagagctgtgtgtaaaagcacatgcattgaagggtcaatcatgtgtccaccacaggctagtggttggtgatggctttgtgactatgacaaagggtgaaagtattagaagtttctttgagcatgctgaagaggccgaggaagaggatgaagatgatgacatggacagggatggaaatgattttgatggtgatggtgcccatccacagaagcatgccaagagccctgaactggcaagagaatttcttttggatgctgctgctgtgatattcaaagaacaggta

SEQ ID NO: 124792 - DNA, 605 bp, Zea Mays
gcgcattggaaagggaatctcaccaaggccctaaactggctccaccgtggttcccttgcacgacgccctgcggcgggtccgccgaacacagcgtcaaaatggacccacatgtcatcgaaggcacatcaatcgacctggggattgcgtacatccttatgctggttgccctagtgctcacctacctgatccacccgcttgacgcgtcctccccctacaagctcttctgatccctgcgcctttccgtttggtcatgcggttaagggcgcgataggattttgagttaggcaacgtgcttaggtgaggctgggaggtttaggatgatgattgcggtcatctggtcttgcttggtatgatgtattggaggctcgaagctgttggtgttctgattggttttgtatcggacggactccatgatctttgtgctcagtccctcagttctgctctgttttggctggtgccgctcggtgtatgagctctgctctgcttgccgttgcaagttgcggcagcaggcacgtgaagagtggatgtgcctggcacagctgacacgcatgcgtgtccactccttcctgtcacgcatgcaacttttgatattcaatggacttcta

SEQ ID NO: 124793 - DNA, 823 bp, Zea Mays
attcagatgcgcagccacgtcgtagcaggcctaggcttttttgaggagcgcggactagggagtagggaggacgggacgggagagagagagagaggcgcgtgcgttcgtggtcggtgccggtgcgtgcgtggcgtggtggccgctgccgtacgtgatccgtccaccccctctcctcttccgacgccggcgacagcgggaggtactcccggggaggaatggccgtggcaagggctccgctcggcgcggttgctgcgatggcggtggccgctctcgtcttcgccatactcatgaccgccgccgctgcggcgcaggcaccggcgcccgcgcccaccagcgacggcacatcaatcgacctggggattgcgtacatccttatgctggttgccctagtgctcacctacctgatccacccgcttgacgcgtcctccccctacaagctcttctgatccctgcgcctttccgtttggtcatgcggttaagggcgcgataggattttgagttaggcaacgtgcttaggtgaggctgggaggtttaggatgatgattgcggtcatctggtcttgcttggtatgatgtattggaggctcgaagctgttggtgttctgattggttttgtatcggacggactccatgatctttgtgctcagtccctcagttctgctctgttttggctggtgccgctcggtgtatgagctctgctctgcttgccgttgcaagttgcggcagcaggcacgtgaagagtggatgtgcctggcacagctgacacgcatgcgtgtccactccttcctgtcacgcatgcaacttttgatattcaatggacttct

SEQ ID NO: 124794 - DNA, 177 bp, Zea Mays
tgttgttgttgttgttgttgttgttattattgttgttgttgttgttgttgttattattattattattattattattattattattattattattattattattattattattattattattattattattattattattactactactactactgttgttgttgttgttattattat

SEQ ID NO: 124795 - DNA, 812 bp, Zea Mays
ttgatggtttgtatgaactgagtgtttttgttctgatgaaatagagagtaataattctcataatttcaatgtaggaagtccatgactacctgaaaagcctttgccctgatctccatattaccagaggtgaacatgatgaggatgctcgatacccagagactaagacacttacaattggtcagtttaagcttgggctgtgccatggccatcaggttgttccatggggcgacctggactccctggcgatgctccagcggcagctggacgtggacatcctggtgaccgggcacacgcaccagttcaaggcatataagcacgagggaggcgtggtgatcaaccctggctctgccacgggcgcctacagcagcatcacttacgacgtgaacccaagctttgtgctgatggacatcgacgggctccgtgtggtggtgtacgtctacgagctgattgacggcgaggtgaaggtggacaaaatcgacttcaagaagactgcgacgatgcacggctagccctatccttccactccgtgattgagtgcaagacatgtctagcttctgtttcttttctttcagcttcttgattcagagcctcctgaacacgctttctacctgttcatgcgcaaagaactttttaggtctggttgttaacaatgtttctcggagccatgaatttaaatactatactttttaattgtcatgataataacataactttggctagcttaaaacaccggctattgtttagataaagtattgtaaatgatgacatttgggcataagttaatcatactatgaaaaatttgggttggagtg

SEQ ID NO: 124796 - DNA, 1188 bp, Zea Mays
gtcatgagcccaatgcggggccacttcgtcgtttttgacaagtagacccacagtggccccacgtgcttgcccctccctttctcttctccccttgtgtcgcgctcgcgcatctgaagcaagggggggaagggccaagggggatcggtcttgttctcggagagggttgagctgcttgacggttttgactcggatcatggtgtgcagctctatcagatagagagctgacgtgaggtgtgagacgcggatcgtggagtactactcagtaggagatcaagaggaaggaggtggggagggggaagaaggcgatagccggggaggatggtgcttgtgcttgcgctgggggatctgcacatcccgcaccgggcgcccgacctccccgccaaattcaagtccatgctcgtgcccggcaagatccaacacatcatctgcactggcaatctctgcatcaaggaagtccatgactacctgaaaagcctttgccctgatctccatattaccagaggtgaacatgatgaggatgctcgatacccagagactaagacacttacaattggtcagtttaagcttgggctgtgccatggccatcaggttgttccatggggcgacctggactccctggcgatgctccagcggcagctggacgtggacatcctggtgaccgggcacacgcaccagttcaaggcatataagcacgagggaggcgtggtgatcaaccctggctctgccacgggcgcctacagcagcatcacttacgacgtgaacccaagctttgtgctgatggacatcgacgggctccgtgtggtggtgtacgtctacgagctgattgacggcgaggtgaaggtggacaaaatcgacttcaagaagactgcgacgatgcacggctagccctatccttccactccgtgattgagtgcaagacatgtctagcttctgtttcttttctttcagcttcttgattcagagcctcctgaacacgctttctacctgttcatgcgcaaagaactttttaggtctggttgttaacaatgtttctcggagccatgaatttaaatactatactttttaattgtcatgataataacataactttggctagcttaaaacaccggctattgtttagataaagtattgtaaatgatgacatttgggcataagttaatcatactatgaaaaatttgggttggagtg

SEQ ID NO: 124797 - DNA, 1304 bp, Zea Mays
gcatttacgcgtgctgtctctctctctctccctctcgtagtcgtgcggccaccgggtgactgccggcgccgccctaagccaggtgccgtcttcgttgggtccctcggttgcgacgagcacccaccagtaatgctgttggcaagctcaacaagacgctatgagcaatttcctttagcacgaaacaatggacttccaagattttcaagagtaaaaatgtcatgcttgggaacaaaccaaagtaaccatcattctgataccgtcagatcttcatcccctagttgtggagataccagaaagatccaccctgtagtcaaaatgtgtggcatcacatcagctagagatgcagaaatggctgtaaaagcaggagctgagcttataggcatgatactatggcccaactctaaacgctctgtctcgttattggaggcaaaagaaatatcaagagttgcgcaatcttatggcgctgaatcagttggtgtctttgtggatgataatgaagagagaattctacgggtgtctgattcatgtgaccttaactttgtccagcttcatggtgatgaatctcgtgcattggttcatactctttcaaagaataatcgtatcatttatgtactaaatgctgatgacgatggaaaactaatcaacattcctgatattgaatacgaacttgattggtacttagtggacagtgcaaagggcggaagtggaaagggattcaactggcagaagttccagatgccatctgtcaaaagcaagaatggatggctattagctggagggcttcatgcagataatgtttgtgaagccttttctgctctgaaaccagatggtgttgatgttagcagcggcatatgtggtcgagatggtatccgaaaagatgcagacaggattaattccttcataagtaatgtgaaatccctaaatttcctatcgtaaggtcatttgcttgtcgagagcttagtttttttttcatttgctcacgtgtggaatccctgaattgctgcaacctgaaggcaagctgtcaaaattgctcttggggctgagggcaaaagagtgattgaatttttgaagtgtgaacatatgtatccggtttattgtggagtgtggcaaactcgttactgcaacctgatggcaagatgttcaaattgcgcttgagaatagggattacatttttgaatgtgagtattgtgtttgtttctagtgcaataagtgtgttttgtatgcatatccagttcaaatgcaaaaataaaaacacattgtaccgttgacaaaattgctgcagtaaaagctggagaatttttatt

SEQ ID NO: 124798 - DNA, 1146 bp, Zea Mays
gcatttacgcgtgctgtctctctctctctccctctcgtagtcgtgcggccaccgggtgactgccggcgccgccctaagccaggtgccgtcttcgttgggtccctcggttgcgacgagcacccaccagtaatgctgttggcaagctcaacaagacgctatgagcaatttcctttagcacgaaacaatggacttccaagattttcaagagtaaaaatgtcatgcttgggaacaaaccaaagtaaccatcattctgataccgtcagatcttcatcccctagttgtggagataccagaaagatccaccctgtagtcaaaatgtgtggcatcacatcagctagagatgcagaaatggctgtaaaagcaggagctgagcttataggcatgatactatggcccaactctaaacgctctgtctcgttattggaggcaaaagaaatatcaagagttgcgcaatcttatggcgctgaatcagttggtgtctttgtggatgataatgaagagagaattctacgggtgtctgattcatgtgaccttaactttgtccagtggaaagggattcaactggcagaagttccagatgccatctgtcaaaagcaagaatggatggctattagctggagggcttcatgcagataatgtttgtgaagccttttctgctctgaaaccagatggtgttgatgttagcagcggcatatgtggtcgagatggtatccgaaaagatgcagacaggattaattccttcataagtaatgtgaaatccctaaatttcctatcgtaaggtcatttgcttgtcgagagcttagtttttttttcatttgctcacgtgtggaatccctgaattgctgcaacctgaaggcaagctgtcaaaattgctcttggggctgagggcaaaagagtgattgaatttttgaagtgtgaacatatgtatccggtttattgtggagtgtggcaaactcgttactgcaacctgatggcaagatgttcaaattgcgcttgagaatagggattacatttttgaatgtgagtattgtgtttgtttctagtgcaataagtgtgttttgtatgcatatccagttcaaatgcaaaaataaaaacacattgtaccgttgacaaaattgctgcagtaaaagctggagaatttttatt

SEQ ID NO: 124799 - DNA, 1971 bp, Zea Mays
ctcgccgtcgcctcctctttttttccccctcctcgacggctcctcctcacaggctcacagcctcacactcacgcggagagcgctcgcgcgggcgcacacgcggaggggacgttcacaggagggggagggaggagatgccggggagccagaacggggggccgaggcctcggccggtcaaagtcgagaccatccacgatcttgcgcgcgccggcgacctcgccggcgtccagaggaagctgctggagaacccctccctcctcaatgacaaaaatcccgtgatgtgtcaaacaccacttcatgttgctgctggctacaataatacagaaatagtcaagttcttgcttaaccagcaaggtacagaaacagttgatctggaggcaaagaacatgtatggggagactcctctgcatatggcagtgaagaacagttcttgtggatcaacaaatctactccttgaacatggtgcacacatagaagccaaagccaataatggcatgacaccattgcatttagctgtctggcatgcaattcaagctggagacttcagcacagttagcgtgttactaagctacaaccctgattgctttgtgaaagatgatgaaggcaaaatgcccttaaatcatattccaggaggagctggtagcgagaagctgctgaaactcctcactcatcatatggaagagcaaagaaaacggaaagctctcatgtcatgcctcgaagggaaagcaatgtcagagtttgaagaggcaatgtcacaaattgttggattgcaggagctaaaaatgcaattgcgccgatgggcacgaggaatgttttttgatgagaagcgacgggctatgggcttggggattgctaaaaggagagctccccatatggcatttcttggcaatccaggaactggcaaaactatggttgctcgaattcttggaaagctcctccacatggttggaattctccctactgacaaagtaactgaagttcagcgaactgatcttgttggagaatttgtggggcatactggaccaaagactaggaggaagatacatgatgcagagggaggtattctcttcgtggatgaagcttacaggttgataccaatgcaaaaatccgatgacaaggattatggtttagaagccttggaggagataatgtctgtaatggacagtggcaagatagttgtcgtatttgctgggtactgtgagccaatgaagcgagtcatcgcctcgaatgatggcttctgcaggcgggtcacgaaattcttctatttcgatgatttcagtacgacagaactagcagagatcctacatatgaagatgaagagtccaagtgactgtagcttgctttacgggtttaagctgcacccaagctgcagcattgaagccattggagagctgattgccagggagatcactgaagagcagaggaagcagatgaatggaggccttgtagacacgctgctcatcaatgcccgcgagaacctggattcgcggcttgatttcagctgcaacgatgccgatactatgatcacgatcacgttggaagacctggaggcagggcttcgtcagatttccagacaacgtcacctgcagtgacatgtaaatttaggagaattttttctcgatgatctcatgcttgtctccaagggcgaagttatggctgtatcgtctcatccaacgtttttggctattctgactgtgttgtatctagtcgttgctatatagcagtaaaatgcatgtggtatatacaattatacatcatgccctaacattatttgacatctgtggaatagccagtaccacatacggatttcagtacgtgcataatcaattcagatttgacggttgaagtgattgaatttgaatcctaactaaaccttgacgaccgatttttctttttacgaatccattcctttacatcactccattgtcatctgatgacattcactttcaaaaaaaaaaaaaggagagagaa

SEQ ID NO: 124800 - DNA, 2118 bp, Zea Mays
ctcgccgtcgcctcctctttttttccccctcctcgacggctcctcctcacaggctcacagcctcacactcacgcggagagcgctcgcgcgggcgcacacgcggaggggacgttcacaggagggggagggaggagatgccggggagccagaacggggggccgaggcctcggccggtcaaagtcgagaccatccacgatcttgcgcgcgccggcgacctcgccggcgtccagaggaagctgctggagaacccctccctcctcaatgacaaaaatcccgtgatgtgtcaaacaccacttcatgttgctgctggctacaataatacagaaatagtcaagttcttgcttaaccagcaaggtacagaaacagttgatctggaggcaaagaacatgtatggggagactcctctgcatatggcagtgaagaacagttcttgtggatcaacaaatctactccttgaacatggtgcacacatagaagccaaagccaataatggcatgacaccattgcatttagctgtctggcatgcaattcaagctggagacttcagcacagttagcgtgttactaagctacaaccctgattgctttgtgaaagatgatgaaggcaaaatgcccttaaatcatattccaggaggagctggtagcgagaagctgctgaaactcctcactcatcatatggaagagcaaagaaaacggaaagctctcatgtcatgcctcgaagggaaagcaatgtcagagtttgaagaggcaatgtcacaaattgttggattgcaggagctaaaaatgcaattgcgccgatgggcacgaggaatgttttttgatgagaagcgacgggctatgggcttggggattgctaaaaggagagctccccatatggcatttcttggcaatccaggaactggcaaaactatggttgctcgaattcttggaaagctcctccacatggttggaattctccctactgacaaagtaactgaagttcagcgaactgatcttgttggagaatttgtggggcatactggaccaaagactaggaggaaggtattaatcctctcttttcttttcatcagaaaggctccgtcagctgcacaaatttcagtttcagggaaattgcgaaacaagttctgaacttatttctattctgtgttctaccttacgcatacattgttaccgtgaccacgacaacagatacatgatgcagagggaggtattctcttcgtggatgaagcttacaggttgataccaatgcaaaaatccgatgacaaggattatggtttagaagccttggaggagataatgtctgtaatggacagtggcaagatagttgtcgtatttgctgggtactgtgagccaatgaagcgagtcatcgcctcgaatgatggcttctgcaggcgggtcacgaaattcttctatttcgatgatttcagtacgacagaactagcagagatcctacatatgaagatgaagagtccaagtgactgtagcttgctttacgggtttaagctgcacccaagctgcagcattgaagccattggagagctgattgccagggagatcactgaagagcagaggaagcagatgaatggaggccttgtagacacgctgctcatcaatgcccgcgagaacctggattcgcggcttgatttcagctgcaacgatgccgatactatgatcacgatcacgttggaagacctggaggcagggcttcgtcagatttccagacaacgtcacctgcagtgacatgtaaatttaggagaattttttctcgatgatctcatgcttgtctccaagggcgaagttatggctgtatcgtctcatccaacgtttttggctattctgactgtgttgtatctagtcgttgctatatagcagtaaaatgcatgtggtatatacaattatacatcatgccctaacattatttgacatctgtggaatagccagtaccacatacggatttcagtacgtgcataatcaattcagatttgacggttgaagtgattgaatttgaatcctaactaaaccttgacgaccgatttttctttttacgaatccattcctttacatcactccattgtcatctgatgacattcactttcaaaaaaaaaaaaaggagagagaa

SEQ ID NO: 124801 - DNA, 1559 bp, Zea Mays
ctcgccgtcgcctcctctttttttccccctcctcgacggctcctcctcacaggctcacagcctcacactcacgcggagagcgctcgcgcgggcgcacacgcggaggggacgttcacaggagggggagggaggagatgccggggagccagaacggggggccgaggcctcggccggtcaaagtcgagaccatccacgatcttgcgcgcgccggcgacctcgccggcgtccagaggaagctgctggagaacccctccctcctcaatgacaaaaatcccgtgatgtgtcaaacaccacttcatgttgctgctggctacaataatacagaaatagtcaagttcttgcttaaccagcaaggtacagaaacagttgatctggaggcaaagaacatgtatggggagactcctctgcatatggcagtgaagaacagttcttgtggatcaacaaatctactccttgaacatggtgcacacatagaagccaaagccaatgcaaaactatggttgctcgaattcttggaaagctcctccacatggttggaattctccctactgacaaagtaactgaagttcagcgaactgatcttgttggagaatttgtggggcatactggaccaaagactaggaggaagatacatgatgcagagggaggtattctcttcgtggatgaagcttacaggttgataccaatgcaaaaatccgatgacaaggattatggtttagaagccttggaggagataatgtctgtaatggacagtggcaagatagttgtcgtatttgctgggtactgtgagccaatgaagcgagtcatcgcctcgaatgatggcttctgcaggcgggtcacgaaattcttctatttcgatgatttcagtacgacagaactagcagagatcctacatatgaagatgaagagtccaagtgactgtagcttgctttacgggtttaagctgcacccaagctgcagcattgaagccattggagagctgattgccagggagatcactgaagagcagaggaagcagatgaatggaggccttgtagacacgctgctcatcaatgcccgcgagaacctggattcgcggcttgatttcagctgcaacgatgccgatactatgatcacgatcacgttggaagacctggaggcagggcttcgtcagatttccagacaacgtcacctgcagtgacatgtaaatttaggagaattttttctcgatgatctcatgcttgtctccaagggcgaagttatggctgtatcgtctcatccaacgtttttggctattctgactgtgttgtatctagtcgttgctatatagcagtaaaatgcatgtggtatatacaattatacatcatgccctaacattatttgacatctgtggaatagccagtaccacatacggatttcagtacgtgcataatcaattcagatttgacggttgaagtgattgaatttgaatcctaactaaaccttgacgaccgatttttctttttacgaatccattcctttacatcactccattgtcatctgatgacattcactttcaaaaaaaaaaaaaggagagagaa

SEQ ID NO: 124802 - DNA, 1073 bp, Zea Mays
ctcgccgtcgcctcctctttttttccccctcctcgacggctcctcctcacaggctcacagcctcacactcacgcggagagcgctcgcgcgggcgcacacgcggaggggacgttcacaggagggggagggaggagatgccggggagccagaacggggggccgaggcctcggccggtcaaagtcgagaccatccacgatcttgcgcgcgccggcgacctcgccggcgtccagaggaagctgctggagaacccctccctcctcaatgacaaaaatcccgtgatgtgtcaaacaccacttcatgttgctgctggctacaataatacagaaatagtcaagttcttgcttaaccagcaaggtacagaaacagttgatctggaggcaaagaacatgtatggggagactcctctgcatatggcagtgaagaacagttcttgtggatcaacaaatctactccttgaacatggtgcacacatagaagccaaagccaataatggcatgacaccattgcatttagctgtctggcatgcaattcaagctggagacttcagcacagttagcgtgttactaagctacaaccctgattgctttgtgaaagatgatgaaggcaaaatgcccttaaatcatattccaggaggagctggtagcgagaagctgctgaaactcctcactcatcatatggaagagcaaagaaaacggaaagctctcatgtcatgcctcgaagggaaagcaatgtcagagtttgaagaggcaatgtcacaaattgttggattgcaggagctaaaaatgcaattgcgccgatgggcacgaggaatgttttttgatgagaagcgacgggctatgggcttggggattgctaaaaggagagctccccatatggcatttcttggcaatccaggaactggtaaaatttcaaaagaagcaacctttttgtgttaccatagttctgttcagttctatgatcaaaagcttcgccatggtttccttagggtgctttcatagtgttgcctatcattgcattgggttgtatggtacagttacaatctgctatccaatgctaaacatcttgttgggagc

SEQ ID NO: 124803 - DNA, 698 bp, Zea Mays
agttgccaggccaaagcaaatcagggagctgatgaaggtgaacggcctgacaaacgacgaagtgaaaagccatcttcaggtgagctatgtaattgacccaaaaggcacttcaagcgggcaggaaagtctaaggcccttacttagtacttccaatgacacaaaggtgtggagcaagaaagagggttattgccccattttaggtggccaatatgttccctaatcaaaatgcgatcagtatatggctgatgcttacatgatgtcagttgcatggccgtacaagaaactgaagttggtgcataaggctgcaacaccgtctagtggagggtgttctggacaaagaaagcttgtaccttaaaataggaggatacaagaagctagagtggttgtctgaaggcttttgaactgcttgaagcattagtgtagctttggtgcttttgtgactgatcagctctggagcagctagaatgatgtagttgtgagcttttgaacaatagctggaataaacattagtgatgtagttgtgggcttttgaactgcttcaagctagagtgatgtcgctatggtgcttttgtgactgatcatctctggagcttttgtgaatgatctagctagctatctgtaaatgatctagttgtgaataatattataattgtgatgcttttgtgaatatataattgtggtgcttttgtgtttatgtg

SEQ ID NO: 124804 - DNA, 500 bp, Zea Mays
acgagacgtacatccaacagggcagggcagcaggcggaaggcggcttcgacttggagccttcgacgctcgacggcggcacagcgccgaggccgaccgcgagtccgccaccggcccaccgccgaccggtctctctcctccacgcggccctctgcctcggtctcttcgaggcttcgacagcgccaccgcgccgtcctggatctggaagcaggcgtgacgaccaccggcgaccagcgcgacttctccaatctctgggctccggcgacaagcacactagattgctaagtgatggaacctttatcggttcattcagttgtagcagcgaaacggaggagcgaaagagacgagactgattcagagagcaactcattcgacaagttgataggatgggtgcgtggcttggaggcttgaggatgagcgacctagaacaacattgtctggttcgaattagtttctatagaatatagttgaagctgatcaacatgtcttttactcacctcaa

SEQ ID NO: 124805 - DNA, 3127 bp, Zea Mays
ctcgactcaaaccctaagcccctctccttgccatcccgacccatggatcgcgagcgctcctcacggcgccctcgcgacgacgatgtgcaccaccggtctcgcgaacgggacgacgaccgacaccgccgccgcagtcgccacgacaccgacggtcaccacaggtatgagggcggagacgaggatcgccgccgccgccaccgccaccgcgacaaggacggtagcggaggcggcgaggatgaccgccgtcaccgcaaccatcatgacaatgacgacagccgtagccacagctaccgcgacggcggtgacgacgatcgccgccgcgggaaacggcggtccgtttccccgtccgagtccccgccaccttcggtgaagcgggatcgctcgtctagccgcccgcgggagtccgttgagcgtcgcgactccaccgaccgcgagccgcggtcgtcgtcgcggaagcggaaggaccacgagggcggtggcgacggggatgagcccgttcgcgaagggggcaagcgggccagggcctccgtggacctgcctccgtccaaggaggagaggcctagacgggagcgcaggaggtttgaggatgtcgatgagaacgggaagaatggtgatatgggtaaatggggcaaggaaatctcatctcatgagctgcagaaggaggagttatcaattaatggtggtttacagagctacgatgcacctaatgctggttctcagcaaccactcagtgctgtttctgtgccatcttctgttcccattccttcaaagatggaagtgcaatgtctgctgctagcaaaagtagtaacctatctcttgatgctttagccaaagcaaaaaaagctttgcaactgaagaaggaactgtcagaaaaactcaagaaattacctatgcttaataataaactcgctacagctgttactgctacacaagtttctaaagaagcagcaaaaacttctgtatcagctgtagatgcacaacacttttctaaaggagaagcaaaacttactgatgtttctagtctgccaactagtagcatctccggaacgccagccattggtggtgtgattggtattccaggtcttacacacatacccaatctcgattctgtgaagagagcccaagagcttgctgctaagatggggttccgccaagatccacaatttgctcctgttatcaacttcttccctggtacatccactgaagttactgtggcacaaagacctgcaaaggctcctgttcttcgccttgattctcatggtagggaaattgatgagcagggaaatgttatcagcatgacaaagccaacgaatctgagtactctgaaggtaacttttcatagtctactatagagctttctgtatagttttatgattttatccatgattttctttggtatggtgacttgtactatctgtttttaccttggttaggtcaatataaacaagcagaagaaagaagcttttcaaataatcaagccggacttggattctcttgcaaaatcaagtgttcattttgatgaaaggatgggcataaaccaaaagaagctcctccgtcctaaaaggccaggatttcagtttgttgaagagggtaaactctctaggcaggctgaattgcaaaaaattaagagtcaatttggtgaagcacaagctaaagagcttaaagtaaagcaagcccagcttgctaaggcaaaggcagaagtagacattaatccaaactttattgaggttgctcctggtgtgagagctccaaaacaaaagcagaatgaagatatccctgaaattgagccatgggatgcaaaaattttactttctgccacatatgaggatatctctgtggaggagattaatatggacaagatcaccatatatgttgaacatccagaaccatatgatccacctgctgaacctgcaccaccaccgccccagccactgaagttgactaagaaggagcagaagaagttgagaacacaaaggcgtcttgctaaggaaaaagataggcaagaaatgattaggcaaggcctcttggagccacccaagcccaaggtcaaaatgagcaatcttatgaaagtactaggctctgaagctgtgcaagatcccacacggttggagatggaaataagaactgctgctgcagagcgtgagcaggctcacgttgaccgtaacattgcccgcaagctcacaccatctgagcgccgcgagaagaaagaacggaagctttttgatgatcctactaacacaatagagactatagtttgtgtttacaagataagagacctgtcccatccacaaacacgcttcaaagtcgatgtgaatgctcaagagaataaactaacaggtgctgtggtcatcactgatagtatcagtgttgtggttgttgaaggggggaagaagtcaatcaaaagatataataagctcatgctaaaccgtatagactggcctgctgctgttggtggtgatgaagacacagaaatggaagctgacaagccagtgaatagctgtgtattggtctggcagggtagtgtggcaaaacccaccttccacaggttcactgtacataactgccggagtgaggctgcagctaagaaggttttcgttgatgtttctgttcctcactactgggaccttgctgtcaatttctcagaagattcttcctgagcaaagcacctgttcagaaccttggtagcttctgctgacctttgctggctacatgctagagatgtgtggccagtgttatagcacttgtcatgatggtaagtcctgttatcacgagtttctacaccaatgggcacatctgctgaaccgaggaatgcctgctgttggcctgttgtcaatctgttgtgaagatgtcatttcagtgatgtttattgctggattttcctatggtctagaaatgtgttgtgagcaactgttgaattttgcagcgtacatttggaataaatccattgcaacaaatgtctatgcgtgttttagtattgttgcggagcgaattgttgtgaaacaagtgtcttcttaaatagataccccttcgtgtgtgtgcgcgtgagtggcattatgaagactataatagccactagtaaatgttttaggtggttaccgtagccactaaaagtgcaatttctatgatc

SEQ ID NO: 124806 - DNA, 528 bp, Zea Mays
cgctgttcaatttctggcgaagctgtatcactgcatgaggccatgtgctattgctcatactcagttgattactcttatatgacttaaccgacactaatttcatagatcatctagtagggttaacaaaataagcaagcacaggggttcttgtatgtttctacctgtttcagttagtaaaattcatagacatgatgctcagtatagggctgggtatatttgatccaatttcatattttgcaattgccattggaaaacagggtggagaagatgaagcgcgggttcgggatgcgagtcccaaggatcattcagtgaagttggttcacatcgagaagcagaggctctgaaagttgtgtgccactacgcctttgtggtatccattgctaatgtaaccctgcctggaatacttgcatctgtcgcagtggttgttttgatcgagtgtgtcttggtgtggccatgtaattttgtctgtacaacatgccggataggtttgcttggggtttaataaaaatgggtgggtccaattctgtg

SEQ ID NO: 124807 - DNA, 2970 bp, Zea Mays
cctgcggttctgcccagtcctcacggcttcctttttcttccgggccactctccgccctcttccttgctgcgctcgcccttcctgcgcattgctcctctgttccccccgtcggtccgttcctgagcgcagccgcttcgcgtccccttgattccacccactgcctaatatgcgtccgtcgcggcggcggcggttggtgctgtgagcgactagcggcgggacaaggggaagggattccgtcgtgctgtgcgaaggcctcaggagccgccggcattgtgcatggagggtgaggaggacggttccggctccgcggtgcagcgcccgcctccgcagcagcagcagatacgggtggtgcgctgccccaagtgcgacaagctcctgcctgagctgcccaattactccgtctacgtctgcggcggttgcggcgccacgctccaggcaaagaagaactcaggatcagatacttcttcagataaatctgatactgctgagcatgtgaagtaccttgaagtgctcgagagtttaccagataagaaaggagtagcgtctgaagctagctgtgctgttcgagaagcagagaccaataaaatcgaagctgggtcagaagagaggtttgtacccagctgctgcaccatgaagcttgaacctgcactcggagatgacagcagggaagtccgggaggcaaaataccggcgcattcgtcatgaagggaaaggagaagcaaagcagccagcgacagcaagagacagatcaccaaggcctgtggttaacagcatcccttctaatgctgaccctgtagaagggccatttgagtgccatatgagaccgggattcatatacgctaacggcgagaagggccatctgagtgacaggaattttgatgatcctagcaccagagtcagtggcctggagaaagatcgtactgagcttctgcggatgcttgatgagttgcgggacaaggtacagagatcctgcgagattgctgacaagtcaagtgtgaatgcttcgacaaatagaatggttaatcctacaagctcctgcattcctcatgagcgtctgagtcgattgcggtatggttcacctcagctgcaacggaatgggtctcagcactcaccttctttgaatgggcagacacctggtgttcctcctgcttttccttcattatctgtacagcaagatctccatggatacggggaatcggttgcacacacgggagctcctatctacccagctgccccatatccatggagaaacttcgataattatttccaaggacattatgatcctgaccctctgatctcttatcaccatgatggcttctaccatcagcctgcttgctcttgcttacattgttaccatcgtgaattcttacctgttcgaagggcaccctatcttatgaacaatcctagcttgtaccatgcagaaggcccagtgatgtttggtgcacagaactacaatacaagaggcatgaatggtatgatgcgacgcagtcacatgagggccaccctgagtaaaaaacctgcacagacttgtgaaccgattgtcaatggcgctccttttactatttgctacaattgctatgaagtgctgcagcttcccaagaactctctcttgttgggaaaagatgagtataagctgcgttgtgggtcatgctcacatgcaattgtggtcagacttgatggaagcaggcttgatgtttcagcacctacaccagtttcacacttatcacctggaagtaagaactactacaacaatggccaagcaaacaatggacaaaatgctgatgagagacttcttccatcctatagtttttctgcaggcagtcattgctctcaagaaaaagatttaccctcgaactcaagcgaaccagacaaaacgcaatgcatatcttctgccagcatttccgaggatgataatagcccagctagatcgaattcacagaagaactcctctggttctagagacgttcctcatgatgctgaagtggttatccgcgttccaactttacctcttcgtgatcattttggatattctccatcagatagggtggttgatgggccaggcaaaggaagcagaagcacccggtccgaacatgaaaagggtgtgttaactgaaagttttaagccaaacaaagtgaaatgtgtacctgtagcaagcgtgctagacccgtcggacgacgagtatgatgatcctgagcacagtcaagatccaggtggtggggcacaatacgtcgaccacctgcgggccacgaaatcgggtgattcctttttctccagcctcataaagaagagctttaaaatcaatggtggaatgggcaatggcagagcaaatgttttcatcaatggctatcccatttctgaccgagctgtcaggaaggcggagaagattgctggaccagtctacccgggtgaatactggtatgactaccgtgctggattctggggtgttatgggacagccctgccttggcatcatacccccatatgttgcggaattcaactatcccatgcctaagaactgtgctggaggaaatactggtgtgttcatcaatggccgagaacttcaccagaaggacatggacttacttgtgggtcgagggcttcccgattctcctgatagatcatacagagttgagatttctggtaaagtatccgacgaagtatctggtgaagagctttattgccttggcaaactcgcaccaacggtggagaagatgaagcgcgggttcgggatgcgagtcccaaggatcattcagtgaagttggttcacatcgagaagcagaggctctgaaagttgtgtgccactacgcctttgtggtatccattgctaatgtaaccctgcctggaatacttgcatctgtcgcagtggttgttttgatcgagtgtgtcttggtgtggccatgtaattttgtctgtacaacatgccggataggtttgcttggggtttaataaaaatgggtgggtccaattctgtg

SEQ ID NO: 124808 - DNA, 534 bp, Zea Mays
atggtggatcaaaattgtggagttattcataaaactttgtataatcaagtgatctgtgacagtcacatcattctatatccagctacaaatcagactggcgacaaatcgaaatgcaaagcaaggcgcgacagggctaatcagatcccggtcactaaactctccatcccggatcaggggacctcccgtggggtgagaggggcgcacctcgtactcgctgacgagcgcctggcggtcccagaaggcaaaggtggccgcaacgaagatgaagaagaggagcgtgaggcgcttgctcgagcacgggtggatcacgcggcctggcgatcggcacgggaccccaatgcaacgcgggggctgcacaaccctgaccgcggcaaaggggaggggcagcaaaggagaaagctgctggatgaggaggtggtggtgggtggtgaggcgaagcggagacgccgcgggcctctcagggacaggttgcaagtggagaggaagggtaactgggccatgctttttgggccgaaaaaacataactataagtag

SEQ ID NO: 124809 - DNA, 125 bp, Zea Mays
atcatatcttaataaaatttacactctaggatttattattcttaaagtaactatttttggtatgatttgcatatttaaaagcttacctaaggtaataaataaataaaactaaaactttgcatcta

SEQ ID NO: 124810 - DNA, 1017 bp, Zea Mays
cgctcgaatgaggcagctctagaaccggttcatgaggcccttgatccaggccaggacaccgctctcctcttcttcaacatctgcctgcttcttggcctcctcggcgtggcggtggacgatgtggtggaagaagcgggaacggcgtccatggccgtggccgtggccgaatctcctcctcatgatcgccttcctgaaccgccggaccatctcttccatttgctcatcctcctcgtcgtcgctgtcctcgtcgtgctcatcagcgtggcggagccgcttcctcgccgccatattcttctcctcgtcctcgtccctcctcctcctcctcctcgtgttggacgtggtggagacggtggcggcgcatgtcgtggtggaagtggaagcggaaccacctccgcagcatctcgtgcttccacgccctgactgccgccgcgctctcgtcgtcgtgcccgtcggcgtcggcgaacggcgacggctgctcgcttgtaatagccacctccccctctccgtcgctgtccgggagagagcgatccgggtccggctcggccacgggcatctcctcccccgcctccctggccacctctgcggatgcgggcaagatggcaaggtggctcactgcctgctcgcgcctcgcgccgtggccagaacaagggaacttgtgcgacgcgtcacggtagatcccgtggtggcgtttcaaccagaggtggtggtggtggtggagccggtgagaaggcaggcggaggagttcgaacccatgctgctgctgctccgccgggatggcctcctcttcagtggcgctggcggtgcccgcctcagcgtggaccgtggggtcggatagcacgttgtcgtcgctgacggccacggcggcggttgattcgggctcggtgtcgtgctctgctgcgactgcgagggcaccgcagtgcgcgacggcgaggagggagaggacgaggaggaggagcgcggcggtggctgacagtcgagccatggttgcgtgctcgggaagcgaacgcggtgactagg

SEQ ID NO: 124811 - DNA, 1988 bp, Zea Mays
cctcttcactctctcctccgtcgtcccgtcactcgtcagtcctcgctctcttcactcgctgaaaggcaggctggtggagtggaagcgcttcactccccttcgtgccaccccagcccatcgccttccactggactcatctgcttggcactcctcgccccgtgcttggattcttgcacttggtgcttcccttctcctacctcacatcacccgcccagatccaatccacacgagatttgcgacgctccggcctcccggcacgaagcctttctagggatcgccactcgccacacgccggccggggcgaaaaaagctcttcttggagcccttctgcttggcctctccctctcttctctcccggcgtcattgtcgccgctgcctgcgagcaacaacaattatggccgccgcgacgtcgcgcgggccagcgtcggtcgccatctgtgcgctcgccgtgctccacgcaatggctgcgctgtgcgactccgccaccgcggcggcggcgacgtgcgcgggcctggccccggccaagcaccggccggaggtgatatccatcgccgacttcggcggcgtgggcgacgggcggacgctgaacacgtgggcgttccgcaaggccgtgtaccgcatccagcaccagcggcggcgcggcggcacgacactgcacgtgccggccggcacctggctcgccggcagcttcaacctcaccagccacatgacgctcttcctcgccagaggcgccgtgctcaaggccacgcaggacacgaggggatggccgctggtggagccgctgccgtcgtacggccggggcagggagctgccgggaccacggtacgccagcttcatccacggcgacggcctccgcgacgtcgtcattacaggtgacaggggagtcatcgacgggcagggtgaggtgtggtggaacatgtggaggaggcggacccttgagcacaccaggccaaaccttgtggagttcatgcattccaccggcattcacatctccaacatcgtcctcaagaactcacccttctggaacatccatcctgtttactgcgacaacgtggtcgtaaccaacatgatgatcttggcaccacgtgactccccaaacacagacggagtcgatccagactccagctccaacgtgtgcatcgaggactcgtacatatccaccggcgacgacctggtggccatcaagagcgggtgggacgagtacgggatcgcgtacgggcggccgagcgccggcgtcacggtccggcgcgtgaggggctcgtcccccttcagcggcatcgccatcggcagcgaggcctccggcggggtgcgcgacgtcctggtggaggactgcgccatcttcgacagcggctacggcatccacatcaagaccaacgtcggccggggcggctacatccgcaacgtcaccgtcgacggcgtgcgcctgaccggcgtgcgcagcggcgtccgcatcgccggcgacgtcggcgaccaccccgacgcgcacttcagccagctcgccgtgcccacggtcgacgccgtgcgcatcagcaacgtgtggggcgtcaacgtccagcagcccgggtcactggaggggatccgggcctcgcccttcacccgcatatgcctctccaacgtcaagctcttcgggtggcggagcgacgccgcctggaagtgcagggacgtgcgcggcgctgcgctcggggtgcagccgtcgccctgcgccgagctcgccaccagcttcgcgtccgcacggtcctcatgcagctagttagtgtagtgatgcctagctaattaatttctgaattctgatgatgggtgtgcttttaagtttgggctttgttttacttattctatggcaccgatgtctgtctgtctgtctttgcttgctcaatcacttactttaggcttccactgctaaagtgctaatcgttcagaaaaccttaccactgcaaataattttgtactccctacattctaaattataaaatatcttagtatttatagat

SEQ ID NO: 124812 - DNA, 1799 bp, Zea Mays
acaaggcacatccctcttcactctctcctccgtcgtcccgtcactcgtcagtcctcgctctcttcactcgctgaaaggcaggctggtggagtggaagcgcttcactccccttcgtgccaccccagcccatcgccttccactggactcatctgcttggcactcctcgccccgtgcttggattcttgcacttggtgcttcccttctcctacctcacatcacccgcccagatccaatccacacgagatttgcgacgctccggcctcccggcacgaagcctttctagggatcgccactcgccacacgccggccggggcgaaaaaagctcttcttggagcccttctgcttggcctctccctctcttctctcccggcgtcattgtcgccgctgcctgcgagcaacaacaattatggccgccgcgacgtcgcgcgggccagcgtcggtcgccatctgtgcgctcgccgtgctccacgcaatggctgcgctgtgcgactccgccaccgcggcggcggcgacgtgcgcgggcctggccccggccaagcaccggccggaggtgatatccatcgccgacttcggcggcgtgggcgacgggcggacgctgaacacgtgggcgttccgcaaggccgtgtaccgcatccagcaccagcggcggcgcggcggcacgacactgcacgtgccggccggcacctggctcgccggcagcttcaacctcaccagccacatgacgctcttcctcgccagaggcgccgtgctcaaggccacgcaggacacgaggggatggccgctggtggagccgctgccgtcgtacggccggggcagggagctgccgggaccacggtacgccagcttcatccacggcgacggcctccgcgacgtcgtcattacagcaacgtggtcgtaaccaacatgatgatcttggcaccacgtgactccccaaacacagacggagtcgatccagactccagctccaacgtgtgcatcgaggactcgtacatatccaccggcgacgacctggtggccatcaagagcgggtgggacgagtacgggatcgcgtacgggcggccgagcgccggcgtcacggtccggcgcgtgaggggctcgtcccccttcagcggcatcgccatcggcagcgaggcctccggcggggtgcgcgacgtcctggtggaggactgcgccatcttcgacagcggctacggcatccacatcaagaccaacgtcggccggggcggctacatccgcaacgtcaccgtcgacggcgtgcgcctgaccggcgtgcgcagcggcgtccgcatcgccggcgacgtcggcgaccaccccgacgcgcacttcagccagctcgccgtgcccacggtcgacgccgtgcgcatcagcaacgtgtggggcgtcaacgtccagcagcccgggtcactggaggggatccgggcctcgcccttcacccgcatatgcctctccaacgtcaagctcttcgggtggcggagcgacgccgcctggaagtgcagggacgtgcgcggcgctgcgctcggggtgcagccgtcgccctgcgccgagctcgccaccagcttcgcgtccgcacggtcctcatgcagctagttagtgtagtgatgcctagctaattaatttctgaattctgatgatgggtgtgcttttaagtttgggctttgttttacttattctatggcaccgatgtctgtctgtctgtctttgcttgctcaatcacttactttaggcttccactgctaaagtgctaatcgttcagaaaaccttaccactgcaaataattttgtactccctacattctaaat

SEQ ID NO: 124813 - DNA, 1070 bp, Zea Mays
ccctcttcactctctcctccgtcgtcccgtcactcgtcagtcctcgctctcttcactcgctgaaaggcaggctggtggagtggaagcgcttcactccccttcgtgccaccccagcccatcgccttccactggactcatctgcttggcactcctcgccccgtgcttggattcttgcacttggtgcttcccttctcctacctcacatcacccgcccagatccaatccacacgagatttgcgacgctccggcctcccggcacgaagcctttctagggatcgccactcgccacacgccggccggggcgaaaaaagctcttcttggagcccttctgcttggcctctccctctcttctctcccggcgtcattgtcgccgctgcctgcgagcaacaacaattatggccgccgcgacgtcgcgcgggccagcgtcggtcgccatctgtgcgctcgccgtgctccacgcaatggctgcgctgtgcgactccgccaccgcggcggcggcgacgtgcgcgggcctggccccggccaagcaccggccggaggtgatatccatcgccgacttcggcggcgtgggcgacgggcggacgctgaacacgtgggcgttccgcaaggccgtgtaccgcatccagcaccagcggcggcgcggcggcacgacactgcacgtgccggccggcacctggctcgccggcagcttcaacctcaccagccacatgacgctcttcctcgccagaggcgccgtgctcaaggccacgcaggacacgaggggatggccgctggtggagccgctgccgtcgtacggccggggcagggagctgccgggaccacggtacgccagcttcatccacggcgacggcctccgcgacgtcgtcattacaggtgagctgagcctcgccttcccttgctcggctaggcttcctcctctgcctactgctctgtcaatatgttgcttactactgtgtgcccgtgagtatcctctatctatctgggaggacaaaaaggctgacatgcacaaggtctccttcctcgtcggagaagactgaatcctgcacaaacatatatttgccatactactg

SEQ ID NO: 124814 - DNA, 1896 bp, Zea Mays
acacctgaggctgcggcctttgtgccatccaggggtcgtcgtcgtcactctctccctctcgccctcgccatcgccatcgccctcgcggtctcgccgcggcataaacaaaacaagcaaagcaaggcaaaggcaaaggcaaaaccccacctcctcgctccgcacctcgtcgtctgcttttcctcggtgcggaacacaagcccctgccgcctccattaccgggctgtgcctgtgcgaggctgcgagcgtggtggctgtgtctggctttgcggcggcggcggtgatggtggtggagatggacggaggcgtgggagtagcagcagcaggaggaggaggagcgcagacgccggcgccgccgccgccgcggcggtggcgcttggcggacgagcggtgcgacctgcgcgccatggagacggactacgtgcggcggttccaccggcacgagccccgcgaccaccagtgctcctccgccgtcgccaagcacatcaaggcgcctgtccaccttgtctggtccctggtgaggcggttcgaccagccacagctcttcaagcccttcgtgagccggtgtgagatgaaggggaacatcgagatcggtagcgtcagggaggtcaacgtcaagtccgggctgccggccacaagaagcacggagaggctcgagctgttagacgacgacgagcgcattctcagcgtcaggttcgttggaggcgatcacaggctgcaggtatgctctgttcttcatctatctatattctgtgctgcccatgcgagatattttgcccaccacctcaaatgcgtcctggagttcctctgccagatgcatcttgatgtgctgccctgcgacgatgccatcctcgagtgatagccccccaacaaactcttgtcgtctatctaaccagaaaacaagcagcggttgttgttgttgttatgtaccgggtgatgtttgcatgctctcaactccaagcatggcactgacttgccatcctttgaccttacatgccaagttcatcgcatgagcacctgtcactcgctgtcgcttgtcgtgctccgtccgtttgccctcactcgtcatcagccagcgatagcaacaagtggcccatggtcacaactcacatgcgttgcacctggataatggacgatggacgccacctggatataagtttatccggccctgacccccttgggttggttgcaagaacgccagcgtgtgtgaaagctgacgactagtctaattcatcgatctgctgcatctcaccttccttttcctttgcccgcagaactactcctccatcctcaccgtccacccggaggtcatcgacggccggccagggacgctcgtcatcgagtccttcgtcgtcgacgtccccgacggcaacaccaaggacgagacctgctacttcgtggaggcgctgctcaagtgcaacctccggtcactcgcggaggtgtccgagggccaggtcatcatggaccagacggagccccttgaccggtgaataatgagtcggaccattatattgcattgcattctgtgtacgcgtagacctgttctccaatgcatggagcccctaggttcttggaaaactgctatgccgcgttcaaagtcaagttctttttccccctccttgcgattgtgtttttctgttcttctccggcgttgtatgtcgcggagggagaagtgcagagtatgatgtgcttgatgaaaattgaaagaaaaaaaaaagaatttagaactgtgaggccctgggacatcttcattctcagatcaatatgtggacttgagggtttaatttctctgtaattagattgctccatcttgattcctttctttcctccgtgtgtgtatgtgtgtgttttgtaaatacatgtcccaagtgtgtacttagggtacgtttagttggattg

SEQ ID NO: 124815 - DNA, 1343 bp, Zea Mays
acacctgaggctgcggcctttgtgccatccaggggtcgtcgtcgtcactctctccctctcgccctcgccatcgccatcgccctcgcggtctcgccgcggcataaacaaaacaagcaaagcaaggcaaaggcaaaggcaaaaccccacctcctcgctccgcacctcgtcgtctgcttttcctcggtgcggaacacaagcccctgccgcctccattaccgggctgtgcctgtgcgaggctgcgagcgtggtggctgtgtctggctttgcggcggcggcggtgatggtggtggagatggacggaggcgtgggagtagcagcagcaggaggaggaggagcgcagacgccggcgccgccgccgccgcggcggtggcgcttggcggacgagcggtgcgacctgcgcgccatggagacggactacgtgcggcggttccaccggcacgagccccgcgaccaccagtgctcctccgccgtcgccaagcacatcaaggcgcctgtccaccttgtctggtccctggtgaggcggttcgaccagccacagctcttcaagcccttcgtgagccggtgtgagatgaaggggaacatcgagatcggtagcgtcagggaggtcaacgtcaagtccgggctgccggccacaagaagcacggagaggctcgagctgttagacgacgacgagcgcattctcagcgtcaggttcgttggaggcgatcacaggctgcagaactactcctccatcctcaccgtccacccggaggtcatcgacggccggccagggacgctcgtcatcgagtccttcgtcgtcgacgtccccgacggcaacaccaaggacgagacctgctacttcgtggaggcgctgctcaagtgcaacctccggtcactcgcggaggtgtccgagggccaggtcatcatggaccagacggagccccttgaccggtgaataatgagtcggaccattatattgcattgcattctgtgtacgcgtagacctgttctccaatgcatggagcccctaggttcttggaaaactgctatgccgcgttcaaagtcaagttctttttccccctccttgcgattgtgtttttctgttcttctccggcgttgtatgtcgcggagggagaagtgcagagtatgatgtgcttgatgaaaattgaaagaaaaaaaaaagaatttagaactgtgaggccctgggacatcttcattctcagatcaatatgtggacttgagggtttaatttctctgtaattagattgctccatcttgattcctttctttcctccgtgtgtgtatgtgtgtgttttgtaaatacatgtcccaagtgtgtacttagggtacgtttagttggattg

SEQ ID NO: 124816 - DNA, 1519 bp, Zea Mays
tgtgatttgagggtagatataggttggaaccagactctgacaccgactacggagccaatccctcctgctggttcgatccaaaccctaccaaatcgatggccgacggcggcaactgcgggccgggcggcggcaatgcatcggcgccggtgtgcagtttcgtgaggaaaccacccaagaacatccggaagcgccccgccgcgcccgcggggtctgatgacgacgacgacggcggcggcggcgccctcgccgccgcgcgctccaagaaggggccaccgtcctcaaccgctggcaagctcgttttctccaccgcaggtgcttcctccgaggcgccgcggttccagtacgaatcgtcccggacgatccagtccacggacacccgcgcaactgccacgctcgagacggagacggagtttgaccgcgacgcgcgctccatccgcgagagacagctcaagcaggccgaggagtccctcaagaagaacccctccgctgttgctgcttccgcctccgcctccaccgctggagaggtgtacaaggggatccacggctacacggactacaaggctgggttccgacgggagcacacggtatctagcgagaaggccggcggttcgcatggtccgctccgggcgtccgcgcacattcgcctctcccagcggtttgactaccagcccgacatctgcaaggactacaaggagacggggtactgtggttacggcgattcctgcaaattcatgcacgaccgaggggattacaaatccgggtggcagctcgagaaggaatatgaggaggctgagaaggcccgcaagcgacgaattgccatgggtggtggtggtgagagtgatgatgaggcagcagatgacgaggatgaggaggaggcgctgccctttgcctgcttcatttgtcgggagccattcgttgatccagtggtcaccaaatgcaagcactacttttgtgaacattgcgctttgaagcaccactcgaagaacaagaagtgctacgtctgcaacaaaccgacgctgggcatcttcaacgctgcacaggagatccgcaagaagatggcacaggacaagaagcagcagcagcaggagtaggagagctcaaaacacaccgttgctaatttagctgtgttgtacaacgatgattggtgcgataactagagtccggtatttttcgccatcagataaaagagaccaagttttgaacgatcacaatgaatgcattcagatccagtcactagatccctacccccagacaggccatggtgcctgttggttcctggcgatgggcaaagctccaaaggtacagtgctagactgccaatgtgtttgtttgttgcagggcacccgaagctcttatctttgatacagtagtagcaatcgtgtcgtgcagtctgactttgagaattcccgctaggctttcgagcgtgctggccttggtgcctctgctcacgcctttccccgtcttgtttgtgctcctcaagtgcctttattatcagtcaaggtgttaccaacacttgttat

SEQ ID NO: 124817 - DNA, 638 bp, Zea Mays
cacaatgcaaaactgcacacaaatgcagcattctaaccggttcacatgccccgttccgcaccacgacatgcaagtgccgacaggttacattacttgaagcctctcaaaccacacgcacatacattacctctcccatccgccgctggcgtagccgccgtcgtgcgccaggggcacggcccccaccgcgcggcgctgcggctgcacctgccccgtctccgcggcggcggcagcagaggcacagtcagaggagtccagcatcatccttcccgtgactgcccggaatccgcgccagccgtgtccgtgccgaggagtcacgcgtacatccgcctcgtggccacacaggatcctgggcccccggcgcctgcccgcagacgccgccgcactcaggaccagcgccctcaggaggctaccgatgcataccatctcatggctgctggctctaccactcgcttgcccagatgccgcggacgcgccccgaggtgagatccgctggttttaatggcttcggatctggggaaagggagggcagggagggggaagcggccggagggaacgtgatggccggtgccagattgcgccgcctgcctcctccccgctagaaaaaggcaccgaactattattattattatcaactaggt

SEQ ID NO: 124818 - DNA, 127 bp, Zea Mays
tacgcgcaaattcagcattatactcccaatttctaatagaaccatcacgattaaactcaagcatagattgagtcttagcaaaaacgataagcttttctcatacatgatgctagatgcctaatcaaat

SEQ ID NO: 124819 - DNA, 255 bp, Zea Mays
atgtccccatccaccgtggcctggcttcgccaagtcttccccactggtgagaattccctcatgcgattcgcctcggttcttgggtcatgttgcatcgttcggattttccatttggagcttggggcgttgtatcatgtttctctggtgaggagcgccaccgtagggcgtagtttccgccacactggttatgcgggaggtaggagacaaccttctagcctttcaatcagagatgggcggtcacgattaagacagtag

SEQ ID NO: 124820 - DNA, 1805 bp, Zea Mays
caagtcaataagtactcaagtaatcactaatgacagtcatgccccgcccatgcccagataaatttgagagctcgagtagatcacggcagcttaggcccgcggccgccatggcaaccgagaccgaatccttctattccgcccagtcatcgccagagccggaggtggctcccatggcgcctaacgtggaaccagcatcccagccggcgaaaccagcagcacctcagccagtagaaccagcatcccagccggcggaaccagcagcccggccggcggatagattggaaatcctgattgagcgagggctcggccaacgtagagagggcgagagcagcatgatgaccatcttccgtgtccccgcccatgtccgggacgccagcaaggagctgtacgagccacggctggtgtcgatcggcccctactaccgcgaccgggcggcgctacgcacgatggagcagcacaagtggaggtacatgcgcgagctgatgaggcggccgcactcgctacccccgctggacagttacgtcagagcagtccgcaacgtcgagcaggaggcgcggtgctgctacagtgagaggaccgacatcttcggctccaccgcccagagcgaaccatctggcggcggggagatcgaagaagcgcactcccccggcttcgcggagatgctcatgcttgacggctgtttcatcctcgagttcttcctgaagtggcataaatctgagaaggacaagctctgcgacgtcgcctggggacttactctgctgcactccgacctgctgctgctggagaaccagatccccttcttcgtcctagaggcgctcttgcacgtggtatatcctacggcgacgaggttgcatctcttcatgctgatcattccctatttaaagttctcctactacaaactgtcgacgcccgaggacctggaccgatccgagatccagccgcaacacctgctgcatctcttctacgaggccatcatgccgggggacgatgagacggcctcggcccaccaggattcgacgccgtcatggatggtccagctgcgtgagatgatcatcaggttgaagaaggccgcgtccacaaggttcgtcttcatccgcgacatgccgcgagtgccgcactggatgaagacgactctgccggccacccttctccgtaaggtcggcgcctggttcagcaaactcttgtccttgatccggagcacatcggcggactccactcctactctggtggtgccgtctgtcacccagctccgcgaggctggcgtccggttcgagaagaaggagtctccccgccacatgttcgacatagcgttcgacaggaatacgggcgtcctggagatgccgcaaatggagctcgactacgcgaacaaggcgctgctcgtgaacctcgtcgcgttcgagcagaccagagacctgccaggcgcggccaagcggctgtcgagctatgtggcgctggtgggcgccctggtgaggacaggtaaggacgtggagcacctgcagaagcacgacatcattcagaacctcctcgacggcgacgatgaggcggccacaaatttcttccagcacttgggcgactgcagcagcttggactacaaaaaccacatgttcgctgacatgttcaaggaactcagagatttctacgactcgagctggcagagacacagggccaagttcctccgtgaccactgcagcagcccatgggcggtgcttgcgctcgtcgtcgccatttgtgggttttgcttcgttctcttcaagctgtcaaccaccatcttcaaccttgctcatcctgattgtcactgctagtag

SEQ ID NO: 124821 - DNA, 806 bp, Zea Mays
atcctaaggttgagagcagagtaccatcgtcaatcgactggtttaattcgtgctaagcagcacacgtctccctcttctgaaagaagctgcaggttttcgccggaccatggctggaagaggaggaaatggcgttccggccgaacaggagttcccaggctggagcgtcgccaaagcccaggaagatccacacccacctgtgcggcatgtgcacgctgctagaggtctccctgcgcaagctcggcataaaaacgaggaagggccggcgcatttcatccctggcatctccaactccatgcctagccatcatcatcaatttccgggggcgcagtggagcaagaatcctacgccgcatgtcccctctccagtggaattcatcatagaggcgtttcagcaccaaaaggatgagctgaaggaaaaggcgcgccaaaagttgattcgcttatccggcggggggaactagacaaagaagagaaaggatgcatggggatgaacaatctacagcagcgctatagttgtctggacatcagcatagagaggtgcagatgacacatacaacatcgactatatatatattaatttatgctgcacgcgcgactcgtgagtctttagtttgatttgttgaataaatgtaatgagagctagtacgtcgtctctactatacatgcatatgctggccaatccacaggatggtactagtcctccatagtaaacaacagaacccaactggttcaaattgtattcggttctgtctgtaaaatctgattctattcaccgctagcaatcacatggagcatgttcatcacaaa

SEQ ID NO: 124822 - DNA, 2077 bp, Zea Mays
atggagattggagaccttgtccaggaaccttcaaattcctcccctggccctatctctccatccgcgcgctctgctctccctgcccgcaccccgcagatcccgaatggccatgcctaccgccgcctgcaggtcggggccggatgcactgcaagctgcggccccgagcaccgggctgaactgaagaggcatctgatggctggggtttataaatggaaactggcatcttataaacagatggaacgtacgaaagttgcatcagagaggttgtcattaagatctaatagcaccaagcatcacgatactgtacatcttggtcttggtcattttgggaaggatggcaatctcatttgtcgttcacttaagtcaatattaaaaccaaaggcaagacagtatgctattgtcaaggtacataataaagatgttgacgagggttgcagctccaaagacaatgagattatttctagtccatctgataggaaagaaggaagtcagctgagggcactggaatcttatttttctaaattcaatccctctcagcagttatactctttgcctcagaagaagcacaaaagtggtccatcatcgtcaaatgaagttgatgcaatcattgctgatgaggatgctaatttgaagaacagggcagactctttgcaggtacagattgacagaggacacacaggtatcaagagtaatcaaaatactcccaacgaggtttacaaggagtacttgatatttgatgaaaaaagtctcctggacatgcatacagatgatcaagcgtctggtttctgtttgacaaacttattggctggtgttaatattgcagttctgttatttgaaatagcaagtccagtgaaaaattctgaaaatgaatatttatccctccctttgttgtatggtgccaagataaacaacttaatactttcaggggagtggtggagactactaacaccaatgtgcctgcactctggtttcttacatatagcccttggttgttgggcattgcttatatttggacctcgagtatgcagggcatatggtcaaaggacattttttctgatatacatacttggaggaatctgtggtaatttgagcagttttgttcacactcctgagataaccgtttgtggcacaggcccagtattttctttaattggagcatggctggtatatcagggtcaaaacaagcaagtcattgacaaggacgtttcagaaagtatgttctggcaggctgtgatagctgcagctttgagcttcttattgagcatttttgggagaattgacaactgggcacatcttggggcgaccatttctggaattttctttggttatctgacatgcccaagtgtagaatttgacaattctgcaaagaacggtcaaaaggaagccgtggctcttattaggcaacaagctcatccatgcaaatccgctgcagtctttttcataaccatacttgcgtttgctgtactcgccttcgcttatgggacacaattcaacaatatggatctggaataggcaaatagctaagtgttgtcatggttcacttcatatatatatatatgcatgcatgtagcccgacagctatatattccggaatgtgaatgagcccgagatgtaagaaaacgttgtacactatagatcagttctatgcgtaaccaggttggaatttttccattccgtatcatgtatacactacaatagtgaatagtctagtacagttggtttttggattggctagagcttatcagtgtctgtaagcaggtgaagccacggacggcataactatttgtacactcggtttgcataagaaccgactgcacatctgcatttgcaccgtcggttgcaagttgtgatagactcggcgggaagttttatgtaatataaaataaagtataggtgaagtacatgtttttagtataaatttttatcctgtaattttatagttattgaattttatgactaagagttggtaatcgtgctagtagtgttttatcttggatcactgcatatgtccccttgatgcagtttttggttgtaatccgagcggtttgagttcgtttgaggaaaccccaatacaaaa

SEQ ID NO: 124823 - DNA, 1395 bp, Zea Mays
atggagattggagaccttgtccaggaaccttcaaattcctcccctggccctatctctccatccgcgcgctctgctctccctgcccgcaccccgcagatcccgaatggccatgcctaccgccgcctgcaggtcggggccggatgcactgcaagctgcggccccgagcaccgggctgaactgaagaggtgtcgaggtcgccattaatcctcaacaaccagctgccaccaacgctatatgctcaccatcgccagcaacttggtggcatctgatggctggggtttataaatggaaactggcatcttataaacagatggaacgtacgaaagttgcatcagagaggttgtcattaagatctaatagcaccaagcatcacgatactgtacatcttggtcttggtcattttgggaaggatggcaatctcatttgtcgttcacttaagtcaatattaaaaccaaaggcaagacagtatgctattgtcaaggtacataataaagatgttgacgagggttgcagctccaaagacaatgagattatttctagtccatctgataggaaagaaggaagtcagctgagggcactggaatcttatttttctaaattcaatccctctcagcagttatactctttgcctcagaagaagcacaaaagtggtccatcatcgtcaaatgaagttgatgcaatcattgctgatgaggatgctaatttgaagaacagggcagactctttgcaggtacagattgacagaggacacacaggtaaagtcacttgacttaccagtatggatgtgtcaccaccaaaacttattaatttaaaagaactatgttacttaggtatcaagagtaatcaaaatactcccaacgaggtttacaaggagtacttgatatttgatgaaaaaagtctcctggacatgcatacagatgatcaagcgtctggtttctgtttgacgtaagtatgtcttaccacttccagtacaagttggaactgccagattgggcatgtaattcctttattatttggtgatattcagaaatatagtttcgttatcatagatacggtgattctagtaccaccatctcctgctattgatattaatgtggaattcatgtgaagaacagaaaatggatatatttgtcacctcctgttttatgtgaacaatgatttctcacatcaaagttacaggaaaacaaaacttgtttaactgtgggcttttccttttatttagataacagaagaaagttgtagccttcatgaaagtgacattagtccaaattatgacaagatatgattagcactaccaaatccacaaccacatgtgcaaaaaaaacatcggataggagttgaacactattcctcaattctaaagataaaaagacatcaatgagaggcaaaaaaaaa

SEQ ID NO: 124824 - DNA, 1395 bp, Zea Mays
aatttaaaaactaaaataaaataaaatagatggattaaaaattcgtcaataaaaatcaaacacgctgacatgtggtaccaacctttaatgggctatgccttagtgggccctcggtcaaccacctacgggcacatcacatgactcaacacgcacgcctgaggctgcctccagcagtccagccgcgtctcccgctctcgtcttttctttcggcgacgagccgcagactaggcaaccgctgccgccctaggtcaggtgcccaggtatccatcggacgacccttccccgtcgacagcaagcaccaggtatcggctgaatccatatgaaggaactgacagtacaataattatttgttttctctgcaaactaattgaccgggaatcgcttggtgtgggcaatatcaaatcaaactgtgcacttatggaggcttcaattccaagttttgaaagcatgtacagccaatattatgtggcatgaaagagatggaaaccagtcagacggccaacttggggattcatcaggagctgggaccagagatcagtcaaaatcccatgggaaatcatgttaacccagaaaaggaaactaatgaaattccaggatctgaggttaaccaagagcttgtggaaatatgccagggcgcagtggtggaaactgatacgatccaagaaaatcaagctgttccagaggcaggcttagaggttaatgaagagactgtggaaacatgccaggaaacagctgcagaatctgatgttaacctagagaagcaaacttctgatccaggtgttatttaccgctgcagaaaatgccggagaatgcttgcaacacaagaatttgttgttacccatgaagtaggtgcaggtggcaaaagcttcagagcaggcaaacggtctaatgtgcatgaggatgatgagaaaccagaatgtccatgcatcttcgtggagcccatgaagtggatgcaaactgtggaagaaggatatgttgcgaaaaagctcttttgcatgggatgtaaagctcgtctgggacagttcaattgggctggtatgcagtgcagctgcggagcctgggtgattccagcatttcagctgaccaaaagtaagatcgaccaatgctcaatgtaacaccagtgcaattaggcgaagttttgacccccttagcagtgtcgttacaacatatatatgtgactaggaaacagtatcatgtagacatgtataggcactgtggtcatttggtctgctgtttagtctgctgctgctgattggcacgtgggttccaccaagctgcaacaactgatactaggaagcattaggtgggctttcagtttgctggtttgttttgccatgctactttagagcaactctaatagattagctaaaaaggctagtcaaatttatagattta

SEQ ID NO: 124825 - DNA, 780 bp, Zea Mays
caggtgtgggcaatatcaaatcaaactgtgcacttatggaggcttcaattccaagttttgaaagcatgggcgcagtggtggaaactgatacgatccaagaaaatcaagctgttccagaggcaggcttagaggttaatgaagagactgtggaaacatgccaggaaacagctgcagaatctgatgttaacctagagaagcaaacttctgatccaggtgttatttaccgctgcagaaaatgccggagaatgcttgcaacacaagaatttgttgttacccatgaagtaggtgcaggtggcaaaagcttcagagcaggcaaacggtctaatgtgcatgaggatgatgagaaaccagaatgtccatgcatcttcgtggagcccatgaagtggatgcaaactgtggaagaaggatatgttgcgaaaaagctcttttgcatgggatgtaaagctcgtctgggacagttcaattgggctggtatgcagtgcagctgcggagcctgggtgattccagcatttcagctgaccaaaagtaagatcgaccaatgctcaatgtaacaccagtgcaattaggcgaagttttgacccccttagcagtgtcgttacaacatatatatgtgactaggaaacagtatcatgtagacatgtataggcactgtggtcatttggtctgctgtttagtctgctgctgctgattggcacgtgggttccaccaagctgcaacaactgatactaggaagcattaggtgggctttcagtttgctggtttgttttgccatgctacttt

SEQ ID NO: 124826 - DNA, 1339 bp, Zea Mays
aatttaaaaactaaaataaaataaaatagatggattaaaaattcgtcaataaaaatcaaacacgctgacatgtggtaccaacctttaatgggctatgccttagtgggccctcggtcaaccacctacgggcacatcacatgactcaacacgcacgcctgaggctgcctccagcagtccagccgcgtctcccgctctcgtcttttctttcggcgacgagccgcagactaggcaaccgctgccgccctaggtcaggtgcccaggtatccatcggacgacccttccccgtcgacagcaagcaccaggtatcggctgaatccatatgaaggaactgacagtacaataattatttgttttctctgcaaactaattgaccgggaatcgcttggtgtgggcaatatcaaatcaaactgtgcacttatggaggcttcaattccaagttttgaaagcatgccaatattatgtggcatgaaagagatggaaaccagtcagacggccaacttggggattcatcaggagctgggaccagagatcagtcaaaatcccatgggaaatcatgttaacccagaaaaggaaactaatgaaattccaggatctgaggttaaccaagagcttgtggaaatatgccagggcgcagtggtggaaactgatacgatccaagaaaatcaagctgttccagaggcaggcttagaggttaatgaagagactgtggaaacatgccaggaaacagctgcagaatctgatgttaacctagagaagcaaacttctgatccaggtgttatttaccgctgcagaaaatgccggagaatgcttgcaacacaagaatttgttgttacccatgaagtaggtgcaggtggcaaaagcttcagagcaggcaaacggtctaatgtgcatgaggatgatgagaaaccagaatgtccatgcatcttcgtggagcccatgaagtggatgcaaactgtggaagaaggatatgttgcgaaaaagctcttttgcatgggatgtaaagctcgtctgggacagttcaattgggctggtatgcagtgcagctgcggagcctgggtgattccagcatttcagctgaccaaaagtaagatcgaccaatgctcaatgtaacaccagtgcaattaggcgaagttttgacccccttagcagtgtcgttacaacatatatatgtgactaggaaacagtatcatgtagacatgtataggcactgtggtcatttggtctgctgtttagtctgctgctgctgattggcacgtgggttccaccaagctgcaacaactgatactaggaagcattaggtgggctttcagtttgctggtttgttttgccatgctacttt

SEQ ID NO: 124827 - DNA, 1332 bp, Zea Mays
aatttaaaaactaaaataaaataaaatagatggattaaaaattcgtcaataaaaatcaaacacgctgacatgtggtaccaacctttaatgggctatgccttagtgggccctcggtcaaccacctacgggcacatcacatgactcaacacgcacgcctgaggctgcctccagcagtccagccgcgtctcccgctctcgtcttttctttcggcgacgagccgcagactaggcaaccgctgccgccctaggtcaggtgcccaggtatccatcggacgacccttccccgtcgacagcaagcaccaggtgtgggcaatatcaaatcaaactgtgcacttatggaggcttcaattccaagttttgaaagcatggtaagtttactttatatattattattattattattattattatagggttgttgcatgtatgcaaattttagtacagccaatattatgtggcatgaaagagatggaaaccagtcagacggccaacttggggattcatcaggagctgggaccagagatcagtcaaaatcccatgggaaatcatgttaacccagaaaaggaaactaatgaaattccaggatctgaggttaaccaagagcttgtggaaatatgccagggcgcagtggtggaaactgatacgatccaagaaaatcaagctgttccagaggcaggcttagaggttaatgaagagactgtggaaacatgccaggaaacagctgcagaatctgatgttaacctagagaagcaaacttctgatccaggtgttatttaccgctgcagaaaatgccggagaatgcttgcaacacaagaatttgttgttacccatgaagtaggtgcaggtggcaaaagcttcagagcaggcaaacggtctaatgtgcatgaggatgatgagaaaccagaatgtccatgcatcttcgtggagcccatgaagtggatgcaaactgtggaagaaggatatgttgcgaaaaagctcttttgcatgggatgtaaagctcgtctgggacagttcaattgggctggtatgcagtgcagctgcggagcctgggtgattccagcatttcagctgaccaaaagtaagatcgaccaatgctcaatgtaacaccagtgcaattaggcgaagttttgacccccttagcagtgtcgttacaacatatatatgtgactaggaaacagtatcatgtagacatgtataggcactgtggtcatttggtctgctgtttagtctgctgctgctgattggcacgtgggttccaccaagctgcaacaactgatactaggaagcattaggtgggctttcagtttgctggtttgttttgccatgctacttt

SEQ ID NO: 124828 - DNA, 1456 bp, Zea Mays
cccgtcgtcctctccatttccttctgtctgcttgccctcaaaccctagcccgtaccggcgtccaccttcgcgcaccctcgcctcaccaaacacccacggcgcattggcgcttccacctcttatcgtacgaaggcgagcggctttcacggtgtctctctgtcgcatgcaatggcaccgctgtttgaggggcgcccaacagctgcctgcccacggcatgctcaggggcgctggggtcccttgccgctgtccctgaagtctagcctgggttgttgatcttgccgcagatgcggtactccattacttctccgcccgcgccatcatttcggccacacctcagtctgttggtcggtcgcagatcccttgccccgtcgagcttaatatgcaatccgttgcttgtgaaggttgtggcttccttgggtgatgcttatttgagaacatagctgttgtgctctgagcatgtcctgtgtgcctgtcatggcggcttcttttggcgacatcataccaacatattcaatgtcaggctttaaaggagtgagctggtttctatattttaactgatgcaccttgatgctttattgagcggtgtctatgaaatgatttggatggaaggctatcctatgctgctgatcagtacttaatggatgggagaagggtcagacctcagataagtacctaacttgctatttcctatttttttatcacttttattgatgcccaattgcatctaaagtgttgtccacttctattgcagcagtgcttgaggattcagtgatcagcagatctgcaaggacaaaaggaccaaaggagtgagctggtttttatattttaactgatgcacctggatgctttattgagcggtgtctatgaaatgagttggatggaagattgtcgtgttttggacaatgccaacctttgtttccgctgtgcctgccaaggttgtggcttccttgggtgatgcttatttgagaacatagctgttgtgctctgagcatgtcctgtgtgcctgtcatggcggcttcttttggcgacatcataccaacatattcaatgtcaggctttaaagattggagaaacgcccatgggcctggcaaactgtggcatgtggctttgaactttgccaattggagacctgatgtggatcattttgggacgcgagttaagccccctgtttggagtgccagaaacaaaacagatggagaagggaaaaaggtgtcaggggataagagccagcgcctgatcaccgttttattcgtttttgagtaaactgtagcgagcaacaggtagcctataattgagacaatgctgaatggattgtagaaaaggatctgctttaatttccgttaatttagcgccttcagtgatgttcctagttgctggagtacatgttaagtatatttaccatttaaatcctcccaccactctcgcgtagctttataaaaaagctcttaataaacca

SEQ ID NO: 124829 - DNA, 1830 bp, Zea Mays
tcccaattcccatttcccattcctccgcaataagccaataactccaccccacgcctaactttaatccgccaaacaccgagtgagccacgccaccacacgcagacgcagcgagcggcgaaggcaagcgccagaaaacgccgctacagccaccaccaccaaccccttcctcccttcccttttccctctccgtagcccgcctctcctacaagaaccccgacccgaccgccgatagctacctagctcccaccccgcacccctgactccaccttctccattcttgatcccttcgccgcgcggagatccaagaacaggggcagcctgacaggggaacgggcggctatgggaggaagcagcgcgatgctcgccgtgttggcggtggtggttcttgcggcggtcggcggcgctgacgccgcggcggaatcgagtgaggcgtcggccaaggggaggtaccacgcgctcttcaatttcggggactcgctagccgacgctggcaacctcatccagaacggcaccccggacatcctggccaccgcgcgcctgccctacggccagacctacttcggcagggccaccggccgctgctccgacggacgcctcgtcatcgaccacctcgcacaagagtttggcctgccgctgctgccgccgtccaaggccacgaacgccagcttcgcgtacggcgccaatttcgccatcaccggcgccaccgcgctcgacacgccctacttcgaggccaaggggctcggtgccgtcatctggaactccggagcgctcatgacccaaatccagtggttccgtgatctcaagcctttcttctgcaacacaacgcaggcatgcaagaaattctttgccaaggcgctgtttgtggtcggtgagtttggcggcaatgactacaatgcacccctctttgcgggcatgggcatcccagaggtttacaaattcatgccggatgtcatccagggcatctctgacggtattgaggcactgattgctgagggggctgtggagatgattgtgcctggtgttatgcccactggctgcttcccagtgtacttgaacatgcttgatgagcccaaagagggatatggctcccgcagtgggtgtgtccgccggtacaacacattctcctgggtgcacaatgcacatctcaaggccatgcttaagaagctccgggctaagcatcccaatgtgaggatcatatatggcgattactacactccagttgtccagttcatgcttcagcctgagaagtttggttttgccaaacaactgcctagggcatgttgtggggctccatcgactcctgagaaagcagcttacaacttcaatgtcacggccaaatgcggtgagcctggtgcgactgcctgtgctgatccgacaacccattggagctgggatggcattcacctgacggaggctgcgtaccgccatatcgctaaaggctggttatacgggccttttgcggaccaaccaatcatccaatcctcatgatcacgccactcctgctgtagagtttcatcaaagtagcgcactggaaaaaaaatggagcgggggaaagtagttcttccatacagtttcaatgtttgcatacatgtacatctccattttgattgtattcatttaacttgggtggtacaaaggtgggatagggaggctgcacaaaggcctgatttcttgatttgtcagggggtataaatatgaaaaatataacgtacatataatcatgtatattgtgtcctggaaatgtgatacagactgtctgcttgagcagcttctgattctctgattaaagatgtgccagttctgcgattcttatactgcagcttctgtctc

SEQ ID NO: 124830 - DNA, 792 bp, Zea Mays
ccgatttttagaatttccatcgaaccgttgccctgtactagcaaataatctgtactttatttggcttgaatttgctgatggagacagttttcctgtctcaactgctagagaaaaagtaggctggcattattgtcgattaaaacagaaggcactttttgcttcaggcattaaacctttgattttaatgcacgtctatgctgggacctaacaacttgtgttctctcattcaggttttgccaaacaactgcctagggcatgttgtggggctccatcgactcctgagaaagcagcttacaacttcaatgtcacggccaaatgcggtgagcctggtgcgactgcctgtgctgatccgacaacccattggagctgggatggcattcacctgacggaggctgcgtaccgccatatcgctaaaggctggttatacgggccttttgcggaccaaccaatcatccaatcctcatgatcacgccactcctgctgtagagtttcatcaaagtagcgcactggaaaaaaaatggagcgggggaaagtagttcttccatacagtttcaatgtttgcatacatgtacatctccattttgattgtattcatttaacttgggtggtacaaaggtgggatagggaggctgcacaaaggcctgatttcttgatttgtcagggggtataaatatgaaaaatataacgtacatataatcatgtatattgtgtcctggaaatgtgatacagactgtctgcttgagcagcttctgattctctgattaaagatgtgccagttctgcgattcttata

SEQ ID NO: 124831 - DNA, 2504 bp, Zea Mays
aattccgtgccgtccctcgcttcttgtgggccacgaatctagggtttatgcatggcttctgaccctcccggagatggcaccagtggtgaggagacggcgccgggccctgcccccgccgtggaggcgccgcctgctcccgccgttccggccaggtcgcgctgggccgctgagatcaaggtctacacccgtaagcacccccgcaaaaaccctaaacctcctccagaatcagcggctgaccccgtttctgttccttccccggctccgaatcccctttctgaaaccttatcctcgattcgccgctccatccaccgcacggaggcggtggacgctgcggcgctgtccgatccggcagcgccggcctcggttcccacccgggcgccgtctggggaacgtggcgccgcctctggggatccctcgtctgggctgaaccgggtcggcggcggtattcctaacggccacggcgacgaccgggcggccgccgctgctgtgaaagctgagaaagcacggaaacgcaggttaaggagtgagctgcggcgctgtctggcaggagagctcgaccaggtccgcgtgctctccaggcgactgaaggaggctgccgaggccctggcgcaacaggaggcttctgagcccgtgcctttgcctttgatggtgctgccaacacagcagcaggtggtggatgctgggtatgttcagcaccagttcttggctggtgatatggcggtgcccatgcctactcagattgcagctgccgttactcctgcccgctcgctgctgcatcgcagaccactaaccgtgtcagttgttcataatgaagcctttgagaaggagaaacggacgccgaaggccaatcaattgtaccaaaattcagagttcttgcttgccaaggataggattcctccctcagattcacatgtgcgcaagaaacccaagcaccacaagaagaaacataggtccctagaatctcgtggcgcagactttgatgccgagcggcgcctgtactctcatgcgttcaagaagtcctcatcacttctgagccgcttaatgaagcacaagtttgggtgggtgttcaacaagcctgttgatccagtcacacttggtttgcatgattattttactattatcaagcacccaatggatcttggcacaataagggggcggctgagccgtgggcagtacaggaaccctaaggagtttgctgaggatgtccgtcttactttccataatgcgatgacatataatcccaagggtcaggatgtgcatttcatggcggagcagttgttaggaatctttgaggcacagtggcctgagattgaggctgaggttaactacctcgcatcatgtcctccattgccgaagaagtttcccccgccaccaattgacctgcgcttcctagagaggtcagattcaatgagacaccatgtggcattggacaccaattcaagaccgatcagtcatactcccacttatacccgaactccgtcaatgaagaaaccaagagcaaaggatccaaataagagggacatgacaatagatgagaagcgtaagcttagtgagaacctccagaatttgccgccggtgaagcttgatgctgttgtgcaagtcattaagaacaagaacttatcagttaagcaacatgatgatgagatagaggttgaaattgatagcatggatgctgagacactttgggagcttgacaggtttgtgtcgaactacaagaagaacctgagcaagcaaaagagaaaggccgagcgagcgatgcttgcccgacaagatgcagagttgcgtgcacagcaccctatacaacaaccacaaccaaccccagtcccccaagaaccttttggtgaaaaatctccaaaacaagttgtgaaagattcgctggaaggcgagcaactgccagcatctgcaccagaacaaaatggtgagaatagacagaatgcgagtagttcaagcaattcaagcagctccagcagtggctcaggatcatcttctagtggctcagacagtgatagctcctcttcagatggatctgatgctggcaattcatcttgagatataggttcagaagttctgtcgagtaggcaataactgcctatttgacgcgacaatagcaccataagattgtacatgcttaccttgtctggcttagggaacccctgtagtttaagtaggttttgtatgtcgattcacccgctgatgaaggcagtaacttgtaggtttcgtggtgtacccgcctaataagactaggcttgttgctgacaccgtcccttggtacaccgcacttttgctaggagccctctggctggcccagacagtactagcatgtacattagcggcagcttgaacgctgattttgtttagctgtgttgattgcagtatgtaggaaggcgactgctgtatgcatttttttcttacttttgtttaacttacggatgaaagcattggcaggccatacaacccctgatggtgtttagtttgccaccatctttctgtggagtaccagtgac

SEQ ID NO: 124832 - DNA, 2483 bp, Zea Mays
aattccgtgccgtccctcgcttcttgtgggccacgaatctagggtttatgcatggcttctgaccctcccggagatggcaccagtggtgaggagacggcgccgggccctgcccccgccgtggaggcgccgcctgctcccgccgttccggccaggtcgcgctgggccgctgagatcaaggtctacacccgtaagcacccccgcaaaaaccctaaacctcctccagaatcagcggctgaccccgtttctgttccttccccggctccgaatcccctttctgaaaccttatcctcgattcgccgctccatccaccgcacggaggcggtggacgctgcggcgctgtccgatccggcagcgccggcctcggttcccacccgggcgccgtctggggaacgtggcgccgcctctggggatccctcgtctgggctgaaccgggtcggcggcggtattcctaacggccacggcgacgaccgggcggccgccgctgctgtgaaagctgagaaagcacggaaacgcaggttaaggagtgagctgcggcgctgtctggcaggagagctcgaccaggtccgcgtgctctccaggcgactgaaggaggctgccgaggccctggcgcaacaggaggcttctgagcccgtgcctttgcctttgatggtgctgccaacacagcagcaggtggtggatgctgggtatgttcagcaccagttcttggctggtgatatggcggtgcccatgcctactcagattgcagctgccgttactcctgcccgctcgctgctgcatcgcagaccactaaccgtgtcagttgttcataatgaagcctttgagaaggagaaacggacgccgaaggccaatcaattgtaccaaaattcagagttcttgcttgccaaggataggattcctccctcagattcacatgtgcgcaagaaacccaagcaccacaagaagaaacataggtccctagaatctcgtggcgcagactttgatgccgagcggcgcctgtactctcatgcgttcaagaagtcctcatcacttctgagccgcttaatgaagcacaagtttgggtgggtgttcaacaagcctgttgatccagtcacacttggtttgcatgattattttactattatcaagcacccaatggatcttggcacaataagggggcggctgagccgtgggcagtacaggaaccctaaggagtttgctgaggatgtccgtcttactttccataatgcgatgacatataatcccaagggtcaggatgtgcatttcatggcggagcagttgttaggaatctttgaggcacagtggcctgagattgaggctgaggttaactacctcgcatcatgtcctccattgccgaagaagtttcccccgccaccaattgacctgcgcttcctagagaggtcagattcaatgagacaccatgtggcattggacaccaattcaagaccgatcagtcatactcccacttatacccgaactccgtcaatgaagaaaccaagagcaaaggatccaaataagagggacatgacaatagatgagaagcgtaagcttagtgagaacctccagaatttgccgccggtgaagcttgatgctgttgtgcaagtcattaagaacaagaacttatcagttaagcaacatgatgatgagatagaggttgaaattgatagcatggatgctgagacactttgggagcttgacaggtttgtgtcgaactacaagaagaacctgagcaagcaaaagagaaaggccgagcgagcgatgcttgcccgacaagatgcagagttgcgtgcacagcaccctatacaacaaccacaaccaaccccagtcccccaagaaccttttggtgaaaaatctccaaaacaagttgtgaaagattcgctggaaggcgagcaactgccagcatctgcaccagaacaaaatggtgagaatagacagaatgcgagtagttcaagcaattcaagcagctccagcagtggctcaggatcatcttctagtggctcagacagtgatagctcctcttcagatggatctgatgctggttcagaagttctgtcgagtaggcaataactgcctatttgacgcgacaatagcaccataagattgtacatgcttaccttgtctggcttagggaacccctgtagtttaagtaggttttgtatgtcgattcacccgctgatgaaggcagtaacttgtaggtttcgtggtgtacccgcctaataagactaggcttgttgctgacaccgtcccttggtacaccgcacttttgctaggagccctctggctggcccagacagtactagcatgtacattagcggcagcttgaacgctgattttgtttagctgtgttgattgcagtatgtaggaaggcgactgctgtatgcatttttttcttacttttgtttaacttacggatgaaagcattggcaggccatacaacccctgatggtgtttagtttgccaccatctttctgtggagtaccagtgac

SEQ ID NO: 124833 - DNA, 1612 bp, Zea Mays
ctagaatcagctggtggttgacatgagaagtgtcttgcctcctcctccttgctttgtctgctacagggctgggctgtagcggtgctggcgtccctctcgcagtctcagacaccacagcccagcagccatgcactcatctgcagctctctcctctcctagttctagcttccctgttcctgccccgataattcgctaactgttcgatctgctcctcccgggcctccttgtgtctactgctgctccctttgctttcgttgctactgttccatctcgtaggtttcgttgctgtcccctgcaggccaccacttgagcgatctgtaagcagataagattgaggccggcggcctccgaaataaaaaagatcctgcaagaaaaaaaaaagaaatatctagggcgagagaggaagagggagggaggaaaaagaataacctagcaagcaagcttgtgagatcgatcgtggtcaagattatggatccggtcacggcatccatacacggtcattatctccctccgccattcaacacccgcgacttccaccaccatctccagcagcagcagcagcagcaccaccaccagcagcacctgcagctcaagaccgaggacgaccacggcggcggcgcgccagggctgttcggcgaccgcggcacgcagggcgaccacgagaacaatgacgagaacagtggaaacagcaacgggagcggcggcggcgagctggcgctggttcccccgtctggtggcggcgggcccgagggcggggatgccacccctcgccgcccgagaggccggccggcggggtccaagaacaagccgaagccgcccatcatcatcacccgggacagcgccaacacgctgcggacgcacgtgatggaggtggccggtggctgcgacatctcggagagcgtgacggccttcgcgcggcgcaggcagcgcggggtgtgcgtgctgagcggcgcgggcaccgtgaccaacgtcaccctgcggcagccggcctcgcagggcgcggtggtggcgctgcacggccggttcgagatcctctccctctccggctccttcctcccgccgcccgcgccgcccgaggccacgggcctcaccgtctacctcgccggcggccagggccaggtggtcgggggcagcgtcgtcggcgcgctcacggcggctgggcccgtcgtggtaatggccgcctccttcgccaacgcggtgtacgagaggctgccgctggaggacgacgacttgctcgctgcccatcaagcgccgcaggcgcaggccgacggtgtcctcgcggccgcgcagctcgccgccggctctgtggatccgaccctcttccagggactgccaccgaacctgctcggcgacgtgcagatgccgccagagccggcctacggatggaacccgccgggcgccgccggtggtgcccgtccggcgccgttctaataattattgcacgcagcttgtttagatgatggtctcgtctcgtcgagtgatttagcttttcttcttccgtgtttacttgaatctgtatcgtgaagaacgaatttccgtgggaattgcatatgatttcgcatgttaatcagtagtaagtcatcttactattgtttcagagaatatgtagctt

SEQ ID NO: 124834 - DNA, 117 bp, Zea Mays
aaataaaagcaaatttagaaattcaaccaagttatgacaactttcccaaaacactctaaatcaactctacaacaaaagttattgagggtttatgccaagaaaatatcaagaaaatag

SEQ ID NO: 124835 - DNA, 1444 bp, Zea Mays
agaactgaatgaatagtttaccgataaacaccgcgtcataagcagagcgcgggcgcgtgccacagccactgcccgcagcttcgacatgtgcatgtggtggacgcagtccggtgggcggtggctgcgcatcaaccaatcaccggccgccttcctcgccacacggggcagagatatagttaggctaggccccgggcggctcatccgcaagccagtggacgccagtgagtgaacaccagccgtcttggcccgctccttccctgctgcggccatggcgacctccgcggcgctctcgaccgccgccaaccccacccagctctgccggtcccgcgctgcgttgggcaagccagtgaaggggcttggcctggggatggggcgggagcgcgcaagccagcggagcatcacgtgccaggcggcgagcagcatccccgccgaccgcgtccccgacatggagaagcggaagctgatgaacctcctcctcctgggcgccatatcgctgcccaccgtcggcatggtcgtcccctacggcgccttcttcgtccccgccggctccgggaacggcggcggcgggacctacgccaaggacaagctgggcaacgacatcacggtggaggagtggctcaacacgcacggtcccaacgaccgcacgctcgcgcaggggctcaagggtgaccccacgtacctggtggtggagcaggacaagacgctggccacctacgggatcaacgccgtgtgcacccacctcggctgcgtcgtgccgtggaacggcgccgagaacaagttcatctgcccctgccatggatcccagtacaacaaccagggcaaggtggtccgcggaccggcgcctctgtcgctggccctggttcacgccgacgtcgacgacggcaaggtcctcttcgtcccgtgggtggagaccgacttcaggaccggccaggacccgtggtggagtgcatgaggaggatcatccgacacaagcggtgctcagtactcataggctttctccgagggcgttgttgctacaaattcacttgcctcttgcctccaaattatatatattacacacactgcatgaaacaagaacacagctgtttgtcatctcttcactataaccttttgaacactctgaaatctgctgtaatcaaatatagactttctctgccatctgctgatcaagtgaccagcagggagagcaatttagacttttttttttgccgaaatgacttttatgtagtaggctcacaccaatttctagttacttggtcaatatttctcttcctcaatgaatgtacaagtttttagatcttgatctagatctacttatgctaagtttttagttaactcctctactagttatacatcaacatagccttttagtctcaagcaagttgtggtaggctatagttaaaatccaacaagatatcaccaaaaagagaaagaggaggaaaaa

SEQ ID NO: 124836 - DNA, 1052 bp, Zea Mays
atgatcacgatccacagctatacagacatcctgaccattctagaccaccagtccgaaccccaccattacttcccaaaccccataacaattctctcctcgcaccaacccggcgaccaccgtaccagagcttgcccaagaaacgcgcgccacggcgctctgcttttgctctgccgtggcatcccccatctggcagtggtagctgacaaccaatcgacgagcggcatgtccgcggtggacgggtcggggtcggggactccaccgccgccgggccaccgcgggtgctgcgcctcgggcgcgacgctggagctggtgggcgcgttcacggcggtgtgcctggtgctgtacggggtgatactgtacatgaactacctgtacgtgcggtggagcggccgcgacggcgtgcaccggacggactccggcctcgcagggctgcccgcgcagaagaggcccgcgggcgggatggacagggcggcgctggcggccatgcctgtgctcaggttcagggctgacgcgcacggcggcgagtctcctgcggagtgcgcggtgtgcctgagcgccttgcaggacggggacgcggtgcgcgcgctgcccggatgccggcacgcgttccacgccgcctgcgtcgacgcctggctctgcgcgcgcgccacctgccccgtctgccgcgcgcgccccgtgctcccgccgccgcagcaggcgcccaaggccggcgccaaggtggtggccgggtcctccggccggcagctggacctggagagccaagtgtagctcccgcgccacggtgaactgcaaaggtaggtagctgttgcgttgcgttctgctccaaaactgtatccttcttcatggagtcagtgagtgaatggtagatagacaccccgcaagtacataattttggtgccaatttctttcgatttgtacggagaaggataccatggcatgtaaaattcggcttgtgcattgtttggcagtgaaaaccttttctgcaatccctctgcgcaatttaagtgttctttttttttgaaggacctgcagtattttgcattgcattagaa

SEQ ID NO: 124837 - DNA, 2526 bp, Zea Mays
atgtacaacatgcaaatgaaacagaattgtaatcctagacatggaattacaacatcacctttttatttattagaagaaaacaagcactattcaacttctgttttcacatatgattcaagtcaaaacaacttttcttcttctgaagatgaggacaatctgaatcgaataatcagtggaaatttcccgtatccagttgatcaacatcaccttgacaatccacatgttaaagccaacttactctttcaggattataatgaaacagttgcagtgattggccgttacataagtgagaactacaatggtgttgctctgcatccaattgattttatagataccagttctgggaagcttctggctgaggtgatggaccctgacataataacaatcagcccagtgaacaagctacatccgcaagatgacatcctagctacaggaagctcaaggtctattttcatatggaagccaaaaactgaagatgaacttactgaagaaagagccaaacagaaggccaaggaatacgtatatggatcaagttcccggaagaaaccaaatggcaagcatgacaatagtagtgatgacgactcaggtggtgattctggcggaaagaacaagaaagcaaagaagactcgcttcactcatgcagtaaagggaaagggcaaatccaacgtctgatgcttggtgtacatagtcgacagcattttgacaagaaaccatccattaaccagcaaatgaaacagagtaagagaaaaagataaaaggttaacatttgctattgctaccttcgtacaataaggccaacacccaacaaatcaagtaggtgccgaatcaaaacccatgatgaatctgcacaacccaatccgattctacgctttttcgagcatgttcttggcgatcttgcagttgtcatcattcaccagagcctcacagaggtcgaaagcctatagcttgattttttccggtgcctgctcgttgctctcggagcaaatccagttgaggacgaggacggcccgctcgattgcacgcgcacggatacgacgctggggccctgcacaactcctgccgccccttccggcacctagcgaggaggccgagaacctcgacagcgcgcgcggagaaccggcgtcgcgtagcgcgagggcgtgcctcggtggttgggtccatgcgcggttgagggaggcgatttccgcaggcacggcagcgggggctgggttcatgcgcgcgcgtgcgcggttgtgggcgagatccgtgggcgggggctgggtgcatccgcggtccgtgggcacggtggcgggggctgggtccatgcgtgtgcctgcgcggttgtggacaagatccgtggcgggggcaggttccacgtgcgggcgtgggagaggacagaggcgggggcaaagtgcggaactctagccacggcgtgcggcaatctcaggggcggcggcggcgtggggaggggcggtcgcggaggggtggtgaagggcgcgcggatggggcgagggtaggcgggggcacggtagtgtggacgctgacgttactaacttaatagagtactatagataaaatcttttacattcgattgttttgtatcctctatatgaccatatactttatatattatcaattaactatgttaaactataggtatctttttttatcataaacaactttaaattatgcacaaatcctataaatatatgaaagcatgctcgactatgttttttatatttgctatacgtatatatatgtcaaatattaagctttggttgtaaaaaaatttaacatctttttatatttggaagaaaaagcagcgcagaagttctagggcaataaattaactagcatgcatatgcgtgtaggaagacggaagcttccatttcaaacaatatttagcatccatttcaaacaatatttcacttgcctaacgtcaaatcaggatgcacacgttgcacgacaaagcaaaattttataataatttgtccttatgaaatgcgtagattagtaaaagatacaaccaaagttgaccaataatatcacactacctactttatcatcctatatatacttagtaacgttttcaccgagtgttttttaaaaaagctgtttccagtagtgtctaggctccaatctaattcattccagaggccctcgccaagtcccatgagtccatgacatagtcacgtttaatatttcattagcatcatgattgaagattaattatagaaaacacaaaacatagtgcatcataaaaatatgacttttccctagcaaaaaaaaagtttcgattccagagaccagaaatatataaactacgcctaagccctagcatctacaacccttggtataagatatccaacatcacggcagggaacaagcttaactagtgagcgtctgctgaactagctagtatagcagccagcgtgtgatcttggctttttttttttttggggccaagagcggcgagctttcaaaccttttcgacgggagcctcgacgacgccacgccggcaaagcgggcatgttgcgtgagagcgca

SEQ ID NO: 124838 - DNA, 1257 bp, Zea Mays
aggcactcctgagtgagatgagatgctagttacaagtgaaataataggcagtattatttgttaatcaaggcactactaccctcatgcaactttctgcactgttgataacggggatactggttagtgatcagttgatcatcacagctcgtctcaattatcaacactgtaacaacagacaggtttcttggaccgctacgatcctccagtgattgcctccaaaggtgtcagagttcaggtgacattgctccactttgaagtactgctctgaggtatcttcggccactataaaaaaagtcgctatgctgtgttctttaggctagctacctttcgtagatattgtctttacaggggatactttttacctacacttttgtacaacgtatgctctacagaatccttcaagtagcaggaactgtcacaaaggcaatggcagtgacgcctttgggaatattctctgtcctggcgctaggatggctaggggatcatatctgtgtttcctccgttcaaatgtctcccaccttgctccaaagtgggctttccactgctgctgtgtggtgtacggtgccagatactgtttcatcccaataccagcctcttcacagaactccactatctgtttgttcaggttcattgaatgtgcaatgctgccgtaacctgagagagacggcgctgaagaaaggaaccccactaggatcttgccaaagacttccttagcaaatctgcggatggagctcctcggtattagaagattcaaccaaggatgtggaacttctccaagctcgccttctggacgaatggtatgttctgttttttgtgactataatattttgatttacatgttgaaaagaacatgctgttttttgctgtaatttctttccatgctcatggaatatattttgatatgatgtaaattgttcacaaggagctgtaaaaattatggcaaactatcttatccgcacaagacaccaaatcacaaaattctatgccctcaagtcccagctacaaggtgtatctcttcgtatatagtctctaaaatcaacacaggcgatgggtgaagccatgaagtgtgtgacgaaagtcatgtggcagatgactagacagatgaatcttcttgccttgtagaagataatgcgagagtttgagatgcaaaacgagaagatggagatggttggtgaactgatgaacgatgccttcgatgatgcctttggagggtgacgaggaggaaaagatggaatagaactcaaattttggtgaccg

SEQ ID NO: 124839 - DNA, 2194 bp, Zea Mays
ctctccctctgcggcacactcgcacccttccgctagccttccttcttgaatcttgagcacagagtaggctcgctcacaggacagtcacttgcctgggaagccagatattattgcagcctcatacaccgcccttccctactgcttcctgagatttgagagctcgggcgccagatctgaaacctcttgtgttgtgcctttggtagttcggtgtagcattgagctagcagaggtgctgttctagttccaggatgagcaaggaggatgtcctcaaggtgcagacattgatgctgagagtgaacatacactgtgacgggtgcgagaagaaggtcaagaagaccctccacaagatcgacggtgtctaccagagcagcatcgacgcggaacagggcaaggtgacggtgtccggtttgctggatccggacaccatcatcaggaagctcaacaaggccggcaagccggctcagctgtggggttccaagcccggcatccctcagaacgcctaccatggcggcggcaaggcccattccaaggaggctggcggcggcaaggcccattccaaggactccggaggtggcaagggccattccaaggatgccggcggcggcaaggcccagaagggcggtgcgggtggcggcggtcacaagggccctggcggtggcggtggcggaggcggtggcgtgggcaatcctaagatggtgatgccgcagccgacgccgcagcagctccagcagctgcagcagcagctgcagatgaaggggctgaagcttccgccgcacctgttgggcggcaatatgccggcgttccccgcggctgcgccgatgaaggaccccgagtccgtcaagtttgccctccccgaggacgactttcgacgactacggccgcgtagttcgacgatgacttcgacgacggcttcgacgacgacgaggacgactacgacgacgacggcctggacgacgacgtctacggcgaccccaagatgatgatgaaagcccatggctgtgccgccgccggcccggcgggggcgacaagaagggcggtggcggcaagaagggtggtggtggggggaacgagatcccggtgcagatcaagggaaacaaccacggcggtgccggtgggcagccgcacaatgcaaagggaggcgccccgggaggcggggcccacctgggccaggggaagaagggcggcggcagcgccgccgccgtcggtgtcggtggcccgatgggcggaatgctgcctcaacaaggcatgatgaggcctcctaacattcttggtggtgctggtgccggcttccccagcacggcccagatgggcggcggacctatgggcatgccggttggccacccgcacatgggtattatgcagcagagcggcggtggcggttgcggagctggcggcatgccgggcctggggttccacccgggattgggcggcggaatgcattctggggcggatatgcttcaggccgccgcggcatccgggaaccccgtggcgcagcagcagtacatggccttgatgcagcagcagcagcagcagatgatgatgatgcagcagcagcaacagcagcacgggaacggcggtgcaggatacccggcggcaatgggctacggctatggccggccaccgatgcattacccaatgggctacccagtgctgcccccgcactcgcatgctgagccttacaacatcttcagcgacgagaacgccaacagctgctcactgatgtgatcagcaattccgcatggaatggccctgttccaagtaaaccatctcaaggagctcaatgtcaccgctgatcaccgacagacatcgccatggttgaagcgccgtgaatcaatcaacaatcagtatgcttggggatgagtcctagctagaaccctgtccctttcctgctccttccccccctttctctagcttattttcgccttgcttttaaaaaaaaaggaacttccttgaatgcgaagttaggtatagtaattatgaggtttccataagggaggggaggagagaggagacgatagggacttcgtacggggtcgttcgcttgtgggttcttcttccctcctggcttcataaaggtggactaatggtagaacaatgttgtcaatctcagtcgtaaatcagtgtgaatatgtcgtgatttctcttctaatctaactaactatatatatggtaataagttctgtttatcggagtc

SEQ ID NO: 124840 - DNA, 519 bp, Zea Mays
atgtgggcttcgcctatgagcactgcaacaagagcaagtcctgtgcttcccctgccaggccatagcaacaattttcttcttgcacttttggtgttactgaaacagctgaaggcagaagagcgtagtgtacgagaagcaaaatggataaaaatccttccaataagaagtacatgtaaattaggcttgccctataactcaagtgtgtatcggcgtccacaggcgcacggttctgcctcggcgccatcaacgctccttgggtcaagtggtttcaatgatattcttctttttacaccatcaacgtcctgtcataatgtgaactatgtcctcaacatgacacattcactcaacatggccattgcatttctggttgctctggtacttgacaacacagtccctggtggtcgtcaagagcggggattgtatgtttggtcagaagcagaggcagcgatgagagaatcgactttcatgaaagactatgaacttcctttcaagatcggacgcccattcagatacgtttga

SEQ ID NO: 124841 - DNA, 783 bp, Zea Mays
atgccgcagctgccctccttccatcctcgcgcaccttccatcctcgtgaaacccccgtcctcgcagatcccgcgctccctccgcgcccgcctgtggatccccaacgacgttgaccccgtgcctcccgccatcctcgccgcaatcgttgcgccagcgccttcgatggaatccaacaccacgcgcctgatggcgtaccctgccccctcacgtccaaggaaggcgcgcccgcaatctccagcgccatcggcctctcgtccaaccccaaccgctgctccagtgctccttcgaccaggtgctcctgtagaaggtacgagcccaccatcctttcgacctatccgtgcgagatctccgtgcttgaggtatctctgtgtcgagggaaagcgagtacatggtcctggtgccgacattgacaccctgtgtgttagtccaagacatgcaactcaaaacgagagaaatgataggctattttacaaactcttgattgataatgtcgaagaactgcttcctgttgtgtataaaccaacagtgggggaagcttgccagaaggcatgggaattccttgggaaagcttgcactttatactgctattggaggtgtacaaccatccactgtgggtacttaacatgcgatgtcaatgggttcaggagaggcgcgctagcatcgaagaagccgccgccggcagtggtcgtggagaaagcgggcaacgaaggtggaggagagggtgagggtctgtatgatgcgatcatgatcgcttcgaccgccgtccaacattgggagcattga

SEQ ID NO: 124842 - DNA, 1357 bp, Zea Mays
gatgcagtctctatcacgaactaatgcattgcaagtgcactgtgatttgccccaccaccgccaggccccccatgcatgtgcacctatgcatctccacctacactgcgttcttgcaaccaataaccatatacatacacacacactaataactatatacatacatctccaacacagctagcaaaggcagcagtcgagcactccaccatccagcttcgcatcccgcaagttcccagtcagccgagcagccagcggcggtgccaagaaggccgagctgcgagctccactccccacacctcagaagaaaaaggtgatggcgcaactgccgccgcgggcgccgagcgccgcgccgcaggaccactggccgccggcggcgggggagttcctgggcttcgccgcggccaggcgcggcgcgcaccgccgctccgcgagcgactcggccgcgttcctcgaggccgtgcccattgacgacgacgtcgtcattggcggcggcggcggcggcggcgacgacttcgaccgcctcgaccacgaccagctcctgtccatgttctccgacgtcgacgtctccgtctccgtctccgtctccggcagcgccggggagagggcgcagctcatggacgcggggggtgcgggtgcggacgacggggtggcggactcgtcgccggctgccgcggacggcgtcgctgagcccaaaagggtcaagaggatattggcaaacaggcagtcggctcagaggtcacgagtgaggaagctgcagtacatctcggagcttgaacggagcgtcaccagtctccagatggaggtgtcggcgctgtcccctcgcgtggccttcctcgaccaccaccgctcactgctcaccgtcggcaacagccatctcaagcaaagaatcgcggcgctcgcccaggacaagatcttcaaagacgctcaccaagaggcgctggagaaggagatccagcggctgcgccaagtgtaccagcagcagcaggtcaaggtggccaccaccggcggcgccgacatcgccaccgccgcctcgccgtcgatgcaggccaggcaagagctgctcgcgtgcgagggcgctgctattcgatagcggaggcggcggcggcggcggcggcgttcacgcccctgttactgttagtagcttaattaacttttgtgcagtctgatcaatacgtgttggcttgtttgtttgctgcttcttaatttaattcgtatgtgatgtattctgctcaccctagcaaaaaaaaaaaaaaaaatgcatcgatgccaagttgtgaatgaattgtactattcagttatttggaccggcttagtcggaatatagtgagacggagtttgttggtgtgagttatccgttctt

SEQ ID NO: 124843 - DNA, 274 bp, Zea Mays
aagtgtagcattcaaagccacctcatctaagggcaagagaaagaataaagaagaatcaagtgaagatgaaagctcaagctcaattgatgagattaagaaatggctctctttgtgcgcctatttggcaacttcatgaagaagaaatgatatggcacaagaagaagaaattcatcataaaaactagatgctacaagtgtggaagtcaagaacatctcattactgagtgtccacatggtgaagaagagaagaaacaaaaaaggacaaaaggcaaaag

SEQ ID NO: 124844 - DNA, 3364 bp, Zea Mays
acaaatagaataggcacgcacactccgaacttcccaccccatctccgccgcgcgcaccgcccaatctccgcctccacctgcgccccgctcaggcgagcagaggcttccaccactctccatttcccacgcccgctgcgggctcgcgggcgagaggggattgtctgtgccgccgggcgggaatttgattcgttcgattcgctgcgccgcgatgccggagcggcaccagtcgatcgacgcgcagctgcggctgctggcccccgggaaggtctccgaggatgacaagctcgtcgagtacgacgccctcctcgtcgaccgcttccttgacatcctccaggacctgcacggcccccacctacgcgaattcgtgcaggagtgctacgagctctcggcggagtacgagaacgaccgggatgaggctcggcttggcgagctcgggagcaagctcaccagcctgccgccgggggactccatcgtcgtcgctagttccttctcgcacatgctcaacctcgctaaccttgccgaggaagtgcagatcgcgcaccgccgccggatcaagctaaagcgtggggacttcgccgacgaggcctccgcgccgacagagtcggacatcgaggagacgctcaagcgcctcgtctcgcagctcggcaagtcgcgggaggaggtcttcgacgcgctcaagagccagaccgtcgacctcgtcttcaccgcccaccctacacaatccgtgaggaggtctcttctccagaagcacggcaggatccgtaactgcctgcggcagctctatgccaaggacatcactgctgacgacaagcaggagcttgatgaggcacttcagagggagattcaagctgcttttagaactgatgaaatccgcagaacccctcctactcctcaagatgaaatgcgtgctggactgagttacttccatgaaactatctggaagggtgtacctaaattcttgcgccgtattgacactgctctgaaaaatattgggatcaatgaacgtctcccttacaatgctcctcttattcagttctcttcctggatgggtggtgatcgagatggaaatccaagagtaacaccagaggttacacgggatgtatgcttgttggcgagaatgatggctgctaacttgtatttctctcagatcgaagatctaatgtttgagctctcgatgtggcgttgcagtgatgagcttcggatccgtgcagacgaactacaccgctcttcaaaaaaagctgcaaaacactatatagaattctggaagcaagttcctccaaatgaaccatatcgtgtcatacttggtgatgtcagggataaattgtactacacacgtgaacgttctcgtcatctattgacatctggaatttctgagattccagaggaggcaacttttactaacgttgaacagtttctggaacctcttgagctatgttatagatcattatgtgcttgtggtgacaaacctatagctgacggaagtcttcttgatttcttgcgtcaagtatcaacttttgggcttgcccttgtgaagcttgacatcaggcaggaatctgatcgacacacagatgtccttgattcgataacgacacatcttggaattggctcctatgctgaatggtctgaggagaaacgccaggattggttgttgtctgaactgaggggcaaacgtccattgtttggttctgatcttcctcagactgaagagactgctgatgttttaggcacatttcatgtccttgcagagcttccagcagattgctttggtgcatatatcatctcgatggcaactgccccatctgatgtgcttgcggtggagcttttgcagcgagagtgccatgtaaagcaaccactgagagttgttccactcttcgagaaacttgcagaccttgaagcagctccagcagctgtagcacgactcttttcaattgactggtacatgaataggattaatggtaagcaggaggtcatgatcggatattcagattctggcaaagatgcagggcgtctctctgcagcatggcaaatgtataaagcacaagaagagctcatcaaggtggcaaagcattatggagtgaagctgacaatgtttcatggaagaggtggaacagttggcagaggtggtggtccaacccatctggctatattatctcagccaccagacacgatacatggatcgcttcgtgtaacagttcaaggcgaagttattgagcactcctttggagaggagcacttgtgctttagaactttacaacgctacactgcagctactcttgagcatggcatgcatcctccaatttcccccaagccagaatggcgtgctctgatggatgaaatggctgttgtagcaactaaagaatatcgatcaattgtctttcaagagccacgcttcgttgaatacttcagatcggctacgcctgagactgaatatggcaggatgaatattggcagccgtccatcaaagaggaagcctagtgggggaatagaatcgctccgcgcaatcccatggatctttgcttggacacaaacaaggttccatctgcctgtttggcttggatttggcgcggcgatcaagcacatcatgcagaaggacatcaggaacatccatatactgaaagagatgtacaatgagtggccattcttcagggtcacccttgatctgctcgagatggttttcgccaagggtgatccaggaatcgcagctgtgtatgacaaattgcttgtggctgatgatttgcaatccttcggcgagcaactgaggaagaactatgaggagacaaaggaactactcctccaggttgccggtcacaaggacgtccttgaaggtgatccttacctgaagcagcgtctgcggctgcgcgaatcctacatcaccaccctgaacgtgtgccaggcctacacgctgaagcggatacgtgacccgagcttccaggtgagcccgcagccgccactgtccaaggagttcaccgacgagagtcagccggcggagctggtgcagctgaacgagcagagcgagtacgccccgggcctggaggacacgctgatcctgaccatgaagggcatcgctgccggcatgcagaacaccggctaggccaagatacatactcggtttgcgaataacccgtctcccatgagatggtaggcgatatgtgtagcctgtaagcagacagttcgtcggcgtgttgcggaggaatttttatgtcagagcctttctctcgtgtgcttgatgtagatgccatggggagtttttactggctgttgaagcctgatgcaaaataaactatggaactaaggcattgttttttttttatctaataactagcaaatatgtttcgatcccattgaaactaacatctatttttgt

SEQ ID NO: 124845 - DNA, 3326 bp, Zea Mays
cccatctccgccgcgcgcaccgcccaatctccgcctccacctgcgccccgctcaggcgagcagaggcttccaccactctccatttcccacgcccgctgcgggctcgcgggcgagaggggattgtctgtgccgccgggcgggaatttgattcgttcgattcgctgcgccgcgatgccggagcggcaccagtcgatcgacgcgcagctgcggctgctggcccccgggaaggtctccgaggatgacaagctcgtcgagtacgacgccctcctcgtcgaccgcttccttgacatcctccaggacctgcacggcccccacctacgcgaattcgtgcaggagtgctacgagctctcggcggagtacgagaacgaccgggatgaggctcggcttggcgagctcgggagcaagctcaccagcctgccgccgggggactccatcgtcgtcgctagttccttctcgcacatgctcaacctcgctaaccttgccgaggaagtgcagatcgcgcaccgccgccggatcaagctaaagcgtggggacttcgccgacgaggcctccgcgccgacagagtcggacatcgaggagacgctcaagcgcctcgtctcgcagctcggcaagtcgcgggaggaggtcttcgacgcgctcaagagccagaccgtcgacctcgtcttcaccgcccaccctacacaatccgtgaggaggtctcttctccagaagcacggcaggatccgtaactgcctgcggcagctctatgccaaggacatcactgctgacgacaagcaggagcttgatgaggcacttcagagggagattcaagctgcttttagaactgatgaaatccgcagaacccctcctactcctcaagatgaaatgcgtgctggactgagttacttccatgaaactatctggaagggtgtacctaaattcttgcgccgtattgacactgctctgaaaaatattgggatcaatgaacgtctcccttacaatgctcctcttattcagttctcttcctggatgggtggtgatcgagatggaaatccaagagtaacaccagaggttacacgggatgtatgcttgttggcgagaatgatggctgctaacttgtatttctctcagatcgaagatctaatgtttgagctctcgatgtggcgttgcagtgatgagcttcggatccgtgcagacgaactacaccgctcttcaaaaaaagctgcaaaacactatatagaattctggaagcaagttcctccaaatgaaccatatcgtgtcatacttggtgatgtcagggataaattgtactacacacgtgaacgttctcgtcatctattgacatctggaatttctgagattccagaggaggcaacttttactaacgttgaacagtttctggaacctcttgagctatgttatagatcattatgtgcttgtggtgacaaacctatagctgacggaagtcttcttgatttcttgcgtcaagtatcaacttttgggcttgcccttgtgaagcttgacatcaggcaggaatctgatcgacacacagatgtccttgattcgataacgacacatcttggaattggctcctatgctgaatggtctgaggagaaacgccaggattggttgttgtctgaactgaggggcaaacgtccattgtttggttctgatcttcctcagactgaagagactgctgatgttttaggcacatttcatgtccttgcagagcttccagcagattgctttggtgcatatatcatctcgatggcaactgccccatctgatgtgcttgcggtggagcttttgcagcgagagtgccatgtaaagcaaccactgagagttgttccactcttcgagaaacttgcagaccttgaagcagctccagcagctgtagcacgactcttttcaattgactggtacatgaataggattaatggtaagcaggaggtcatgatcggatattcagattctggcaaagatgcagggcgtctctctgcagcatggcaaatgtataaagcacaagaagagctcatcaaggtggcaaagcattatggagtgaagctgacaatgtttcatggaagaggtggaacagttggcagaggtggtggtccaacccatctggctatattatctcagccaccagacacgatacatggatcgcttcgtgtaacagttcaaggcgaagttattgagcactcctttggagaggagcacttgtgctttagaactttacaacgctacactgcagctactcttgagcatggcatgcatcctccaatttcccccaagccagaatggcgtgctctgatggatgaaatggctgttgtagcaactaaagaatatcgatcaattgtctttcaagagccacgcttcgttgaatacttcagatcggctacgcctgagactgaatatggcaggatgaatattggcagccgtccatcaaagaggaagcctagtgggggaatagaatcgctccgcgcaatcccatggatctttgcttggacacaaacaaggttccatctgcctgtttggcttggatttggcgcggcgatcaagcacatcatgcagaaggacatcaggaacatccatatactgaaagagatgtacaatgagtggccattcttcagggtcacccttgatctgctcgagatggttttcgccaagggtgatccaggaatcgcagctgtgtatgacaaattgcttgtggctgatgatttgcaatccttcggcgagcaactgaggaagaactatgaggagacaaaggaactactcctccaggttgccggtcacaaggacgtccttgaaggtgatccttacctgaagcagcgtctgcggctgcgcgaatcctacatcaccaccctgaacgtgtgccaggcctacacgctgaagcggatacgtgacccgagcttccaggtgagcccgcagccgccactgtccaaggagttcaccgacgagagtcagccggcggagctggtgcagctgaacgagcagagcgagtacgccccgggcctggaggacacgctgatcctgaccatgaagggcatcgctgccggcatgcagaacaccggctaggccaagatacatactcggtttgcgaataacccgtctcccatgagatggtaggcgatatgtgtagcctgtaagcagacagttcgtcggcgtgttgcggaggaatttttatgtcagagcctttctctcgtgtgcttgatgtagatgccatggggagtttttactggctgttgaagcctgatgcaaaataaactatggaactaaggcattgtttgtttctctccattctccatgattatataatccagcttatagattatataagcacctaataa

SEQ ID NO: 124846 - DNA, 207 bp, Zea Mays
atggtggagaaggtaccaaaagctattatcaggtacactaagttccttgtcgggttatcggaggagaaagagacaatgctgccaacaaagcaagacatgacaaaggtgcgaataatagcagacatggttatagaggaaaatagcaagggaggtccattgggacatcatacatttccagaatatgaagtagctttcatcgttacatga

SEQ ID NO: 124847 - DNA, 527 bp, Zea Mays
gaggcacggggatcgataccccgcatctccaaaatcatgtttttttaatcttccattaaggttttaatccgttattgcattgcattgcatgaagtaattaatctagagaaaactttctttctcctcgaatcttttttgccaaccacgtcatgtttccatccgtgcagtccagagacattatcaccatggacgacatcgtatcgccatcgtcatgctgcgatgaagtagcagtgcttgtaggaggagcaggacaacgacccgttctgactgttgagcttatattgatgatgtgacgttttcattatgctggctatagcataatagtagctcaggggatgtagttcagatggtagaacgctcgcttagcatgcgagaggcacggggatcgataccccgcatctctaaaatcatgttttttaatcttccattaagtttttaatccgtcattgcattgcattgcatgcactgattaatctagagaaatttttctttctcctcgaatctttttcgccaaccacgtcatgttt

SEQ ID NO: 124848 - DNA, 400 bp, Zea Mays
gtgcttccatatattgtgagtttgccaatgatgccattgtagccgagtctgggaagaaagtggcctcttcctcaagatcaggtcagcttcaattgtttgcttggatgtttggctcttctgctggtgctttcggaaacctcctaggtggcattgcgctcagctatttttctcccaaagtcatgtttctgtttttcgcaatccttctcctgctccagttcttcagtacatcactttagctcagttctgtttagttcagtacatcatgttcagtgaccaaaccattgactgtcataagaaatctgaaaacaagccactcggttttcatttcctggttgtgtccagtttagttctctcttttcatttcctgaaaacaagccactcggttgatacattttctggt

SEQ ID NO: 124849 - DNA, 334 bp, Zea Mays
gtcgccctggagaaaagcaccgggcgtgcgccgtcatattcacagccgccgagagaaacaaaggatgaagagagagaacgtgagtgttgttgccgagagggtgttcgacaagtcacgcactggacgtccaggtacttcctgtgcgtgcgatgaggagcggaccgggcctcttcgccgagcgttgaagattgtgcgagtgcttcgttgtcgacattgaaggatcgccgtcgtgctgcagacttctagacgactgtacttgcgccgtgaaacacgcgcgaggacacgtgtcatccgaagagcaagttggtacctggaatctcaagtgtcaggcaag

SEQ ID NO: 124850 - DNA, 334 bp, Zea Mays
gtcgccctggagaaaagcaccgggcgtgcgccgtcatattcacagccgccgagagaaacaaaggatgaagagagagaacgtgagtgttgttgccgagagggtgttcgacaagtcacgcactggatgtccaggtacttcctgtgcgtgcgatgaggagcggaccgggcctcttcgccgagcgttgaagattgtgcgagtgcttcgttgtcgacattgaaggatcgccgtcatgctgcagacttctagacgactgtacttgcgccgtgaaacacgcgcgaggacacgtgtcatccgaagagcaagttggtacctggaatctcaagtgtcaggcaag

SEQ ID NO: 124851 - DNA, 484 bp, Zea Mays
aaagtgggccattagcattgactattattgaatattaatttgggccaagcccacattaatccaacactttcagtctttcacctaggagcttggcgatgactaccaggttgacatggaagaaataatggtagcaccaatttaggatggataacaaccaaaatatcctacaaaagttgtttctaatatcgtaccgggctccagtgtgttcctatgcaatgttggtcttcggtctgcatccaagaaaagctccatagcgtcaatttctgcaaaggttcaacaactttaggatgaacttgagatcaagaagcaagaaatatttgcagcgaacaaattcatgcgatattttggttgtgatgtgtaatattccttgacgatatgaatgcttatgatgtgttccttctaatgactattgtatctatcacaaatgctttggcacatcactgccatgtcatcatattttatgatgaaaatattcgtcacaaat

SEQ ID NO: 124852 - DNA, 238 bp, Zea Mays
ggaatgtttagctccttctcttcatcttcataatcaagatccattatgtaagaggcaagaagcaaaaatgaggtcaaggaaacaaaatactccataaagaaattgtttagatcagtcttacatgaaataaaactaataaaaaatcaatgttaaaaaggatattcatcaactttgacatggcactttcacttttctttgattccctaagtgcagcctacaggattaaatccaagtaagt

SEQ ID NO: 124853 - DNA, 489 bp, Zea Mays
aactgggatcgacactgcgtcggccgccgcgtgcacggccccggccccgcaccgcgcgcgcaccgcctccacctcagccgccagtcgctccgtcaccgcgggcacgaccgggtacgacaccacgccaccgtgctgcacgtagcccgacaccaccttcacgaactccttgcaggccgaccttgcgtacatacgtcgtagcggccatggaccccgtcgagcaccttcaacgccccgtactggaccaccaactccggcgccccgtccaaccaaggtcccatccgcctcggccgccagtcgctccgtcaccgcgggcacgaccgggtacgacaccacgccgccgtgctgcacgtagcccggcgagacggccaggagagccggcatggccgcgatggcgattgacgtggcggctgagcttaggcggcggcggccgcggcgaagggttgtgccgctgcgtcggggagacgaggccagccgctgcgtcggcgaagg

SEQ ID NO: 124854 - DNA, 2992 bp, Zea Mays
caggataatatgttcaatctgtttccttgttcatttaaacgtagagtggccttgaaggatgataattgaagcaaaatgattctctatttcaccatattttggagatggatgatctgccaggagatgaaggaagatcccagacacacccttcagaccggaattggccctcccatttggagcagaagttccagtccctgcccctgactaaacaggaaaggaattttgattctgcatattcttcccttgattctagggaagttggtcattcattgcaggctgctcagacattatggtctagcggatccctttcaggtccaatacccaatggtttttattccattattccggaaaagagactcaaggagcattttgataccataccttctcctgatgacctttattctcttggaatagaaggatttaaggctgagattatccttgtggacatagaaagagataaaaagctatctgctttaaagcagttatgcacagcactggtaaaaggattgaattcaaatcctgctgcaatgataaaaaaaattgcaggtttggtttttgacttctacaaccgaccaaacccacatctcagtcctgcaagaacatcctctgaagatctttccaatttattagaaaatcgaggagttcaattgctgggacagataagacatggatcttgcaggcccaaagctatattatttaaagtccttgctgactcagttggtatagattctaaactgctggtgggcattccaaatgaagaacctcatggatatgataattcatccaaacatatgtctgttgtggtcattctgaaatctgcggagtttctagttgacctgatgcgttttccaggacaactagttccattttcatccaaagctgttgtcacatcccatatgtctgcaactggagaaagtgattcagccgactatgattcctgtgattctcctcttgaaccaaatagtcctctatgtgctcaaaggcaagagcaagatgatggcaatagatccttcaaagtcctctcactaagaaacatcatgctcaaatcgacaaattctatggagggtaaaatgagttgttcatctcatagtgagccgaatgttgcaaatgccttctgtggtcgcagccgcgataaagttgtggatgaacatcaaagaactgcaagctcaagtccagagcatccactgtccagagttcgtgggcgctcaatgctgggtgataaacaatatggtggtgctgtagcagtgtcaaggtcagatggcgcatcaacatcaaatacacatagagcacggagaagtactaatattactcctgaaatcagtgatgatattgtgagagcagttcgagcaatgagtgaaagcatgagacaaaatcgcctttcaagggagcagaaggatggtagtcttggatcctcaaatgattcaatgaaacatgaacctgctggtgactccaatgatgatgaagcatccacaagacgaccgagtgcactggagggtttgagaaggcaatttaatagtcagaaagctgtgtcattgccttcgtcgcccaataggtcaggtattcttggcctcaggagcccatctgactatacagaagccgatctgatggcgacctggaatgaggtgttgcagtcttcaccatttctgaacaagcctttattgccttatgaggaatggtgcattgagttttcagagatcactgttggcattcgtgtgggagtagggttttttggggaagtcttccgtggcctttggaacggaacagatgtagctataaaagtatttctggagcaggatttgacaacagagaatatgaaagatttctgcaacgagatatcaatacttagccgacttcgacaccccaatgtcatactctttcttggtgcatgtatgaagcctcctcacttatccctagtcactgagtacatggaagtgggttctttgtatagtttgattcactcaaaaacacagaaaactaagctccattggaagaggaggttaaagatgctccgtgatatctgtaggggtctcatgtgcatgcaccggctaaagattgttcaccgggacctcaagagtgcaaattgcctcgttaacaaatactggacagtcaagatatgtgattttgggctctctcgagtaatgtcaaattctgcaatgaatgacaactcatctgcgggaactccagagtggatggctcctgagctcattcgcaacgagccattcacagaaaaatgtgatatcttcagcttcggggtcatcatgtgggagctttgcactctttgtagaccttgggaaggaattccacctgttcagatcgtttactctgttgcgaatgatggggcaagactggaaataccagatgggcctcttggaagcttgatagcagattgctgggcagaaccggagaggcgtccatgctgccaggagatcctgacccgccttcttgattgcgagtataccttgtgctgaggctttgcttctagtctgtatagcggttataggggcatcagacggtctggcttatatatacatcacttaattttccatttcacatacatcattgagggtgtaaattaccatgtattaataagcaaactttttctaaacctctttaatgctattgccccaaaatccaagaaaagttttcgcaaaaaaaaagccttgttcgagttctgtacgttttccctttatctatatcttagtcgctttctgaaataatgagatttcactttccaaataaatctatatgtgatttttttaacctttgtttgactaactgccgaacccaacgattcttccaggacccgacccaaacgtttttgattggatctctttctttctctctccctgagagcaagcagatgggatgtaagcttgtctatgtcattaaatcctacgtagagatgagagagaataagagaccgaagtgggcacccgatctaccgcacaactaaaacacgccatttccaaggttcgtttaacttttaatccat

SEQ ID NO: 124855 - DNA, 2987 bp, Zea Mays
caggataatatgttcaatctgtttccttgttcatttaaacgtagagtggccttgaaggatgataattgaagcaaaatgattctctatttcaccatattttggagatggatgatctgccaggagatgaaggaagatcccagacacacccttcagaccggaattggccctcccatttggagcagaagttccagtccctgcccctgactaaacaggaaaggaattttgattctgcatattcttcccttgattctagggaagttggtcattcattgcaggctgctcagacattatggtctagcggatccctttcaggtccaatacccaatggtttttattccattattccggaaaagagactcaaggagcattttgataccataccttctcctgatgacctttattctcttggaatagaaggatttaaggctgagattatccttgtggacatagaaagagataaaaagctatctgctttaaagcagttatgcacagcactggtaaaaggattgaattcaaatcctgctgcaatgataaaaaaaattgcaggtttggtttttgacttctacaaccgaccaaacccacatctcagtcctgcaagaacatcctctgaagatctttccaatttattagaaaatcgaggagttcaattgctgggacagataagacatggatcttgcaggcccaaagctatattatttaaagtccttgctgactcagttggtatagattctaaactgctggtgggcattccaaatgaagaacctcatggatatgataattcatccaaacatatgtctgttgtggtcattctgaaatctgcggagtttctagttgacctgatgcgttttccaggacaactagttccattttcatccaaagctgttgtcacatcccatatgtctgcaactggagaaagtgattcagccgactatgattcctgtgattctcctcttgaaccaaatagtcctctatgtgctcaaaggcaagagcaagatgatggcaatagatccttcaaagtcctctcactaagaaacatcatgctcaaatcgacaaattctatggagggtaaaatgagttgttcatctcatagtgagccgaatgttgcaaatgccttctgtggtcgcagccgcgataaagttgtggatgaacatcaaagaactgcaagctcaagtccagagcatccactgtccagagttcgtgggcgctcaatgctgggtgataaacaatatggtggtgctgtagcagtgtcaaggtcagatggcgcatcaacatcaaatacacatagagcacggagaagtactaatattactcctgaaatcagtgatgatattgtgagttcgagcaatgagtgaaagcatgagacaaaatcgcctttcaagggagcagaaggatggtagtcttggatcctcaaatgattcaatgaaacatgaacctgctggtgactccaatgatgatgaagcatccacaagacgaccgagtgcactggagggtttgagaaggcaatttaatagtcagaaagctgtgtcattgccttcgtcgcccaataggtcaggtattcttggcctcaggagcccatctgactatacagaagccgatctgatggcgacctggaatgaggtgttgcagtcttcaccatttctgaacaagcctttattgccttatgaggaatggtgcattgagttttcagagatcactgttggcattcgtgtgggagtagggttttttggggaagtcttccgtggcctttggaacggaacagatgtagctataaaagtatttctggagcaggatttgacaacagagaatatgaaagatttctgcaacgagatatcaatacttagccgacttcgacaccccaatgtcatactctttcttggtgcatgtatgaagcctcctcacttatccctagtcactgagtacatggaagtgggttctttgtatagtttgattcactcaaaaacacagaaaactaagctccattggaagaggaggttaaagatgctccgtgatatctgtaggggtctcatgtgcatgcaccggctaaagattgttcaccgggacctcaagagtgcaaattgcctcgttaacaaatactggacagtcaagatatgtgattttgggctctctcgagtaatgtcaaattctgcaatgaatgacaactcatctgcgggaactccagagtggatggctcctgagctcattcgcaacgagccattcacagaaaaatgtgatatcttcagcttcggggtcatcatgtgggagctttgcactctttgtagaccttgggaaggaattccacctgttcagatcgtttactctgttgcgaatgatggggcaagactggaaataccagatgggcctcttggaagcttgatagcagattgctgggcagaaccggagaggcgtccatgctgccaggagatcctgacccgccttcttgattgcgagtataccttgtgctgaggctttgcttctagtctgtatagcggttataggggcatcagacggtctggcttatatatacatcacttaattttccatttcacatacatcattgagggtgtaaattaccatgtattaataagcaaactttttctaaacctctttaatgctattgccccaaaatccaagaaaagttttcgcaaaaaaaaagccttgttcgagttctgtacgttttccctttatctatatcttagtcgctttctgaaataatgagatttcactttccaaataaatctatatgtgatttttttaacctttgtttgactaactgccgaacccaacgattcttccaggacccgacccaaacgtttttgattggatctctttctttctctctccctgagagcaagcagatgggatgtaagcttgtctatgtcattaaatcctacgtagagatgagagagaataagagaccgaagtgggcacccgatctaccgcacaactaaaacacgccatttccaaggttcgtttaacttttaatccat

SEQ ID NO: 124856 - DNA, 2168 bp, Zea Mays
gacctatataaaatgccatattaagtatgtattacttctctttaacttcatatttttaatgataatttcaggtttttgacttctacaaccgaccaaacccacatctcagtcctgcaagaacatcctctgaagatctttccaatttattagaaaatcgaggagttcaattgctgggacagataagacatggatcttgcaggcccaaagctatattatttaaagtccttgctgactcagttggtatagattctaaactgctggtgggcattccaaatgaagaacctcatggatatgataattcatccaaacatatgtctgttgtggtcattctgaaatctgcggagtttctagttgacctgatgcgttttccaggacaactagttccattttcatccaaagctgttgtcacatcccatatgtctgcaactggagaaagtgattcagccgactatgattcctgtgattctcctcttgaaccaaatagtcctctatgtgctcaaaggcaagagcaagatgatggcaatagatccttcaaagtcctctcactaagaaacatcatgctcaaatcgacaaattctatggagggtaaaatgagttgttcatctcatagtgagccgaatgttgcaaatgccttctgtggtcgcagccgcgataaagttgtggatgaacatcaaagaactgcaagctcaagtccagagcatccactgtccagagttcgtgggcgctcaatgctgggtgataaacaatatggtggtgctgtagcagtgtcaaggtcagatggcgcatcaacatcaaatacacatagagcacggagaagtactaatattactcctgaaatcagtgatgatattgtgagagcagttcgagcaatgagtgaaagcatgagacaaaatcgcctttcaagggagcagaaggatggtagtcttggatcctcaaatgattcaatgaaacatgaacctgctggtgactccaatgatgatgaagcatccacaagacgaccgagtgcactggagggtttgagaaggcaatttaatagtcagaaagctgtgtcattgccttcgtcgcccaataggtcaggtattcttggcctcaggagcccatctgactatacagaagccgatctgatggcgacctggaatgaggtgttgcagtcttcaccatttctgaacaagcctttattgccttatgaggaatggtgcattgagttttcagagatcactgttggcattcgtgtgggagtagggttttttggggaagtcttccgtggcctttggaacggaacagatgtagctataaaagtatttctggagcaggatttgacaacagagaatatgaaagatttctgcaacgagatatcaatacttagccgacttcgacaccccaatgtcatactctttcttggtgcatgtatgaagcctcctcacttatccctagtcactgagtacatggaagtgggttctttgtatagtttgattcactcaaaaacacagaaaactaagctccattggaagaggaggttaaagatgctccgtgatatctgtaggggtctcatgtgcatgcaccggctaaagattgttcaccgggacctcaagagtgcaaattgcctcgttaacaaatactggacagtcaagatatgtgattttgggctctctcgagtaatgtcaaattctgcaatgaatgacaactcatctgcgggaactccagagtggatggctcctgagctcattcgcaacgagccattcacagaaaaatgtgatatcttcagcttcggggtcatcatgtgggagctttgcactctttgtagaccttgggaaggaattccacctgttcagatcgtttactctgttgcgaatgatggggcaagactggaaataccagatgggcctcttggaagcttgatagcagattgctgggcagaaccggagaggcgtccatgctgccaggagatcctgacccgccttcttgattgcgagtataccttgtgctgaggctttgcttctagtctgtatagcggttataggggcatcagacggtctggcttatatatacatcacttaattttccatttcacatacatcattgagggtgtaaattaccatgtattaataagcaaactttttctaaacctctttaatgctattgccccaaaatccaagaaaagttttcgc

SEQ ID NO: 124857 - DNA, 263 bp, Zea Mays
acttgacaaaaacttcatgcaaatgggaggtttcacatttgcaagagaaagaatagcctcgggtagtgcccaaagacaatcaccacacatggagcctgatgcaacggcttgtccgaacgagtcagcttcagttctgttcttcattttccaaatgaagagtatcgtacagctcaagaacatgtcaatagtgaagtatgctccaacatagaaaggaatggctactggcctacttccatggggatggggatgaacttcactacctt

SEQ ID NO: 124858 - DNA, 1077 bp, Zea Mays
atgacacgcgaaatgcacgccatcctcgctgggattccgcagtccctccggcccgcggtgctgatcgcctcgacgtgcgcgctgctcctcctcgccaccgcgctactccttccgcgcgctcctccggcggcgccggcggcggcgctgaccactgtcaccgacgcggacgccgtccgcttggacgctagcgtcacccgaaggaacggcaacgaggtgctgtggcagctaccgcccccgtcgtccccactgcgagccgcgttgttcgcggcgcccgggtgcaccatccgcgccaccgacttcttcgacgcctccccgggctgcccgcgctgcacggggcttcccgaggagcgccgtttcacccgcgccgcgctcagccgcgggtacgccgtcctcgccgtctccagccgcgccaagtgctggtccctcgacgacgccggcggcggggaggacggcagcgagctcgccgccgtccagtccatcatcaagtggtggaccacagagaagtaccctcagctcgcgggcctcccactcttcggcatcggcgcgtcctcgggcgggtacttcctctccgcgctcgcggccagggttaagttcagcagcgtgaccgtcatgatcgcggagggcatgtacgggaccatggccgagatccccaccgggtatccgccggcgctgtttgtgcatatgcccaaggacaccgaaagggcgcggttggttgcggaaagcatggacaaactcagggagaagcacgtcgacgtgcgggagatccagtgcgatgacttcgccgtgagcgcggagttcctggcggagagggtgccggggctgacctgggccttcgccaacgcgctggtggacatgcttcggcggaagggattcgtggatgagaaggggatgctgaagaaggacgggaggagaacgccgtggaaggaggcggctgaggaggccaaggtgctgcctgagcggttcggtctggagaggcatgtcaccgaggagctcaatgttgcctatgcgtaccatgagttcaccagcctgaagaatactgaagtcttccaatggtttgagtcccatatgaatcattag

SEQ ID NO: 124859 - DNA, 1106 bp, Zea Mays
gaagaaaatagaacatacagagggtattcgtgatgagagaaagaagataccagcgagaagctctcgccatgattctgactctggtgcagataataatgggaaaaacaagagaccattgcaaagctctcgtcatgatttggaggatgagaagcctagatcgagaaattataattatggctctcgggcttccgagcatgagaaacatatgttgaaaaaggatgtgcaagagaaaagaaaagtagctacctcaagtgatagttcagattacagcagcagcctcagcagtagtgattctgacacgagtgcagatagctatgaggaacagaaaaggagtcaagctggagggagaagaaatgagctgactacacaaaggcagaaagaggaggaaagaaaagagcttgaaaagcaacagaagagagaggtagagaagaaagagctggataagcaaaagcaaagggaggaagagaggatggagatggagaaggagaagaaaaggcagcgagagagggaggaagagagacagagggagagagagcaatacgaaaggaaaggtggaaatgatgtggagagggacaacaaaaggaaactgatagatgatcggtatgatccaaattcaagtagagatagagaagagggatacagagactctcagaacagagatgacaatagaaggcaggaagagcatggtcaacacaatagatatatggatagtcatgattccaagaggtcaaggcatgactcgcattaccattcaaggagggattttgaacaacgctattctagagacgaacatagagacagaaggcgtcactaaatcttggaagaatgccgctctaggtggacaacttattctcagctatcacccataagttccagtcccagatcttttctgcggcagcaagaccaacccatcagtacctccgctgcagcattaatatctgcttttgtttgtatcatactttggattttactatgcaaagagcgaagtctgcaatatgtaatatgttgtggaacagacatgaacggtaggattttttttgttggaatttgtggtgcgcatgttgctgatcataattatgataagttttcttaagcttatatttgat

SEQ ID NO: 124860 - DNA, 2709 bp, Zea Mays
atgtacaacggcatcgggctgcagaccgcgcgggggtcgggcaccaacgggtacgtccagaccaacaagttcttcatcaagccccgctccacatccggcgggggcccgggcggaccccacaggccgccgctccccgacgccaccggcgcggatggcggcgggctcggcgggatgcgcaagcccaacaaggagatcctcgagcacgaccgcaagcgccaggtcgagctcaatctgctcgtgctcagggacgcgctcgaggagcagggctacaccgaagacgagatcgaggagcgcgtagaggaggcgcgcaaggctgctgaggcagaggcggccgcggtcgcggcagcggaggaagcagggagcgttagcggcgccggtcgaccgcctctacccggcagagggtttacagacacacagagccaccatgttgcagcacggaaggagaaacaacttgagactctaagggctgctttagggctgaacgtggaggatgcaaagaagggggatgtagaaagtgatgtagaatctggggagcttgttcctggtaagtactatgaggaactggttactgttggggaaaataatagtaaggattcaaagaatgcaaagaagagcaagaagaaaaaagagaatgacaaaaggcgtcaacccaaaagttcgagaaagagcaagtatgactcagacttggatcacgatcataacacaaaaacgaagaagagttctcaccatgattcagatgatgattcagagactgattatgatgagaaaaaggaaaagaaatacaacaagaaacatcgtcttggttctgatgatgattctgaaaatgatcgaaagaaggcaaagcgtggaaagaactctggttctgagtctgatacagatagtggccatggcaaaaagaaaactaaacatgtaaagagtgatcagggtgggagaaagaagatacaagtgaagaactctcatcacgattccgagtctgacacagatagtagctatggcaagaaaacagaacatgcaaggaatgataggggtgagagaaagaagataccggtaaataattctcgtcatgatttcaaatctgatatagatagtggatatggcaagaaaacagaagatgcaaagagtgaacactatgagagaaagaagttattggtgaagagctctcgtcatgattctgagtctgatacagacagtggttatggcaagaagaaaatggaacatataaagaatgaacgcgatgagagaaagaaggtgctggtgaagaactctcgtcatgattctgagtctgatacagatagtggctatggcaagaagaaaatggaacatgcaaaaattgaacgtgatgagagaaggaaggtaccggtgaagagttctcgttatgattctgagtctgatactgatagtggctatggcaagaagaaaatggagcaaacaaagaatgtacgtgatgagaaaaggaaggtaccattgaagagttctcatcatgattctgagtctgatgcagatattgactataggaagaagaaaatagaacatacagagggtattcgtgatgagagaaagaagataccagcgagaagctctcgccatgattctgactctggtgcagataataatgggaaaaacaagagaccattgcaaagctctcgtcatgatttggaggatgagaagcctagatcgagaaattataattatggctctcgggcttccgagcatgagaaacatagtaagtacaaggaaagctttcgccatgactcagattcagatggttattcccgtggtaaggaaagacaattgaatgttgcagtgttgaaaaaggatgtgcaagagaaaagaaaagtagctacctcaagtgatagttcagattacagcagcagcctcagcagtagtgattctgacacgagtgcagatagctatgaggaacagaaaaggagtcaagctggagggagaagaaatgagctgactacacaaaggcagaaagaggaggaaagaaaagagcttgaaaagcaacagaagagagaggtagagaagaaagagctggataagcaaaagcaaagggaggaagagaggatggagatggagaaggagaagaaaaggcagcgagagagggaggaagagagacagagggagagagagcaatacgaaaggaaaggtggaaatgatgtggagagggacaacaaaaggaaactgatagatgatcggtatgatccaaattcaagtagagatagagaagagggatacagagactctcagaacagagatgacaatagaaggcaggaagagcatggtcaacacaatagatatatggatagtcatgattccaagaggtcaaggcatgactcgcattaccattcaaggagggattttgaacaacgctattctagagacgaacatagagacagaaggcgtcactaaatgtaagcttggaagaatgccgctctaggtggacaacttattctcagctatcacccataagttccagtcccagatcttttctgcggcagcaagaccaacccatcagtacctccgctgcagcattaatatctgcttttgtttgtatcatactttggattttactatgcaaagagcgaagtctgcaatatgtaatatgttgtggaacagacatgaacggtaggattttttttgttggaatttgtggtgcgcatgttgctgatcataattatgataagttttcttaagcttatatttgat

SEQ ID NO: 124861 - DNA, 3054 bp, Zea Mays
acctcaccccgtccggattgcggatctgacgcgcgagcacgaagcctcgacctagccaggcttcccttgccctactttgcgccgccgccgccgccgatccagccggcctctccccgcccgccggccgcgatgtacaacggcatcgggctgcagaccgcgcgggggtcgggcaccaacgggtacgtccagaccaacaagttcttcatcaagccccgctccacatccggcgggggcccgggcggaccccacaggccgccgctccccgacgccaccggcgcggatggcggcgggctcggcgggatgcgcaagcccaacaaggagatcctcgagcacgaccgcaagcgccaggtcgagctcaatctgctcgtgctcagggacgcgctcgaggagcagggctacaccgaagacgagatcgaggagcgcgtagaggaggcgcgcaaggctgctgaggcagaggcggccgcggtcgcggcagcggaggaagcagggagcgttagcggcgccggtcgaccgcctctacccggcagagggtttacagacacacagagccaccatgttgcagcacggaaggagaaacaacttgagactctaagggctgctttagggctgaacgtggaggatgcaaagaagggggatgtagaaagtgatgtagaatctggggagcttgttcctggtaagtactatgaggaactggttactgttggggaaaataatagtaaggattcaaagaatgcaaagaagagcaagaagaaaaaagagaatgacaaaaggcgtcaacccaaaagttcgagaaagagcaagtatgactcagacttggatcacgatcataacacaaaaacgaagaagagttctcaccatgattcagatgatgattcagagactgattatgatgagaaaaaggaaaagaaatacaacaagaaacatcgtcttggttctgatgatgattctgaaaatgatcgaaagaaggcaaagcgtggaaagaactctggttctgagtctgatacagatagtggccatggcaaaaagaaaactaaacatgtaaagagtgatcagggtgggagaaagaagatacaagtgaagaactctcatcacgattccgagtctgacacagatagtagctatggcaagaaaacagaacatgcaaggaatgataggggtgagagaaagaagataccggtaaataattctcgtcatgatttcaaatctgatatagatagtggatatggcaagaaaacagaagatgcaaagagtgaacactatgagagaaagaagttattggtgaagagctctcgtcatgattctgagtctgatacagacagtggttatggcaagaagaaaatggaacatataaagaatgaacgcgatgagagaaagaaggtgctggtgaagaactctcgtcatgattctgagtctgatacagatagtggctatggcaagaagaaaatggaacatgcaaaaattgaacgtgatgagagaaggaaggtaccggtgaagagttctcgttatgattctgagtctgatactgatagtggctatggcaagaagaaaatggagcaaacaaagaatgtacgtgatgagaaaaggaaggtaccattgaagagttctcatcatgattctgagtctgatgcagatattgactataggaagaagaaaatagaacatacagagggtattcgtgatgagagaaagaagataccagcgagaagctctcgccatgattctgactctggtgcagataataatgggaaaaacaagagaccattgcaaagctctcgtcatgatttggaggatgagaagcctagatcgagaaattataattatggctctcgggcttccgagcatgagaaacatagtaagtacaaggaaagctttcgccatgactcagattcagatggttattcccgtggtaaggaaagacaattgaatgttgcagtgttgaaaaaggatgtgcaagagaaaagaaaagtagctacctcaagtgatagttcagattacagcagcagcctcagcagtagtgattctgacacgagtgcagatagctatgaggaacagaaaaggagtcaagctggagggagaagaaatgagctgactacacaaaggcagaaagaggaggaaagaaaagagcttgaaaagcaacagaagagagaggtagagaagaaagagctggataagcaaaagcaaagggaggaagagaggatggagatggagaaggagaagaaaaggcagcgagagagggaggaagagagacagagggagagagagcaatacgaaaggaaaggtggaaatgatgtggagagggacaacaaaaggaaactgatagatgatcggtatgatccaaattcaagtagagatagagaagagggatacagagactctcagaacagagatgacaatagaaggcaggaagagcatggtcaacacaatagatatatggatagtcatgattccaagaggtcaaggcatgactcgcattaccattcaaggagggattttgaacaacgctattctagagacgaacatagagacagaaggcgtcactaaatgtaaggtatattaaccaccccacctaaactccccttgacatacctggtgccttgtcgtagataagctcacgtgtttttttttgttatattgccaaatcatacaaccagtctacattgagctgtaggctgtaggtttagaagctagttcagcatatatatgtgtatgttatgaactactaatatgttttggatgctacatgcctctgcatattggtacacggcccttttgcttgtgtcaaattaattggttattacacatttatctcaccatactctgcgccttatgtgcagcttggaagaatgccgctctaggtggacaacttattctcagctatcacccataagttccagtcccagatcttttctgcggcagcaagaccaacccatcagtacctccgctgcagcattaatatctgcttttgtttgtatcatactttggattttactatgcaaagagcgaagtctgcaatatgtaatatgttgtggaacagacatgaacggtaggattttt

SEQ ID NO: 124862 - DNA, 932 bp, Zea Mays
cgtacgtgggcctccacttgagcgtttatggctgcgggataaataaacgccggccgaccaatagaaatctaacagctgctattaaaaagggtgacgtggcgcttttaccgtagaaaaataaaatactctcacgtggccggaggtacggactcggagtcacgggcccagaccagaatataacccaaccggctcctcccttgcttctcaattctcatctcaccagtcatctcgtcctagccaggcttcccttgccctaggattgcgccgccgccgatccaaccggcttctccccgcccgacggccgcgatgtacaacggcatcgggctgcagaccgcgcgggggtcgggcaccaacgggtacgcgcagagcaacaagttcttcgtcaagccccgctccacatccggcgggggtccgggcgggccccacaggccgctgcgctccgacgccgccggcgcggatggcggcgggacgcgcaagcccaacaaggagatcctcgagcacgaccgcaagcgccaagtcgagctcaagctgctcgtgctcagggacgcgctcgaggagcacggctacaccgaagacgagatcgaggagcgcgtcgcggaggcgcgcaaggcctcggaggcagaggcggccgcggccgtggctgcggaggaggcagggagcggtcgtggcgccgggcgaccgcctctgtctggcagagggtatggatctgttggcgtcatttaggtttcagattgccgcagataaggccagatgtcgattatctatccagacctggatgtagtggcttctagtacgtatattagtatgggagacttctccagtgaaatcacacggacgataatacatagatgtcttaaagaggaatcccatattcgaattgtaggttctgtttatatgttcggcatttgtgtatcttttggatcgtaaaatca

SEQ ID NO: 124863 - DNA, 893 bp, Zea Mays
acgagggcgaaaaatcacccactaatagcaacatttcatgggcatgaaaagacactgtcttttttatctattgcgtggcataaatcgtccctgttggtgagctgttccaaagactcaaaggttaaagtttgggacacagtggctccttcgagtggttcatcatcatgtgtaggcagtgctcacctcaactcaaacgggccaccaattgctatgaaatgccatgaatccctttgctatatcgctgctggagctgaagtgacagcgattgacttgaggacaatgaagaaggcttctgtccttgcactccagaaccacagaatgctttcttgtgagatgatgccttctgaatggttaatatgtactggcacgaaagacagggctcttctatgggacacccgcaaggctcaggaactcccaaacacagtggcagagatgcaatcgaacggcccggtgacattgcttcacttggaccaatacaaggtggtgaccggagtgccgtcggacggccaggtccacgtctaggaaacacggacgggggactcactgaactcgttgggttgtggcgaaccttcgagactgggcgtgcggagcagggtgtcggccatggccgtggacgggtgcaggatcgccatggcgggcagctctccggaaggctgcatgctgcactaccgtgacttcgcgacggcttctgcccctgtagtgtccttgccaggcaaggagaaggaggtctccaggttctagtgtgttattcaagtaggtgtggtccttttagctcatctaattggtaatatgtatgctgtgttatattagatggttttaactctactttaagataaggtgttagtaatatttgaagtactaagcacatgatagttgtagaagccaaataggag

SEQ ID NO: 124864 - DNA, 629 bp, Zea Mays
atctcacctgcaatttcgtcctagccaggcttcccttgccctagtttgcgccgccgccgccgatccatccggcctctccccgcccgccggccgcgatgtacaacggcatcgggctgcagaccgcgcgggggtcgggcaccaacgggtacgcgcagagcaacaagttcttcgtcaagccccgctccacatccggcgggggtccgggcgggccccataggccgctgcgctccgacgccgccggcgcggatggcggcgggatgcgcaagcccaacaaggagatcctcgagcacgaccgcaagcgccaagtcgagctcaagctgctcgtgctcaggaacgcgctcgaggagcacggctacaccgaagacgagatcgaggagcgcgtcgcggaggcgcgcaaggccgcggaggcagaggcggccgcggcagcggaggaggcagggatcggtcgtggcgccgggcgaccgcctctgcttgggagagggtatggatctgttggcgtcatttaggtttcagattgccgcagataaggccagatgtcgattgtctagcaagacctagatgtagtggcttctatattagtatgggagtccttctagtacttaaagagcaatcccatattcgaattgtat

SEQ ID NO: 124865 - DNA, 1334 bp, Zea Mays
tctcatctcaccagtcatctcgtcgatctcgacctagccaggcttcccttgccctaggattgcgccgccgccgatccaaccggcttctccccacccgacggccgcgatgtacaacggcaacagactgcagaccacacgggggtcgggcaccaacgggtacgtgcagaccaacacgttcttcgtcaagccccgcttcgcatccggtgggggtcctggcgggccccacaggccgctgccccccgacgccgccggtgcagatggcggcgggatgcgcaagcccaacaaggagatcctcgagcacgatcgcaagcgccaagtcaagctcaagctgctcgtgctcagggacgtgctcgaggagcacggatacaccgaagacgagatcgaggagcgcgtcgcggaggcgcgtaaggccacggaggcagaggcggccgcgacagcaaaggaggcagggagcctgaacagtacagggatattgttcatctatttataagcacagggcgcagcctgtgtaaaattacattcatgtcctttatgtttactattgacttaatgacaatccaacgaggactagatagccttttcccctttaagtcggttccttttttctgccgttgagctgaagcttccttgcgcatagcttcgaaactggttcaaccttcgtcccgaccatgctttttatgttgtgtacaactttattccgagtccgaaggttcctgtacatatattacacttgggaaacattgttagtcatgtttttgaggaccttctgaagacgaaggcccccaacactggcgatttatgtttgttcttaaatatgctgttgacgacatgaacaaataggacacaacacttattcaacaacaacgacaaccttacattgaactagcacggacacatagcacttccaccattagggcatgtatagtggagagacaccaaaacggttctccaagcataagagacaactaagagactctattatacaatggagtgtctataaatgtagtctattaataaatacagaattcgtggacaaactgaactaagagacagaaggaatggttcctacattggcgaaatccacatttgttgcgattcatccttcatcttctattatcatgtgaagaattatacatccttcatgatttcacctagcctttggcggtcccactcgcaaactggcctgcgaagtactacccatcaggcttgcaacactccgaaggcgtgttcgacatccttatgacattattcatgcatatgagtgaaatgaactttcttctcctcgaaggggtggaagatggctttaacaaacataggctagtcgagataaatac

SEQ ID NO: 124866 - DNA, 186 bp, Zea Mays
atggacgcgtttgccaaggatcaaggcgtgttgcaggtgtgtggtgggggaggatcggaggaggcccactgcgggtgcgagccggtggagcacagcaagaacgggaagaggtggaggaggcctttgcaggtgcgagccggtggagcacaacaagaacgagaagaggcagaggaggccagggcgtga

SEQ ID NO: 124867 - DNA, 534 bp, Zea Mays
cctcccttgcttctcatctcacatgtaatttcgtcctagccaggcttcccttgccctaggattgcgccgccgccgatccaaccggcttctccccgcccgacggccgcgatgtacaacggcatcgggctgcagaccgcgcgggggtcgggcaccaacggttacgcgcagagcaacacgttcttcgtcaagccccgcccccgctccaccacatccggcgggggtccgggcaggccccacaggccgctgccccccgacgccgccggcgcggatggcggcgggatgcgaaagcccaacaaggagatcctcgagcacgaccgcaagcgccaagtcgagctcaagctgctcgtgctcagggacgcgctcgaggagcacggctacaccgaagacgagatcgaggagcgcgtcgcggaggcgcgcaaggccgcggaggcagaggcggccgcggccgtggcagcggaggaggcagggagcggtcgtggcgccgggcgaccgcctctgcccgtgagagggtatggatctgtcggcgtcttttag

SEQ ID NO: 124868 - DNA, 704 bp, Zea Mays
ggcacctcccttccttctcatctcacctcaccccgagcccgaagcctcgacctggccaggcttcccttgccctaggattgcgccgccgccgatccagccggcttctccccgcccgacggccgcgatgtacaacgtaacggcatcggactgcaaaccgcgcgggggtcgggcaccaacgggtacgcgcagagcaacacgttcttcgtcaagccccgctccacatccggcgggggtccgggcggacaccacaggccgctgcccctcgacgccgccggcgccgatggcggcgggatgcgcaagcccaacaaggagatcctcgagcacgaccgcaagcgccaagtcgagctcaagctgctcgtgctcagggacgcgctcgaggagcacggctacaccgaagacgagatcgaggagcgcgtcgcggaggcgcgcaaggcagcggaggaggtagggatcggtcgtggcgccgggcgatcgcctctgcccggcagaggatatggatctgttggcgtcatttaggtttcagattgcggcagataaggccagatgtcgattgtctagcaagacctagatgtagtggcttctatattagtatgggagtcttctagtacttaaagagcaatcccatattcgaattgtatatgttctgtttatatgttcgtgcatttgtccatcttttggatcgtaaaatcatttatcagtcccaa

SEQ ID NO: 124869 - DNA, 154 bp, Zea Mays
atttctttttaatattgcttgtatgtttatttcattgtttgtttatgtatggacatgactatagtatgtaactgtgttctttgtgcttatatgatattagttattacgttaaatagggtaataaatttttattcaaatgtttattatttatttg

SEQ ID NO: 124870 - DNA, 780 bp, Zea Mays
atctcacctgcaatttcgtcctagccaggcttcccttgccctagtttgcgccgccgccgccgccgatccatccggcctctccccgcccgccggccgcgatgtacaacggcatcgggctgcagaccgcgcgggggtcgggcaccaacgggtacgcgcagagcaacaagttcttcgtcaagccccgctccaccacatccggcgggggtccgggcgggctccacaagccgctgcgccccgacgccgccggcgcggttggcggcgggatgcgcaagcccaacaaggagatcctcgagcacgaccgcaagcgccaagtcgagctcaagctgctcgtgctcagggacgcgctcgaggagcacggctacaccgaagacgagatcgaggatcgcgtcgcggaggcgcgcaaggcctcggaggcagaggcggccgcggccgtggctgcggaggaggcagggagcggtcgtggcgccgggcgaccgcctctgtccggcagagggtatggatctgttggcgtcatttaggttcagattgccgcagataaggccagatgtcgattgtctagcaagacctagatgtagtggcttctatattagtatgggagtcttctagtacttaaagagcaatcccatattcgaattgtatatgttctgtttatatgttggtgcatttgtccatcttttggattgtaaaatcatttatacttatcccaagctttgcacatatgagaagtatatggctatctatactttcagtccattatacttatcccaccagagaattgca

SEQ ID NO: 124871 - DNA, 366 bp, Zea Mays
atgtacaacggcatcgggctgcagaccgcgcgggggtcgggcaccaacgggtacgcgcagagcaacaagttcttcgtcaagccccgctccacatccggcggtggtccgggcgggccccacaggccgctgcgctccgacgccgccggcgcggatggcggcgggacgcgcaagcccaacaaggagatcctcgagcacgaccgcaagcgccaagtcgagctcaagctgctcgtgctcagggacgcgctcgaggagcacggctacaccgaagacgagatcgaggagcgcgtcgcggtggcgcgcaaggccgcggaggcagaggcggccgcggcagcggaggaggcagggagcggtcgtggcgccgggtga

SEQ ID NO: 124872 - DNA, 751 bp, Zea Mays
gcgccgccgccgccgatacatccggcctctcctcgcccgccggccgcgatgtacaacggcatcgggctgcagaccgcgcgggggtcgggcaccaacgggtacgcgcagagcaacaagttcctcgtcaagccccgctccacatccggctggggtccgggcggacgccacaggccgctgcccctcgaagccgccggcgcggatggcggcgggatgcgcaagcccaacaaggagatcctcgagcacgaccgcaagcggcaagtcgaggtcaagctgctcgtgctcagggacgcgctcgaggagcacggctacaccgaagacgagatcgaggagcgcgtcgcggaggcgcgcaaggccgcggaggcagaggcggccgtggccgcggaggaggcagggagcggtcgtggcgccgggcgaccgcctctgcccggcagaggatatggatctgttggcgtcgtttaggtttcagattgcgcagataaggccagatgtcgatttttgaaggataggccagatgtcgattgtctagcaagacctagatgtagtggcttcgatattagtatggaagtcttctgcagtgaaagctagtacttaaaatcatttattcgaattgtatatgttctgtttatatgttcgtgcatttgtccatcttttggatcgtaaaatcatttatcagtcccaagctttgcacatatgagaagtatggctatctatactttcagtctattatacttatcccaccagagaattgcat

SEQ ID NO: 124873 - DNA, 567 bp, Zea Mays
ctctcacaacactaaattccagattcactaaagcatgttaggcgctggaagatgcaaagtgatgtaacaaagagagggaagtttcagtagggtctaacaaccttcctcaccatgtcaggcgctggaagatttacagattggaaacgactgactaggcatgtaaagtcttaacataaatatagcaaaagagcatataactgaaacaactgactgcgtatgtaaagtcttaacataaatatagcagttcaatgtctcaaatatatggcatcaaatcctccaaggtacagagatttaacaatgacttaccagttgcttacaaagtttttggaagccacacaacttgaccagaccctcttaacagctgagcatcatattgagaacaccatggtaaacggctcgctcaaccttcagaagtaatttgtgttgaatgatacatccaaaccaaccaatctacgtttcaaaatgaaaaaggcgtcttgggtacagcagcgtctactccttacttcccgaagaatttagagaggcgtaccgggccttcctcctcgctttcactgcctctgcgcttgg

SEQ ID NO: 124874 - DNA, 354 bp, Zea Mays
actcagaggaagactcagaagacgaatatgggagcccagaggaagattctatcttaaaaaagagggttttattgagcatcaaggaacaaaagaatttagtctaaaataccaaaaagaagtagatcgttttttttcattcttcaagaactacatatcttgctgagatcctcatccctaaaggtacttgacaatagtattattggagtcgatacacaactcacaaaaaatacaagaagtcgactaggtggattggtccgagtgaagagaaaaaagccatacagaactcaaaatctttttcggagatattcattttcctgaagaggcggataagatattaggtggatcatgcttgcc

SEQ ID NO: 124875 - DNA, 1955 bp, Zea Mays
ggggcggtggcgctgcctccctctctctctctagcccagccgcctccccaacggcccaacctcaccgaggagagagagaccgatacagagagagagaccaagaggacacgggagagaggacgttcatttccgcgtcgtctccgcccgcagccggcagccccaccacccaccacatggccgccatgccgggtggggcccacggcgccggcgccgcggacccgatgcaggtggaccagccgctcccccctgccgccgcaggcacagcacacgcccccgccgacgccaagcatgctggttctatgattgaagggagtgatccggtcacaggccatataatctcgacaaccattggagggaagaatggagagcctaaaaggactatcagctacatggcagagagagttgtgggaactggatcatttggaatcgtcttccaggcaaaatgtctggagactggtgagactgttgcgattaagaaggttttgcaggacaagcgctacaagaacagggagctacaaatcatgcgatccatggatcactgcaatgttgtttccttgaagcattgcttcttctctaccacaagcagagatgaacttttccttaacttagtgatggagtttgttcccgagtcattatatcgggtgttgaaacattacagcaatatgaaccagaggatgccactcatttatgtcaaattatatacctaccagatatttcgaggcttagcctatattcacacagtacctggagtttgccacagggatgtgaaaccacaaaatcttttggttgatccactgactcaccaagtgaagatatgtgattttgggagtgccaaaatgttggtcaaaggtgaagcaaacatatcatatatatgttcacgttattaccgtgctccagagctcatatttggggcaactgagtacacaacatcaattgatatttggtcagctggatgtgttcttgctgagctgcttcttggccagcctctcttccctggtgaaagtgctgtggatcagcttgttgagataataaaggttcttggtaccccaacgcgcgaggaaatccgatgtatgaatccaaactacaccgagtttagatttcctcagatcaaagctcacccatggcacaagattttccacaagcggatgcctccagaagctatagatctcgcttcacgcttgctccagtattcaccaaatctaagatgcactgctcttgaagcgtgtgcacatccattctttgacgatttgcgagaaccacatgcgaggttgccaaatggacggccatttcctccactgttcaactttaaacaggaactagcaaatgcctccccagagctcatcaacaggttgatcccagaccatgctaggcggcatcttgggctcacattattgcccgctactggaccataggcgaaggctctatggtggtgcttcgttgtgcggaaggcaacctgcattcaaggtgtagaatctgacaattattggaaggtcaaacatgagctggcgcgtaaggagaggtggtatgttctcgtgcagccagccttaatttgtcgcatgtcttaatgcaaaaatctgatttttgcccaagtagtgagaggagggaagggggtggtcggtgtattgttaagctattgaaggaattcgatccctgctattgtgttactttctccaacgtttaaacgttgtagtgcgcctgtaagtgttccatatatcccctgttgtcagtcagtgtaattctgtaaatgttattaatgggaaattatttcgtgcttttccaaccacataactaatccctaccttgttggaagcaatctcttgttttcgttgtcagttgtgctgatctgggaattgtttccttcaactccatgcgagcaagttttagttctgaatgaattgtcatcctagagtagcatcagatgggcacgtgcctagtgcaaaggcagcaaagatata

SEQ ID NO: 124876 - DNA, 3568 bp, Zea Mays
atgcccgactccgccgatcccctccccacgcaagcctcgccggatccggacatgccgccgcggaagcctacagctggctgcggcggcggcaagctcaagaagcctctcactgacaagcagcgcgctgccgcggagcagcgcctgtcccacctccgcgcccacctcatcctccgatccctcgagtcctcagctgccggggcccgtgccctaccgccggcgcaggaggcggcgctcgatgccctaggtctgctcgagtttttccgcctcgacctgcaatccgacaccctgcgccccgacctcatcgccccgctcgtcgcctactacgacccggtctgcaagcgcagcttcgtccgaggcgtccgtgtcgccgtctcgcgccacaactttacccgcgcgctctgcctaccctcgaagccctccccctcggcgccggccccagccgacatcgaccccgcagccgtggtgcctgccgttatgcagctcctgaaggattacgttctgctcccgttcctaggagacgacatgtgcatactgccgcaggaagtggccgccgcggagcaggcggtcagggagggggcggcgcatagggttgactgggcgggcctgatgtggggcctcgtcgagaaggagatcctcgagctgcctaagagggaagacggggtgtgctactacgggcctcatctgcagaggctcatttatgcccaaaagccacatttgttggagctggtggaggaagggggcacaggagagcctgctccggaggcatccactgatgtggagatggaggaggatggtgatgtggatatgaaaagcaagagcttggtggagctggagctgggggatagggatggggatgccagtaacgacgtgaggagcaagagcttggaggagtcggaattgggaaatgctagtgcaaggagtgatggtttggacgagttggaattgggggtttctgttactaggaacaaggtcatggaggagttgggtttaggggatatggatgacaggaacaacagtatagaggaactagaggtggttgaggaagatgcaaggagcaagaggttggatgaatatgagtctgtggatgtggatccggatgccatggataacaatatagatgaaataaacacagtcaatgaagactcaaggaggaaaagcttgaatgaatctgagactgtggatgtggatccggatgccatggacaacaatatagatgaaatgcaggcggtcaatgaagactcaaggagcaagagcttgaatgaatctgaggatgtggatgtggatccgcatgccatggacaacaatatagatgaaatggagatggtcaatgaagatgcaaggaccaagagcttggatgaatctgaggctgtggatgtggatccggatgccatggacaacaatatagatgaaatggaggcagtcagtgaagattcaaggagcaagaccttcaatgagtctgagtctgtggatgccatgaacaacaatatagtcgaattggatgcggtcaatgaagacacaaggagccagagattgaatgatgaatcagagttggtggaagaggatgttaagggtccaaacttagatgacaagaacactgcggatgagcatgtcaatggcacaaacattgatggaatatgtttgggatttgtggcagttgaagtggtgcctgctgtacatgaggcaaggcttgacaataatgaggaaacagcagaggtagcaccaatggggggcgatgatgtgccagtgcctacagatgtggatggtgaagaacccttggtggaggcagcagctgtaacacaggaggtagtggctgttgcagaggaattgggggatgatgaggctgaggaggatgaagagaaggatgcaatgggattgagcttggggtttgactctaccaatggttatgttgctatggatgtggaagaggaaactaatgttgagaatctggacgaggatgagagtgacagtgccaatgaagaggcagaggagtcagaggatgatgcatttgaggttaatgatggagaggacatgaattggagaattggggatggcaggggggatgagggaatgtcacattctttgcaacgctgtaacacatttggaggcatggagtttgagaacctgaatgaaggggagactgtaatgaaggatgagttgaggtttgatgatttccctgcgagggcatcttcagaaaggatgacaccatcaaacctcctccaagccatgaactcaattccctcaacgtacaatgtagcagggaatgtgcatgatctgccttctggggatttcttggctatgggggctgatgcacataagaatggagtggatctgggaccagggagctcatatttatttgggaataatggtaagaggaatattgatgatattgatggttacgatgacaatatgcaggcgcaagaggactttcctcagtctaatcagcagaagaggatgcgccatagtaacagtggcaacatatcacctggatcaggctttttcaacgcaagcttttcggtacctatacagaacttgatggttgaggcaagcaggctctatgagcagaaggagcaaaaacttcagagtttgcaatttgagaaacaacattggtctgacatgctgcaagagaaggaagccattatccaatccctaaactcagctcggtttgagcaacagaacaagtatcaagtggagcttagacgcttcgagcatgatctgaatgttatggcccatttggtaactacctacaaaagagctttaaaacagacccgggcttcttttgatgagtacaggaagaagttcccttgcaatgttcctctttatgatgatgttgctggtggtggtggtcttgttcttagtgtgagggagttggagaagaggcggtgtgaggaggagcagcaaaaaattgccatggtaaatgatatgatcgaaagattccagtacaaatggttctcaaaagcttgaagagtggggactgtctgtcaactcactgtggagcagaatggaaggactctataaggagattgagcttctgaaggaaaatagaagatcaagatttgctaccccagctacagaggaatctctagctacagaagaacctaccccagctacagaggaatgagttccctgacagtcagaggttcagatgtgaatatgactcccagtcactccgctagatgttttgatgtcaacgagcatacattccctctgctggatgactcccagttagtccctaccctctgctgccaccaagagtgtggctgcctattggtacatactgtagcaaggataaatagtttcgcaagtaaccctgcttgtatcctcatgtgggatattttgattattagtgatcaaggccctgtttgtttccttccaggattattagtgattaaggccctgtttgataaatagttctctagattatataatccacctaataatctatgatgtttgtttgcctcccaacttatttaagctggattatataatctcgagggtaaacaaacatggcttaattcaggtgcatttagggtttcttaatctacgtggaagtgtgtgctttcatatcctt

SEQ ID NO: 124877 - DNA, 2295 bp, Zea Mays
ccggtaaccctactcccggcgacggggatcctgcactcttgggttcttgcatcccgcataccctcgaaagctcgaaagatcccgcggcgcagcagccacccttctctcctctccgctcccaatcttatcgtcgcctccctcgaagtcgccgctgccttcattccaccatggcgcttcacgccccggtccacgtgatgaaggactcgctgaagcgggagtctggcgcgaaggttcaccaagccaacatccaggcggccaaggctgttgctgacatcattcgcacgacattgggtcccagatccatgctgaaaatgcttctggacgctggtggaggtattgtggttactaatgatggtaattctattttgagggaaatagacatcgcacaccctgctgccaagtctatgattgaactaagtcgtacacaagatgaagaagttggtgatggcactacatctgtcattgttctagctggagagatgctacacgttgcacaggcattcattgacaagaactaccatcctactgttatttgtcgagcatacaccaaagcgcttgatgatgctattgctgtacttgacaaaattgcaatgccggttgatgtgaatgatcgcggggcaatgctaggcctcgtgaagagctccattggtacaaaattcactggccagtttggtgatcttattgctgaccttgctattgatgctacaacaacagcaggcgttgaccttggtcagggtatgcgtgaagttgatatcaagaaatacattaaagttgaaaaggttcctggtggtcagttagaggattctagagtccttaaaggagttatgatcaataaggatgttgtggctcctggaaaaatgaggagaaagatagttaacccccgtatcatcctgttggactgccctgttgagtataagaaaggagaaaatcagaccaacgctgaattgatgaaggaagaagattggcaggttctcctagagatggaggaagaatatataaagaacctttgcgctcaaattctaaaattcaagcctgatttagttatcacagagaaagggctcagtgatctcgctatccattatttgagcaaggctggtgttactgcaatccgtagacttaggaaaactgacaacaacaggattgctaaagcttgtggggcagttatagtgaacaggcctgaggagctccaagaatctgatgtgggaacaggagctggcctgtttgaggtcaagaagataggtgatgaattctttgcctttattgttgactgtaaagatcccaaggcatgtactgttctgttgaggggagcaagcaaggatgtattgaatgaagttgagagaaacctgcaggatgccatgtctgttgcaagaaacattttgaaaaatccgaaactccttcctggaggtggtgctacagagctgactgtatcagcaacactgaagcaaaagagttcttcagttgaaggcgtggaaaagtggccctatgaagctgctgctctagcatttgaggcaattccaaggactttggcccaaaattgtggtttgaatgttattaggataatgacacaacttcagggaaagcatgctaatggtgaaaatgcgtgggttggcattgatggaaggagtggcgatatcgttgatatgaaagagcgaaagatctgggattcctacagcgttaaagcgcagacgttcaagacagcgattgaggctgcttgcatgcttttgagaatagatgacattgtcagcggtatcaagaagaagcaggctcctggagcctcagctcccaagcaaccccaaattgaaactgagggtgatgccgacaatgagcagatgatcccagagtagaggctgtgaccaacctgcactgtcaaagttgtttactagtgccggaatagcactttgaatagagttcattttatttgagtgttggtggttagccttaggttttatatatagtttgatacactcgtccgagggttttttgtagtgtggttgctgcgcattttgctttggacagatggacgaactttacctgttgtatgccgtaaatctacctaatacatggtaatgctgttgtttcccatgatccgaactgattcgtaatgttctcctcatgatccgaacgtgattgatagacgcatacagtaaagccattttttcttgaagatacctacaccagttcttggggactgtagaatacaattctctaatcaaggaccacgtttctacatcgaagttgccattttgtgttgtttctgttgtggaggagctaaaagaaaactttatattttggatg

SEQ ID NO: 124878 - DNA, 1621 bp, Zea Mays
gaaacaaattgcgcattttcttctcctgcggtccttccttcgcttccccgttcttccagaatcctgtcgagacctgaatccaccctcacccagcggtccccatggcctccggcgaaggtgtagttgatcagctgtacgaggcggctggcggcgaggcagtggccaagatagagggggaggccaaggtggaggcggaggccaagatggagacggaggagccggtgctgtacctcgacctgacgagctaccagctgcacgatctaagcgaggtggagatcccacccacgctggaggaggtcgacctcaccgccaaccgcctctcttctgttgatcctcgcatcggccaactcccccatctccgcaagctctcattccgccagaacctcctcgacgatgacgccgtcgcgccgctcacgtcctgggaggctattgccgggttgaaggagttcgtcattagagataacaaacttacaaggattcctgatgctggcatattcaaggatcttctggtgttcgatgtatctttcaatgagatatcttctttgactggtctgtccaaggtttccatcaaattgaaggaactttatgtttcaaaaaatgaagttgcaaagatggaagagcttgaacatttccatgcgctggaaattcttgaacttggtagcaacagattacgggtaatggaaaatcttgaaaccttgacaaatctacaagaactgtggttgggaagaaatcgaattcgagctgtcaacttgtgtggtttgaagctaattaagaaaataagtttgcaaagcaacagactgacttcaatgcatgggtttcaggaatgtgctgcattagaggagttatacctcagccataatggaatccaaaagatggaaggcctctctactttgcataacctccgcattttggatgtttcagctaacaagctaacgactatagaaaatatcgaaaccttaaccaggctggaggacctgtggttgaatgacaaccaaataccatctctagagggtatagagacagctttggctggttcgcgggagaagttgacgacaatctatctcgaacgaaatccctgtgcaaaaactccagattactcgtcgacgttgaggaaaatatttccaaatctcgaacaaattgattcagatatcatagcatgataactagctaatccttgcccagatactaaggcaaagaaggctttggggttccccggagaagtcattaacagcaatcaacttgtgaggcgaacaatagacagtaatttgatccttaaagtcttcattgccaactctgctcgtgttgtggaagacattggttcggagtttgtagccttgagccgttacgggcttaatatagtgattggtaaccaaataattagaggtgtacgaggattgtcacaggatccatatccgtgttactagttttaagatgtttcatttcagttctctagattagtgttgatttttttttctctccaaatgaggctaggaacagccagcagttcatttctgtaagttgaatgcagacatctctgtgttgcatatcaacttgcaaggatgtgtcagcctgttgagaacccgaaattatcttttatttgaattttatttattactccact

SEQ ID NO: 124879 - DNA, 237 bp, Zea Mays
atgtggccggcggcgacgatgttcgcgctgggcttcctgctctgccccttccccgccctgtcgccgtcggcacgtaacctcaccgcgctgctgccggagctccgcgacctcttcggctccctctaccgccactgccggcaggagttcgtcctgctggcctctactcgacggcggcggcgtgtaatggtgctgatatctgcctggctagtttggccattaagaatccgattgcaataa

SEQ ID NO: 124880 - DNA, 700 bp, Zea Mays
catctctggtaggcaaagcagatgaatgagcttgtagatataatcccgatgatactgaggaggtgatagattgtcctccagatacttatgcatgcaagtgttctcaattgcaacatgtagtgggagtagattctcaatgaccttatcaccaactgtgcgcacattggctgaagcaccatggcggaagagcaacttgatcatttcaacagagaaccgttcagcagcttcatggagagcgaaatatccatatgagttgatgcagttggggttggcatgcagagaattgagcttacgcatcttgccctccaatacaacttttgcacatcgcagggcatcatggctgacaatgcaggtcaatgtttcagagtttatgttcaaataccatgtcatggccttaggagattccgcaaacaaacggaggaagcaccggacactatcctttttcagtaccgggcccaatctttctgtaaatgataattagaagaagaaacacacatcaggagtagggtctgggatccttatttcatttggaagcgccttggccatccgaacaatggctaattaccatacctcaatcaccttttcccaatcactttcatcatgaaccataaaaagataagatggatcccatggactctctgtaatatctttgtgacaggcagtttgcacgacctccttttcacgtgttgccgaaactttc

SEQ ID NO: 124881 - DNA, 447 bp, Zea Mays
atgtcgtgtatgaatgctgctgaggaaaaagttctgagaaagaaagtaactggaggatgggatccaacatgcacaaagagaagttttttcccgttctggagatcagtattagggtctcggggtaatgtgagggtgtatccatcctatgcagcaccagatgagaatatggtgcttgatggtgaactacttcgtaagagaatgagcaattggtcttctcctatgaatcgtgttgggttaaccggaaaaattccgcaactgacaagtactcatcaatcaagaaggtgcctcgtggcatgccatgatattcagtggcggaggacgccagaaaatttaggtgttgctaacgcaacgaagaataaaaaattatgacagtttaaaataacttgtagttgtagctacaaaataagtaatagatgttgaaaaataccttatttaatagtcatcttg

SEQ ID NO: 124882 - DNA, 135 bp, Zea Mays
aagtggaggcaactgactaagagtcagacttgtacatgtagaagggaaaaagtgattgttttacatatggaaagtcatcttgataggtgcaacaaccacgtggcggttggcctcaaacttgtcctggagatctga

SEQ ID NO: 124883 - DNA, 1536 bp, Zea Mays
caacgcagcataatccaatcgcacatggcggcggctcttcaggcgcagcgcctcttcctgacggcctccacctccacctcctcctcgtcgtcgtcgttcgctacgcggccccgccggacaaccaccgccgccgctccctgccgcgccggcctgcgcgtgccgtccggcgtccagacgacaacagccgcgtcgacgtcccggccggcggacggcggcggcggaatcaggctggactggatcgacgccgcgacgtcccccgccgaccgcaacgcggtcgagaagctccgcgcggtggcggaggccgcggcggaccgcgccgagatgcacgacatcatcgggcggcagcgggacaactggaaccacctgctgctgcactccaccaactcgctggcgctggcggcctccgtgatggccgcgctggcgccagccgcgccggccgccaaggcatccgcgggggcgctcctggccacggccgcggtcaccatggccgtcgccaacaggctccagccgtcgcagctcgccgaggagcagcgcaacgccacgcggctctggaagcagctggagcgcgacgtccgcgccacgctccagcaggacaaggaggcgcagcggcagccaaagcagctgggccaggccgacgtgcaggacgccgtggaccgggtgctcgcgctcgacgctgcctacccgctgccgctgctcccggggatgctggacaagttccccaatgccgtcgagcccgcgcggtggtggccgcgccgccgcccgcacacgcagcagccgaagaggaacgcccggtccaggagcttgggccgccgcggcggcatcggcaacggcaacgggtggagcctggagctggaggaggagatgcgtggcctgctgcgcgtgctaagggccaaggacgagcagcagtacctgagggtggggaagctggtgctgggcgtcaaccgcgtcctggccgtggccgggccagcgctggccggcaccggcgcggtggccgcggccttcatcgggagcggggacggcggcggcgccgccgccgccgctgccgccgcggcgtgcggcgcgctggctgccgcggtcaacacggtggagcacggcgggcagctgggcatgctgttcgagctgctgcgcaactgcgccggcttctaccgcaagatgcaggaggacatcgaggcggcgctgggcgaggccgacgtggagcgccgggaggacggggaggtgttccggaccaaggtggcgctgctgctgggccgcgacgcgtcggagctcggccagttcaggcggatggcgtccgcgtcggtcaaggacgacgacatcaaggactacgccgggaaactcttctgatcgatcgatggatcaaagtgcacgagacgaagattagtagcaacgcaaattagtgttcgtatgtagtaggactactaaataggcaggtaggctagatagatagggagaagagttccattccattgattcttttttgtaagtagcaatcaccattcgttcgagaaccgtgaaatgacacttgcttgattgagatct

SEQ ID NO: 124884 - DNA, 1642 bp, Zea Mays
cagagatgtcttctgccggcatcagcggatgcgtgcctacaactgtaaacataagttgtttcttattttcttgcgtaaatcgcgcaacgttggaattttcaatcttcctgctggttgaagttcttcaggaattctcactagccttttctcctcttttttttgacatgttttacttcttgtctattcaggaacaccatatacaaacgaatcatggacctgtatctgttgcagtgtacggtgaccatgacaagcctgcccttgttacttatcccgatattgctttaaactatatgtcctgcttccaaggactattgttctgtcccgaagccgcttcgctgctgcttcataatttttgcatttaccatattagccccccaggacatgagttaggagctgctccaatttccccaaatgctcctataccgtctgttgacgatttggcagatcaggttgcggatgtcctcgatttctttggattaggctctgttatgtgcttcggtgtcactgcaggtgcctacattctaactctgttcgcggcaaagtatagggagcgggtactaggtcttatccttgtttcacctctgtgtaaaggccccacttggactgagtggttatacagtaaggtaacatccaatctgctgtattactatggcatgtgtgggttagtgaaggagtgcctacttcagcggtacttcagcaaggaagtgcgaggattctctgaactacccgaatcagacatagtgcaggcttgtaaaagcctgctagagcagcggcagagcatgaacgtgtggcgcttcgtacagacaatgaacgagagatacgacttgtctgagcatataaagcggctgcagtgcagaaccctgatttttgtgggcgacaattcccagttccacacggaggccgttcacttgacgtcgaagctggacaggagatactgcgctctagttgaggtgcaagcgtgcggttcactggtaaccgaggagcagccgcacgcgatgcttataccgatggagtacttcctgatgggatacggcctgtacaggccgcctagccaggtggtggagtgcagcccgcgcagccccctgagcccgttctgcatttcgccggatctcctgtcacctgagagcatgggggtgaagctaaagccgatcagaacgcgagtcaggcttgaggtgtagcagagggctaggctaacttttgcaggtctgtgtttagtttttggaggtatagttatactgccatgtatatataaatatataggaaacgctgttctttgatttgtagcctgaaagaaaataatagcagaagtttgggtgtacagtctctctattatgccattatacccgctggtttggttgggtggcaggattagatgtggttcccaaagaagcatatgtcttaagaagataagagatggaccagctgtagtatttgttcggtttgttgtttggtgtcgatttgattcctctgcgttgctttaggatcgggacaaggattggcttgcagttgtgtcttgttgatgtctgtctcctgctgttgtaataagcatatatgcaagctggtaaagaccatggtctggaccagaggtgagcatcacaagagacgatggcctggctgagtcgatgcacacaaagaaaaaaaa

SEQ ID NO: 124885 - DNA, 1759 bp, Zea Mays
ggcagtcctccgccccgaaaggcaacaatgagaggagagggagggaggccgcgcgcctggctcgtcctcccccttgcttccttccgtcgtttataagcgacggcaacacaggcgaagaagacggggggagaaaggggcgcacgaggcaatttatagggaggaagaggaggggccgggcctgagcagagcaggccggaccagccatctctcctctgaggcgtcgaggggaggcggcgcccgagatgggggactccggcggctccgtcgtgtcggtcgacgtcgagcgcatctcctttggcggcaaggaacaccatatacaaacgaatcatggacctgtatctgttgcagtgtacggtgaccatgacaagcctgcccttgttacttatcccgatattgctttaaactatatgtcctgcttccaaggactattgttctgtcccgaagccgcttcgctgctgcttcataatttttgcatttaccatattagccccccaggacatgagttaggagctgctccaatttccccaaatgctcctataccgtctgttgacgatttggcagatcaggttgcggatgtcctcgatttctttggattaggctctgttatgtgcttcggtgtcactgcaggtgcctacattctaactctgttcgcggcaaagtatagggagcgggtactaggtcttatccttgtttcacctctgtgtaaaggccccacttggactgagtggttatacagtaaggtaacatccaatctgctgtattactatggcatgtgtgggttagtgaaggagtgcctacttcagcggtacttcagcaaggaagtgcgaggattctctgaactacccgaatcagacatagtgcaggcttgtaaaagcctgctagagcagcggcagagcatgaacgtgtggcgcttcgtacagacaatgaacgagagatacgacttgtctgagcatataaagcggctgcagtgcagaaccctgatttttgtgggcgacaattcccagttccacacggaggccgttcacttgacgtcgaagctggacaggagatactgcgctctagttgaggtgcaagcgtgcggttcactggtaaccgaggagcagccgcacgcgatgcttataccgatggagtacttcctgatgggatacggcctgtacaggccgcctagccaggtggtggagtgcagcccgcgcagccccctgagcccgttctgcatttcgccggatctcctgtcacctgagagcatgggggtgaagctaaagccgatcagaacgcgagtcaggcttgaggtgtagcagagggctaggctaacttttgcaggtctgtgtttagtttttggaggtatagttatactgccatgtatatataaatatataggaaacgctgttctttgatttgtagcctgaaagaaaataatagcagaagtttgggtgtacagtctctctattatgccattatacccgctggtttggttgggtggcaggattagatgtggttcccaaagaagcatatgtcttaagaagataagagatggaccagctgtagtatttgttcggtttgttgtttggtgtcgatttgattcctctgcgttgctttaggatcgggacaaggattggcttgcagttgtgtcttgttgatgtctgtctcctgctgttgtaataagcatatatgcaagctggtaaagaccatggtctggaccagaggtgagcatcacaagagacgatggcctggctgagtcgatgcacacaaagaaaaaaaa

SEQ ID NO: 124886 - DNA, 1716 bp, Zea Mays
ggcagtcctccgccccgaaaggcaacaatgagaggagagggagggaggccgcgcgcctggctcgtcctcccccttgcttccttccgtcgtttataagcgacggcaacacaggcgaagaagacggggggagaaaggggcgcacgaggcaatttatagggaggaagaggaggggccgggcctgagcagagcaggccggaccagccatctctcctctgaggcgtcgaggggaggcggcgcccgagatgggggactccggcggctccgtcgtgtcggtcgacgtcgagcgcatctcctttggcggcaagtgtacggtgaccatgacaagcctgcccttgttacttatcccgatattgctttaaactatatgtcctgcttccaaggactattgttctgtcccgaagccgcttcgctgctgcttcataatttttgcatttaccatattagccccccaggacatgagttaggagctgctccaatttccccaaatgctcctataccgtctgttgacgatttggcagatcaggttgcggatgtcctcgatttctttggattaggctctgttatgtgcttcggtgtcactgcaggtgcctacattctaactctgttcgcggcaaagtatagggagcgggtactaggtcttatccttgtttcacctctgtgtaaaggccccacttggactgagtggttatacagtaaggtaacatccaatctgctgtattactatggcatgtgtgggttagtgaaggagtgcctacttcagcggtacttcagcaaggaagtgcgaggattctctgaactacccgaatcagacatagtgcaggcttgtaaaagcctgctagagcagcggcagagcatgaacgtgtggcgcttcgtacagacaatgaacgagagatacgacttgtctgagcatataaagcggctgcagtgcagaaccctgatttttgtgggcgacaattcccagttccacacggaggccgttcacttgacgtcgaagctggacaggagatactgcgctctagttgaggtgcaagcgtgcggttcactggtaaccgaggagcagccgcacgcgatgcttataccgatggagtacttcctgatgggatacggcctgtacaggccgcctagccaggtggtggagtgcagcccgcgcagccccctgagcccgttctgcatttcgccggatctcctgtcacctgagagcatgggggtgaagctaaagccgatcagaacgcgagtcaggcttgaggtgtagcagagggctaggctaacttttgcaggtctgtgtttagtttttggaggtatagttatactgccatgtatatataaatatataggaaacgctgttctttgatttgtagcctgaaagaaaataatagcagaagtttgggtgtacagtctctctattatgccattatacccgctggtttggttgggtggcaggattagatgtggttcccaaagaagcatatgtcttaagaagataagagatggaccagctgtagtatttgttcggtttgttgtttggtgtcgatttgattcctctgcgttgctttaggatcgggacaaggattggcttgcagttgtgtcttgttgatgtctgtctcctgctgttgtaataagcatatatgcaagctggtaaagaccatggtctggaccagaggtgagcatcacaagagacgatggcctggctgagtcgatgcacacaaagaaaaaaaa

SEQ ID NO: 124887 - DNA, 1755 bp, Zea Mays
ggcagtcctccgccccgaaaggcaacaatgagaggagagggagggaggccgcgcgcctggctcgtcctcccccttgcttccttccgtcgtttataagcgacggcaacacaggcgaagaagacggggggagaaaggggcgcacgaggcaatttatagggaggaagaggaggggccgggcctgagcagagcaggccggaccagccatctctcctctgaggcgtcgaggggaggcggcgcccgagatgggggactccggcggctccgtcgtgtcggtcgacgtcgagcgcatctcctttggcggcaaggaacaccatatacaaacgaatcatggacctgtatctgttgcagtgtacggtgaccatgacaagcctgcccttgttacttatcccgatattgctttaaactatatgtcctgcttccaaggactattgttctgtcccgaagccgcttcgctgctgcttcataatttttgcatttaccatattagccccccaggacatgagttaggagctgctccaatttccccaaatgctcctataccgtctgttgacgatttggcagatcaggttgcggatgtcctcgatttctttggattaggctctgttatgtgcttcggtgtcactgcaggtgcctacattctaactctgttcgcggcaaagtatagggagcgggtactaggtcttatccttgtttcacctctgtgtaaaggccccacttggactgagtggttatacagtaaggtaacatccaatctgctgtattactatggcatgtgtgggttagtgaaggagtgcctacttcagcggtacttcagcaagtgcgaggattctctgaactacccgaatcagacatagtgcaggcttgtaaaagcctgctagagcagcggcagagcatgaacgtgtggcgcttcgtacagacaatgaacgagagatacgacttgtctgagcatataaagcggctgcagtgcagaaccctgatttttgtgggcgacaattcccagttccacacggaggccgttcacttgacgtcgaagctggacaggagatactgcgctctagttgaggtgcaagcgtgcggttcactggtaaccgaggagcagccgcacgcgatgcttataccgatggagtacttcctgatgggatacggcctgtacaggccgcctagccaggtggtggagtgcagcccgcgcagccccctgagcccgttctgcatttcgccggatctcctgtcacctgagagcatgggggtgaagctaaagccgatcagaacgcgagtcaggcttgaggtgtagcagagggctaggctaacttttgcaggtctgtgtttagtttttggaggtatagttatactgccatgtatatataaatatataggaaacgctgttctttgatttgtagcctgaaagaaaataatagcagaagtttgggtgtacagtctctctattatgccattatacccgctggtttggttgggtggcaggattagatgtggttcccaaagaagcatatgtcttaagaagataagagatggaccagctgtagtatttgttcggtttgttgtttggtgtcgatttgattcctctgcgttgctttaggatcgggacaaggattggcttgcagttgtgtcttgttgatgtctgtctcctgctgttgtaataagcatatatgcaagctggtaaagaccatggtctggaccagaggtgagcatcacaagagacgatggcctggctgagtcgatgcacacaaagaaaaaaaa

SEQ ID NO: 124888 - DNA, 875 bp, Zea Mays
ggcagtcctccgccccgaaaggcaacaatgagaggagagggagggaggccgcgcgcctggctcgtcctcccccttgcttccttccgtcgtttataagcgacggcaacacaggcgaagaagacggggggagaaaggggcgcacgaggcaatttatagggaggaagaggaggggccgggcctgagcagagcaggccggaccagccatctctcctctgaggcgtcgaggggaggcggcgcccgagatgggggactccggcggctccgtcgtgtcggtcgacgtcgagcgcatctcctttggcggcaaggaacaccatatacaaacgaatcatggacctgtatctgttgcagtgtacggtgaccatgacaagcctgcccttgttacttatcccgatattgctttaaactatatgtcctgcttccaaggactattgttctgtcccgaagccgcttcgctgctgcttcataatttttgcatttaccatattagccccccaggacatgagttaggagctgctccaatttccccaaatgctcctataccgtctgttgacgatttggcagatcaggttgcggatgtcctcgatttctttggattaggctctgttatgtgcttcggtgtcactgcaggtgcctacattctaactctgttcgcggcaaagtatagggagcgggtactaggtcttatccttgtttcacctctgtgtaaaggccccacttggactgagtggttatacagtaaggtaacatccaatctgctgtattactatggcatgtgtgggttagtgaaggagtgcctacttcagcggtacttcagcaaggtagataaaagcgcctgtttggatcatggttcaattattataatcggggttatggat

SEQ ID NO: 124889 - DNA, 225 bp, Zea Mays
atggagtcgctggtctacgcggcggtagtggtcgatccggagcaaggagaggtcctccacccaccagtcctcccggcagcgcgcagcggcgcagtcgcacgtctccaggtgcgccaggccggagaccagctactccttgcccgcgctggcggcgacggcgttgatgcacgccacatgaccgtcgcacctgcgcagcacctccaacgccccgtccaggctccgtag

SEQ ID NO: 124890 - DNA, 2577 bp, Zea Mays
ccttcgtccacgctccctgcagccgccgcccaaaccctagcaacccgtcctccgccatggccgacgaccactactcctctaagaggaagtacgacgacccctcgccgccgccgcggcgcacggggttctcttcgggcccgccgcctgcctcgccgctcgcgggcggcgccccgtcgtacaacagcgtgccaccgccccccgatgagatccagctcgcgaagcagcgcgcgcaggagatcgcggcgcggatctttaacgccgcagaggccaagcgtcctcgcgtcgacaacggcgacgatgacagcggcggcttcggtgtaggcctgggcagcactggtggcggtggccgcatcggcggcggaggactcggcttctcgtcctctgccggtggtgggcacggggcttctatcccacaattatcttctcagagcagcgcacctcagtactcctcttatggtggatatcagggtacaagcaaaaagattgaaattccaaatggaagggttggtgttatcattggaaaagccggggaaactattaggtatatccaacttcaatcaggagcaaagattcaagtcacaagagaccatgaagctgaacctggtgcactgacaaggcaagttgagctttctggcaaacctgagcagataagcaaagctgaacagttgatcaaagaagttctggcagaggccgatgctgggtcatccggtgctggatctggtggccggaaatacaatgcaacacagccaggtgctgagacgttccagatgaaaattgctaataacaaggtgggactgattattgggaagggtggggagactataaagtccatgcaggccaattctggagctcgtattcaggttattcctttgcatctgcctgctggtgatacttcaactgaaagaactgtgcatattgatggtacccaagaacaaattgaagctgcaaagcaactgatcagtgaggttaccagtgagcttgccaggaggactgcaaactatcctggagagcagaatcgtgctaggaatccaatgtctggtggctattctcagcagggatatcgccctcctcgtcctcagtcaaactggggcccgccttctgtgccaccccagcagcctggctatggttatatgcagcctggggcttatcctggggcaccgccacagtatggtgcacctcagcaaccttatggtagctaccccccaacatctggtggttatcagactggatgggatcagtctcaaaaccagcaatctcatacaactccccctggtactgggtatgattattatagtcagcagcagcaacctcagcaacaatctgcccctgggacagctgcttctactgatgccactagctacaattatggtcagccttcgacgtatgcttcacagggatatgattctacctacactcagcagagtggtgggcagcaagcatatggacatgatggctacactggttaccagacccaagggcagcagcagggctactctcagcagactggttatgatcagcagggttatggcacatctgcttatggatcagctgcaagctcgacccaggatgggtccaactatggtggtcctggaggggccagtcaggcatctccagggcagcaaacatcaaacccagctgctggaagccaacctggctataccagccaaccgcccactagtgctgcagcaacttacccacctcaaggttcagctccatctggatatggcgctccaccatcccagtctggctatggcacccaaccaccacagcaagccggatatggtcagggcgcttatgggcagccttctccacagggccagaaacctcctgcattgtcaccttatggacaggctccgcctcctggttctgctcaggctggttacgggcagtatggttacagccaacctgcttacggtgcaccaccagcttaccctggtgcacccattgcaagccaccagggctatggccagcagcagtcttatggccagcagcagtcttatggcgatgcttatggtagtgcaagctatgggcagcctccagcctactctactgaagcaacacctcctgctgcatcccaggatcactctgctgcccctgctgcggcccttggaacaacagcttcgacagctcctgaaaacagtgggggcgcccaaacatccgctgaaacttgagcttcagcagctaattgggaacaaacattttccaagaccctgccgtgtggtttcctccgcgctgttgcttaatataattacgcatctaatttagggtctacaactacaagttatttatttttctgcctgttgtttttgacaccatgactttctgtttccttgctatattgagtagtactttgcagttattttattgctggcgtatatgtctggactagtgatatatgtgtttgtgtggttacccttgttggaccgtaatgggtaccttccggcttggtctggacagataaatgcccatctatatgtattctgagccctgttatgattgctctaccgtcggaggtttctatgcccacttcagctggtgatgatggttatgtatgaaatttggtttcaatatttcgta

SEQ ID NO: 124891 - DNA, 2541 bp, Zea Mays
ccttcgtccacgctccctgcagccgccgcccaaaccctagcaacccgtcctccgccatggccgacgaccactactcctctaagaggaagtacgacgacccctcgccgccgccgcggcgcacggggttctcttcgggcccgccgcctgcctcgccgctcgcgggcggcgccccgtcgtacaacagcgtgccaccgccccccgatgagatccagctcgcgaagcagcgcgcgcaggagatcgcggcgcggatctttaacgccgcagaggccaagcgtcctcgcgtcgacaacggcgacgatgacagcggcggcttcggtgtaggcctgggcagcactggtggcggtggccgcatcggcggcggaggactcggcttctcgtcctctgccggtggtgggcacggggcttctatcccacaattatcttctcagagcagcgcacctcagtactcctcttatggtggatatcagggtacaagcaaaaagattgaaattccaaatggaagggttggtgttatcattggaaaagccggggaaactattaggtatatccaacttcaatcaggagcaaagattcaagtcacaagagaccatgaagctgaacctggtgcactgacaaggcaagttgagctttctggcaaacctgagcagataagcaaagctgaacagttgatcaaagaagttctggcagaggccgatgctgggtcatccggtgctggatctggtggccggaaatacaatgcaacacagccaggtgctgagacgttccagatgaaaattgctaataacaaggtgggactgattattgggaagggtggggagactataaagtccatgcaggccaattctggagctcgtattcaggttattcctttgcatctgcctgctggtgatacttcaactgaaagaactgtgcatattgatggtacccaagaacaaattgaagctgcaaagcaactgatcagtgaggttaccagtgagaatcgtgctaggaatccaatgtctggtggctattctcagcagggatatcgccctcctcgtcctcagtcaaactggggcccgccttctgtgccaccccagcagcctggctatggttatatgcagcctggggcttatcctggggcaccgccacagtatggtgcacctcagcaaccttatggtagctaccccccaacatctggtggttatcagactggatgggatcagtctcaaaaccagcaatctcatacaactccccctggtactgggtatgattattatagtcagcagcagcaacctcagcaacaatctgcccctgggacagctgcttctactgatgccactagctacaattatggtcagccttcgacgtatgcttcacagggatatgattctacctacactcagcagagtggtgggcagcaagcatatggacatgatggctacactggttaccagacccaagggcagcagcagggctactctcagcagactggttatgatcagcagggttatggcacatctgcttatggatcagctgcaagctcgacccaggatgggtccaactatggtggtcctggaggggccagtcaggcatctccagggcagcaaacatcaaacccagctgctggaagccaacctggctataccagccaaccgcccactagtgctgcagcaacttacccacctcaaggttcagctccatctggatatggcgctccaccatcccagtctggctatggcacccaaccaccacagcaagccggatatggtcagggcgcttatgggcagccttctccacagggccagaaacctcctgcattgtcaccttatggacaggctccgcctcctggttctgctcaggctggttacgggcagtatggttacagccaacctgcttacggtgcaccaccagcttaccctggtgcacccattgcaagccaccagggctatggccagcagcagtcttatggccagcagcagtcttatggcgatgcttatggtagtgcaagctatgggcagcctccagcctactctactgaagcaacacctcctgctgcatcccaggatcactctgctgcccctgctgcggcccttggaacaacagcttcgacagctcctgaaaacagtgggggcgcccaaacatccgctgaaacttgagcttcagcagctaattgggaacaaacattttccaagaccctgccgtgtggtttcctccgcgctgttgcttaatataattacgcatctaatttagggtctacaactacaagttatttatttttctgcctgttgtttttgacaccatgactttctgtttccttgctatattgagtagtactttgcagttattttattgctggcgtatatgtctggactagtgatatatgtgtttgtgtggttacccttgttggaccgtaatgggtaccttccggcttggtctggacagataaatgcccatctatatgtattctgagccctgttatgattgctctaccgtcggaggtttctatgcccacttcagctggtgatgatggttatgtatgaaatttggtttcaatatttcgta

SEQ ID NO: 124892 - DNA, 1232 bp, Zea Mays
ccttcgtccacgctccctgcagccgccgcccaaaccctagcaacccgtcctccgccatggccgacgaccactactcctctaagaggaagtacgacgacccctcgccgccgccgcggcgcacggggttctcttcgggcccgccgcctgcctcgccgctcgcgggcggcgccccgtcgtacaacagcgtgccaccgccccccgatgagatccagctcgcgaagcagcgcgcgcaggagatcgcggcgcggatctttaacgccgcagaggccaagcgtcctcgcgtcgacaacggcgacgatgacagcggcggcttcggtgtaggcctgggcagcactggtggcggtggccgcatcggcggcggaggactcggcttctcgtcctctgccggtggtgggcacggggcttctatcccacaattatcttctcagagcagcgcacctcagtactcctcttatggtggatatcagggtacaagcaaaaagattgaaattccaaatggaagggttggtgttatcattggaaaagccggggaaactattaggtatatccaacttcaatcaggagcaaagattcaagtcacaagagaccatgaagctgaacctggtgcactgacaaggcaagttgagctttctggcaaacctgagcagataagcaaagctgaacagttgatcaaagaagttctggcagaggccgatgctgggtcatccggtgctggatctggtggccggaaatacaatgcaacacagccaggtgctgagacgttccagatgaaaattgctaataacaaggtgggactgattattgggaagggtggggagactataaagtccatgcaggccaattctggagctcgtattcaggttattcctttgcatctgcctgctggtgatacttcaactgaaagaactgtgcatattgatggtacccaagaacaaattgaagctgcaaagcaactgatcagtgaggttaccagtgaggtccgccttctttctcgttgtgtatattcctgatctgtaattgctttgccgttttgcgctttatctatcttaggtaggttgcttctggttcattctgtttattgtctcattttatgattttccccgattctttttgaaaattttgtttcttctgcttattgctgccctacattgattacactgcgtcttcgctaatcaatgtctgaaacatattgttcgtgggtacatcctcagcatgcaaggggattgttatat

SEQ ID NO: 124893 - DNA, 1521 bp, Zea Mays
tacacagcagccacaaccaattcaccgtacggttgggggtggaaagatcacgatgattcgtgtgtcggatttcctcgccgtttttttgttggggtttgctacgacggcgaaacaacccaagagttttaatttgtcgacgtcgtcgtacggaccgtcggtggctagcatcctgaatcctgattcatctgtggtctccagggattcggcatggaggacggtgtgttctgcggcgtgttcgacgggcacggccgctgcgggcagctggtcagcaagctggcgagggaccacctccccttcatgatcctgagccagcggaacgcgctgctcctgggctccgacgacgacggcgacggcccggccttcagcgacgcatcgcccgcggcgtcgtcgtccacggacggcagccgcagcgagcggtcgtcgccggcgccggcgcagatgctggaggagtggcgggaggcctgcgccaacgcgttcgaggccatggacagggagctcggggtccaggctaaggtggactgcgacttcagcggcaccacggccgtgtgcgccatcaagcagggggaggacctcgtcgtcgccaacctcggcgactccagggccgtgctggcgaccgtgtcggagacgggctacctgaaggccgtgcagctcaccaccgaccagaagcccaacgtgcctcaggaggctgagcgcatcaagcgctgcaacgggcgcgtgttcgcgctcaaggacgaggcgtcggtgcctcgcgtgtggctgcccgacgaggactgcccgggcctggccatggcgcggtcgctgggcgaccaccgcctcaagcggcacggcgtggtgtcggagccggaggtggcgcaccgccgcgtcgcgccgggggacctgttcctcgtcctggccacggacggcgtgtgggacgtgctcagcaaccaggaggtggtgtccatcgtctgcgccacgccaaggaagcagcacgcctccaaggccgtcgcccaggccgcggcgcagcgctggcggaccaggtacccggcgtcccgcgtcgacgactgctccgccgcctgcctcttcctgcgggaccaggactgggccaccagcgtcgccgccgcgcccaaggcgaaggcggccgctagccgctagtgctactgtgctagtgccagacggcggacggagcttgatccggcgacaagcccgccggcgtagccctcgtcgcgccctgccgtccgtcgctcttgctctactgatgtgccgcaacggcggttgttagtgtaccgggagtgtaattaagtgctgtaacatagtgttaattaagaagatctggtgtttttttggaacaaggagatgaggagagaaaaaaaggcggggtaatttctcagatttgactactcatagttatcagtgatcagctgaccatgcatgacatggcgtcggaggacgcaaatcgctggcgggaacgccatctgtactctgtggggacatgaaagaggttaccacgtgaagcggagccttgttaccagctccgctcaagta

SEQ ID NO: 124894 - DNA, 1805 bp, Zea Mays
caccaccggaaatccacccactgttttgccgtccacgccttaaaaaagccgcggcgcatccgggtgcggtgcggctcacagtgcccccaccaaaccacccctgtgcgattcgccgccatcattgtgagcaagctcgagcgcgtctgccgccaccgcttccgttgcttagctctgttctcccgccaagaaggcgaaggggagacggttgcctgagttgagccagccagccagccagtggcggggcgtctgctctcggttgctttgctatggggatctgcgcgtcgtccaagcgcgtggagcaggaggaggaggactcggacgagaacgtggtgtacgtggtgatggacgggcagggcggcggcggtggagggggatggggaggggacggccgtggcgcggcgtgggagcggacggtggccgcctccctcttctcgcagaagggcaagaaggggcccaaccaggacgccgtcatcctctgccagggattcggcatggaggacggtgtgttctgcggcgtgttcgacgggcacggccgctgcgggcagctggtcagcaagctggcgagggaccacctccccttcatgatcctgagccagcggaacgcgctgctcctgggctccgacgacgacggcgacggcccggccttcagcgacgcatcgcccgcggcgtcgtcgtccacggacggcagccgcagcgagcggtcgtcgccggcgccggcgcagatgctggaggagtggcgggaggcctgcgccaacgcgttcgaggccatggacagggagctcggggtccaggctaaggtggactgcgacttcagcggcaccacggccgtgtgcgccatcaagcagggggaggacctcgtcgtcgccaacctcggcgactccagggccgtgctggcgaccgtgtcggagacgggctacctgaaggccgtgcagctcaccaccgaccagaagcccaacgtgcctcaggaggctgagcgcatcaagcgctgcaacgggcgcgtgttcgcgctcaaggacgaggcgtcggtgcctcgcgtgtggctgcccgacgaggactgcccgggcctggccatggcgcggtcgctgggcgaccaccgcctcaagcggcacggcgtggtgtcggagccggaggtggcgcaccgccgcgtcgcgccgggggacctgttcctcgtcctggccacggacggcgtgtgggacgtgctcagcaaccaggaggtggtgtccatcgtctgcgccacgccaaggaagcagcacgcctccaaggccgtcgcccaggccgcggcgcagcgctggcggaccaggtacccggcgtcccgcgtcgacgactgctccgccgcctgcctcttcctgcgggaccaggactgggccaccagcgtcgccgccgcgcccaaggcgaaggcggccgctagccgctagtgctactgtgctagtgccagacggcggacggagcttgatccggcgacaagcccgccggcgtagccctcgtcgcgccctgccgtccgtcgctcttgctctactgatgtgccgcaacggcggttgttagtgtaccgggagtgtaattaagtgctgtaacatagtgttaattaagaagatctggtgtttttttggaacaaggagatgaggagagaaaaaaaggcggggtaatttctcagatttgactactcatagttatcagtgatcagctgaccatgcatgacatggcgtcggaggacgcaaatcgctggcgggaacgccatctgtactctgtggggacatgaaagaggttaccacgtgaagcggagccttgttaccagctccgctcaagta

SEQ ID NO: 124895 - DNA, 1026 bp, Zea Mays
gcgctgcttgcttgtccgttgtcgcagagagagaaagagtgggatggcaatggagaggtcgttgtcgtgcgcggagaggggcagccagtacggcgccggggcgggggcgggggcgatgaacctccggagctacagcgcctcctacgagcgaccgacgacagcggcgccgtccacggtgcagcgcgccaggagcgtgagctcgtggagcacgccgccggcgccgccgcccgtgcagcgggccgggagcaccaagagcggccccaccgccgccgccggtggccgggccgccccggggctgaacctgcgctcctacagcgcctcctacgcggcctcctacgggcccaccctggccgataccggcgggcagctgaagcgctccggcagcgtcaccaactggacctccgccaaccgccgctccgtcaacctgagggggtacgccccgtccttcgccgcgatggacgacaccgccggcgcggtcccggcgcccaggaggaagctgcgggcgggggcggacgacgccgaggtgcagcggcggcggctggtcgtgtacaagacgtacggcgtggaagggaaggtccgggagtcggtgcgccgcggcgtcagctggatcaagggcaagtgctccggcgcggcctacggctggtggtgatcgatcgccagctccatcgccgtgcccaccggcctatcggagtggtactactacggtacggtctaccatatgagctggtgcactgcatgcccaccgccgcaccagtacctcctgttacttgttcttggagttaggagtttttttaatctttaggagatggatttggttgtatgtagtagcatactagcatgagctgtggagcttcttctcttggtgagtgatctcgtgtcttgtgagggaaggaggaagttcatgctgtgggtgtcctactcctctttacagaacagatatctggactctggtctatgtaaatataggtgctgcgtatgtatatatgtgtgtatagaataagatttctgtaaattattactactact

SEQ ID NO: 124896 - DNA, 330 bp, Zea Mays
atggccggactaaccacgccagccgcgggcagtgggtcgcgcgacgcgcgcgagggccgcgccaggcgcaccaggcaagccgcgctgcgctggccgttcgcaggaggaagcgggagcggctggggcgtcctgcgcagggactacgtgagctggccgccgcagaccgcgatgaaggccctgccgggcgcacgccgagcgctggccgcgctggcaggccacaccaagtttgccaagccaccgcaccccaggacacgctgcctccacgcacgggcggagatcatcacggggaaaagactcgggcgcggtttgtggggcgaggacgagcgatag

SEQ ID NO: 124897 - DNA, 567 bp, Zea Mays
atggcactggtgcactactccccgattcgcaacactctacacaaatctcaggccaaagctaaccgcagggaagaggtctcaccagaagcaaagatggggacgaggtcggacacggtgtggtgcggaacgctggcatcgaagtcccacggcggcggcgatctctgcttcgaccatgggctatacggtggcggtgaggacccagcggtggccggccccaggcagtgcggatggggcgagttcggcaatggttccggttttatacaccgctgccaagcccgaccggggagggattctcgcaatttggggatggacttgtcgaggttgttcgcaacggaccgaagctgggggaggattctgcggacggatcgaggattgttccgccaagctcgcgcgctgttggagatggacaaactgcagagggggttcacaaggaggaggcacacccgcgagccccggctgaggacgcaggaggaccgatccatcgcctgggaagcggacgcttcttacataatggacccactggcagtggtcgagcacagcgagggagtcctaggccggcgcgcgtga

SEQ ID NO: 124898 - DNA, 1924 bp, Zea Mays
cggcaaaggcccacctaggctcgagggtgtcgcacaaccaagccgtaacccgagagcggcgatgaacagggaggtgattttttggtgcagggccaggggttgaacccgtgacctggtgaaagggaccatgccaccttcaccaccggggtattacaccgtctgcatatgcatttctttactgcctctctgccagcaaagattttagcttgtttgctttccattggcaaatttgagtgtcttccaatattgggtgtggtgctatcttgattgccttaatccctttgacattctgtattaacatgctgtgcttattccagacctgcctccacatcaagaaattggaatgccttcactttcacctaccatgactgagggaaacattgccaagtggcttaagaaggaaggagataaggtctcccctggcgaggttctctgtgaggtggaaactgataaagcaactgtggagatggagtgcatggaagagggctatcttgctaagattattcatggagatggtgcaaaggagattaaagttggtgaggtcattgctataactgtggaagaagagggtgacattgagaagtttaaggattataagccgtcatcttcagctgaacctgtagctcctgctgaatcaaaggctcaaccagaaccttcacaaccaaaggtggaggaaaagaagcttacccaggctcctgaggttaaggccccaaagattgaagaagcttctcaatctggagatcgcatatttgccagccctcttgcccgtaaactggctgaagataacaatgtcccactatcaagtgtgaaaggtactggtcctgatgggcgtattttgaaggcagacattgaagattacttggccaagggtgggctgagggaggcttttgcagctccagggttaggttacgttgatattccaaatgcacagataagaaaggttaccgcaaaccgcttgctagcatctaaacagaccattcctcattactacttgacagtagatgcacgtgttgacaaacttgtcaagttgcgaggtgaactgaatccactgcaggatgcttctggtggaaagaaaatatctatcaatgatcttgtcatcaaggctgcagctttggctcttagaaaggtccctcagtgtaacagctcatggatgaatgattttattcgccaatatcacaatgtgaacatcaacgtggctgtgcagactgaacacggattgtttgttccagtaattagggatgcagacaagaagggacttggtacaattgctgaggaggtgaagcagttggctcaaaaagcaagagacaatagcttaaaaccagcagattatgagggtggcaccttcacgatatcaaacttgggaggtcccttcggaatcaaacaattctgtgccatcataaatcctcctcagtcagcaattttggctattggttctgccgagaagaggtgatacctggttccgccgatggtctgtatgagtttggttcgttcatgtcagccacactgagctgtgaccacagggttatagatggtgcaatcggtgcggaatttctgaaagcattcaagggctacatcgagaacccgacttcgatgctgctgtgaagttaggatcgatgacctaacacaattcttgtcaagttgtttaaataaccaggccacccaaaggtggcgtctccaaagttccaaaccaatagcacagagccgttatgatattcccagtgttaattaggatcaacgtatagaggcctgaagtcatttttgggattgttctcacgggcaattgatgggaataaatatgaaagcagccaacatgggaaataacttttgattttttttctttggaacatcgctatgcgatttaaaaaaattgtgtaaatctgttgagcttctccacagtaagcgtgatttgatgcgttgatgatat

SEQ ID NO: 124899 - DNA, 405 bp, Zea Mays
ggtgttggaaaaagaaccagaggtcccagattttcccagcattaccagctacaaaagagcttgacccattctcactaggagtaaatggaaactgcagttggagaagagcatccaacagccttaccccaagtgctgctagttggctcaatggttcattctcatgtggacaggtagtttcagcacggacattctcaaatagtgcaggtactgcccactatactttttacacttctaatttggaaccatgttattatgactagtatatttctaagtggatccattcccttcaagaaatatttgcaaaaatgcagggttacttgcaaatgcttgtgcagaattgcatctgctggcaatctgttttacttccataaatttgctcctcgctgtatcctgtgttttcacttt

SEQ ID NO: 124900 - DNA, 247 bp, Zea Mays
gccagtgtcctccgcatctcccgtctctcctgttccgcctcccctccgatctccgccgcatcacctccctcgaaccctagacccacccgcgcgcccattgcctccggtcgccatgtccgccactcagcttctccgtcgctcccgcaagctgcagagtttgcacaatgctgtaggttgtgagaaatttttcctttttcggcatttctccagtggttccggatcctttatcgccaaggaaaatggtatt

SEQ ID NO: 124901 - DNA, 186 bp, Zea Mays
tcttttctttttactattttctattttccaaattccttttttttagttttcaaattttctatttcaatcagattaaattcaaatttcaaattatattcaaatagagttcaaacttcaagccaatctaactccacaaacaaagatacaacatgtatgcattccatagataaaattcatgaaagaaat

SEQ ID NO: 124902 - DNA, 422 bp, Zea Mays
tagtccaaacatttttgaggattatatgtggacatatactacgcctccatgaaattccatgaatttctaaggctattttgagtattattaatttctttatgtagaaaatcgttaaaatgcaattaaatccataaaagttctagcgtcgatcggaaattacaaataagttaccaagactaataaacattctataagaagataacctcaagtccctacatgaaagattatgttgaaacttggatacttaagttgatttcacgtgtaattcacgcaacaagtggaagtgaaataaaaaaatcgctggcatcttatggactttatgacccaaacatttttttagaattttacgtggacaaatgttaaccgttcatcaaattttatgaatttctgaggctatttgtgtattattaatttctttctac

SEQ ID NO: 124903 - DNA, 2122 bp, Zea Mays
cacgttaaagtgctagagaccagagagtcctccgcccctggacccaggcatgtacaaacacaaaaatactccatattcttgtgtgtgtagactagagagtagattgttttgctgtataacccacatgttaaagtgcgcggcttggctatttaacacgcgcgggcgcggtacgtagagcgaggacttcaacacactaaacgttggcctgctgctctctcctctcggtcatggcatcgaaacgagccaacgccggcgacgagcagcagaagctgtcaccttctggcctcccggtccacaagatcccgggaagctacggcgtgcccttcttcacgccgttgcgcgaccgcctggactacttctacttccagggcgcggaggagtacttccgctttcgcgtcgccaaacacggcggcgccaccgtcctgcgcgtcaacatgccgccaggcccgttcctctccggtgactcccgcgtcgtcgccgttctcgacgcgcgcagcttccgcgtcctactcgacgactcccgtgtcgacaaggacggcacgctcgacggcacctacatgccctcgctcgcgctcttcggtgggcaccggccgctcgcgttcctcgacggcgccgacccgcgccacgctgcgctcaagcgcgtcatgatccgcctcgcggccgcggggatgcagcacgtcgcgccggcgtttggcgccgccttcaccgccacgttcgacgccgtcgaagccggcatggcgggcggagcctccgccgtggagttcaacaagcacaacatgcgccacatgctggacttcacctgcgcctcgctgttcggcgggaagctgccgagcaaggccatcggcgacggcgccgcggcgaaggcgttcaagtggctcgtgttccagctccacccgctcgcgagcaaggccatcaggccctggccactggaggatctgctcctccacacgttccgcctcccgccgttcctggtgcgccgcgactacgccgagttgacggcctacttcgccgacgtcgcggcgggcgtcctcgacgacgccgagaaggccgagccgggcgccgtcccccgcgacgagctcctccacaacctcatcttcctcgccatcttcaacgcctacggcggctacaagatcttcctgccgcacgtcgtgaagtggcttgcgcgcagcgggccggagctgcacgccaggctcgccgacgaggtgcgcgccgtcgtcccaccgggcagtgccagtgccggcgacgcgatcaccctgtccgacgtggagaagatgccgctggtgaagtcgttcgtgtgggagacgctgcgcatgaacccgccggtggagttccagtacggccgcgcgcggcaggacatggtggtcgagagccacgacgcggcgtacgaggtgaagaagggcgagatgctgttcgggtaccagccactggcgacgcgcgacgagcgcgtgttccggcgcggccgggagttcgtccccgaccggttcgccgtctgctccgacgacgagcggcggaggctgctggaccacgtggtgtggtcgaacgggccggagaccggcgcggccgcggagcggaacaagcagtgcccggggaaaaacgcggtggtggcggtggggcggctgatggtggcggagctgttccgtcggtacgacacgttcgtcgctagcgtccatgagaccccggtggaaccggtggtcacgttcacttcgctcacgagggcttcctccgccgcgggccatggcagcagcgtcaagccctgatcatgtacagtgctgtacgtaccttgtcttctgcgagatacgtacagcacgtagtacaggaaccatcatttgcttgcattgccttcaagaatgccgactttgctttgttatggtttccagtggcattagatcaatggtggaccacgatcaagatgttgttaagcaaactttgccttgggtgggcttggctatcatcactcatcagcttcattcgcttttgatttgtactgtgtgggatatgagtggtttgctgtagtaaatcttactaggtgctggcagcttgtccccactcctcaataagagcccttctaaattatctattgtaaggtcgttacaaattgaaaacatttgctactgtgtgtaac

SEQ ID NO: 124904 - DNA, 2469 bp, Zea Mays
atggcctccggcggcgcaccgccgaccgttgccgtcgctgtgcgccccggcggcagcggcagccgcctcgccgcgcggtgggtggccgcgggactcccgggcaacgggcgcgccaccgcgatcactgtcgtccacgtcatccccgagctctcctacgagccttctccgacgggggagcgggtgccgatgccgctggtgggaagggagccggcggaggcgtacgcgtgggaccggcgcgcacgcgcggaggaggcgctgctcccgttccgccgcctctactgctgtggcctcgcgaacgtcaccgtggagacggtagtggttgaaggcgacggtgtcgcggaggcgctgctgcggtacatacgggagtccggcgtacggagcctggtgctcggctcggcgtccttccgctggtttcggagggcgctgagcatcccagatgtccccgagtctaacagaaacttgaggatcgagtccattagtcatgaaacatttgcactatcacacaggagtttactgtttgacaactttggtgacgatgaagcacaatcagattcattctcccagtcccacagctcacatagtgcttccaatgttgtttcaagttcagaaagttctgaacaagttgcttcaggaagttcaggagtaaattatgcagcaaccgaaggaagtaagaactacgattctcttagctcctggggggaagatccttgggttgcctcaaactccagcgaagagtgccaatctacggatgatgtgtccaaactaaggaaggagctgcaggaaaccttagtagtctatgataaagcttgtgcaaaccttgttagtgttaagaaaaagattcaggtactttctatcgagtgttctgaagaggctaggaaggtggagcacgcgctagagtgggaggaagctttgaagcagacggtgtctgatgagaaggcgaaacagctcgaggtcatcagtgaagtcgagcaagcaggaaaatcattcacccgagaggcttattcaaggtacaagacagaaatggctgccagcatgatctgtcaggataaggtgcagattgttgatgcgattttgacaaagagcagaagttgcaggcggtattcgaagagagatatagagcttgccactgacaacttctctgaagaaaggaagatcggtgagggtggttatggcaatgtgtacaggtgcaccctcgaccacactgaagtagctgtgaaggtcattcaggaaaactccattgacaaaactgatgagttcctgaaggaggttgagattcttagccagcttcgccatcccaacctggttttgttgcttggtttctgtcccgaaattggctgcctggtgtacgaatacctgaagaacgggagcctagaagaccagctcttcaacagcgaagggtgccaaccactgcactggttcctccggttccaggtcgtcttcgaggtgtcctgcggactcgcattcctgcacgcgagaagcccagagcctgtcgtccaccgcgacctgaaaccggccaacatcttgctggacaggaactacgtgggcaaggtcggcgacgtcggtttcgcgaagttcgtctctgatctcgtgcccgactggcagaccgagtacaaggacacgatcgtcgccggcacgctgtactacacggaccccgagtaccagcagaccggcaccgtgcgtcccaagtccgacgtgttcgcgctgggagtcgtcatcctgcagctcctgaccggcagacgcccggacgggctcgttgcgagcgcagagaacgctgtgagaaacggcaggctcgctgatatcctcgactggtctcaggctggttggccgcttgccgaggcagaggtgtttgccaggctcgggttgagatgcgcggccttgaggtgcagggacaggcctgaccttgagtcggaggtgctgccggagctcgacgagatcctgcacaggattacttttgctgtcagtttgagaagccccaaactgacgagcgtaccaagccacttcgtctgccctataacacaggagctgatggaggatcctcacgtcgccgcagacggccacacctacgagcattacgcgatcagagcttggctcaagcggcacaggacatcgcctgttacgaggagtaagctgcagaattcgtccgtaatcccgaaccactcattgcgcggcgcgatacagcagtggaagtcacagttaccggctcagacgaacgagtgaaacgggagtcagggtgccctctcttcttgattcaactgttaatggtggcgaaattattttggagagcacgcaaaaggcctttgcgtttcggtttttgtaagtggttcaaagctgtaaatgaaaaaggaggcagctgtaaattgaagcgcagaatcacgaaggtcgattttgtaactggagtgctaggttctgttgccatagtattggtcatcagttttggaacagagcaagcttaaaagttttttttttgct

SEQ ID NO: 124905 - DNA, 1408 bp, Zea Mays
cgagagtttgaaaatctaagtggtatgagagtttgaagatctaagtaacatagaatgctaagtttgaggaccgcgttaaaaggaagaggagagtgcccaacttttgctaattttttgtgtggttcttggaatgaaaatccactactagtagttatgatgccactgagattgctggaaacaagttatttttttttcaggaaccgagctggtgaattaaataaaggaggcaaaccatagtttggaaacttgaggctgctgttacagcaaaaaagaaatcaacacattttacacacatgtacacaccataagtttcctttgtatgctccccttatctacacgctaacaatctcgtttggttcactggaactattttaggccccatcatcaggcgctgcagtccatgaccatctcatctgagtcaggactgaatctgaacaagcatggacagcagtggttttccagacctggaaggcaacctcatgcccgtctatactctatacaattatgagtatgcttgatttgcttgatccggcggaagattccttcccatggcattcagatgtcatcgttattgaaactgtaaggagcggagcttgagcagttcgtacttgcgcagctgacctgggaagtctcatactcatgcccaagattgcgcagcctgttcagctccggcaagatttccttcccgagatccggcctgtctttcttccgcagctccgcgcaccgcagcgccagcttggcgaattccagagcctcttccaccggccagtcggtcaccgtcgggtcgaggatctcctggaaggctcctctctctatggcgttctccacatggtgcgtgagccccatgggcgacctcgccgtgatgatctggagcagcatgatgccgagcgagtacacgtcggacttggtggtgagcatgccagtctgttggtactccgggtcgatgtagcagaaggtgccggccgtcgatgtcatcctgtactgcgtgacgtcggccgcggactgtggcaccagcctcgcgagcccgacgtcgctgatcttgctgacgaagttgtggtcgaggaggatgttggcgggcttcaggtcccggtggacaagtggttctggcttcgcttggtggaggaagaggagtccagttgcgatgtcagcggcgatcctgaagcggatgctccatgggattggcaacgtttttcctcgcctgcagagccgatcctctaggctcccatagtccatgtactcgtacaccaggcacccatactctgggcaggctccaagcaacagaaccatgtttggatgccgcatgcagcttagtacttcaatctgcaaatcgtcacaagcacgtgattaactgctttaggcacgatactattgttgccattgatataaataggttgatcatgatttcata

SEQ ID NO: 124906 - DNA, 1700 bp, Zea Mays
aattagcatgaagttgtttttgctgaagagggtcgaacaaaagaaatgcttcactgagcaaaatatagcatttcgatcccgacaccccaaaatccctcagccctctggcctcggcggcgctcaaaccttcgccgtcccgccgtctccaaaaccctcttaccatggccgccgcgacaaccgcgggggccggagccgcgacgccgcagccgccacggcagtacaagctagctccgcagagcgagctgcgtgtggaggtgctccccgacgcgcccctccgagtgcgcctcgtcactggcaccgcagagatcttcggcaccgagctgcctccggagggctgggtccccgtccctccccgatccaagatcgccattttcacctggcacggcgcgacggtggaactggacggggtgagcgagagcgagtacacgtctgacgagactccaatggtaatttatgtcaacacgcacgccattctggatgcccgcagggcaagggcgagaacagccgcagctcaggggggcgataaggaggcatcacagggacctagagtgattgttgtggggccaacagattctggaaaaagtactctctgcaaaatgcttcttagctgggctgccaaactgggctggaagcctacgtatgtcgatttagatattggccagggatctataacgatccctggatgtatttctgctacaccaattgagaaacctatagatataattgatgggattcccttggagatgccactggtatacttctatggtcacccaaatccaagtattaatgcggatgtttacaaagttcttatgaaggagctagctaaaacattggagaaacagttctctggcaatgctgaatctagggcagcaggaatggttatcaatacaatggggtgggttgaaggccttgggtatgagttacttctcaacgcaattgaaaccttcaaggccaatgtagtactggtactgggacaggagaaactctggaagatgttgaaagatgcagttcaaagcaagtccaacattgatgttgtaaaacttcataaatcagagggtgttgtcctcagaaattcaaaatatcggcaaagaacgagaagcttccgaatcaaggaatacttttatgggattgcaaatgatcttgcaccgcactcaaacattgtcaatttcagtgatgtctcggtgtataaaatcggtggtggccatcaagctccccgttcagcattacctatcggtgcagagcctgtggcagatcctactcgacttgttgctgtcaacatcagcacggatatgatccatacagtgcttgcaatttcctatgctaaggaacctgaagaaataatatctagcaatgttgccggattcattcatgttactgatgttgacatccaaaggaagaagctgacgtacattgcaccttgcccgggggacttgccaagcaggttgttgatcgcgagttcacttacatggtatgaagcgtgatcagtctaagttagatgggccatatgcccatacgcatgttgtaaagccaggacatgtgacgttgggactgagcgttcgatgtctactgctaaccaagagaaacgatgcaaggacaaatatcctgttccctcgtgatttactgtgttctcgtttcttctcttattatacgccaacatctacggtgcggttgagataacaaatggcgtggtttgagaaatg

SEQ ID NO: 124907 - DNA, 1545 bp, Zea Mays
agcatttcgatcccgacaccccaaaatccctcagccctctggcctcggcggcgctcaaaccttcgccgtcccgccgtctccaaaaccctcttaccatggccgccgcgacaaccgcgggggccggagccgcgacgccgcagccgccacggcagtacaagctagctccgcagagcgagctgcgtgtggaggtgctccccgacgcgcccctccgagtgcgcctcgtcactggcaccgcagagatcttcggcaccgagctgcctccggagggctgggtccccgtccctccccgatccaagatcgccattttcacctggcacggcgcgacggtggaactggacggggtgagcgagagcgagtacacgtctgacgagactccaatggtaatttatgtcaacacgcacgccattctggatgcccgcagggcaagggcgagaacagccgcagctcaggggggcgataaggaggcatcacagggacctagagtgattgttgtggggccaacagattctggaaaaagtactctctgcaaaatgcttcttagctgggctgccaaactgggctggaagcctacgtatgtcgatttagatattggccagggatctataacgatccctggatgtatttctgctacaccaattgagaaacctatagatataattgatgggattcccttggagatgccactggtatacttctatggtcacccaaatccaagttcttatgaaggagctagctaaaacattggagaaacagttctctggcaatgctgaatctagggcagcaggaatggttatcaatacaatggggtgggttgaaggccttgggtatgagttacttctcaacgcaattgaaaccttcaaggccaatgtagtactggtactgggacaggagaaactctggaagatgttgaaagatgcagttcaaagcaagtccaacattgatgttgtaaaacttcataaatcagagggtgttgtcctcagaaattcaaaatatcggcaaagaacgagaagcttccgaatcaagtgatgtctcggtgtataaaatcggtggtggccatcaagctccccgttcagcattacctatcggtgcagagcctgtggcagatcctactcgacttgttgctgtcaacatcagcacggatatgatccatacagtgcttgcaatttcctatgctaaggaacctgaagaaataatatctagcaatgttgccggattcattcatgttactgatgttgacatccaaaggaagaagctgacgtacattgcaccttgcccgggggacttgccaagcaggttgttgatcgcgagttcacttacatggtatgaagcgtgatcagtctaagttagatgggccatatgcccatacgcatgttgtaaagccaggacatgtgacgttgggactgagcgttcgatgtctactgctaaccaagagaaacgatgcaaggacaaatatcctgttccctcgtgatttactgtgttctcgtttcttctcttattatacgccaacatctacggtgcggttgagataacaaatggcgtggtttg

SEQ ID NO: 124908 - DNA, 1689 bp, Zea Mays
aattagcatgaagttgtttttgctgaagagggtcgaacaaaagaaatgcttcactgagcaaaatatagcatttcgatcccgacaccccaaaatccctcagccctctggcctcggcggcgctcaaaccttcgccgtcccgccgtctccaaaaccctcttaccatggccgccgcgacaaccgcgggggccggagccgcgacgccgcagccgccacggcagtacaagctagctccgcagagcgagctgcgtgtggaggtgctccccgacgcgcccctccgagtgcgcctcgtcactggcaccgcagagatcttcggcaccgagctgcctccggagggctgggtccccgtccctccccgatccaagatcgccattttcacctggcacggcgcgacggtggaactggacggggtgagcgagagcgagtacacgtctgacgagactccaatggtaatttatgtcaacacgcacgccattctggatgcccgcagggcaagggcgagaacagccgcagctcaggggggcgataaggaggcatcacagggacctagagtgattgttgtggggccaacagattctggaaaaagtactctctgcaaaatgcttcttagctgggctgccaaactgggctggaagcctacgtatgtcgatttagatattggccagggatctataacgatccctggatgtatttctgctacaccaattgagaaacctatagatataattgatgggattcccttggagatgccactggtatacttctatggtcacccaaatccaagtattaatgcggatgtttacaaagttcttatgaaggagctagctaaaacattggagaaacagttctctggcaatgctgaatctagggcagcaggaatggttatcaatacaatggggtgggttgaaggccttgggtatgagttacttctcaacgcaattgaaaccttcaaggccaatgtagtactggtactgggacaggagaaactctggaagatgttgaaagatgcagttcaaagcaagtccaacattgatgttgtaaaacttcataaatcagagggtgttgtcctcagaaattcaaaatatcggcaaagaacgagaagcttccgaatcaaggaatacttttatgggattgcaaatgatcttgcaccgcactcaaacattgtcaatttcagtgatgtctcggtgtataaaatcggtggtggccatcaagctccccgttcagcattacctatcggtgcagagcctgtggcagatcctactcgacttgttgctgtcaacatcagcacggatatgatccatacagtgcttgcaatttcctatgctaaggaacctgaagaaataatatctagcaatgttgccggattcattcatgttactgatgttgacatccaaagaagctgacgtacattgcaccttgcccgggggacttgccaagcaggttgttgatcgcgagttcacttacatggtatgaagcgtgatcagtctaagttagatgggccatatgcccatacgcatgttgtaaagccaggacatgtgacgttgggactgagcgttcgatgtctactgctaaccaagagaaacgatgcaaggacaaatatcctgttccctcgtgatttactgtgttctcgtttcttctcttattatacgccaacatctacggtgcggttgagataacaaatggcgtggtttg

SEQ ID NO: 124909 - DNA, 1670 bp, Zea Mays
aattagcatgaagttgtttttgctgaagagggtcgaacaaaagaaatgcttcactgagcaaaatatagcatttcgatcccgacaccccaaaatccctcagccctctggcctcggcggcgctcaaaccttcgccgtcccgccgtctccaaaaccctcttaccatggccgccgcgacaaccgcgggggccggagccgcgacgccgcagccgccacggcagtacaagctagctccgcagagcgagctgcgtgtggaggtgctccccgacgcgcccctccgagtgcgcctcgtcactggcaccgcagagatcttcggcaccgagctgcctccggagggctgggtccccgtccctccccgatccaagatcgccattttcacctggcacggcgcgacggtggaactggacggggtgagcgagagcgagtacacgtctgacgagactccaatggtaatttatgtcaacacgcacgccattctggatgcccgcagggcaagggcgagaacagccgcagctcaggggggcgataaggaggcatcacagggacctagagtgattgttgtggggccaacagattctggaaaaagtactctctgcaaaatgcttcttagctgggctgccaaactgggctggaagcctacgtatgtcgatttagatattggccagggatctataacgatccctggatgtatttctgctacaccaattgagaaacctatagatataattgatgggattcccttggagatgccactggtatacttctatggtcacccaaatccaagttcttatgaaggagctagctaaaacattggagaaacagttctctggcaatgctgaatctagggcagcaggaatggttatcaatacaatggggtgggttgaaggccttgggtatgagttacttctcaacgcaattgaaaccttcaaggccaatgtagtactggtactgggacaggagaaactctggaagatgttgaaagatgcagttcaaagcaagtccaacattgatgttgtaaaacttcataaatcagagggtgttgtcctcagaaattcaaaatatcggcaaagaacgagaagcttccgaatcaaggaatacttttatgggattgcaaatgatcttgcaccgcactcaaacattgtcaatttcagtgatgtctcggtgtataaaatcggtggtggccatcaagctccccgttcagcattacctatcggtgcagagcctgtggcagatcctactcgacttgttgctgtcaacatcagcacggatatgatccatacagtgcttgcaatttcctatgctaaggaacctgaagaaataatatctagcaatgttgccggattcattcatgttactgatgttgacatccaaaggaagaagctgacgtacattgcaccttgcccgggggacttgccaagcaggttgttgatcgcgagttcacttacatggtatgaagcgtgatcagtctaagttagatgggccatatgcccatacgcatgttgtaaagccaggacatgtgacgttgggactgagcgttcgatgtctactgctaaccaagagaaacgatgcaaggacaaatatcctgttccctcgtgatttactgtgttctcgtttcttctcttattatacgccaacatctacggtgcggttgagataacaaatggcgtggtttg

SEQ ID NO: 124910 - DNA, 460 bp, Zea Mays
atggccgccgcgacaaccgcgggggccggagccgcgacgccgcagccgccacggcagtacaagctagctccgcagagcgagctgcgtgtggaggtgctccccgacgcgcccctccgagtgcgcctcgtcactggcaccgcagagatcttcggcaccgagctgcctccggagggctgggtccccgtccctccccgatccaagatcgccattttcacctggcacggcgcgacggtggaactggacggggtgagcgagagcgagtacacgtctgacgagactccaatggtaatttatgtcaacacgcacgccattctggatgcccgcagggcaagggcgagaacagccgcagctcaggggggcgataaggaggcatcacagtttagcatattcctagagatagtcagagtaagtgtaaaacaatgtgaaatttgacatagcaccacttttaattcttcattaa

SEQ ID NO: 124911 - DNA, 129 bp, Zea Mays
gctctaacttcaacaaactgtttggcaaatttaaagacctcaaactcaaaaacttacaacaaaaaagttgtaggtctcctttttctctttcttttagatatatggatcgcctattttagacaaataaag

SEQ ID NO: 124912 - DNA, 222 bp, Zea Mays
atgaccaagacggtgtcagctagcgatagtggcagcacgtggaagttgatggacaggttcatctccacatcatgtgtgacagcggtcatggcatccgtagacatgacaggcagtttgatgatgatgacagtaaaagcgagcgacatgggcagtctcggcataaggaagcgatggcatgttggcttgttgacacagctatggaccatgagattttttgcttaa

SEQ ID NO: 124913 - DNA, 723 bp, Zea Mays
tttattttatattatattattatgattacaaccttatgattatttgatagcgcattcggttataaatctgataatattaagttcgcattgcaatagttgaaattggttagcgaaattattggttaaagattataatggctgttaaaacaaagaagcatagtagacagcatatacatacatacatacatacatacatacatacatgatagatataagttgaattacaggacactcatgatggacggcgatggcgacagagtcaccagcatccatctttattcatgctcaacatattataacagaaccccaaattcgacaagtttgacccaaccctaaactcagacgcatattttcggatgcttgcgagcacacaacactgtaacataaaacggcatggcactaatgccgtgataaacagaagaaaaatcaagacacacagttgtgcgctgagttgcgctaggcaccaccgtccattgccagtgacagagacggcatgctattttatgtagtttcattcaatataaagactcgcccgccccctcaggccacgttcggttactagtggtttgagggggattgaaggggattaaatcccctcctattcaaaattgaataggaggagatttaatcccttcaatcctctccaatcccctagcaacccctcaacaagcacatgccaaacgatcgcacagcaagcacaccggctagcaggacgggcaccct

SEQ ID NO: 124914 - DNA, 2421 bp, Zea Mays
atggcgtcggcgggaggagaaggtgcagttttggtacccctggcgcggcgctgcggcgggtgcgacggccgtgaggaagccgtggtggaggcgatgctgcagtggcagaaggtgagcgacctgctcatcgcggcgtcgctgctgtccatcccgctggagctgctctacttcgccacgtgcgccgccctggcgcctctccggcgggtgctcctccagctgggcaccttcattgtcatgtgcggcgtgacccacctgctgaacgtcctcgcctacgaccacccgggctcccaccgcatcctcgtcgccctcaccaccgccaagattctgggcgcgctcgccacctccgccgccgccgtctccctcccggtcctgttcccgcgcctgctccgcctcaaggtccgcgaatcgttcctccgcaccaaggcgcgccagcttgaccgcgacctcgccaccgtcaggcaccgcgaggagaccgtctggcgcgtcgtccgcgcggtcacgcaccacatccgcgactccatcgacgcgcgcaccatcctgcgcaccaccatgctccagcttgccgccgccctcggcctcagcaactgcgccatctggatgccccagcccggcgggagcgaccgcggcgtgctccagctcatggaccagctgctgccagaccgagacgacgaaggcgacaaggtgcttcatcacagcggcggcacacgcgccatctccgttcgtgaccctgacgtggccgccgtattggccagcaaggacgccaaggtgcttagccggccaggctcggcgctcaaggcggcgagctgccggagcgtgccgctggcaggagccgcggccgccatacggattccaaatttccacggagaagtgggcagcaggaacacatcagagccgttgagctacgccatcctagtcctggttcttcgggctcatgaagatcaacacagggcacctacaggctggagcaacctggacctggagattgtccaggccgtcgccgaccaggtcaccgtcgcgctgtcccacgcggcagccctggaggagtcacagctgatccggcacaggctggcggagcagcacggggcactgctgcgcgcaaggagcgagctcgcggctgcgaccaaggcgaggaacaacgctcacagcgcgatgcgaagcgccatgggcaggccgatgcactccgtcgtcggcctgatatccgtgatgcagcaggaggccgccgcgatgcgcccggagcagaggctcatcgtcgacgccatcgctaggacaaacgctgtgtcctccactctcatggacgacgtcatggagacgctgcagaggatggtggacatccgtgacccgccgctgtcgactcctactcctaccctggtgtcaaggcggccgttcgagctccgctcgctgatcagggacgcggccttcgtcgcccgatgcttgtccggctgccaggagctcggcttctcgcaccagctgcaggccaattccctgcccgaatgggttgtcggcgacgacaagagagtcttccatctcgtgctgcacatggtgggcgctcagctgagccgatgccatggccagcatgtcacagcagcaggccgtaccctctcgttttctgtctgcagctgcaacagcatcgccagtgagcaccaggactggatcccgtcgccactgcgacccgtcagcttcaccagtggcaaccaagtatttgtcaggatccagattgggctgacgaagagcggtcctgggagctcgccggcatcgcgcccaccccagtgtggcctctcctccgattccggcggtgccaacatgcggctaaccttcgctatgtgcaaaaagattgtggagatgatgaatgatgacatgtggtgggcatcagagtcggaaggccagggagaaaccatgacgtgcatccttcggttccaacagcagcagccaccgaatccgcacgtgcctggatcaggcacgtaccggattggagcctcgtctgcgacggcggcgcctcaccttcacttcaacggcctaagaatcctgcttgccgacagcgacgccatgagcatggaggtcacccggaagctcatcgagcggctaggctgccaagtcctgccagtgtcgtcgggcgccgactgcctcagtttgctgcgaggcgctgagccgtcgttcgaactcgtggttcttgatctcgatgggcatggcggagccggcacggcaggcgccatggatgggctcgaggtagccctcaggatacgggagctcagtaacacctgctggctgctggtcctcgtcgccgtggaagccagcggcgtcgatgacaccgtgcgtgatatgtgccggcgagcgggagtggacgggctcatccacaagcccatcacgctgccggcgctcggagctcagctccagagagtccttcagaacaactgatccaacctc

SEQ ID NO: 124915 - DNA, 2129 bp, Zea Mays
tgcttctcgccctaccatcgcctgaccgacgcgcccgttttctcctgaaaacagaaggctccggcctccggcatccgccaaaaaggggaaaaaaggagagataacacacacacacacaaaccccaatcccctgcggcggcgatggacccgtcatcggcgggctccggcggcaactccctcccgtccgtcggccccgacgggcagaagcggcgcgtgtgctacttctacgacccggatgtgggcaactactactacgggcagggccatccgatgaagccgcaccgcatccggatgacgcactcgctgctggcgcgctacggcctcctcaaccagatgcaggtgtaccgccccaacccggcccgcgaccgcgacctctgccgcttccacgccgacgactacatcaacttcctgcgctccgtcacgccggaaacgcagcaggaccagatccgcctgctcaagcgcttcaacgtcggcgaggactgccccgtcttcgacggcctctacagcttctgccagacctatgcgggcgcctccgtcggcggggccgtcaagctcaaccacggccatgacatcgcaatcaactggtcggggggcctgcaccacgccaagaagtgcgaggcgtcgggcttctgctacgtcaatgacatcgtgctcgccatactcgagctgctcaagcatcacgagagagttctgtatgtcgatatcgatatccaccatggtgatggagtggaggaggctttctacacaacagatagggttatgactgtctcgttccacaagtttggtgattatttcccaggaacaggggatatccgtgacattgggcactcaaaagggaagtactactccctgaatgtccctctagatgatgggattgatgatgaaagctaccagtccctttttaagccaatcatgggcaaagttatggaggttttccgccctggtgcagttgtgcttcagtgtggtgctgattccttgtctggggataggttgggctgcttcaacctctcaatcaaaggtcatgcggaatgtgttaggtatatgaggtctttcaacgttccattgttgctccttggtggtggtggatataccataagaaatgttgcacgctgttggtgttatgagactggagttgctcttggccaagagcctgaagacaagatgcctgttaatgagtactatgaatacttcggtccagattacactcttcatgttgcaccaagtaacatggagaacaaaaatacacgacaacaactggatgatatacgatctaaacttctggataatctttcaaaacttcgacatgctcctagtgtccactttcaagagagagttcctgacacagaaatacctgagcaagatgaagatcaagatgatccagatgaacgacatgatcctgactctgatatggaagtggatgaccacaaggctgtggaagagtcatcgaggaggagcattctaggtataaaaatcaagagagaatttggtgaaaatgcgaccagagtacaggatggtggcagggttgcatctgaacatagaggactggaacccatggcagaagacattggttcctccaagcaagctcctcaggcagatgccagtgcaatggccatcgatgaaccaagcaatgtcaagaatgaacctgagagctcaactaaattgcaaggccaagcagctgcgtaccacaagccatagctgcgaccatcaagagttgctgggtttctgctaggcaacttcctgcttgatttggacagtccagaaaacagaagtgaatccgcaatacgtccctgccatttcaaatttgacttggttacacctatctgtgacaatgttaatgtaatgagatcccatggcactagtgaagttcccaggtgtccacctgggattgcttgcggttgagagagacgatagtctgatgacccatgtatacatgaagcccatgatctcagttgtacagtcattagccaatacaaatatgcagtggactaaagggtgattcattgcgtgttcttaatggttttgtgtcctgactcgtccttttttttgtgcggaagcaaggtaggcagttgctgtgccgcaaatttgccgagtttgtagaatgctgatgcaaatacatgcgctatctgcct

SEQ ID NO: 124916 - DNA, 2126 bp, Zea Mays
tgcttctcgccctaccatcgcctgaccgacgcgcccgttttctcctgaaaacagaaggctccggcctccggcatccgccaaaaaggggaaaaaaggagagataacacacacacacacaaaccccaatcccctgcggcggcgatggacccgtcatcggcgggctccggcggcaactccctcccgtccgtcggccccgacgggcagaagcggcgcgtgtgctacttctacgacccggatgtgggcaactactactacgggcagggccatccgatgaagccgcaccgcatccggatgacgcactcgctgctggcgcgctacggcctcctcaaccagatgcaggtgtaccgccccaacccggcccgcgaccgcgacctctgccgcttccacgccgacgactacatcaacttcctgcgctccgtcacgccggaaacgcagcaggaccagatccgcctgctcaagcgcttcaacgtcggcgaggactgccccgtcttcgacggcctctacagcttctgccagacctatgcgggcgcctccgtcggcggggccgtcaagctcaaccacggccatgacatcgcaatcaactggtcggggggcctgcaccacgccaagaagtgcgaggcgtcgggcttctgctacgtcaatgacatcgtgctcgccatactcgagctgctcaagcatcacgagagagttctgtatgtcgatatcgatatccaccatggtgatggagtggaggaggctttctacacaacagatagggttatgactgtctcgttccacaagtttggtgattatttcccaggaacaggggatatccgtgacattgggcactcaaaagggaagtactactccctgaatgtccctctagatgatgggattgatgatgaaagctaccagtccctttttaagccaatcatgggcaaagttatggaggttttccgccctggtgcagttgtgcttcagtgtggtgctgattccttgtctggggataggttgggctgcttcaacctctcaatcaaaggtcatgcggaatgtgttaggtatatgaggtctttcaacgttccattgttgctccttggtggtggtggatataccataagaaatgttgcacgctgttggtgttatgagactggagttgctcttggccaagagcctgaagacaagatgcctgttaatgagtactatgaatacttcggtccagattacactcttcatgttgcaccaagtaacatggagaacaaaaatacacgacaacaactggatgatatacgatctaaacttctggataatctttcaaaacttcgacatgctcctagtgtccactttcaagagagagttcctgacacagaaatacctgagcaagatgaagatcaagatgatccagatgaacgacatgatcctgactctgatatggaagtggatgaccacaaggctgtggaagagtcatcgaggaggagcattctaggtataaaaatcaagagagaatttggtgaaaatgcgaccagagtacaggatggtggcagggttgcatctgaacatagaggactggaacccatggcagaagacattggttcctccaagcaagctcctgcagatgccagtgcaatggccatcgatgaaccaagcaatgtcaagaatgaacctgagagctcaactaaattgcaaggccaagcagctgcgtaccacaagccatagctgcgaccatcaagagttgctgggtttctgctaggcaacttcctgcttgatttggacagtccagaaaacagaagtgaatccgcaatacgtccctgccatttcaaatttgacttggttacacctatctgtgacaatgttaatgtaatgagatcccatggcactagtgaagttcccaggtgtccacctgggattgcttgcggttgagagagacgatagtctgatgacccatgtatacatgaagcccatgatctcagttgtacagtcattagccaatacaaatatgcagtggactaaagggtgattcattgcgtgttcttaatggttttgtgtcctgactcgtccttttttttgtgcggaagcaaggtaggcagttgctgtgccgcaaatttgccgagtttgtagaatgctgatgcaaatacatgcgctatctgcct

SEQ ID NO: 124917 - DNA, 661 bp, Zea Mays
gattattcatcgacaagtcaattctcatacactggtgtatcgacaaaggagagatgaatgcgaagaggctgacaccgattctcctcgccgttctgatgatgacatgcctcgtgtccgctgcaaactgtgcgattgcaggcggccatgacgtggagacgacaccggctagcggtctccggtggccgccgtcgccggacgcagagaagacgatgttggaaagcagtgacatcaacgtcatattgtgtttgaaggctcagtgcgccggttacaagagctgttactgctgcttcactttacctggtttgccgtgctggcctgatcagaagacgtgctggcaagagtgtcccagtcacaagcgactctgatccacccgatttatgaagcacaccgacgcgatgccctccataggtcccagcgggttctcatgagaaaggatctagcctccaattctctggctcggagtgacaatttgtgatatcatgtcatacatggcaatgtgaatgtaggataataataaataagcaacattccatgcaacagtatgtcgtatgggaacatcttgattcatgagattaatcagagctctttcctcgtaatcctgggcttgtatggcaggatataacatacttactctgttctaaaacaaatatacttactcagt

SEQ ID NO: 124918 - DNA, 652 bp, Zea Mays
gattattcatcgacaagtcaattctcatacactggtgtatcgacaaaggagagatgaatgcgaagaggctgacaccgattctcctcgccgttctgatgatgacatgcctcgtgtccgctgcaaactgtggcggccatgacgtggagacgacaccggctagcggtctccggtggccgccgtcgccggacgcagagaagacgatgttggaaagcagtgacatcaacgtcatattgtgtttgaaggctcagtgcgccggttacaagagctgttactgctgcttcactttacctggtttgccgtgctggcctgatcagaagacgtgctggcaagagtgtcccagtcacaagcgactctgatccacccgatttatgaagcacaccgacgcgatgccctccataggtcccagcgggttctcatgagaaaggatctagcctccaattctctggctcggagtgacaatttgtgatatcatgtcatacatggcaatgtgaatgtaggataataataaataagcaacattccatgcaacagtatgtcgtatgggaacatcttgattcatgagattaatcagagctctttcctcgtaatcctgggcttgtatggcaggatataacatacttactctgttctaaaacaaatatacttactcagt

SEQ ID NO: 124919 - DNA, 2206 bp, Zea Mays
acaaaacttaattattatggttgttagttcttagttcatgtctgtacaacttcctcctgttctttaaagcatatatgttgcaaattttaaggcggttatgttgctgttttgcactttgcccgcatatgacttcacaagctcagacctcaagcactacaacatggttctccaatacaatcctgatgaatcaaacgtgctccgggttccacgcttaatgaatctggcctcaagtgcataccttcggttgaggggtaatgatactaatatgcggtttgtgtttgttaaagacatgcctagagatggtcatcctatgaaggctcctgacatgtcttttatagttgggaagatggtttttgtatggattataatgctccttttcccggtcatcctgagcagtttagtgtatgagaaacaacagaagctaagggcaatgatgaagatgcatggtttaggggatatggcatattggactatatcttattgctacttccttgtcatatcattactttatatgttcttgctggttgtatttggcgccgtcgttgatataaagttatttgcagtgaacagctacgtgctacaattcttactatattttatctacatgaacttgcaaatttcatttgcgttcctcatgacaacgtacttttctacttccgcaacagctaccgaaaagatggctgcaggaacattctatctacctcgtgcagtaacaggatacctctatgttattgggtctggcctcataggagaatatctgttcaggccttttgtcgaagacacctccgtctcaagaagcctgattacgctgatggagttcttcccaccaatgtctctgtaccgcataatctacgagctctctccacctccatcgccgtcggggcctttctcggacttctccggcgtacgcgtgggagacctgagcgaccctgagaacgggatcttggtcctcatggtcgtgatggttcttgagtggcctacgtttcttttcctgacattgtatctggatggatttggctggctccaaactagagttagaaagctgccgccggcggcggcggcatcttctcatcagacccttcagaagccgtccaccacacggcctcaagaacgacccgaagcttcgattgaaatagacgggacgacagatatcccgggagaggtagcgcgtgcatgcgcagagagagagatagtcgacaggttcttgcagcaaccggaccagagctacgcagtcatagtcgacaacgtcaggaaagtgtaccctccgagagacggaaacgcagaggtggtcgcagtgaacggcttctcgctctccatcaaacgcgggcagtgtttcggactccttggctcaaacggcgccggaaaaacctctctcattggcatggtatggtatggtatggtaatgctgactgggttcactaaacctacatccggcacggcttatattgatgggatggacatacgaacagacatgagcgagatctacacgagaataggcgtttgtccgcaattcaacttgctatgggaaacactgaccggccgtgagcatctgatgttctatggcagactaaagagactgaacggcgctgcattaactgaggctgcagaacaatctatgaaagtactgaagatattcgagggcggtgtcgccgacacgctggtttcacagtacagcggtggcatgaaacgccgcctcagcgtcgctatctctctgatcggggaccctaaggtggtgtacttggacgagccaagcacagggttggatccagcgtcaaggagcgccttgtgggacgctgtgaagcttgccaagaaggacaaagccatcattctcacaacgcattccatggaggaggctgaggctctgtgcgaccggatcggaataaccgcgcatggacgtctccgctgcaccggaacctccaaagagctgaaggccaagtacggcggcacgttcgtgttcacggtgacgacggcggcggcgggcgaggacgaggcggtggagcggctggtccgcggctccatctcgcctgacgccaagcggacgtaccacatcgccgggacgcagaagttcgagctgcccaagcagggggtcaggatcgccgaggtcttccgcgccatggagcaggcgaagcgctcgctgagcatcgccgcctggggccttgtcgacaccacgctcgaggacgtcttcatcaaggttgctgcttgctaa

SEQ ID NO: 124920 - DNA, 450 bp, Zea Mays
atgccgcgccacctcgcgctccacgcgatcgccgcggcgctgccggcggcgtcaggtccaggcagccgcctcggcgggcccgcggtggccgccgcggcagcggcgttcctggcggtgtgcgcgctggcgctggcgctctgcgcgtcgcactcggcgccggggcccgggcccgggcggctgcggcgcgcgctggccagcgtgagccggcggcggacggagccggtcatcgcggccgtgcaccaggtgcagcccggcggcggggaggcgtcgccgtgcgtctggcagaagggcatcctcatgggcggcaagtgccagctccccgacttctccggcgccatcaactacgaccccgccggcaacctcgtcgcgcccgcccgccctggccgcgccgtgcccgccgccattgggcttggctggtgaagactgaagactgatgaggatttgatcaag

SEQ ID NO: 124921 - DNA, 1334 bp, Zea Mays
ttgaaaacatgagttatatgctctgaaacattttaataataccaaaacatgagttcatatccatagttcacccaaccataactcataaccatagttcatcaccagcgatgttcaagtacacaagcaaaatcacaacacataaccatagttcatcaaacaactacgatacatgagttcatatcaccatgacataccaagttcaattcatcaataaaatagtttacaaaatcggaagaaggatgctcactgccattgttatggaaagagtatagtagcacagttaccggtttcttgttgcatagaattccgccaagcagagagtaacatgagacaacaattgaagaattaaaagtttaagaaacaaaacatgattcttgttgctcgtgcgtagaattcacattcacaacagtgccatgaatgccagtgctagctctgctgctcgtgcgagcacaaagcaacaacagaaaattcccagattcttgctgggattaaactgattcgcagtaatctttttacagattgcatttggatatattcgaataaaatggcttttgtgcaatcgggcgttggtaaccagcttggatttgtcttgttatcacaactgagcatggtgaccatccaagtggagtgaagattcgtccaaacaagaattattagtgttttcctgacaggacagtacttctttggatggtattaaaccaagagacaagacaacactaataaacaagaattattagtgttttcctacaaggccaaccgtgtctgtggtggccgccaacgccttgggcggtgccgccacggccgcgacgcttgccaacggcatgggcaccgcgtcgtcgtccaacacgcagctgcccctgccacagcaaccctatcgtcaactagtatctatcgacgcgtcgctgctgttgctgcctgatcagacactacgtctccactacgaccagatccggcgacggacggacacagagacgtgcacaatacctagctgccgggtcttttctgccatttcccacttctcttcagatccatcactgtgaagctccctgcacccagcagatctggtgaagggaggagaagacagagcagatctgctgacggcgtggaggaaggtggcgatggcagaagcacaaatagtggaggaggaaaggggccggtgggggaagagaagagggggcctggaaggagaagaggtggtggcagattcacctgatttgacggatgacggcggacgggcggagctcctcacggcggcggtggctcaaggatgcactgctcgcgtgagagagaacggaggagtagagagaacgagagcgctcaggtccggtcgattt

SEQ ID NO: 124922 - DNA, 270 bp, Zea Mays
atgcccagcctcctctcttgcatgcagtgtccagccattcgtagctcagctttcttggccgccgccgccggcggcaccctccacaggtggaatgaccatgtcaggcttgtagatgttgtggacgatggaggcgccaacgaggagggaggcgacgatgacgacggacgaccacgcgagggacggggtccccgtcggcacccgcccgccgccgaacctcttgccaccggtcatcctcctgggagtccgacgcctgtaccaaatggccaccta

SEQ ID NO: 124923 - DNA, 2897 bp, Zea Mays
gttgcagctgtttggactgctgcagctgcaatccatagagagaaaaatactgtagaagccgcagccgcagccggattgcagccgcagcaagccgcagcgaacaagctggtaatcaccacctgtcgtcgatttagcactcgtcagaaatcattagccagctagctgtctagacaccgccttccccgcgaccggctgcacccggtcacttcttctccccacgcagtcacctccccgcaaaccccacgaggaaaaagtttctttttttctctgttaaacacgcgcatcgaagcaagccagcagcaacaaaagagacgagccttttcgctcgccgctaccaccacctcgttgtctcgcctccgcctcggcctcagcacgcgcgcgggatctcgcgctcgctcgcgcaccgaggagcgcgcacccacccgcagggttcggggcggggtgatccggtggtgatggcgagccggatcaaggaggacgagaggcacgagaagatcatccgcggcctgctgaagctgcccgccaacaagcgctgcatcaactgcaataatttgggaccacaatatgtctgcacaaatttctggacctttgtttgtaccaattgcagtggatcacatcgggagtttacacatcgagtaaaatctgtttccatggccaaatttaccgcacaagaagttgctgcccttcaagaaggggggaatgagcgtgctagagaagtatttttcaaggaatgggatcctcaacgaaatggataccctgacagcagtaacgctgacaaattgagaaatttcattaagcatgtgtatgtggaacgtagatacacaggagaaaggagtactgataggccaccaagggcaaaggatgacaaggatgagtatagtgaaaatagaagatctgatggaaattggggtggttcgagaagtccgccaaatggaagttactctgatcgtcagaattatagcggacggagtgatgacagaaattccagatattcctatggggaccgtagtcctggctatgaccaaaatgactataagagaagtcctcgctactttgaggttggtgataatagatctggaaaaataactccaattcaagggtttgaagacaggaggttttcagagcccagaaagcgagatagtgggtctccagacttccagaaagaagctgatggttctagtcctgttgtacggccagtgagggatatattgggtgacaacgctcctcaacttcgggtcggtgaaccttcaaagccagctactgagcctgcaaagccaactgtagtcagaccaattgatcctccaaagccaagtgtagtcagaccaattgatcctccgaagccaaatggaaccagggcaattgatcctccaccactgacaaagacaatatctagtgccagcagcattggttctgcagaagggacatcggaacagacaaaggtggcaagtgcagtgagtttgattgatttcagtgcagatcctgaacctgagtccacagcaccaccacagccggcccctatgacacaacagcctccagttaatgcagtagcaccacagcctgttcttgaacaaaggaaaagtgctccttctgtcagtggtggtgattgggcatcttttgatgcttttggccaacaacaaacacctcaaacaagcagcagtgtaaatccccttgagtctgcacttgcacagctgtcattctctgaagcaccctctgcaccaaatgtgtcagcttatcctgtttctctggatcccactttgaaagcaaatgatggaggatattcatctgtgctagatcagtcacattccttgtttgatgcaccctttggaatctcaggcaaccaggcctcaacagtaatgtctggccaagaaacatcggttcaacaatcttctatagctgcccctacggctggacttccatctcaagctactgcaaatcaacaaggaaccagtggtattcaaggagcagcttcttctactgacagtaaattcagtggcaggaaagaacttccagcggatatctttactgcactatatccaccatcaactccaatgatgcctggttggcagagagccccccattttggaatgggatacgccatgcaatatccacctggagtgttccagggaatgcaagcatatcctcagcctacatatcagcaacctgtatattcgcaacatgcatattcccacccccaacctgtgaaagcttcaaacccttttgatcttgggaatgggccagctccaactcaagctcacatgcccccatctggaccaccaggagtattagcaggcccagctccccaaaccttaattagcaactctagttttggtgttcctccacagcagcctcaccagctctatcaatcagccgcacatccaagccatttcatgatgcagcaagttccgaacagcatgcccatgcccgagcaacaacctaatagcatgcttgtaacgcaacaaggtttgggatacctccagccaaacacccccccaccttcatacggctccgttgggggtagtaatccattcgggtaaaagaagtgtgggaacacctgctctttcatctctagactaagggtctgcagcactcagcgggacagacatgcatcgaagccctcgagagaatgtgttccatacaaccaggtggtgtattctgtcggctgtgatatgttgtacaacttgtttccaagggcgtcatcatcgaatgtaactctgttttagagggcctaagctgctttcagcctcactccttgtatattgtgtctgcttgaattgcatagtatgtatattttgtgatccttcgttgtccctgtcactatcactagacatagagcatttagcgataaaatgactgggcttaccacatttgcgtcgatgggaagcctacttgatgtagac

SEQ ID NO: 124924 - DNA, 2908 bp, Zea Mays
gttgcagctgtttggactgctgcagctgcaatccatagagagaaaaatactgtagaagccgcagccgcagccggattgcagccgcagcaagccgcagcgaacaagctggtaatcaccacctgtcgtcgatttagcactcgtcagaaatcattagccagctagctgtctagacaccgccttccccgcgaccggctgcacccggtcacttcttctccccacgcagtcacctccccgcaaaccccacgaggaaaaagtttctttttttctctgttaaacacgcgcatcgaagcaagccagcagcaacaaaagagacgagccttttcgctcgccgctaccaccacctcgttgtctcgcctccgcctcggcctcagcacgcgcgcgggatctcgcgctcgctcgcgcaccgaggagcgcgcacccacccgcagggttcggggcggggtgatccggtggtgatggcgagccggatcaaggaggacgagaggcacgagaagatcatccgcggcctgctgaagctgcccgccaacaagcgctgcatcaactgcaataatttgggaccacaatatgtctgcacaaatttctggacctttgtttgtaccaattgcagtggatcacatcgggagtttacacatcgagtaaaatctgtttccatggccaaatttaccgcacaagaagttgctgcccttcaagaaggggggaatgagcgtgctagagaagtatttttcaaggaatgggatcctcaacgaaatggataccctgacagcagtaacgctgacaaattgagaaatttcattaagcatgtgtatgtggaacgtagatacacaggagaaaggagtactgataggccaccaagggcaaaggatgacaaggatgagtatagtgaaaatagaagatctgatggaaattggggtggttcgagaagtccgccaaatggaagttactctgatcgtcagaattatagcggacggagtgatgacagaaattccagatattcctatggggaccgtagtcctggctatgaccaaaatgactataagagaagtcctcgctactttgaggttggtgataatagatctggaaaaataactccaattcaagggtttgaagacaggaggttttcagagcccagaaagcgagatagtgggtctccagacttccagaaagaagctgatggttctagtcctgttgtacggccagtgagggatatattgggtgacaacgctcctcaacttcgggtcggtgaaccttcaaagccagctactgagcctgcaaagccaactgtagtcagaccaattgatcctccaaagccaagtgtagtcagaccaattgatcctccgaagccaaatggaaccagggcaattgatcctccaccactgacaaagacaatatctagtgccagcagcattggttctgcagaagggacatcggaacagacaaaggtggcaagtgcagtgagtttgattgatttcagtgcagatcctgaacctgagtccacagcaccaccacagccggcccctatgacacaacagcctccagttaatgcagtagcaccacagcctgttcttgaacaaaggaaaagtgctccttctgtcagtggtggtgattgggcatcttttgatgcttttggccaacaacaaacacctcaaacaagcagcagtgtaaatccccttgagtctgcacttgcacagctgtcattctctgaagcaccctctgcaccaaatgtgtcagcttatcctgtttctctggatcccactttgaaagcaaatgatggaggatattcatctgtgctagatcagtcacattccttgtttgatgcaccctttggaatctcaggcaaccaggcctcaacagtaatgtctggccaagaaacatcggttcaacaatcttctatagctgcccctacggctggacttccatctcaagctactgcaaatcaacaaggaaccagtggtattcaaggagcagcttcttctactgacagtaaattcagtggcaggaaagaacttccagcggatatctttactgcactatatccaccatcaactccaatgatgcctggttggcagagagccccccattttggaatgggatacgccatgcaatatccacctggagtgttccagggaatgcaagcatatcctcagcctacatatcagcaacctgtatattcgcaacatgcatattcccacccccaacctgtgaaagcttcaaacccttttgatcttgggaatgggccagctccaactcaagctcacatgcccccatctggaccaccaggagtattagcaggcccagctccccaaaccttaattagcaactctagttttggtgttcctccacagcagcctcaccagctctatcaatcagccgcacatccaagccatttcatgatgcagcaagttccgaacagcatgcccatgcccgagcaacaacctaatagcatgcttgtaacgcaacaaggtttgggatacctccagccaaacacccccccaccttcatacggctccgttgggggtagtaatccattcgggtaaaagaagtgtgggaacacctgctctttcatctctagactaagggtctgcagcactcagcgggacagacatgcatcgaagccctcgagagaatgtgttccatacaaccaggtggtgtattctgtcggctgtgatatgttgtacaacttgtttccaagggcgtcatcatcgaatgtaactctgttttagagggcctaagctgctttcagcctcactccttgtatattgtgtctgcttgaattgcatagtatgtatattttgtgatccttcgttgtccctgtcactatcactagacatagagcatttagcgataaaatgactgggcttaccacatttgtagcacactttcttggagcggggtttataatccttccccc

SEQ ID NO: 124925 - DNA, 647 bp, Zea Mays
cccggtcccagcttggcctctgctccaacttccccagccgcacccagccgaggtccctcccacgtgcacagcccctcacccatctcccatggccgcaccgctcctctctctcgcgctcggcctctcaccggcagattccctagtcgtgagctctggcgccggctgccccttcgtgctcgtctctggagctcgcccgaccccaagctacgctcgcccgtggccgtcgaacttgctcaagtccggtcatcctcaaccttcggtctttgctcatcccagccgatgcccatctccctccaactccaagccgagctcgtctccactactccagctgcaagccgccggccatggtgctttccctggcggccatccggttatgcgtcgttgtgcctttggtcttgctcattgtcgaacgccattacctcgccgaccgcgaccctatctccgttcttcaagtcgcccagccctctgttgggtccgctagcgacgaccgtcgtagagcgctgctcgacctcctccatgcacgaacagcagcaacctcgagcctcctctgcgtcgtgccatcgacccgctcgatggaatgccgcagcgagctctacccgatctgcaatgcctgcgcaccatcgtcgaaatccccgcaaccgtgttga

SEQ ID NO: 124926 - DNA, 82 bp, Zea Mays
ccttcctctgtgcgcctctccctggggctgagctccctcacgctcagatctctcccttgctcctgcagctcgccctctcttc

SEQ ID NO: 124927 - DNA, 3836 bp, Zea Mays
ccgcagcagccagcagcatgggaatagacactctttacagacctgctcgcccgtctcgtccacacgcaaccacaaatcaacgagacctgcatacatcgataaccctaaaaccccaaatcgcccatttcccgattcgcatcgccgccgccgccgcggggcttaccggctggtgccgccgagcgctgggctcaccgcgggccgacgccaccgccccacgggccacggcttccctcgatatgtctgcattttgaagtttggtaaatagcattgttatatgtgccaagagttttgggagttactggcataatggaattctcaaagcaagggcaggcacccatgccaaacaacatcggactacaaccgctgccctcttcaaatgtccaatctaatcaaacagagtatccatctctgttttatccatcatcattgcctggtgactggagttcacatatgggaacctcagtaccagttagctcatattatattgtccccatgaatcagcaatcagtccagctaggtgcttcgaggccagaggtttcacatccggcacaacctttgctaagtagggtatcattgaggccaccccagcaggtgctaaatattcaaacatctttgccagcaatggctggatcacaaccctcaccatctatggcaggcaggaaatcacaacagaaagttgcttctccaaaggttcaaatgctgaaatctccatcattccagtcatctaataagcggtctgcacagaaggagctaccgtcaaaggtccagcatcatcaacttgaatctgttaggtccaagttcagggagtcacttattgctgcgctgagtttggatttggatcagcagaataggagtcagtctcctgataatgtgcagtctgatggttctacagataaattcaaaccagcagcaggagatgtggtacaggatttagcggcaaacacatcaaaagatgtgtgcacaaccaattcaggtgtagccacaactgtagctcccagtagatgtgaggaaaatgagaagttaatcagtggtttagcttcagagatgaccatgagcatcaacgatgacatgcagcaaccatcaaatcaggtttcttcagaagacgacttattgggtcagtgtatggttgcagatgaacttttgcaaggtcacgggcttagttgggtttctgatcatgttgccgggatttctaaacctaacgcagaacctaatgatttaaaaaggccgcaaacttctgatgtggagtctgagtcaaaaagaataaagtctgctaatgaattagcaatggatgaggagaaatttaatcaaagggctgaaagtttggcgtttagaattgaagaggagctgttcaaattgtttcgtggggtaaataagaagtacaaggaaaagggcagatctcttttgtttaatttgaaagacaaaagcaaccctgagctaagagagagggttttgtctggagatattgcgcctgagcgcctttgttcaatgactgcagaagaacttgcctccaaagaactctcagagtggcggctggctaaagctgaggagtttgcacagatggttgtccttcctaatatggaggttgacccaaggcgtttggttagaaaaactcacaaaggagagttccaagttgaagtcgaagaaccagatggtttctcagtggaggttgaacttgggagtaatcttactaacattccatcaaaaaccgtcgaagatcaggccaagtctaatggaacagatggtaaagaagatgttcaagaaaaagacaaagcatctgatggcacttcacaagatgagggtggcagaacaggcaacaatgatatgccaggtgatgtacaatatatcgataatgagaaagctgatctcatgcaggaacttattttggatgacatgaaggacaccgtaaatctcccaccgatcccttctttagatgaattcatgcagggcttagattccgagccaccttttgttgatctctcagttgggactcctcaagaagatgtcaatgactctgaggaacctggcaccaccatggagcctgaggaccttccagagacagaggataatgcatctacaccagagaaatttgaatctgaatctgataaatcatctgcacaggttaacagcgagcctaagctagagtcaccaggagatacagcggttccaaattcggatcttactgaaccacgtgatggagagctgaataaatcctccccctcccatggcaaaggtgaagccaagaaaacgacgactgataatgcctctaatcctgactctgttcatcaggatcaggcagccagtatccctatgatacgtgagagcatatgggaaggtgcaattcagctgaacgtgtcttcactctctaatgttgttgctattttcaaaagtggtgaaaagccatcattaaaagtttggcgtagctttgttgagattaagggaagagttaaacttagtgcttttcaagaatttgtcgagcagcttcccaaatctagaagccgtgctataatgataactgagctgtgttggaaggagggttcatcagagagcggccgccaacatatcctgcagactattgatgcatacatttcagatgggagagtaggattagctgagcctgcagaaggaatagagctgtacctgtgcccttctcatgggaaaaccgtggaaatcctctcacggcacttgccaaaggagcaccaggagagccttgctgtggcgggatcatccttcatcggagtcgtcgtatggcggaggcccgacattcctagggtacccacctcccgccacagacatgatggttccaaaaggcagtcgatcctagggaagccaccggttacaaatccagcagccgcaaggccctccctacctctcaactcttatggtgcgccaccaggctttcccaaccagcgccaccaggaggaggaagatgtagctgacgatgcccctccgggctttggacccggtgttgctagggatgaggatgatcttcctgaatttaattttgttaatccgacacaccatgctgctaatgtaactgcgcgtgcctacatgggtcggccacatgtaccaccaccctccgctcgcccagcagagcaaatgagggaactggttcagaagtatggtaaaagatcatctgttcaagccccacgtacctgggatgacgatgacgacgacataccagagtggaaccccagccagacgattaaacagccaccgccactgcctcacgccccacagcaacagccgttgcctccacctcccgtccagcagatggacgcctaccagcagcagtaccacatcacaagtgcagtgcagcctcaggttcccgtcgcatcgctgacccatgcctacctccagatccagcagcctgggcaggcatggcagcagcctagcaatccttggtggccggcgcagggagttgctgccgctgccgcacagatgacgaacattgtacatcatcaaccacagtatggtgtagtgcctggcagtagcggcgtccagggctacgactatagcagtgcgagtggtatggcatggaggccgagataggacactgtaaaattcagctggttttcttctgtagctgtggtctacctgactagcgggtgttttttattcccttttttttggttagctgttcatgtaagtatatgagtggtgttcgcccgtacgaaggatctaatctggatggactagatagttgctggctgtatccgtctatccagcaatccgttttgaacagtagtctgtcttcagctaggcgctgccagcaataacaataatgtaccgcaaagtttctgaactatatttatacatttcatggcatttggtgggac

SEQ ID NO: 124928 - DNA, 5633 bp, Zea Mays
cgaacatctctccctctcccttcctcttcttcacggagagcagcaagctacacgcctagagctacaggcctacagcaaaaagacaaagaacacagagtcaagcactcaagctcaagcagggagaagtgttcgtcaggaaagacaaaaaaacggagggggtttgcatcgccggcgggaaagaaaaaaaaaaccgaaccgaggccctgagggcgcgcgaggatggacttagtgcagatggggagcatcgccggcgggagcatgcggcggacggcgtcgtcgtggcgggcgtccgggcggagcgacgcgttcggccggtccgtgcgggaggaggacgacgaggaggcgctgcgctgggcggccatcgagaagctgcccacctacgaccgcatgcgcaagggcatcctcacggggaacgcggccggcgccggcgtcgaggaggtggacatccaggggctcggcatgcaggagcgcaagaacctcatcgagcgcctcgtgcgcaccgccgaggaggacaacgagcgcttcctgctcaagctccgcgaccgcatggagctggttgggatcgataatccgacgatagaggtgcgttttgagaacctgaacatcgacgccgaggcctacgtcggcaaccgaggtgtccccacgatgaccaacttcttctccaacaaagtcatggatgtactaagtgctatgcacatcgtctctagcgggaagaggcctgtctccatccttcacgatatcagtggggtcataagacccggcagaatgtccttgctgcttggccctcctggatccgggaaaacaagtctacttctggctttgtcagggaaacttgactccaatctgaaggtgtcaggaagagtaacttacaatggtcatgacatggatgaatttgtccctcagaggacatcggcgtacatcgggcagcacgatgttcacgtcggcgaaatgacggtccgggaaacacttgccttctccgcaagatgtcaaggagtcggaacacgttatgacatgcttactgaactttcaagaagggagaaagaagccaacattaaaccagatcctgatgtcgatgtttacatgaaggctatctccgtggaaggtcaggagagcgtggttacagattacatcctcaagattctgggtctggagatctgtgcggatacaatggttggagactctatgatcagaggtatctcaggaggacaaaagaagcgtgtcactaccggcgagatgcttgttggtccagctaaggcgctattcatggatgaaatctccaccggcctggacagctccacaacatatcagatcgtcaactctctaaggcagtcggtccacatccttggtggaactgcacttatcgcattgcttcagcctgcgcctgaaacatacgagctcttcgatgacattgttctcctctcggagggccaaattgtgtaccagggtcctcgggagaatgtcctggaattttttgaggtcatgggcttcaaatgtcctgagagaaaaggtgttgcagacttcttgcaagaagttacatctaggaaggatcagcaccagtactggtgtagaagagacgagccatacagatacatctcagttaacgacttttcagaggcattcaaagcattccatgttggccgtaagctgggatcagatctcaaggtgcccttcgatcgcaccaggaaccatcctgcagctctcacaacgtcaaagtatggtatcagcaagatggaacttctcagagcatgcttctctagggagtggctactgatgaagaggaactcatttgtttatatcttcaaagtagtccagctcataattcttggaacaattgcaatgacggtcttcctgcgcacaacaatgcatcgacgtggtgtcgaagatggggtgatatttctgggcgccatgttccttggactagtcacacatttgttcaatggttttgctgagctcgccatgagtatcgcaaagctgccgatattttataagcagagggacctcctcttctatccatcatgggcatatgcatcgcctacatggttgctaaagataccaatatcattcttggaatgtgctgtgtggatcggcatgacttactatgtcattggctttgatccaagcatcgaaaggttctttcgccattaccttctgcttgtactagtcagccagatggcatctggtcttttccggcttcttgctgcactaggaagagaaatggttgtcgcagacacatttgggtcattcgcgcagcttgttcttctgattcttggtggcttcttgatagcaagagataacattaaaaaatggtggatctggggctactggtcctcccctctgatgtatgcccagaatgccgtagcggtgaatgagttccttggccatagctggcagatggttgtcgataggacacatagcaacgacacactcggtgttcaaatcctaaaggcccgtggcatttttgtcgatccaaactggtattggattggtgttggtgcattgcttgggtatatcatgctcttcaacgtactcttcgttctgttccttgattggcttggcccacttggaaaaggtcaggccgttgtttctgaagaggaactgagggagaagcatgtaaaccgtactggtcaaaatgttgagttgctgcctcttggaacagcttcccagaatccgccttcagatggaagaggagaaattgctggagctgaaagcaggaagagaggaatggtacttccatttacgccgttgtccatcacctttgacaatatcaaatactcggtggacatgcctcaggaaatgaaagataaaggtattactgaagatcggctactgctgctgaagggtgtaagcggagccttcagaccaggagtccttacagcactgatgggagtcagtggagcgggtaaaactaccctgatggatgtattggcgggaaggaaaactggtggtcacattgaaggagatatttcaatctctggatacccaaagaaacaagagacctttgctcggattgctggctactgtgagcaaaatgatattcattctccacatgtcactgtttatgaatccctcctgtactccgcatggctccggttgccccatgaagtggattcagaagcaagaaagatgtttgtggaagaagtcatggaactcgtggaattgacaccactgaggggagcattggtaggactgccaggagtaaatggtttatccacagaacagcggaagagactcactattgctgttgagctcgtggccaacccatccatcatattcatggacgaaccaacttctggactagatgctagggcagctgcaattgtgatgaggacagtccgaaacacggtggacaccggaaggacggttgtctgcacaatccaccagcctagcattgatatctttgaagcttttgatgagctatttctgatgaaacggggaggggaagaaatatatgtcggacctttgggacgcaactcatgccatctaattaactactttgagggaatagaaggagtaaagaaaatcaaggatggttacaaccctgcaacatggatgttggaagtgaccaccttagctcaagaagatatccttgggatcaactttgctgaagtatacagaaactctgacctataccggaggaataaagatttgattagtgaactaagcacaccaccaccagggtccaaggacttgtacttcccaacccagtactcacagtccttcctcacacaatgcatggcttgcctgtggaagcagcacaagtcttactggagaaatccatcatataccgcaactaggatcttcttcacaacagttattgctctcatcttcggaactatcttcttaaacttgggaaagaaaattggcactaggcaggaccttttcaattctttggggtccatgtatgcagcagttcttttcattggaattcagaatggtcaaactgtgcagccaattgtggatgtcgagcgaacagttttctaccgagaaaaggcagctgggatgtactctgctctaccctatgcttttgcacaggttcttattgagatcccacacatcttccttcagacagttgtgtatggtctcattgtctacagcctgattggctttgattggacagttgcaaagttcttctggtatatgttcttcatgttcttcaccttcatgtacttcacattttatggaatgatggcagtcgccatgacaccaaacagcgacattgcggctatagtctcaactgcattctacgcaatatggaacatctttgccggcttccttatcccccgcccgaggataccaatatggtggagatggtactcgtgggcttgcccagtggcttggacactatatggacttgttgcctcacaatttggagacatcgcagacatcaggctggaagatgacggggaactagtgaaagatttcgtcaacagattctttggattcgagcatgacaacttgggttatgtagctaccgctgttgttggattcactgttctctttgctttcgtctttgccttctccatcaaagtcttcaacttccagagaagataagggagggcgtcatccaaaaaggatttggtgttattccagctcacttcagtatataggtcctgcagcaatgtaaagtgacgagaaagagtgtatacttagcctttgtttatttctaggaagtttgacttcattttttgtattccggccagtttggcctgtactgaacagaaaagggcttctgtgtaaattgtatgtagtagactgtgcacagctgggttcaatacttcaatgtaagatttttccattaaatttataccttttgtccaactgagactcgcctccaggaattaagtccatggcagaataacatgagaaaaaaaagaaggtagtgtctatatggctatggcagtatggctagcggatcgtgtatatatggtcatacaaaacattgttttatattgtagactatactgtttataatgcaaagtttaaaataaaagataaagtcatagggatgggtaagctgctggggataagaagggcatttgggttcagacacatactcaataaatattaggaacagtggagtattcagaagcaacacccgtgtcactgctgacggacagcaattctgccactaagtcgctaggggtcctaaattgcgtgaaatccgagcccaattggtatcctggacaacatcctaaaatgacgtgaaatctgagcccaattcaattggtatcctggaggacctggacaaggacaacatcctaaaataacttgtcgaaatttctatgcagaacccagaatggtgcaccgaccagcgaaagagccgaaacagccgaggaacgaacacgcagtgcgtgttcgcaactcgcaaacccttcctaaaccacaaaccaacctcttttccccatcggcaggcttggatcacattttgcggcgcaaaactgttcaatgggagctgcaggcagccgccgcagggcgcagctcccattgcttgcgccagccgccgcaggacgaagacggaaccgccagtccgccaccgcaggttgggtgcggattgcggaacaagccgccgaagaggcaacggcctagagcctatgtaacgcacccgtcagtccgtccaaaggctactggccgcg

SEQ ID NO: 124929 - DNA, 1164 bp, Zea Mays
cttgatttcgtttatgatcatactatcaaaggcaagtgttatggtttaaaaactttcactcaccccagagctgctgagcaagcaattgcaggcatggacggcaagaaattaggcaatcgtattattcgagtaaatgaagtgcgtacaagaggtccccgagattttggtcgagatggttttagacgagatccaagaaggtatggtagagatccatactgggacagaagggatagggaacagagctatgatcgtgaaagagatccctaccatgacagggatagtgatagatcccgcgagcatgatagagaaagagattatgagcatggtggctttaatagagaagttgactatcccatggatcgagatcatgaagtagacgacatacatcctagagaacatgatcgtgcagcagaaacacataatatggattcagataatgacaaatataaggaacatggatcaagaaaaaggttcagccacccaaaaggtcgtgatagcaaagatttatcgagttccagtgatcttcaaaatgatgggaaacaccagttggataaaactattcagatgcgtgaggaccttgaaaatgaggttagccagattaaggataaaatctctgcgaaaggacaacacattgcagatttgcagaagaaagctcagaaattagaggacgaactggctgctgcacggaaagtctcttcagaacgacaattagctgttacagacctgtacaaacattttcttcaactccaagactacaacgatagggtcaaaacagctgaacataggctgcagtctcttgttgacgctgccatggccgagcttgacatggccgaagatgctactaccagagatggctcgatgtatgagaacggcgtggtttgaacacccaaagggggctgccagctgtcatgtcacggcttgtgaggtttactaatttgttagatttgtagtttggatttgccatgtataatagaactgtactgtaactagaaacgggaaaatgttgtgtaaggatcagggaatgaatggctgcacagtgcacatttgctatggcttgtttttttttttcaaagttgaatttattagccggcctgactattgctgatacggtatgatctgccctaatatcagagctgttcagttaggcaggtttgacttgagaaa

SEQ ID NO: 124930 - DNA, 1158 bp, Zea Mays
cttgatttcgtttatgatcatactatcaaaggcaagtgttatggtttaaaaactttcactcaccccagagctgctgagcaagcaattgcaggcatggacggcaagaaattaggcaatcgtattattcgagtaaatgaagtgcgtacaagaggtccccgagattttggtcgagatggttttagacgagatccaagaaggtatggtagagatccatactgggacagaagggatagggaacagagctatgatcgtgaaagagatccctaccatgacagggatagtgatagatcccgcgagcatgatagagaaagagattatgagcatggtggctttaatagagaagttgactatcccatggatcgagatcatgaagtagacgacatacatcctagagaacatgatcgtgcagcagaaacacataatatggattcagataatgacaaatataaggaacatggatcaagaaaaagccacccaaaaggtcgtgatagcaaagatttatcgagttccagtgatcttcaaaatgatgggaaacaccagttggataaaactattcagatgcgtgaggaccttgaaaatgaggttagccagattaaggataaaatctctgcgaaaggacaacacattgcagatttgcagaagaaagctcagaaattagaggacgaactggctgctgcacggaaagtctcttcagaacgacaattagctgttacagacctgtacaaacattttcttcaactccaagactacaacgatagggtcaaaacagctgaacataggctgcagtctcttgttgacgctgccatggccgagcttgacatggccgaagatgctactaccagagatggctcgatgtatgagaacggcgtggtttgaacacccaaagggggctgccagctgtcatgtcacggcttgtgaggtttactaatttgttagatttgtagtttggatttgccatgtataatagaactgtactgtaactagaaacgggaaaatgttgtgtaaggatcagggaatgaatggctgcacagtgcacatttgctatggcttgtttttttttttcaaagttgaatttattagccggcctgactattgctgatacggtatgatctgccctaatatcagagctgttcagttaggcaggtttgacttgagaaa

SEQ ID NO: 124931 - DNA, 554 bp, Zea Mays
gagtatccgacagtttcgccttcccgtctttccctctccccccacacccgggtcgtcgtcgtcgcggcgtgagcgtctgagcgagcgtgcgagagcgagaggggggaacacaaaaccctagcaccgtcgccgacggacgccagagtagagagatggcggtggacgaggtgaattcggtctacgtcggcagccttccctacgaggccaacgaggagatgcttcgcgacgccttcgggtactacggcaccatcgtctccgtcaaggtccgccccgctcctcccccctctagtctccgtttagccatctcccgcgtttgctatctgtcatggcctcggttggtgacaatggagcagtcacggaagctacggggattgcaacttctgctgaaagggctattgccgggtgaggaggagatgtgggattattcccatgtaatagggatgtcatggcctcggctggtgacaatggagcagtcacggaagctacggggattgcaactactgctgatggaagggttattgccgggtgaggaggagaagccatgtaaaggctga

SEQ ID NO: 124932 - DNA, 2525 bp, Zea Mays
atttcagatgaaacttgtgttctacctcatgatgatcgtggtctcttgacaacagcagatactggatccaaagctagtggctcccagttctgcattactttcaagcctaattctcatcttgacaggaagcacacagtttttggcaagcttgttgttggaagtgatgttctgaagagaatcgagcaagtagatgtgcaatcccctgattcaactcctgttgttccggttactatagtaaattgtggggagctcactgaccgtaaagatattggatctatgagaataggaattgataaaaagagggccgccaaatcaaagttgtcaaagggtatatcttctgatgaggaaagtaatgaaggacagcacaagggccgccgtaacaaatcttcaaaaaggagaaggaagaagagatatttttattcggagtcagatagctcttctgagtcggagactgaatcatctgattctgagagcgattctgatacttactcaagtgactcatctgatgtcagcagttcaagtgatgacaggcgaaggcgcagaaagagacattcgaagaaaaataaacgcaagcgttcaagaagaaagcatgaccaaaggcgtgaaagaaggcgtaggaagcgtgataggaaatcaaaacagaagtcaaaaagcaggataaagggtgacagtgaagctgaaagttcgagtgatagcagctctgaagatgctagaagcaagagacaccgccacgggcggaagtccaaggcatcatctcaagtttttgaggaaaatattgctgcagtgtctgctttgaaggatgccacgtcacctcaacaaaagagtggcataccaaacagtccagcacaagatgtctccccgctgcaaaatggggaaaactatacaaatggtgttaacgaatcaaaaattgaaaggaatgcagctgtcatgcctgttctaactggcaaccaaagcaaatctaggagccagagcatgagtgttaatcactcaatgagcaagagtatgagcatcagcccaagaagaagcccaatgaaaaggtcaattaccaccacaaagaggtcagttagcaggagccctgttcaccataatcgcagtggaagtcctgtcggtgctccccaaaaaagcgtgagcaggagttcagccagaaggcagagcatcagcaggagccctgctaggagcctcagcaagagcccacccagagatgcaagcagaagcccccacataagcaggactcctgttaaagctcacagaagaagcattagcaggagctcagctaggtccatggaacagagaagtctaagcaggagcctggagagaattcatgtacgaaaaagtgtcagcccaagaccaccattggcgaagccaaaaagcattacccgaacccctgtgacatctccattgcgaagcgttagccggagcccagctaggatttcaaggagcccacttaggccttctaggagaagccctatgagaagtccacgacggaacattcacagaagtctcagcaggagccctgcaagaatacttagaagtgtgagcagaagtccagtaagaggtggtcgacctcgccggaacattagcagaagtcccagtccacttcgcagggcattaacaccaccaaacaatggaaggagccgatctaggagtgattctcctgatgggtcacccaaacgcataagacgtggacgtggttttactcaacgctattcatttgcaagacaatatcgctcaccttccgctgatcgcttgcatcgttatggcggaagaaatgaccgtgacagatacatgggttaccggggttttcgccaccgatcacctcctcgacgttataggagcccctctagaggcagagtgtcatcgccaaggtacaggaggaggagccgaagcgcatcacgcagtcctgtccacagaggaaggagaggtgggtacaacaagagtcctgtacggagccgttcaccccccgccaggaaaaggtcacctagcgatcgtgcacggtcagtttctaggagccacctttctaggtcagtatcaaagtctccaccagtgcatcatccctccccacttgattctccatctctggagcgtgcaagtgatgggaaatctcggtccccatcaccgtctggtggaggcaagaaaggtttggtttcctacggtgatggcactcctgattcagctgggaagtaggtttccaccggatgtattgtactacctttggccattgtctcttgatcggtccagtgttacgtcactactgtagagaagagaacggttttggtccttgaggcgccccgtgtactggtgttgtcgctgtagaattgttacttaagttgtttgggatgatcgtcgttgtccttagattatcttaagacctagtactctgagcttagtttacgctcatgctgaacatgtagcagggcttcagcttaattaccattggtggaatttggatgttataatgtttgacgcatagagaatcattacattattttgatctcggagcacaataacatgtataattaataatt

SEQ ID NO: 124933 - DNA, 2705 bp, Zea Mays
ctctcttcctcctcacttcccacccaccctcgctcgttttgttctgtctctctttctcctcactccctccgtcgatcctctgcagcttgcatcggtcgaccagtagtcttccactgatttgaggctgtcatagtatgctctctgaccgtgctggcgggaggaaggagatgatttaagttctctgcgtttataaccagaaagaggaggataatccaatcatgtgaaatttatatttgcctgttcccaccatactgtaatatgaatacaaggatggcttgatctggcaagtgctcgccattctatgggcccatcatgcttttcgagtacactgtttgatcacaaggagcggtctgctgccactaaacttcaagttgttgatcatgatggcctgaaaaattatcggggatatgctcatatgccttggccttaatttaaactacttgtatgagatggagaaatgtcacaaaacacaggatgaagacgactccaggaatccacccatgcctctcagtgactcagtggcacaaacgacagcctagtcagccttcagcgatggaggcctccacagaagctactaggatggcctccagcttatgacctctcactgccgaccgcaccttcctcagaatatgttgcttcatcaccgccctctcagcagactggagtttcttgcacatgttcaatccctggatgtacctcgacaccgcgccgccgaaaggatcaccggctttctcaagggccacgagcttctcgacgatctgagaagcgagcattctctcgatacagggtttggttccaacctccgtgatgtccaccagaaattgcatggctagatccttggtcttcaaagacttgcggtccagcaagttcaccagtttctctatggttcttagttgcagaaatctttgcaagacaagggatccacccttcgcaaagacgatctgatggagagcgtagtacgctgaatcctggagctcatcgatgttgcactgcagcatgtcaatgagctcgtgaacaatattaagctccaggaacctatgcacgtatggctctcctccagtgcaggccaatttcatcaccaaaaaggcggtctgggacctcacctggttcttttcaacctctctgcgttgtagcagccaagccaacctatcaaacagatggcttcccagaaggaggtcctgcacccttgtatcatttgccgtttcagcaagagataataaaccttggatgcctttaatgatatttttgttgtctctctgaaggatattatgaagaatcacctcaaatgattgttgaggctttggtgattgcggcacatttctgtcagataaaacaaatctttccaaactgatccgagcatgccagggcaaatgaagcagcactgcaggccctatgcacccttgaagtggagcaccaagttcacagaatgtttttagcgtgataatcgcgtggtgctgtgagatctcagaaccattgcccagaagcacaagaagtttattgtcaattcctgattcaatcattgtctcaacagccttcagctttccaacctttgtcagagatgcaagtgttgtaaacacaatttcatgccactgctcattttctgcagtcaagagatctgcaattcgaaccatgggaattcttgacaaaatttcatccgcaattgtggcatcaacatgctcagatatcttggtcagaacagaagagaggttggctagagttgaagtatcttcacaggcaccaagaagatcaattaatttatctatggaacctgctatttcaagagagtgagcaagatttatgtagtctgatggggaaaatataactgtaattgcggcagtgactgcaaaaataagatctagtgaccctatagaaattatctctgctattcgagggccaagtattttgctgaacccaattctatttgtctcaagttcagacagggatctgcatgccatgagagcttgagttgtgtttaccaataaaatctcgatgtccatgaattctagcagagaaaagaatgatcccatcttctgttcggctggccgtttcatacactctttgccaaaaacaaaaagccaaggagctactaatgccacattatatgaaatggaatcagataaaagagcacgagtggcatcatttgttttgttctccaggtaaagtgagaccatgtcatgcatatgatacaacggctggtcctccagtttgataataagtgatccttcgactagttttgaaaccacgagagagaacagtccgcactgctcaagcgctgaccaaatggattccagacaagcctcaggaacaggttcttcccaagagatagctgcaagagccatgaaaaaaattcttgaattttctggcattgcttctaagctgaactcaaaagatccaaatatggtcaacgtagtctccacatctttctcattgacgtatgaaactggaccaggtgcacatgtggcatatgttgagaggttggatatagctttctcccatttttccactctagtttccttcctcagagccttgcccatgacagcaactgtaaggggatggtgaccacatcgatccaacaagacttctgcgacaggctgtgaagtatagagaagttaaacattcaaaaaccatggtgtttggaatttttagttattctattttttcatgatgtatcttcttctaaaatatcttactttgcaagtttggca

SEQ ID NO: 124934 - DNA, 984 bp, Zea Mays
gctagcgtcagcctcgtctcgctcgttttgctccgtctctcttcctcctcacttcccacccaccctcgttttgctccgtctctcttcctcctcacttcccacccaccctcgctcgttttgttctgtctctctttctcctcactccctccgtcgatcctctgcagcttgcatcggtcgaccagtagtcttccactgtaatcgcctctcattattctttctgccacgctcctcttcgtccttactccctccgtcttgtctatctgtagccacttcgtcttcctacgtttttgccaggatttgaggctgtcatagtatgctctctgaccgtgctggcgggaggaaggagatgatttaagttctctgcgtttataaccagaaagaggaggataatccaatcatggtaactaaatattttggtgtacttttgctgcatgtgtctcccagagttgcagatttgcagtgctcgccattctatgggcccatcatgcttttcgagtacactgtttgatcacaaggagcggtctgctgccactaaacttcaagttgttgatcatgatggcctgaaaaattatcggggatatgctcatatgccttggccttaatttaaactacttgtatgagatggagaaatgtcacaaaacacaggatgaagacgactccaggaatccacccatgcctctcagtgactcagtggcacaaacgacagcctagtcaggactaggagacgtcttcacatcacggagtagaccactcagcaacaacagtgcaacggtgttcggacttttgttcacatatgggagtgtttaagctcctgcacctagatttagaaacaccaccatgtaaaatagacaagacagtgcttttgcaaacatgatgctaccacgagacccgaactcatgtatggccaaacatgttaacatattttgtatgtcaccaaaacgcttatttacatcaatgagcgattatctgaactgttgaatgctc

SEQ ID NO: 124935 - DNA, 997 bp, Zea Mays
gctagcgtcagcctcgtctcgctcgttttgctccgtctctcttcctcctcacttcccacccaccctcgttttgctccgtctctcttcctcctcacttcccacccaccctcgctcgttttgttctgtctctctttctcctcactccctccgtcgatcctctgcagcttgcatcggtcgaccagtagtcttccactgtaatcgcctctcattattctttctgccacgctcctcttcgtccttactccctccgtcttgtctatctgtagccacttcgtcttcctacgtttttgccaggatttgaggctgtcatagtatgctctctgaccgtgctggcgggaggaaggagatgatttaagttctctgcgtttataaccagaaagaggaggataatccaatcatgatacagtgaaatttatatttgcctgttcccaccatactgtaatatgaatacaaggatggcttgatctggcaagtgctcgccattctatgggcccatcatgcttttcgagtacactgtttgatcacaaggagcggtctgctgccactaaacttcaagttgttgatcatgatggcctgaaaaattatcggggatatgctcatatgccttggccttaatttaaactacttgtatgagatggagaaatgtcacaaaacacaggatgaagacgactccaggaatccacccatgcctctcagtgactcagtggcacaaacgacagcctagtcaggactaggagacgtcttcacatcacggagtagaccactcagcaacaacagtgcaacggtgttcggacttttgttcacatatgggagtgtttaagctcctgcacctagatttagaaacaccaccatgtaaaatagacaagacagtgcttttgcaaacatgatgctaccacgagacccgaactcatgtatggccaaacatgttaacatattttgtatgtcaccaaaacgcttatttacatcaatgagcgattatctgaactgttgaatgctc

SEQ ID NO: 124936 - DNA, 1259 bp, Zea Mays
gctagcgtcagcctcgtctcgctcgttttgctccgtctctcttcctcctcacttcccacccaccctcgttttgctccgtctctcttcctcctcacttcccacccaccctcgctcgttttgttctgtctctctttctcctcactccctccgtcgatcctctgcagcttgcatcggtcgaccagtagtcttccactgtaatcgcctctcattattctttctgccacgctcctcttcgtccttactccctccgtcttgtctatctgtagccacttcgtcttcctacgtttttgccaggatttgaggctgtcatagtatgctctctgaccgtgctggcgggaggaaggagatgatttaagttctctgcgtttataaccagaaagaggaggataatccaatcatggtaactaaatagtaggtagtaatgtttcacggtaaatcacagtgctcgaatgcgatatgatctttgactcggagtattgaagactaatttagtttgagtttgagattagttgtttttgtcattaataaactcacattggcatctggttacgagctcactactagattttagatctccagttttggtgtacttttgctgcatgtgtctcccagagttgcagatttgcaggtagcacctgattcttttttatttttggattgagatacagtgaaatttatatttgcctgttcccaccatactgtaatatgaatacaaggatggcttgatctggcaagtgctcgccattctatgggcccatcatgcttttcgagtacactgtttgatcacaaggagcggtctgctgccactaaacttcaagttgttgatcatgatggcctgaaaaattatcggggatatgctcatatgccttggccttaatttaaactacttgtatgagatggagaaatgtcacaaaacacaggatgaagacgactccaggaatccacccatgcctctcagtgactcagtggcacaaacgacagcctagtcaggactaggagacgtcttcacatcacggagtagaccactcagcaacaacagtgcaacggtgttcggacttttgttcacatatgggagtgtttaagctcctgcacctagatttagaaacaccaccatgtaaaatagacaagacagtgcttttgcaaacatgatgctaccacgagacccgaactcatgtatggccaaacatgttaacatattttgtatgtcaccaaaacgcttatttacatcaatgagcgattatctgaactgttgaatgctc

SEQ ID NO: 124937 - DNA, 1326 bp, Zea Mays
gctagcgtcagcctcgtctcgctcgttttgctccgtctctcttcctcctcacttcccacccaccctcgttttgctccgtctctcttcctcctcacttcccacccaccctcgctcgttttgttctgtctctctttctcctcactccctccgtcgatcctctgcagcttgcatcggtcgaccagtagtcttccactgtaatcgcctctcattattctttctgccacgctcctcttcgtccttactccctccgtcttgtctatctgtagccacttcgtcttcctacgtttttgccaggatttgaggctgtcatagtatgctctctgaccgtgctggcgggaggaaggaggtgtgtatatagttttcttgcattattttcctgtgactattctcatccctcctatatgttctttcagatgatttaagttctctgcgtttataaccagaaagaggaggataatccaatcatggtaactaaatagtaggtagtaatgtttcacggtaaatcacagtgctcgaatgcgatatgatctttgactcggagtattgaagactaatttagtttgagtttgagattagttgtttttgtcattaataaactcacattggcatctggttacgagctcactactagattttagatctccagttttggtgtacttttgctgcatgtgtctcccagagttgcagatttgcaggtagcacctgattcttttttatttttggattgagatacagtgaaatttatatttgcctgttcccaccatactgtaatatgaatacaaggatggcttgatctggcaagtgctcgccattctatgggcccatcatgcttttcgagtacactgtttgatcacaaggagcggtctgctgccactaaacttcaagttgttgatcatgatggcctgaaaaattatcggggatatgctcatatgccttggccttaatttaaactacttgtatgagatggagaaatgtcacaaaacacaggatgaagacgactccaggaatccacccatgcctctcagtgactcagtggcacaaacgacagcctagtcaggactaggagacgtcttcacatcacggagtagaccactcagcaacaacagtgcaacggtgttcggacttttgttcacatatgggagtgtttaagctcctgcacctagatttagaaacaccaccatgtaaaatagacaagacagtgcttttgcaaacatgatgctaccacgagacccgaactcatgtatggccaaacatgttaacatattttgtatgtcaccaaaacgcttatttacatcaatgagcgattatctgaactgttgaatgctc

SEQ ID NO: 124938 - DNA, 1182 bp, Zea Mays
gctagcgtcagcctcgtctcgctcgttttgctccgtctctcttcctcctcacttcccacccaccctcgttttgctccgtctctcttcctcctcacttcccacccaccctcgctcgttttgttctgtctctctttctcctcactccctccgtcgatcctctgcagcttgcatcggtcgaccagtagtcttccactgtaatcgcctctcattattctttctgccacgctcctcttcgtccttactccctccgtcttgtctatctgtagccacttcgtcttcctacgtttttgccaggttagaaaaaggatttgaggctgtcatagtatgctctctgaccgtgctggcgggaggaaggagatgatttaagttctctgcgtttataaccagaaagaggaggataatccaatcatggtaactaaatagtaggtagtaatgtttcacggtaaatcacagtgctcgaatgcgatatgatctttgactcggagtattgaagactaatttagtttgagtttgagattagttgtttttgtcattaataaactcacattggcatctggttacgagctcactactagattttagatctccagttttggtgtacttttgctgcatgtgtctcccagagttgcagatttgcaggatggcttgatctggcaagtgctcgccattctatgggcccatcatgcttttcgagtacactgtttgatcacaaggagcggtctgctgccactaaacttcaagttgttgatcatgatggcctgaaaaattatcggggatatgctcatatgccttggccttaatttaaactacttgtatgagatggagaaatgtcacaaaacacaggatgaagacgactccaggaatccacccatgcctctcagtgactcagtggcacaaacgacagcctagtcaggactaggagacgtcttcacatcacggagtagaccactcagcaacaacagtgcaacggtgttcggacttttgttcacatatgggagtgtttaagctcctgcacctagatttagaaacaccaccatgtaaaatagacaagacagtgcttttgcaaacatgatgctaccacgagacccgaactcatgtatggccaaacatgttaacatattttgtatgtcaccaaaacgcttatttacatcaatgagcgattatctgaactgttgaatgctc

SEQ ID NO: 124939 - DNA, 1825 bp, Zea Mays
gctagcgtcagcctcgtctcgctcgttttgctccgtctctcttcctcctcacttcccacccaccctcgttttgctccgtctctcttcctcctcacttcccacccaccctcgctcgttttgttctgtctctctttctcctcactccctccgtcgatcctctgcagcttgcatcggtcgaccagtagtcttccactgtaatcgcctctcattattctttctgccacgctcctcttcgtccttactccctccgtcttgtctatctgtagccacttcgtcttcctacgtttttgccaggttagaaaaaggcatgttttcttttttcccgatactttgtccttctagcagatctagttccttctgcttcacatttattggatctgttagtcgcttcttacgattcgcatcttagatttttggattcgttgggcgccttaaaccgcaaccatatttctcctctaaggtctgtgtcttgtcttcggcgtgaaaagtgaatcaccccacctccaaaaaattactttgcccccccccccatgttacagttaacgttcttcgctccttactctctgcgtgttatttcatatttacacagtacatggatgaatattctttcgaaaaaagatgttaagtaacttagtgactctccttaacactgtaggatttgaggctgtcatagtatgctctctgaccgtgctggcgggaggaaggagatgatttaagttctctgcgtttataaccagaaagaggaggataatccaatcatggtaactaaatagtaggtagtaatgtttcacggtaaatcacagtgctcgaatgcgatatgatctttgactcggagtattgaagactaatttagtttgagtttgagattagttgtttttgtcattaataaactcacattggcatctggttacgagctcactactagattttagatctccagttttggtgtacttttgctgcatgtgtctcccagagttgcagatttgcaggtagcacctgattcttttttatttttggattgagatacagtgaaatttatatttgcctgttcccaccatactgtaatatgaatacaaggatggcttgatctggcaagtgctcgccattctatgggcccatcatgcttttcgagtacactgtttgatcacaaggagcggtctgctgccactaaacttcaagttgttgatcatgatggcctgaaaaattatcgggtaaatgacttctctactatttgagttaactgatgctatctatctatcaacattgcagaactaattctagattttaggaatgcttttgtttctcttgaatttggttcctcggttcaagttttgtttttactgaagcatacatttatataaaattagaatgtcaattccatacacaaatcactgatgggtttttgcttgttggtagggatatgctcatatgccttggccttaatttaaactacttgtatgagatggagaaatgtcacaaaacacaggatgaagacgactccaggaatccacccatgcctctcagtgactcagtggcacaaacgacagcctagtcaggactaggagacgtcttcacatcacggagtagaccactcagcaacaacagtgcaacggtgttcggacttttgttcacatatgggagtgtttaagctcctgcacctagatttagaaacaccaccatgtaaaatagacaagacagtgcttttgcaaacatgatgctaccacgagacccgaactcatgtatggccaaacatgttaacatattttgtatgtcaccaaaacgcttatttacatcaatgagcgattatctgaactgttgaatgctc

SEQ ID NO: 124940 - DNA, 1291 bp, Zea Mays
gctagcgtcagcctcgtctcgctcgttttgctccgtctctcttcctcctcacttcccacccaccctcgttttgctccgtctctcttcctcctcacttcccacccaccctcgctcgttttgttctgtctctctttctcctcactccctccgtcgatcctctgcagcttgcatcggtcgaccagtagtcttccactgtaatcgcctctcattattctttctgccacgctcctcttcgtccttactccctccgtcttgtctatctgtagccacttcgtcttcctacgtttttgccaggatttgaggctgtcatagtatgctctctgaccgtgctggcgggaggaaggaggtgtgtatatagttttcttgcattattttcctgtgactattctcatccctcctatatgttctttcagatgatttaagttctctgcgtttataaccagaaagaggaggataatccaatcatggtaactaaatagtaggtagtaatgtttcacggtaaatcacagtgctcgaatgcgatatgatctttgactcggagtattgaagactaatttagtttgagtttgagattagttgtttttgtcattaataaactcacattggcatctggttacgagctcactactagattttagatctccagttttggtgtacttttgctgcatgtgtctcccagagttgcagatttgcaggtagcacctgattcttttttatttttggattgagatacagtgaaatttatatttgcctgttcccaccatactgtaatatgaatacaaggatggcttgatctggcaagtgctcgccattctatgggcccatcatgcttttcgagtacactgtttgatcacaaggagcggtctgctgccactaaacttcaagttgttgatcatgatggcctgaaaaattatcggggatatgctcatatgccttggccttaatttaaactacttgtatgagatggagaaatgtcacaaaacacaggatgaagacgactccaggaatccacccatgcctctcagtgactcagtggcacaaacgacagcctagtcaggtaacacaataacatatcagccatatgctatacatgcatatactatgttatggaaataactccgaagagtatatcacattctaactagttatgtatgcaaacactaatgcaagacaaccatcttgctcgtcatgttggtgtggtgggggtcaaaagcgtcttgctgctgaaattgatggtataccgtacaagcatttacctttgatttttgctgacgttaatatgttgcttcac

SEQ ID NO: 124941 - DNA, 1511 bp, Zea Mays
catttgtccactcctgggtgcccttaccatttttcctccctcgcctaaacacgattacacgactcatccaaaatgacgcgtcacaaactcacgaataaaaccgccaccacggcgcgagacgtcggcgcccggaatattcctgtggcttcgcatcaccagcaccacccgttgctcgtcgtcgtcctctgcatccgtcccctatttatccgtcccctcctctcccgcactagctcccaagttccatcccatcccgccacgaaattctccacgctccgatccaatcgcaacaatgaagttcggcaagagcctcaacaaccagatcgtggagacgctcccggactggcgcgacaagttcctgtcctacaaggacctcaagaagcggctgaagcagatcggcgccggctctggcgagcggcggagcaagcgccagcgggtgggggacgggcgcggcggatcctcgccgcctgcgatgaccccggaggaggccggattcgtcgcgctcctcgacgccgagctcgacaagttcaacgccttcttcctcgagaaggaggaggactacgtcatccggctgaaggacagggtggtgagcgccgcggaggtggggtcggcggaggagctgctgcgggtgcgcaaggagatcgtcgacttccacggcgagatggtcttgctggagaactacagcgcgctcaactacaccgggctggtcaagatcctcaagaagtacgacaagaggaccggcgcgctgatccgcctgcccttcatccggaacgtgatgcaggagccgttctgcgccaccgacgtgctgtacaagctcgtcaaggggtgcgaggagatgctggaccagctcctcctgccccggaaccagcagcggcccgtgccgagcgacaacggcggggaaggagacagcgacggcgacgacgacaagcaacgaccggcggagccaggcgcctcatcgctgcccagcggcggcggcggtggcgctggcgacatggagctggaggagatcgaggacatggagagcatgtacatgaagagtacggtggccgcgctcagggcgctcagggagatcaggagcgggagctccacggtgagcgcgttctccctgccgccactacggtgattgacacgttgtgttcggttcagtagcgaagcgagacagaacggggccgactgcgctgttgctgtaggtagtgtttggttcaaagaagacacgaacaaaatgaaagaaaatctgtaaaatgatagtaatattcatctagtattctcaatctcactgctcccacaaaacttaaggggtgcatcgaatgcacaagtgacctccgctctacaaatcaatttctcgccgcctgtttctgatccaactctcgccgcggaaattgcatgtctgttacttgagctctccagctaggttgcaaactcagatctcgcttcttgaccaaaaaaccactttataacttttctgtatatatcttgtctgtgctgaacatcattttgtaagatcattttaagac

SEQ ID NO: 124942 - DNA, 1235 bp, Zea Mays
catttgtccactcctgggtgcccttaccatttttcctccctcgcctaaacacgattacacgactcatccaaaatgacgcgtcacaaactcacgaataaaaccgccaccacggcgcgagacgtcggcgcccggaatattcctgtggcttcgcatcaccagcaccacccgttgctcgtcgtcgtcctctgcatccgtcccctatttatccgtcccctcctctcccgcactagctcccaagttccatcccatcccgccacgaaattctccacgctccgatccaatcgcaacaatgaagttcggcaagagcctcaacaaccagatcgtggagacgctcccggactggcgcgacaagttcctgtcctacaaggacctcaagaagcggctgaagcagatcggcgccggctctggcgagcggcggagcaagcgccagcgggtgggggacgggcgcggcggatcctcgccgcctgcgatgaccccggaggaggccggattcgtcgcgctcctcgacgccgagctcgacaagttcaacgccttcttcctcgagaaggaggaggactacgtcatccggctgaagggctggtcaagatcctcaagaagtacgacaagaggaccggcgcgctgatccgcctgcccttcatccggaacgtgatgcaggagccgttctgcgccaccgacgtgctgtacaagctcgtcaaggggtgcgaggagatgctggaccagctcctcctgccccggaaccagcagcggcccgtgccgagcgacaacggcggggaaggagacagcgacggcgacgacgacaagcaacgaccggcggagccaggcgcctcatcgctgcccagcggcggcggcggtggcgctggcgacatggagctggaggagatcgaggacatggagagcatgtacatgaagagtacggtggccgcgctcagggcgctcagggagatcaggagcgggagctccacggtgagcgcgttctccctgccgccactacggtgattgacacgttgtgttcggttcagtagcgaagcgagacagaacggggccgactgcgctgttgctgtaggtagtgtttggttcaaagaagacacgaacaaaatgaaagaaaatctgtaaaatgatagtaatattcatctagtattctcaatctcactgctcccacaaaacttaaggggtgcatcgaatgcacaagtgacctccgctctacaaatcaatttctcgccgcctgtttctgatcc

SEQ ID NO: 124943 - DNA, 1335 bp, Zea Mays
catttgtccactcctgggtgcccttaccatttttcctccctcgcctaaacacgattacacgactcatccaaaatgacgcgtcacaaactcacgaataaaaccgccaccacggcgcgagacgtcggcgcccggaatattcctgtggcttcgcatcaccagcaccacccgttgctcgtcgtcgtcctctgcatccgtcccctatttatccgtcccctcctctcccgcactagctcccaagttccatcccatcccgccacgaaattctccacgctccgatccaatcgcaacaatgaagttcggcaagagcctcaacaaccagatcgtggagacgctcccggactggcgcgacaagttcctgtcctacaaggacctcaagaagcggctgaagcagatcggcgccggctctggcgagcggcggagcaagcgccagcgggtgggggacgggcgcggcggatcctcgccgcctgcgatgaccccggaggaggccggattcgtcgcgctcctcgacgccgagctcgacaagttcaacgccttcttcctcgagaaggaggaggactacgtcatccggctgaaggagttgcaggacagggtggtgagcgccgcggaggtggggtcggcggaggagctgctgcgggtgcgcaaggagatcgtcgacttccacggcgagatggtcttgctggagaactacagcgcgctcaactacaccgggctggtcaagatcctcaagaagtacgacaagaggaccggcgcgctgatccgcctgcccttcatccggaacgtgatgcaggagccgttctgcgccaccgacgtgctgtacaagctcgtcaaggggtgcgaggagatgctggaccagctcctcctgccccggaaccagcagcggcccgtgccgagcgacaacggcggggaaggagacagcgacggcgacgacgacaagcaacgaccggcggagccaggcgcctcatcgctgcccagcggcggcggcggtggcgctggcgacatggagctggaggagatcgaggacatggagagcatgtacatgaagagtacggtggccgcgctcagggcgctcagggagatcaggagcgggagctccacggtgagcgcgttctccctgccgccactacggtgattgacacgttgtgttcggttcagtagcgaagcgagacagaacggggccgactgcgctgttgctgtaggtagtgtttggttcaaagaagacacgaacaaaatgaaagaaaatctgtaaaatgatagtaatattcatctagtattctcaatctcactgctcccacaaaacttaaggggtgcatcgaatgcacaagtgacctccgctct

SEQ ID NO: 124944 - DNA, 642 bp, Zea Mays
catttgtccactcctgggtgcccttaccatttttcctccctcgcctaaacacgattacacgactcatccaaaatgacgcgtcacaaactcacgaataaaaccgccaccacggcgcgagacgtcggcgcccggaatattcctgtggcttcgcatcaccagcaccacccgttgctcgtcgtcgtcctctgcatccgtcccctatttatccgtcccctcctctcccgcactagctcccaagttccatcccatcccgccacgaaattctccacgctccgatccaatcgcaacaatgaagttcggcaagagcctcaacaaccagatcgtggagacgctcccggactggcgcgacaagttcctgtcctacaaggacctcaagaagcggctgaagcagatcggcgccggctctggcgagcggcggagcaagcgccagcgggtgggggacgggcgcggcggatcctcgccgcctgcgatgaccccggaggaggccggattcgtcgcgctcctcgacgccgagctcgacaagttcaacgccttcttcctcgagaaggaggaggactacgtcatccggctgaaggtaattgattgaccatacccattcctgtcgtgatccgattccatccccccctcgtgttgtccgctccc

SEQ ID NO: 124945 - DNA, 843 bp, Zea Mays
ggtactcgtgattttttttaataaacggtcaagaacagatcagaaaaaagtcgtacagaacgaagctagggttagaaccctaatttttttcaaaaaccacgtgaatcaaaagtgtacagatgcactaaaatcatcacagaaaataacagaaatatcgcgggacccagatctatgattctttacctccaaaactcgatcccgttacaaaatcacttgagggatcgagttgaggatagatcctggggagagagaggttcgcaggcgacggctaacagtgccgcagttcttaactcgtcggactgggcctcgaccaccgcgcagcacccatccgacgacggcgcgcccacccgaagggacgcgcacgtcggcgggatggggatgcgaggcggctcaggccggccatctccggtgcattgaagccaaccgtgcgttagtaatctccaaaatcagtaaacagtgaaagaaagaaaaaaaaaagagagagataggagcatgcaacgcgcaggaacggccgtactcgggcacgttcggccagtagctctgtgctctagcggctgctcagacaaagaatcagagaaagaaacaagcgtgatgctccctggcggccgagtggagcagcggctggggagaagaaaattaaaaaaaaaaaaagggaaaccagaggcggcacttgagcatagctcggccatgaggcccatgcagaaatgcatggatagctcctggcggccggcagtctgttagtggccatgcagccatgcaggaacgcaaggagaaatcctggcggccggctggctgtttgtggcggctgggatacaggagtagaatgttttagggttttttttt

SEQ ID NO: 124946 - DNA, 1248 bp, Zea Mays
atggcgttcggccgacggagccccggatcctcgcggcaccctcccgcgctcaccatcgtcacggcgctactcctcgcctccctctacttcgccgccgcggcggcggctctatcgcccaccgacgcgatgcacaacaacaactgggccgtgctcgtgtgtacctcccgcttctggttaagaataatcatgcttcaaaagtcaagtgctttgagtaactatcttattccattttgttgccttttgtttcctttcaggactgttaagagattaggaatacctgatgagcgaatcatacttatgttggcggacgatatggcctgtaacccaaggaacagctatcctgcccaagttttcaataatgagaaccaccagctaaatctctatggtgacaatgttgaggtcgattatcgagggtatgaggtgacagttgaaaatttcttgagagttttgactggccgacatgaaagtgctgtaccaagatcgaagcgtcttcttagtgatgaaggaagtcatatacttttgtacatgactggacatggtggtgatgaatttttgaagttccaagattctgaagagcttcagagccatgacttagcagatgctgtgaagcaaatgaaggagaagcatagatttaaagagctgctgataatggtagatacctgccaagctgctactctcttttcacagcttcagtcacctggtgttttggcgattggtagtagcatgaagggtgaaaactcttattctcaccatcttgattcagatgtaggtgtttctgttgtggataggtttacctattatacacttgctttctttgagaaactgaacatgtatagcaatgcctcactgaacagccttttcacctcatacaatccttccatgctgttgtctactgcatattatcgaatggatctttatgaacgtcccttaaatgaggtgcctgtgacaaatttttttggatcagtcatgaagactctccacactgattcagcctacacaggtttcttggctgcgcatgacaatgaaactccaatgtccacgggagataaccttgatgatcatttcatgttaaagggcagggctatcgcacgaagatcaaccatagaaaaggaggcacaattaacaccgcatggatggactgaagttctggctgaacagctggagggaaagaatactgatactgttgtgatgtatggtctgggagctatgggtatactgttggcactttcaacctggttatcaatgtag

SEQ ID NO: 124947 - DNA, 1339 bp, Zea Mays
cagaggaggatgatgcattgtcacagttgtctaactgtgccctaacacagaccggagcgtcgcggcgctatctcctccgcggctctgcgcgcagtcgtgttggcaactgcagcggggcggcggcgtgcgtccctgctgtgagcttcatcgccccgtatcaagctagtttaggctgtcagcgggccacaacttcagccacacaacccggaactccgacaaccctcgcggctcgtgccgccctctcccgctcggtcgttcccatggatccaccgcaagagttggccgccgccggccgcaagcggcgccggcgaggaggcgtccggaaccgcaaaaggctttcctcgcagaaggggctccctccagcgactgcgcccccaacgccggcgtccccacctgtcaagcggcggcgcaaggacatcgctggacaggccgctgctatgccgaagagaggcaacacctcgagtctactggacaagatgcgtgcaaggttatctggtggccattttagaatgttaaacgagaagctatacacttgcagtatcatacaggatatcaagagcagatgtcacactggcctgaacagccagtgaatgtaataatcaattggttgaagagtcagaatgcgtcatggactgttgctgattttggctgtggcaatgcagcagttgcaaaaaatctgaagaacaaggttttctccattgatctcgtttcagatgaaccttcagtgattgcttgtgatatggctcatactccattggagccatcctctatagatgttgcaatattttgtctttctttgatgggaatcaactatccaagttatttagaggaagcaaatagggttctcaaaccaagtggttggcttgttattgctgaagtgcgaagtaggctagacccgagcaacggaggtgctgatcctgaaaagttttctaaagccattatccagcttggcttttcgcttgtttcaaaggatgtgaaaaacagaatgttcattctgttctacttcaggaaaaaggaaaaaagtaaggtggcgaagagcatcgattggccacagctgaaaccgtgcttgtacaaacggcgatgagccgcttgtctcgtatccaccagtaatactgtagttgttgtagtagagctcttcaaaagtttcgtcaaaactgaaagtctagatttaggtccctccgtacctgtatggctgcatctgtgtgccacgctattccattattttccacattagctgcgtctttcatttgttggacctcacaagaaaagatcacatagggaacgatgcattgtttggaagcagatcatatataattcaagtctacttttcacatgctgc

SEQ ID NO: 124948 - DNA, 1391 bp, Zea Mays
cagaggaggatgatgcattgtcacagttgtctaactgtgccctaacacagaccggagcgtcgcggcgctatctcctccgcggctctgcgcgcagtcgtgttggcaactgcagcggggcggcggcgtgcgtccctgctgtgagcttcatcgccccgtatcaagctagtttaggctgtcagcgggccacaacttcagccacacaacccggaactccgacaaccctcgcggctcgtgccgccctctcccgctcggtcgttcccatggatccaccgcaagagttggccgccgccggccgcaagcggcgccggcgaggaggcgtccggaaccgcaaaaggctttcctcgcagaaggggctccctccagcgactgcgcccccaacgccggcgtccccacctgtcaagcggcggcgcaaggacatcgctggacaggccgctgctatgccgaagagaggcaacacctcgagtctactggacaagatgcgtgcaaggttatctggtggccattttagaatgttaaacgagaagctatacacttgcagtggagaggatgcatttgactacttcaaaaacgaccctaatctttttgatgtgtatcatacaggatatcaagagcagatgtcacactggcctgaacagccagtgaatgtaataatcaattggttgaagagtcagaatgcgtcatggactgttgctgattttggctgtggcaatgcagcagttgcaaaaaatctgaagaacaaggttttctccattgatctcgtttcagatgaaccttcagtgattgcttgtgatatggctcatactccattggagccatcctctatagatgttgcaatattttgtctttctttgatgggaatcaactatccaagttatttagaggaagcaaatagggttctcaaaccaagtggttggcttgttattgctgaagtgcgaagtaggctagacccgagcaacggaggtgctgatcctgaaaagttttctaaagccattatccagcttggcttttcgcttgtttcaaaggatgtgaaaaacagaatgttcattctgttctacttcaggaaaaaggaaaaaagtaaggtggcgaagagcatcgattggccacagctgaaaccgtgcttgtacaaacggcgatgagccgcttgtctcgtatccaccagtaatactgtagttgttgtagtagagctcttcaaaagtttcgtcaaaactgaaagtctagatttaggtccctccgtacctgtatggctgcatctgtgtgccacgctattccattattttccacattagctgcgtctttcatttgttggacctcacaagaaaagatcacatagggaacgatgcattgtttggaagcagatcatatataattcaagtctacttttcacatgctgc

SEQ ID NO: 124949 - DNA, 858 bp, Zea Mays
cagaggaggatgatgcattgtcacagttgtctaactgtgccctaacacagaccggagcgtcgcggcgctatctcctccgcggctctgcgcgcagtcgtgttggcaactgcagcggggcggcggcgtgcgtccctgctgtgagcttcatcgccccgtatcaagctagtttaggctgtcagcgggccacaacttcagccacacaacccggaactccgacaaccctcgcggctcgtgccgccctctcccgctcggtcgttcccatggatccaccgcaagagttggccgccgccggccgcaagcggcgccggcgaggaggcgtccggaaccgcaaaaggctttcctcgcagaaggggctccctccagcgactgcgcccccaacgccggcgtccccacctgtcaagcggcggcgcaaggacatcgctggacaggccgctgctatgccgaagagaggcaacacctcgagtctactggacaagatgcgtgcaaggttatctggtggccattttagaatgttaaacgagaagctatacacttgcagtggagaggatgcatttgactacttcaaaaacgaccctaatctttttgatgtgtatcatacaggatatcaagagcagatgtcacactggcctgaacagccagtgaatgtaataatcaattggttgaagagtcagaatgcgtcatggactgttgctgattttggctgtggtaagactgatcttatgatcctgtagctggtgcttgttgcaagtttcttcctgttacatatttttattttcctggctcagttatgaaaatactatttatatttcccaggcaatgcagcagttgcaaaaaaattcttacggtcttgtagctggt

SEQ ID NO: 124950 - DNA, 1564 bp, Zea Mays
ggaggaataacagctacatctgttcttgtccatgtttctgtagcatcagtagcgcagcgtggttgtacgtttgctgtgttgctgtatcactctgcgtctctgcaagtgctaaaccagtcactttatggacggtggttcctgtggtctcgagggagcgtcggtagtgacatctactactagcgctggtattcagcttctgccagagaagcactgcgccgatgaagcttgtggagccatggcacgcagtaatggtcctgaaggagtgccagtagtgacttctgctgatgaccctccgacccgtgccgatattccatttctctgcaattcagttgatgaaacctgtgaagccacaggggacggcagtgctcccttggatgctcagatatgtacgggtttctctaagttgatcagcttggaggtgaagaaaggcctccagaagtgcgcgacgttcccaccctcgtctggtcagcctcagcaggaggattgttcatgctcccatgtaggtgatggcctcacgggtgctcctgctttctagcgatctgtgtccttacctgtgataaatacatgtgtgagctaaatctattgatctgcttgtttatgtaacggtacttcaaaactgtatcaccggttatgtcttggcatgcttctttacggatctgttatccatgcatggcagacaatagttggcattttagcagcacaacaatatttctaactattaagtgttaattatctaatgttatttctaactattaagtgttaattatctaatgtatttaatgaagtaacacagttagacttgcctaaagaggccagtgaagcttcactggctgcatagagaagtacatttttattatcatgtaaatgcatggttctttggaaccatttggcctatctgattaattattactataaccgggaatgggagcccgaggctataacccggactcctcgccctcgtacctcgttgctggcgaagagcgtcatcaatggcgagtggaggttcactacacagaggcccgccggatcttggagcatcattcgcggtcttggcgcgtctacgcaactgtatcctaagggcatcgaagaggagagacggtacgccggtggcgacaaggtacggtagatttgaactggagtgtggaggtatcgtcggccagtgccatgcacccaggaggaactcttgtgtgggtgtgggcagggctagaaggaagaaccatgcatgctactacattcatataatctttttcagagggagggcacattttggcggctacgagagaccgattttcctgtgtggtggtgacaacaacaccgtggagccaagtcaatgtcggcaagctgatttttcagattggaacctatggttctttttaaagatcgaatatgttctagcatcttaaaaagatttgtcagaatgtaaacatttgttttgaggtcatttaagcctcaaacaaaatttcttggacttatttcgttggagggaacgagacatctcgagatctaaatgtgtatagaacatatattttttatgggtatcaaatatgattgtgtgtaaagcacg

SEQ ID NO: 124951 - DNA, 510 bp, Zea Mays
ttaaagcctgaggaggttgctggtatcataaaggactttaatgaacctggtactcttgcaccaactggtcttttcgttggaggtacaaagtacatggtgatccaaggtgaacctggagttgtcatccgaggaaagaaggtacagtggggaatagattgtctgatagaagaaatgctttgatcattcccttttcgtatgcttatgttaattttaccgaaaaaacaaactcaattcatatctgtagtactccctccgttcttttttatttgttgcgttttagctcaaaaatgaactaccgggcgacaaatattcgaaagcggaggtagcactatattagcgttatgatatctaaatggatcaagctcttatagaattattacgcaagaggaatactgtatcaaatatgcctggatacatggtcatgatcactttcagttaattaatattcctgatgaactctgttagctgcatctgcaagcttttgtagcatgtattcaagatcactctacg

SEQ ID NO: 124952 - DNA, 883 bp, Zea Mays
gtagttcatacatcattttttgtagctgacaaatataagctcgttagataactcttctttttaaccacgtgaatagcttgtttctgcactagcctattttagatttctatatggaaaaatgtagaagttgataatttttatcaatatattttgtttacttgaagtatttccagaaagcagatgtcaatagttcattacttttcattttctttactctagtagctcatatgtttcctctggtgattcatttattgtttgatataatatccatccagggacaagaggttgaggcagcagctgaggaaacgaaaaagagcaaccatgtcacgaggaagcttgagaagcgcaaggagggacgtacccttgacccacacattgaggagcaatttggcagtggacggttgctggcatgcatttcttcccgccctggacagtgtggccgagctgatgggtacatccttgagggtaaagagcttgagttctacatgaagaagctacagaggaagaagggcaagagcgctgtagcttagagcattctcatggattgtcttgcaccgaaatgtgtgtcctgatgagtacactttttttggttaatcgtctcaagttcagagcgttatgccatgttttcagacctgattagtacactgttttctaaaagcgattgagctctagtccaatgtattgataatatctgctgttgtcctattgcggtgatgttgatttgccctgttcgctagctgcaatagttcctatttgttgatgaatttgtttgaagcataaacgcagaacatgtcgtaaagaaaacatttttctgtaatattagcttgtaagatcgtcatggcatcactgcatatataggccctgtttgggagagcttcacttc

SEQ ID NO: 124953 - DNA, 1124 bp, Zea Mays
tatatataaacccgatatatagggtctcacttgtgtaccccaacgagaagagcggcggcgcgggcggacaaggagcaggcggaggaggagctgtgccaagccacaatgggtatctcgcgtgactcgatgcacaagcgccgggccaccggtggaaagcagaaggcctggaggaagaagcgaaagtatgagcttggtcgccagccagccaacaccaagttgtcaagcaataagacagtgaggagggtccgtgttcgtggaggtaatgtgaaatggagggctcttcgccttgatactggtaactactcatggggaagtgaagctgttacccgcaagacccgtatcctcgacgtggtctacaatgcatcaaacaatgagcttgtgaggacacaaacccttgtgaagagtgccattgtgcaagttgatgctgccccattcaagcagtggtacctcactcactatggagttgacattggtaggaagaagaaaacccctgctgcaaagaaggataatgctgagggacaagaggttgaggcagcagctgaggaaacgaaaaagagcaaccatgtcacgaggaagcttgagaagcgcaaggagggacgtacccttgacccacacattgaggagcaatttggcagtggacggttgctggcatgcatttcttcccgccctggacagtgtggccgagctgatgggtacatccttgagggtaaagagcttgagttctacatgaagaagctacagaggaagaagggcaagagcgctgtagcttagagcattctcatggattgtcttgcaccgaaatgtgtgtcctgatgagtacactttttttggttaatcgtctcaagttcagagcgttatgccatgttttcagacctgattagtacactgttttctaaaagcgattgagctctagtccaatgtattgataatatctgctgttgtcctattgcggtgatgttgatttgccctgttcgctagctgcaatagttcctatttgttgatgaatttgtttgaagcataaacgcagaacatgtcgtaaagaaaacatttttctgtaatattagcttgtaagatcgtcatggcatcactgcatatataggccctgtttgggagagcttcacttc

SEQ ID NO: 124954 - DNA, 742 bp, Zea Mays
tatatataaacccgatatatagggtctcacttgtgtaccccaacgagaagagcggcggcgcgggcggacaaggagcaggcggaggaggagctgtgccaagccacaatgggtatctcgcgtgactcgatgcacaagcgccgggccaccggtggaaagcagaaggcctggaggaagaagcgaaagtatgagcttggtcgccagccagccaacaccaagttgtcaagcaataagacagtgaggagggtccgtgttcgtggaggtaatgtgaaatggagggctcttcgccttgatactggtaactactcatggggaagtgaagctgttacccgcaagacccgtatcctcgacgtggtctacaatgcatcaaacaatgagcttgtgaggacacaaacccttgtgaagagtgccattgtgcaagttgatgctgccccattcaagcagtggtacctcactcactatggagttgacattggtaggaagaagaaaacccctgctgcaaagaaggataatgctgagttctacatgaagaagctacagaggaagaagggcaagagcgctgtagcttagagcattctcatggattgtcttgcaccgaaatgtgtgtcctgatgagtacactttttttggttaatcgtctcaagttcagagcgttatgccatgttttcagacctgattagtacactgttttctaaaagcgattgagctctagtccaatgtattgataatatctgctgttgtccta

SEQ ID NO: 124955 - DNA, 2251 bp, Zea Mays
tgcccgtgtgccaggcgaaaaacgtagcctcgcactctcgcaggcggcggcgcatcgagaaacagggctgcggctgttgcttcttccacctctccggccatccggcggtccatcgttccgtgccggcggcctcccctcctacgcccctgccgattcttcaatcttcaccaacgtctgcgcgtagcaggctagcagtcggcacggcttcctcagatctgccggacgacttgctgttcgtcaccgactcaccagcaaccaacgtcagccatcagccggcagcaggggaagctgggcggagggtcattgcggcacggcgtccaggcgtacagaaggcaccagcaacagcccatggcaaacgccgcagatgaccctatggcagatgaagccggagtagaagatgccttcacacaggagatcaatcattcgtacgtccctagataccatgtgttgagttggatggaaactgtggaggggatggtggccggtgtggcgtcgcttccgccggtgtatttgatactgaacagagatcttcttgagacgggatggggatggaagaggctggtgccctacagacctggttatgttgagttgcatgtgttcaagaaataccttggggactatttcgaccataatcgtgaagcttttctttgtgccgagcagaagcctgatccatttggatggattgttgctgaaaagagtgccctgattgctgcagccaaatcgtgcctcaagatggagaaggcacttctcaggtactgtgctagctttctcactcctgacgacaaaaggctgatcctccggatcaaggaccaggcaaagcaaatgatccaatcagagggtgatcaatctttgattgtaactatatgcttggagtgtattgcgaaggaggccgagttaatgtacaattatttgccttgtgattttgacaccaccgaagaagtcgccgtctgcaataaggttcggcggtctgccttgaatcttatgctctacaaaggttctgaatctgctgttgctgctggtgccatgatgggtatcacaacagaggctaagtccatttttgacttgcttagtcgagaccatgacgtggtcatggaagtttttacttgtgagagtataagggaacatacagcatcagttctgacccagcttgggaaggaatttgcttgcgagactgctactgtgaacagctcatcagcgcggcctatgggggtcagtgatgttagagatctgaactctgaagtatctggttcaatggaagactgtacgagtatggatggagcaaggttttaaagtcggctagtcgactctagtcgcctaagcaccgataagggaaaccttcgttgacttctgaggtactgaaggttagtgaagaggcagatgattacgttccaaataggaagtcttgaatactgctgtgacttgtgttttgaaatagatatagtattttctggttctcttgcaaacctcattgttgcagccctaacatttcatggtgtgtttgatttgtggggtgggggtggatgggagacggtcaacccattttttaaagttgttcagttagatgggatgcccaaccagtggggatattcccccgagatcttggatgggatgtccatgcaaatctggtggacagagtagtccatggccttgttgaatacttattgcgcgactggttgtggtcacctaatgtgccttttctttttgctccaattgttcccaatctcatccctcattaacctgtttctgactgggatgcgcacagcaattgggaaccagcaggccctctgtccagacgctggtgctttgtgctccgttgttgtgctgctgctccactggcgtttactagttctagtgccttttcactgatttgtccgcacagggatcctggtgctagtgcttggctgattgctgctgcccctgtgttctccctcaattcgtactgctcatgcaattcctggaggccctaggaattggttctgcagttgtacctgtaggctgtagctgccaatttagttcgattttgaatttggcaggtagttgttgtgcttgtttctagatgcaagagtgcttattgtttgtggtgtttgttattggaaattttggttggtggtagttatttgtccggaaaggttaatgcaatgctgtggcttgtcttgcttttagtcaatggtagtaagttgagtaaaatgttcatgtgtatgtgcagcttgtggtcggcagtgtgaaattttgacctctaattatttgttag

SEQ ID NO: 124956 - DNA, 1502 bp, Zea Mays
tgcccgtgtgccaggcgaaaaacgtagcctcgcactctcgcaggcggcggcgcatcgagaaacagggctgcggctgttgcttcttccacctctccggccatccggcggtccatcgttccgtgccggcggcctcccctcctacgcccctgccgattcttcaatcttcaccaacgtctgcgcgtagcaggctagcagtcggcacggcttcctcagatctgccggacgacttgctgttcgtcaccgactcaccagcaaccaacgtcagccatcagccggcagcaggggaagctgggcggagggtcattgcggcacggcgtccaggcgtacagaaggcaccagcaacagcccatggcaaacgatgaccctatggcagatgaagccggagtagaagatgccttcacacaggagatcaatcattcgtacgtccctagataccatgtgttgagttggatggaaactgtggaggggatggtggccggtgtggcgtcgcttccgccggtgtatttgatactgaacagagatcttcttgagacgggatggggatggaagaggctggtgccctacagacctggttatgttgagttgcatgtgttcaagaaataccttggggactatttcgaccataatcgtgaagcttttctttgtgccgagcagaagcctgatccatttggatggattgttgctgaaaagagtgccctgattgctgcagccaaatcgtgcctcaagatggagaaggcacttctcaggtactgtgctagctttctcactcctgacgacaaaaggctgatcctccggatcaaggaccaggcaaagcaaatgatccaatcagagggtgatcaatctttgattgtaactatatgcttggagtgtattgcgaaggaggccgagttaatgtacaattatttgccttgtgattttgacaccaccgaagaagtcgccgtctgcaataaggttcggcggtctgccttgaatcttatgctctacaaaggttctgaatctgctgttgctgctggtgccatgatgggtatcacaacagaggctaagtccatttttgacttgcttagtcgagaccatgacgtggtcatggaagtttttacttgtgagagtataagggaacatacagcatcagttctgacccagcttgggaaggaatttgcttgcgagactgctactgtgaacagctcatcagcgcggcctatgggggtcagtgatgttagagatctgaactctgaagtatctggttcaatggaagactgtacgagtatggatggagcaaggttttaaagtcggctagtcgactctagtcgcctaagcaccgataaggtgactaatcgcgattagtcgtcgattagctcgattagtcgatcctagtcgactccctagtcgtcctatagtcgtccatctataacaggaccatatatatatatatatatactagattgcaaatctattgacaatattacaatgaaactgtagaatgaatgaatgatcatgttttcact

SEQ ID NO: 124957 - DNA, 823 bp, Zea Mays
agggaagagatgttagttgatttgctgtaaaaatcaatatgttaacagagatatatgatacatgctcctgcttgctcatgatgccggtttggtgccaaagctatcttcttgagacgggatggggatggaagaggctggtgccctacagacctggttatgttgagttgcatgtgttcaagaaataccttggggactatttcgaccataatcgtgaagcttttctttgtgccgagcagaagcctgatccatttggatggattgttgctgaaaagagtgccctgattgctgcagccaaatcgtgcctcaagatggagaaggcacttctcaggtactgtgctagctttctcactcctgacgacaaaaggctgatcctccggatcaaggaccaggcaaagcaaatgatccaatcagagggtgatcaatctttgattgtaactatatgcttggagtgtattgcgaaggaggccgagttaatgtacaattatttgccttgtgattttgacaccaccgaagaagtcgccgtctgcaataaggttcggcggtctgccttgaatcttatgctctacaaaggttctgaatctgctgttgctgctggtgccatgatggtgtgttcctgatactctctccattcattttataggctttattttgactatgcaaaaaccaatattctgctgtaaattctccctatagtattatgttggtagttacaaaatcatagtcagtagcaagtgcttttaattaggaattgttacgtaactcacattttatgggactaatgtctggtcaaagcatgaacttggatagtcaaaccacaccttat

SEQ ID NO: 124958 - DNA, 1085 bp, Zea Mays
ccatatatataaacccgatatttagggtttccttctctcacttgtgtagcccaacgagaagagcggcggcgcgggcggacaaggagcaggcggaggaggagctgtgccaagccacaatgggtatctcacgcgactcgatgcacaagcgccgtgccaccggtggaaagcagaaggcctggaggaagaagcgaaagtatgagcttggtcgccagccggccaacaccaagttgtcaagcaataagacagtgaggagggtccgtgttcgtggaggtaacgtgaagtggagggctcttcgccttgatactggtaactactcatggggaagtgaagctgttacccgcaagacccgtatcctcgacgtggtctacaatgcatcaaacaatgagcttgtgaggacacaaacccttgtgaagagtgccattgtgcaagttgatgctgccccattcaagcagtggtacctcactcactatggagttgacattggtaggaagaagaaaacccctgctgcaaagaaggataatgctgagttctacatgaagaagctacagaggaagaagggcaagagcgctgtagcttagagcattctcatggattgtcttgcaccgaaatgtgtgtcctgatgagtacacttttttttggttagtcgtctcaagttcagagcgttatgccatgttttcagacctgattagtacactgttttctaaaagcgattgagctctagtccaatgtattgataatatctgctgttgtcctattgcggtgatgatgatttgccctgttcgctagctgcaatagttcctatttgttgatgaatttgtttgaagcataaacgcagaacatgtcgtaaagaaaacctttctgtaatattagcttgtaagatcgtcatggcatcactgcatatatagttttccctttttaggtgtcgcccattttgtttaatatgtgcattgcgtaggctgctgattcaactgaatgaagccatccatggtgtgacatggaaatatccataacatgatttgggacaaggcatttagcgatatacgctatcattagttttaacatttactaaagaatcatagttgttt

SEQ ID NO: 124959 - DNA, 617 bp, Zea Mays
ttgctacggcaacttaaaattgatacaaaacaatgacgcaatataattacaatctttgattgatgattttgtagctaacaaacaacgccaccatcagaaaggacacgtcaatgaacataccaaaatccacctttagctaagaaatttacttgtgagaaacccctagctgcaaattccaattcagcataactaaagcagtgaggaggctttcagaaattcagcttggaaaacttttccaataaaacatatgcttgcattacgagttttttgtgaaagttttccaagtgatcttgaggatgttaatccctatacaacaacaatgttgcactgaagcttctcccccacaatgcttctcctcatgcttcaaatccaaagctatgtgacaggatgatgacaagtatgatgctaccgcctcgcccagatgatggggtcttgtggctgccctaactgtgccaccaccttctctaccaccacagttgcggcggcgggcccttgtcagccacagatttccccttcctctatagctgctagtggtgggaagagcccaccatcatcttcttcaagacaaccagcaatgcctagtacaaacaacagtacaacacaacaaccacgccagg

SEQ ID NO: 124960 - DNA, 744 bp, Zea Mays
aagcggaaaccagcgcagcgactcagcctgccgtcaaggagaaggaaagcggaagccgccgagagcacgccgcccgccccgcccacctaaagaaagagagcgcagaggaggcgagacccaccccacccacctaccgcgaaggcttgaccgcggacggaaacaccatccatgtcgtcgtcgtcgtctatgggaggctccctggcgctcgccgccgccacggccgtcgcgttatccggctccctcgtcatcttctcgctctgccgcgcgcacctcgcccacggcgccgagccggagccggagccggagcacgccctgcgcccctgcctctcgtcttcggagaggcggacgcgcggcggggggaaggcgaaggcgaggagacgcaagggcgagaggcgggtgcggttcgcggccgacgtcgtcgacaatgagggcgcgacgcgcccggtcaggttctccccgcccgcgccgtcgtcgtcggcggccacgtgtggggacgcggcgcggtcggaagaccccatgatgcctgccaaccgggaggcgctctaccgcggcatgctccgcgaccgctccacgcaccgggtcacctgctcctactgaccctgacgctcaccgccggagagctcgtttgttcgttgcctctcttcgtttcgtttgttcgttcgccgttagcgttcggtcggtagtaggcaggctgttaacttcggaggttcatcctcttgctgacggaggattttgttaatggaa

SEQ ID NO: 124961 - DNA, 1997 bp, Zea Mays
aaagaattttttttccgcataggctcagggttgcgtggcagcgtggagcatattcaacaccgccgtcagcccgtcaccgcaggccgcagcaggctcgcttcgcttgcgcctccccccttccccgccgtcgccgccgccgccggagccatgtccggctcggcgttgcaggcggtggagccccgcccagcggcagccgcgacgactgccgcggcttctccggccgccacggctcagcccgcggcggtggcagcggctaggggagcgagagggtgtggcggcccagcgcgtgcatcggggccggaggcaacgatggagcacgtgctgctggcgctgcgggagacggaggcggaacgggaagcgcggatccgcggcgtcttcggcttcttcgacgccgcggggcagggccacctcgagcacgcgcagatcacggccggtctcatcgcgctgcgcgtccccgaggagaccagcggagcaggcgccgaggccgaggactacgcgcgcgcgctgctgcgggcctgcgaccgggaccgcgacggccgcgtcggttatgacgacttccggaggtacatggacgacaaggagctcgagctctaccgcatcttccaggccatcgacgtcgaacacaacggatgtatcctgcccgaggagctctggcacgcgctcgtcaaggctggtatagaaattgatgatgaagagcttgcaagatttgttgagcatgtggataaggacaatgatggtattattacttttgaggagtggagagattttcttttgctttatcctcatgaagcaaccatggaaaacatatatcatcactgggaaagagtctgccttgtagatatcggtgagcaggctgctataccagaagggataaacaaacatgtaagtgcgagcaaatatctgattgcaggaggcatcgctggtgcagcatctcgcactgcaactgcacctcttgatcgcctcaaagtaaatatgcaagtgcaaacgaactgtattgcagttgtagatgtagttaagggtatatggagagaaggtggtctactgggattttttagagggaatggactgaatgtggtaaaagttgctccagaaagtgctataaggttctatacctatgaaatgcttaaagaatacataatgaaaagtaaaggagaaaataagggtgacattggtacttctggacgtctcatggctgggggtttggctggtgctatcgcacagacagtgatttatcccatggatttggtgaagactcgtctgcagacttatgagggaggcagaattcctagccttggcgcactatcaagggatatatggacacatgaaggtcctcgagcattctacagaggccttgttccatcattgcttggcatggtcccttatgctggaattgatcttactgtttatgaaacactgaaagaaatgtccaggacatatgccctcgtggacaaagatcctggccctttagtacagctgggctgcggaacagtctctggagcgctaggagcgacatgcgtttatcctttacaagtcatcagaacaagaatgcaagctcagccagccaattcagaggatccatatagggggatgaccgattgtttccggataactctgcgtcgtgaaggagtttctggattttacaaaggccttgtaccaaatcttcttaaagtggtgccagctgcaagcattacctatcttgtttatgagacaatgaagaaaagtctctccctagattaagtgactttgtagattctggatatcagcgactgactctatagatagtgtcgaggcatgatcttccttgatgagtaggttctaacttaatgggcctgaggtgtaagatagtagtatttttggcctcaggatacagatgatgcagggcattttcattattattggtagaaataaaacgcgatacctgtcagaacatcaagggcccatattggaatgctagtagttggccttctttgtaaaagcctctactatatatatatata

SEQ ID NO: 124962 - DNA, 2011 bp, Zea Mays
aaagaattttttttccgcataggctcagggttgcgtggcagcgtggagcatattcaacaccgccgtcagcccgtcaccgcaggccgcagcaggctcgcttcgcttgcgcctccccccttccccgccgtcgccgccgccgccggagccatgtccggctcggcgttgcaggcggtggagccccgcccagcggcagccgcgacgactgccgcggcttctccggccgccacggctcagcccgcggcggtggcagcggctaggggagcgagagggtgtggcggcccagcgcgtgcatcggggccggaggcaacgatggagcacgtgctgctggcgctgcgggagacggaggcggaacgggaagcgcggatccgcggcgtcttcggcttcttcgacgccgcggggcagggccacctcgagcacgcgcagatcacggccggtctcatcgcgctgcgcgtccccgaggagaccagcggagcaggcgccgaggccgaggactacgcgcgcgcgctgctgcgggcctgcgaccgggaccgcgacggccgcgtcggttatgacgacttccggaggtacatggacgacaaggagctcgagctctaccgcatcttccaggccatcgacgtcgaacacaacggatgtatcctgcccgaggagctctggcacgcgctcgtcaaggctgtttaatgtttgcaggtatagaaattgatgatgaagagcttgcaagatttgttgagcatgtggataaggacaatgatggtattattacttttgaggagtggagagattttcttttgctttatcctcatgaagcaaccatggaaaacatatatcatcactgggaaagagtctgccttgtagatatcggtgagcaggctgctataccagaagggataaacaaacatgtaagtgcgagcaaatatctgattgcaggaggcatcgctggtgcagcatctcgcactgcaactgcacctcttgatcgcctcaaagtaaatatgcaagtgcaaacgaactgtattgcagttgtagatgtagttaagggtatatggagagaaggtggtctactgggattttttagagggaatggactgaatgtggtaaaagttgctccagaaagtgctataaggttctatacctatgaaatgcttaaagaatacataatgaaaagtaaaggagaaaataagggtgacattggtacttctggacgtctcatggctgggggtttggctggtgctatcgcacagacagtgatttatcccatggatttggtgaagactcgtctgcagacttatgagggaggcagaattcctagccttggcgcactatcaagggatatatggacacatgaaggtcctcgagcattctacagaggccttgttccatcattgcttggcatggtcccttatgctggaattgatcttactgtttatgaaacactgaaagaaatgtccaggacatatgccctcgtggacaaagatcctggccctttagtacagctgggctgcggaacagtctctggagcgctaggagcgacatgcgtttatcctttacaagtcatcagaacaagaatgcaagctcagccagccaattcagaggatccatatagggggatgaccgattgtttccggataactctgcgtcgtgaaggagtttctggattttacaaaggccttgtaccaaatcttcttaaagtggtgccagctgcaagcattacctatcttgtttatgagacaatgaagaaaagtctctccctagattaagtgactttgtagattctggatatcagcgactgactctatagatagtgtcgaggcatgatcttccttgatgagtaggttctaacttaatgggcctgaggtgtaagatagtagtatttttggcctcaggatacagatgatgcagggcattttcattattattggtagaaataaaacgcgatacctgtcagaacatcaagggcccatattggaatgctagtagttggccttctttgtaaaagcctctactatatatatatata

SEQ ID NO: 124963 - DNA, 2021 bp, Zea Mays
aaagaattttttttccgcataggctcagggttgcgtggcagcgtggagcatattcaacaccgccgtcagcccgtcaccgcaggccgcagcaggctcgcttcgcttgcgcctccccccttccccgccgtcgccgccgccgccggagccatgtccggctcggcgttgcaggcggtggagccccgcccagcggcagccgcgacgactgccgcggcttctccggccgccacggctcagcccgcggcggtggcagcggctaggggagcgagagggtgtggcggcccagcgcgtgcatcggggccggaggcaacgatggagcacgtgctgctggcgctgcgggagacggaggcggaacgggaagcgcggatccgcggcgtcttcggcttcttcgacgccgcggggcagggccacctcgagcacgcgcagatcacggccggtctcatcgcgctgcgcgtccccgaggagaccagcggagcaggcgccgaggccgaggactacgcgcgcgcgctgctgcgggcctgcgaccgggaccgcgacggccgcgtcggttatgacgacttccggaggtacatggacgacaaggagctcgagctctaccgcatcttccaggccatcgacgtcgaacacaacggatgtatcctgcccgaggagctctggcacgcgctcgtcaaggctggtatagaaattgatgatgaagagcttgcaagatttgttgagcatgtggataaggacaatgatggtattattacttttgaggagtggagagattttcttttgctttatcctcatgaagcaaccatggaaaacatatatcatcactgggaaagagtctgccttgtagatatcggtgagcaggctgctataccagaagggataaacaaacatgtaagtgcgagcaaatatctgattgcaggaggcatcgctggtgcagcatctcgcactgcaactgcacctcttgatcgcctcaaagtaaatatgcaagtgcaaacgaactgtattgcagttgtagatgtagttaagggtatatggagagaaggtggtctactgggattttttagagggaatggactgaatgtggtaaaagttgctccagaaagtgctataaggttctatacctatgaaatgcttaaagaatacataatgaaaagtaaaggagaaaataagggtgacattggtacttctggacgtctcatggctgggggtttggctggtgctatcgcacagacagtgatttatcccatggatttggtgaagactcgtctgcagacttatgagggaggcagaattcctagccttggcgcactatcaagggatatatggacacatgaaggtcctcgagcattctacagaggccttgttccatcattgcttggcatggtcccttatgctggaattgatcttactgtttatgaaacactgaaagaaatgtccaggacatatgccctcgtggacaaagatcctggccctttagtacagctgggctgcggaacagtctctggagcgctaggagcgacatgcgtttatcctttacaagtcatcagaacaaggtaaacgatagtatttcattgatagcaatgtaggcttgtacagccatgaagctctgcagaatgcaagctcctttctattaatgttgtttgcagaatgcaagctcagccagccaattcagaggatccatatagggggatgaccgattgtttccggataactctgcgtcgtgaaggagtttctggattttacaaaggccttgtaccaaatcttcttaaagtggtgccagctgcaagcattacctatcttgtttatgagacaatgaagaaaagtctctccctagattaagtgactttgtagattctggatatcagcgactgactctatagatagtgtcgaggcatgatcttccttgatgagtaggttctaacttaatgggcctgaggtgtaagatagtagtatttttggcctcaggatacagatgatgcagggcattttcattattattggtagaaataaaacgcgatacctgtcagaac

SEQ ID NO: 124964 - DNA, 1052 bp, Zea Mays
ggggaggccgccattatcgcagcacgccgccgcgtcatctaatcgaggcgagggggagacagagaggaggaggaaaaacgggaaataaatcttcatcaagcaacaggtagcgggagcggacgcgaggtgaaccactagctggccagtgccggccgaggctagggttccggggatcgcgggcgcgggctcgggctcgactttcgtagcctagccgccgccgccggccgcgcgggggaaccggatgctatgctgctgagctgcgggtcgctctcctcctgggtgcgccgcttcgtcgcctgcgttggaggttgttttggttgtgcccagcctactccaataatagctgttgacaagcctacaaaaggtttaagaattcaaggacgctcagtaaaaaggcgcaacgtatcagacgacttttggagctcgagcccacacgaaatggagaatagtgccttgcaatcccggcacagtatgtcctcaatcagcacagcagcacagcctaatgatcagcatgtttctggaactagcagctccccaaatgagtttgtaaatcaaggtcttctactatggcaccagactagacagcagtggattggaaaccgaaggcttaattctcagggtcaacaaagtcaagaaccaaaaataagttgtaatgctacatacgaaagcctgctcggaagctcgaagccgttcccacaaccgacccctcttggtgaaatggtggattttctcgtggtcagctgggagcaggaaggcttgtacggttagagctggttattggaaggtgccgttggttagagctggttattggaaggtgccgtttgtaatcacgttattattcgctgaaatgtacgcagcttgagtaggctgcagaagtctgtgtcgtgttgaatgtggattgcctcggagacaggaacaggatgacaccccttttaagcaaatgtataaaatattcgttgtttttattactagtataattgtttgtgttcacagcgttcagtttacgagttcattgttctacactacagtactatgtataaagttcgttttcg

SEQ ID NO: 124965 - DNA, 1057 bp, Zea Mays
ggggaggccgccattatcgcagcacgccgccgcgtcatctaatcgaggcgagggggagacagagaggaggaggaaaaacgggaaataaatcttcatcaagcaacaggtagcgggagcggacgcgaggtgaaccactagctggccagtgccggccgaggctagggttccggggatcgcgggcgcgggctcgggctcgactttcgtagcctagccgccgccgccggccgcgcgggggaaccggatgctatgctgctgagctgcgggtcgctctcctcctgggtgcgccgcttcgtcgcctgcgttggagcagaggttgttttggttgtgcccagcctactccaataatagctgttgacaagcctacaaaaggtttaagaattcaaggacgctcagtaaaaaggcgcaacgtatcagacgacttttggagctcgagcccacacgaaatggagaatagtgccttgcaatcccggcacagtatgtcctcaatcagcacagcagcacagcctaatgatcagcatgtttctggaactagcagctccccaaatgagtttgtaaatcaaggtcttctactatggcaccagactagacagcagtggattggaaaccgaaggcttaattctcagggtcaacaaagtcaagaaccaaaaataagttgtaatgctacatacgaaagcctgctcggaagctcgaagccgttcccacaaccgacccctcttggtgaaatggtggattttctcgtggtcagctgggagcaggaaggcttgtacggttagagctggttattggaaggtgccgttggttagagctggttattggaaggtgccgtttgtaatcacgttattattcgctgaaatgtacgcagcttgagtaggctgcagaagtctgtgtcgtgttgaatgtggattgcctcggagacaggaacaggatgacaccccttttaagcaaatgtataaaatattcgttgtttttattactagtataattgtttgtgttcacagcgttcagtttacgagttcattgttctacactacagtactatgtataaagttcgttttcg

SEQ ID NO: 124966 - DNA, 1640 bp, Zea Mays
aaccagctccggcccaaacacagccacgagcacctacacccccccgctgtcacctctccttccatcgccacaggcggcccttctccgcggaagccggcgggccgccgcctcccttacccctctcgctgtgctcctccgcaccgtcattccctagcattccccacgggcgagtggcggcttggtcgagatgggcgatgcggttgatgacatcatctgtgcaacggatgcggcggtcgccgtcgaggatgcggccagtgggaagcccgcaatgctctctagcttaggggggcagggtgaggaagagcatgaggagaaggacaatgaggacaagtcaggcgagagcgaggtgatcaacccgccagaagacgctggcggggaggccacctcacccctggaagggttgaagcctcgcctttccaaggggaatcaaagccatggacctaatgctgtcaaatcaaagagcccaacgagtggagacgaaggtcagacgaggaaaaaggctcccaattcttctcttcctaaggcacccattgtccaggtgtcccatggtgacgctggtgtcggcagtaataaagatggcaagaatgagtctcgctcatcttccgtggatgcaacattgctggatgactccaaggagaaaaggaaaactcaaaagccattagcacagctcttttccatcaaaagtgacgaagaacagtcaaatggtgagagtgcaaagcctcgaaaagttggcagcattccatcatatggtttcaccttcaagtgtgatgagagatctgaaaaaagaagagagttctattcgaagcttgaggagaagattcatgcaagagagttagaaataagcaatttgcaagcgaaatcaaaggaaactgaagaagcagaactcaaaatgctgagaaagagtttgaacttcaaggcaacaccaatgccaagcttctataaggaaccaactcctgtcaaggttgaattgaaaaagatccccccaacaagagccaaatcgccaaagtttggtcgttctaaaaacaagtccacaccagagactgaagaaaatgctaccgcggaccagcctgcccacctgagcctcgaggagaatgtttctcaaaccggtgtgaaaaaaccaaccccgttgaatccagcaaagaagccccagaggaagtcactccccagactgccatctgaagaaaccggtccgcttgatgccacctcaaggcaacttataaagagcgccaagctggatgcagttagtgctccggagacaggatcagctacaggacaggcacaactacaaggaagtcagacggaaacagattctggtcaggggccagttgaagctggagctaatcctgatgaacaagacgccagcgaacagagtgttgtttagtgaagatcacgatgaccaaaccagctgatttgtgatgtgcatggtgttcctcggctttgtataatatattgtgcttgcctgctagagtaacctgtagtctgtattatgttatgtgatatatactactactcctggtttattttcctggaattgagccgtatgttgcttatcaatctagatagcttttgttcatattctacagatatatatatatccaaattgtcccgagtcatttgcagttggtggcaagtgcgttcat

SEQ ID NO: 124967 - DNA, 1781 bp, Zea Mays
aactaaccagctccggcccaaacacagccacgagcacctacacccccccgctgtcacctctccttccatcgccacaggcggcccttctccgcggaagccggcgggccgccgcctcccttacccctctcgctgtgctcctccgcaccgtcattccctagcattccccacgggcgaggtaaagaaacattctcccaccccctccagccccataggtgccaccgggatttctcttgcggttgcttggcccagatctgcggcgcattcggcgtttctgatctcgcgtgcacctcgtttccctcggcggtggatcagtggcggcttggtcgagatgggcgatgcggttgatgacatcatctgtgcaacggatgcggcggtcgccgtcgaggatgcggccagtgggaagcccgcaatgctctctagcttaggggggcagggtgaggaagagcatgaggagaaggacaatgaggacaagtcaggcgagagcgaggtgatcaacccgccagaagacgctggcggggaggccacctcacccctggaagggttgaagcctcgcctttccaaggggaatcaaagccatggacctaatgctgtcaaatcaaagagcccaacgagtggagacgaaggtcagacgaggaaaaaggctcccaattcttctcttcctaaggcacccattgtccaggtgtcccatggtgacgctggtgtcggcagtaataaagatggcaagaatgagtctcgctcatcttccgtggatgcaacattgctggatgactccaaggagaaaaggaaaactcaaaagccattagcacagctcttttccatcaaaagtgacgaagaacagtcaaatggtgagagtgcaaagcctcgaaaagttggcagcattccatcatatggtttcaccttcaagtgtgatgagagatctgaaaaaagaagagagttctattcgaagcttgaggagaagattcatgcaagagagttagaaataagcaatttgcaagcgaaatcaaaggaaactgaagaagcagaactcaaaatgctgagaaagagtttgaacttcaaggcaacaccaatgccaagcttctataaggaaccaactcctgtcaaggttgaattgaaaaagatccccccaacaagagccaaatcgccaaagtttggtcgttctaaaaacaagtccacaccagagactgaagaaaatgctaccgcggaccagcctgcccacctgagcctcgaggagaatgtttctcaaaccggtgtgaaaaaaccaaccccgttgaatccagcaaagaagccccagaggaagtcactccccagactgccatctgaagaaaccggtccgcttgatgccacctcaaggcaacttataaagagcgccaagctggatgcagttagtgctccggagacaggatcagctacaggacaggcacaactacaaggaagtcagacggaaacagattctggtcaggggccagttgaagctggagctaatcctgatgaacaagacgccagcgaacagagtgttgtttagtgaagatcacgatgaccaaaccagctgatttgtgatgtgcatggtgttcctcggctttgtataatatattgtgcttgcctgctagagtaacctgtagtctgtattatgttatgtgatatatactactactcctggtttattttcctggaattgagccgtatgttgcttatcaatctagatagcttttgttcatattctacagatatatatatatccaaattgtcccgagtcatttgcagttggtggcaagtgcgttcat

SEQ ID NO: 124968 - DNA, 833 bp, Zea Mays
cgagcaaacagtcatacactgggacgcggagtcgcggacgcctgcgcgatcagcgaacggaagaccgtggaagcaaagaggcgcaagcgagcacggaacaaatacaccttcaggtggcctccctccgactgccgactgaatcttccacctcgcttcgcgcctccggctccgcgccgggcccgcataatctgtgctcgggatcgcctcttcccgcggcaaatgggggccgactccgaggacgccgtcaagcagctcagcctcctcatggagcaagtggaggccccgctgaagagatcgtttcagaatatgcaccagggctatcctaaagaaacactggtgcgtttccttaaggctagagagtggaatgtagcaaaggctcataaaatgattgtagaatgtttgaattggaggattcaaaatgaaattgatagtgtgctagagaggcctatagtcccagtagatttatacaggtcaatacgtgattcacaacttattggcctgtcaggatacacaaaggagggtctcccaatttttggcattggtgttggacatagcacatatgacaaagcttcggtccactactatgtgcaatctcatatccagattaacgagtaccgtgatcgtataattttgcctaggctgacacaacagtttgggcggcctgttaccagctgtataaaagtgctggatatgactggtttgaagctatcagcactaagccaaataaagatgttgacttccatatcgacagttgatgatctaaattaccctgaaaagacagagacctattatgtagtcaacgttccatacatattttctgcttgttggaaggt

SEQ ID NO: 124969 - DNA, 956 bp, Zea Mays
cgagcaaacagtcatacactgggacgcggagtcgcggacgcctgcgcgatcagcgaacggaagaccgtggaagcaaagaggcgcaagcgagcacggaacaaatacaccttcaggtggcctccctccgactgccgactgaatcttccacctcgcttcgcgcctccggctccgcgccgggcccgcataatctgtgctcgggatcgcctcttcccgcggcaaatgggggccgactccgaggacgccgtcaagcagctcagcctcctcatggagcaagtggaggccccgctgaagagatcgtttcagaatatgcaccagggctatcctaaagaaacactggtgcgtttccttaaggctagagagtggaatgtagcaaaggctcataaaatgattgtagaatgtttgaattggaggattcaaaatgaaattgatagtgtgctagagaggcctatagtcccagtagatttatacaggtcaatacgtgattcacaacttattggcctgtcaggatacacaaaggagttttcaataggaaagttaatatgccgaatgaagatcgcactgaagaggttaaagtgttaacttatattgattgtcaaacttccacggaatgatgtcctactaactgcaacatgggttattaagggtctcccaatttttggcattggtgttggacatagcacatatgacaaagcttcggtccactactatgtgcaatctcatatccagattaacgagtaccgtgatcgtataattttgcctaggctgacacaacagtttgggcggcctgttaccagctgtataaaagtgctggatatgactggtttgaagctatcagcactaagccaaataaagatgttgacttccatatcgacagttgatgatctaaattaccctgaaaagacagagacctattatgtagtcaacgttccatacatattttctgcttgttggaaggt

SEQ ID NO: 124970 - DNA, 1802 bp, Zea Mays
acgctgcagcggtgcagtctgcttttttttcttcgtccatcgccgcccccagcttatttctttctctctctcgtggcgacgccggggcggccgtcgctgccgcctacggtgcccaggtcttcctgcccccccttcgccggcgccgagcacgagaagaattgtagttgcatcctaagcatggactgtaatagtgatgatcttgataagcagaatgaagtgacgggatctcgagtattcattcctcaagatgcccaaggggttatccttgcttttcttcctggcagggatgttgtcaagctccgcagtgtgtgcaagttctggctagagtgcgttgaagaacatagttttatggaccgtcacctgaataatgcttgccgctaccaccagtccattgcttgtttcacctcgcttgatcatggcctagtccacatgtacacattcgatcctgccacaatgaatttcagaagtgtggagctcgtgttctcaagtaggtttaacatgtcagccccctgcaacggcttggtgtgtgcctatgatataaaaggcgatgctgaggtcttgaatcccacaacaaggaagcatttgaggctcccagattcagcactcaagtcacggtctctttactctgaatattttgttggattcgtgcactccacaaaacagtacaaggtggtctctatccgtcaccatgtgcggttcttgacatttgaaatctgcactattggcacaccgtcgtggaggacaatacatgaatctgcagagctcctagtggcaacgaaggcagtcattgttaaagatggcatgtattggctacttctcgatgaggcttcctcctattcgtctcgagaaatcctgacgctcaacctgacagacgagaggttctcaaaaattgccatcccagatgctgtaaaaagccacaagttggaactattcgagggggaaggaaagctccgtttgttgtcgacacattccgatggatctagcaatatagtgtcagatatttgggtagcggacttggctggtgaagactggatccacttgcagactatcatccccctgacgcatctgggcataagcccgtttttccagctcaagacgaaggtcttcttcggcaaccagaagagactcctctgcgtagatcttcaggacggtacggtttcatacatcaacatgccttccggtgagactttgatatcctgtggcatgtttgtggagagctttgcgcctgccgcgacaggcctggtgagctcgactgcgtcatatggtgaccgctctcgtctggctgaaccgtccatggcggaccctgggccatctttccgtggcgcagggtcatcctcggcaagccgcggacggtcttctggtctcaccggatggtcctcagctgaccttgagcagtccttcaagagaacgaagaggacgacaaacatgcagtggaagatatcgaaacatagagcaatctaggagcgcctggcatggcctatggattaccctctagactgtacagcagctgtaattttttctgtaggtgggtgcaatgctgtacttgctcattgctatggtaccactggaagcaaccatggcaatggggcggggaatacaagaggaaatcaatcaataaatgtcaagatcaaggggtggctttgactataacccctcttttggtaaatgtctggtggtagtttgcttcgtacttgtataaactgtatctgtatgtgtgcgtcgcaatttgtaaacaaacaggacgagtataagtgttgcccagacatgttagaccatacaaactgaaggctctgaagttgaac

SEQ ID NO: 124971 - DNA, 2287 bp, Zea Mays
ccgtcaaccttctttctcgcgcccaaacaggagttctctcgttctaaaaaaagattgcgaaaggacatgaatcccatgaggatcgagcatatggaggagcctagttcttgatccaatctcccagcatgcttgacgaacgcgaagacgaacgtggggcgaacgctgcatgctaacgcggttgatcttattcctaataatccgtagcgattcgggagattgatttttgatcatgcacaagcgatccaaatcctgcgagccgtacaggaagatggaggagcgcgtcgggtgcagcaatgccgcgacgtccttcgacgactccgccaccggcaggacggcgggcgccgcggcggcgcagtgctccacggtgtcggtgttcctcgccaagatcaacggcgccgcgcgccacgtcaccgccgtctggagcaagagcctcatcaaccagtccttcaccgtctccatcgaacggccgggcgacggcgacgggccggtcacccacagggtggagctgaagccgtggccgttctggagcaagaagggcggcaaggcgctcgacgtgggcggcggcgaccgcgtcgacatgttctgggacctgcgctcggccaagttcgcggcggcgggcagcagcccggagcctgccggcggctactacgtcgcgctggtcagcaacgacgaggtcgtcctcctgctcggcgactgcaagaaggacgcgtacaagcggaccaaggcccgcccgtcgctggaggacgccgtgctggtgtgccgccgggagagcgtgttcggccgccgcagcttcgcggcgcgcgcgcggctcgacgccaggaggagcaaggagcatgagatcgtcatcgagtacgcgctcgccgccgcgggctccagcagggacccggagatgtggatcacggtggacggctccgtgctgctgcatgtcaagagccttcagtggaagttccggggcaatgagacgctgctcgtcgacgaggagccggtgcaggtcatctgggacgtgcacgactggctcttcgccgggccgggcacgcaggcagtcttcgtcttcaagcccggcgcaccgccggagatccaagaggacagcggagggaacgccatccagggtgacgggactgacttctgcttcttccttcaggcatggaggacggaatgaggcggtgaaatttgaagggcaaggcaatgatcttgtcctcgcgctactgatctgttgatgtgaatgacattgaaagcgtatccagctttacaaatttgtaaccaggaacacttcgtcaatccaagtttctgtcactggaaatttaatccaagcacacaagatatacaactttctttttacactgcaatggaactgacgtaagatatcaggtacgtaagcaactgcgaagtgtttataactcatagcagatacaacaagagcacaagattcatatcgttggccctgatggccacatacattcactccaccagaaaagctgtgtagagcccaaagaactgcttattctagaacaagtcatgactatcatcatagcaactaatctctactctccatctctcccttgttaccaacgtagctgtgaactagtctatttcctccatctgcacagtggcactgcaatgtgcaatctcaaatacctgaacatggcaacaaaaatatgaaacaaaaaagaaggcgtgatgtctagatgatcatctatcattcactccatcacagcaacaccgccagctgcctttatctttgctatgatcgcttccgcttcctcctttgtgagcgattgcttcagaacgactggggccttctccaccagctccttggcctccttcagccccagatccgtaaacgtcctgatctccttgatgatcttgatcttcgcagcagcgtcgaacttctccaacctgacgtcgaagactgtcttctcggctttcttctcagcctttccagaacctgccccagagccgacctgggcaccgaaaccgaaaccctggccagataccgcctgtggcggctcctggttcagtctgaggagaagggctggagcaatctgtttgatctcctcgggagggagagcagcgatgcgatcagctagttccacgactttctccgaaggcggcggcataggcccgtaggggtcgtatacatcggggtacttgtacttcttagcacccatgtcctttgcagcctcagtgctgtatagatgagcccaaattgctgaaagacgactgccagaggatggttttgaaagacatagccgtcgtgctattgtacagagactcatcctaatatcag

SEQ ID NO: 124972 - DNA, 1295 bp, Zea Mays
gtcgagttgtccagccatttttcttttctcggattctggattcatttcatgttcgcgtttcgtttattgtttttctaattgcccattcattcatgccgttcgtgcccacgcatgcagcccatgaggatcgagcatatggaggagcctagttcttgatccaatctcccagcatgcttgacgaacgcgaagacgaacgtggggcgaacgctgcatgctaacgcggaagatggaggagcgcgtcgggtgcagcaatgccgcgacgtccttcgacgactccgccaccggcaggacggcgggcgccgcggcggcgcagtgctccacggtgtcggtgttcctcgccaagatcaacggcgccgcgcgccacgtcaccgccgtctggagcaagagcctcatcaaccagtccttcaccgtctccatcgaacggccgggcgacggcgacgggccggtcacccacagggtggagctgaagccgtggccgttctggagcaagaagggcggcaaggcgctcgacgtgggcggcggcgaccgcgtcgacatgttctgggacctgcgctcggccaagttcgcggcggcgggcagcagcccggagcctgccggcggctactacgtcgcgctggtcagcaacgacgaggtcgtcctcctgctcggcgactgcaagaaggacgcgtacaagcggaccaaggcccgcccgtcgctggaggacgccgtgctggtgtgccgccgggagagcgtgttcggccgccgcagcttcgcggcgcgcgcgcggctcgacgccaggaggagcaaggagcatgagatcgtcatcgagtacgcgctcgccgccgcgggctccagcagggacccggagatgtggatcacggtggacggctccgtgctgctgcatgtcaagagccttcagtggaagttccggggcaatgagacgctgctcgtcgacgaggagccggtgcaggtcatctgggacgtgcacgactggctcttcgccgggccgggcacgcaggcagtcttcgtcttcaagcccggcgcaccgccggagatccaagaggacagcggagggaacgccatccagggtgacgggactgacttctgcttcttccttcaggcatggaggacggaatgaggcggtgaaatttgaagggcaaggcaatgatcttgtcctcgcgctactgatctgttgatgtgaatgacattgaaagcgtatccagctttacaaatttgtaaccaggaacacttcgtcaatccaagtttctgtcactggaaatttaatccaagcacacaagatatacaactttcttttt

SEQ ID NO: 124973 - DNA, 1571 bp, Zea Mays
cgcccgcagcgcccccccccccacttcctttccctctctcacggcggcggcgagatgaaggtaacggtaatgaccggcgacgagcagatcgtcaccctcgacgtcgaccgcgacgaatccgtggaaaatctcaaggcgctactcgaagtggagactcgggtgccgctgcggcagcagcagattcacttcaatgggaaggagatgcagaacacggagaagctcagcgccgctggggtccaggacggcgaccttgtcatgatgttttccaccagcgaaaggccatctcaggatggcttaagggtaaatcctgatggaactgctgtgaatcctcaagcttttcaacaacatgctcgaggtgattcacaacttatggcacagctccttcagaatgatcctcaactagcacaagctatccttggggatgacaccactgagctacagaatatcctgcggtcccgccaccaacaaagaacagaactaaaacgtaaacaagaagaagagcttgctttattgtatgctgatccttttgatgtggaagcccagaagaaaattgaagctgcaatccggcagaaaggcatagatgaaaattgggaggctgcattagagcacaatcctgaagcatttgcccgagtggtaatgctatatgtggatatggaggtcaatggtgtacctttgaaggcttttgttgacagcggagcgcaatcgactatcatatcaaaaagttgcgctgaacgttgcgggttgctgaggcttcttgatcagcggttccgagggattgctgttggagtcggtcaatcagagatactaggaagaatacatgtagccccaataaagattgggaatatattctatccttgttctttcaccgtattggatgctcctaatatggaattcctattcggacttgacatgctgcgaaagcatcagtgcatgattgacctaaaggacaatgttctcagagtgggaggtggcgaagtttcagtgcccttcttacaagagaaagacatccctgcacacatacgcaatgaagagaaactgtctaagttagggtctctcagccaagcaactggagagtcatcaaggacacgtgagggtactcccaatgcgctacaacaaacccctccaggagctccagctgcaaaccctccacagcagggaggagattttgaagcgaaagtcacgaagcttgtggagctcggttttgacagggcgtcggtgacacaagcgctcaagttgttcaacgggaatgaggagcaagctgctgcgttcttgtttggtggttagactggtgggagcagccgttcctggctttgtgttcgctcaaccctttccagggttgagtacttgaatatttgatacgaaagtgattaaagtatttggatactgtttgtccagtgaaaggacttacttttagaggttttatgttttctcttgtttctgagaacaaacatttgttttctgtacctgatacatagactgatagacaccagaatggagacagaactgtgaagatttttttttattaagagtgtttatttgagccagcgaaagtgcgactagccgagtttgtt

SEQ ID NO: 124974 - DNA, 1568 bp, Zea Mays
cgcccgcagcgcccccccccccacttcctttccctctctcacggcggcggcgagatgaaggtaacggtaatgaccggcgacgagcagatcgtcaccctcgacgtcgaccgcgacgaatccgtggaaaatctcaaggcgctactcgaagtggagactcgggtgccgctgcggcagcagcagattcacttcaatgggaaggagatgcagaacacggagaagctcagcgccgctggggtccaggacggcgaccttgtcatgatgttttccaccagcgaaaggccatctcaggatggcttaagggtaaatcctgatggaactgctgtgaatcctcaagcttttcaacaacatgctcgaggtgattcacaacttatggcacagctccttcagaatgatcctcaactagcacaagctatccttggggatgacaccactgagctacagaatatcctgcggtcccgccaccaacaaagaacagaactaaaacgtaaacaagaagaagagcttgctttattgtatgctgatccttttgatgtggaagcccagaagaaaattgaagctgcaatccggcagaaaggcatagatgaaaattgggaggctgcattagagcacaatcctgaagcatttgcccgagtggtaatgctatatgtggatatggaggtcaatggtgtacctttgaaggcttttgttgacagcggagcgcaatcgactatcatatcaaaaagttgcgctgaacgttgcgggttgctgaggcttcttgatcagcggttccgagggattgctgttggagtcggtcaatcagagatactaggaagaatacatgtagccccaataaagattgggaatatattctatccttgttctttcaccgtattggatgctcctaatatggaattcctattcggacttgacatgctgcgaaagcatcagtgcatgattgacctaaaggacaatgttctcagagtgggaggtggcgaagtttcagtgcccttcttacaagagaaagacatccctgcacacatacgcaatgaagagaaactgtctaagttagggtctctcagccaagcaactggagagtcatcaaggacacgtgagggtactcccaatgcgctacaacaaacccctccaggagctccagctgcaaaccctccacagggaggagattttgaagcgaaagtcacgaagcttgtggagctcggttttgacagggcgtcggtgacacaagcgctcaagttgttcaacgggaatgaggagcaagctgctgcgttcttgtttggtggttagactggtgggagcagccgttcctggctttgtgttcgctcaaccctttccagggttgagtacttgaatatttgatacgaaagtgattaaagtatttggatactgtttgtccagtgaaaggacttacttttagaggttttatgttttctcttgtttctgagaacaaacatttgttttctgtacctgatacatagactgatagacaccagaatggagacagaactgtgaagatttttttttattaagagtgtttatttgagccagcgaaagtgcgactagccgagtttgtt

SEQ ID NO: 124975 - DNA, 683 bp, Zea Mays
ccgtcggctctactcggcgaccggaagcggacaccgcactgggccgaccatgccggtttcggctcacgcctccgcccctctgacgagtccatgtcggggcgagcgaatccgtgctccgcgacgcggacgggaggggctgcgcgcgcgcgggggcggggatcggccggccacgagcccatggtctatcgatcgattgatcgatcgatcacacgctcgcctccacgctgctgcagtcgcaaaaccctcttttttctccgccggcctgcgccgatccacccaccgcagtccaggcgcagcgcaagtccccgttttgatccagctagctgcaactgcaatgcaaccgcgctagccgctcgctcgttccagctccgtccccctctctcctcgctcgctcgtcgtccagtccagctccgtccgttcttgcctcctcctccggctcccgcgcgcgccccccgatggccatgctgagggtgtgtgactgggacgtagacatcgactcggccctcgacttggtgctctggtgcctgcccctgctcctcgtggcctgcctcatcggcggccgcgtggccaggggaggcccgcccgaccccgtcgccgacttcgcggcagccgccgccgccctcgtcgccatcgccaatgtcctcgcgcgccgcctcaggctccgctgcttctggcgccgatag

SEQ ID NO: 124976 - DNA, 1281 bp, Zea Mays
gcgcctctgcttctccttctctccatcccatcccatcccctcccctcccaccgtatgcgcaacccgcgcctcccttcccggtcccctccctccaccacccgcccgcaggcgcaggcgtcccccgtgaccccgtcgatcgcccctcggccctgccggtggagttagtgctggagatccatccggacttggatttctcctcggtccaagcaaggaggttttggcaccatacaagatcgtcgaaattgcggaaatgggaggtgtaattagtggtgactcaccaaggcacacctcgccggcatctaagttagagaagaagatggttgaagccatgcagcagagagcattaaaaggaacctcagtgaaatcattgaacagtgtcatcatgaaatttcctaagatcgacgagagtttgagaaaatgcaggactatctttcagcaatttgatgaagattccaatggtgaaatagatcagctggaacttaagcattgtttccaaaatttgggcattgaatcgactgaccaggagataaaagatctgtttcaggcatgtgacatttatgagaacatgggcatgaagttcaatgagttcattgtcttcctgtgccttgtttatcttctagatgatcctgcagtgtctgaagttagaaaaagaatggggttaggtagccttgaaccaacatttgaaacattggtcgagtcttttgtcttcttggacaagaacaaagatggatatgtcagcaagagcgagatgatacaagcaataaatgagactattggaggagagcgctcttctgggcgcataggcatgaaaagattcgaggagatggactgggacaagaatggaacggtgaccttcaaggaattccttttcgctttcactcactgggtggggatcaataatgaagaagacgaggacgaagaagaatgagcgtgtcggctgaaggagattcctttccgaatcgaccgagccagccagccagcccccctcaggggaggcctccagcagctccctcctgccgtggatcagaagcggtagagctcatgtgttctctgtgtgtgccgagctgatggtagatgttcatgttcgtataaatagaatgaaacactagccgtgtcaagggatttgctgataaaaaaaaaggttacgctggtcagacgctgctcagttaattaggttaccttgtcattaataaagtatttgcagtgtgtttggaaaatgtaaaactgcgaatggtactactaatcctctttacttcgaagttggttggttggcaggttgtc

SEQ ID NO: 124977 - DNA, 1547 bp, Zea Mays
gcaccctacagcacgagacatatcgatggcgttcatcagcagtgcggcgatgaaggcagccgtggccgctctgctggtgttcgccgcggtgtcgcctgccgcgcgcgcggtggcggcggaggcggaggcgaaggcgaaggctgtgggaggcgcgccgtcggtgcccgctggctcgctggacatcgcgcagctgggcgccaagggcgacggcaagtcggacagcaccccgatggtgctcaaggcgtggaagcacgcgtgcgaggcgacggggcagcagaagatcgtcatccccaagggcaactacctgacgggcgcgctggacctggtgggcccctgcaagtcctccatcatcatccgcctcgacggcaacctgctcggcaccggcgacctcaacgcgtacaagaggaactggatcgagatccagaacgtcgacaacctgtccatcaacggccacggcaccatcgacgggcagggagccctggtgtggaacaagaacgagtgccagcgttcctacaactgcaaaatcctccccaacagcctggtgctggacttcgtgacgaacgcccagatccgcggcatcacgctgctgaacagcaagttcttccacatgaacatcttcgggagcaagaacgtggtgatcgacaaggtgacgatcaaggcccccggcaacagccccaacacggacggcatccacatcggcgactcgagcaacgtgaccatcagcggcaccaccatcgccgtcggcgacgactgcgtctccatcggccccgggagcaagaccatccgcgtgaagggcgtcaagtgcggcccgggccacggcatcagcgtcggcagcctggggcggtacaaggacgagaaggacgtggaggacgtgaaggtgacggggtgcacgctcgccggcaccaccaacggcctgcgcatcaagtcgtacgaggactccaagtcgtcgctcaaggccaccaagttcctgtaccaggacgtcaccatggacaacgtctcctaccccatcatcatagaccagaagtactgccccaacaacatctgcgtcaagtccggcgcctccaaggtggccgtcaacgacgtcgtcttcaagaacatccacggcacctccaacacgccggaggccatcacgctcaactgcgccaacaacctgccctgccagggcgtgcagctcatcaacgtcgacatcaagtacaacaggtccgacaacaagaccatgtccgtctgcaagaacgccatcggcaagtccattggcatggcgaaggagctcgcctgcgtctgaacctacttgcatccatcactcactcttcgtcacctctctctttctcactctcgccagtctttttttaggcctctggcaatctgcgaactttcttattcattctactagtgtggatctataattccattcaaaatatatacatgatctaaatttcatgccacagaggacattgcaatgtacaagtttaagaacacaacccaactcttaaatagagggagacatcgtataaaatggtgaagcggttttattgcacaacagagcatca

SEQ ID NO: 124978 - DNA, 1701 bp, Zea Mays
ttcgtttgcgtcggattgcacccggaatcgttctagctaatcaaagtttatataaattagagaagcaatccggttaggaatcgttccgacccatcaattcgacacaaacgacaaggccttagctggaacgatttcgagtataatccgacacaaaggaagtgaaattccccaatactccatatgcgatgccaacgagaccaaaagtgaaaaattccccactcatgtttgctatatatataaatagcctcctcagtcctcccctcccgtagtcccgtctcctccacctttcactttccagttcaagtcaaaccacgttcctcgcggtcgcggaggctcacgccaagctcgctaaccgctcccctcctccctcactccctcgtctctccctctccccccgaatcctcgacacccaaagcccaaaccctagcacgggcagcggagctgcgtcgggcgaatggacctgcagctgcatgtcttctacagggcgctcgggctctcgttcgtcggcggcctcagcaccgccatcggtgcactgtttgtcgttttgaatcctgcccctaaccttaaagtgctcgggcttctacagggttttgctgctggacttatgctcagcatctcctttctagacctggcacacaatgccctgaattctattggcttcttgaaggggaacctctggttttttgcaggggttcttttcttcggtttcattattaagtttatcccagagccagatttttcgccaccagctgatccaagcgagaaagaggctgatgatggtgtatcaggtaaagatatgatgagaaaacatcgccggcaagtgctattcagtggtattatcactgctgttggaattagcttgcataatcttccagagggaatggctgtatttcttggatctgtcaagggtcttcatgtgggcctgaacttggctgttgctattgccttacataacataccagagggggttgctgtagctcttccaatctattttgctaccaaaagcaaaaaaaaggcattttatacggcagcattctctggtttggctgaaccactaggagtggttgctgtagctttgttgtttccaagcagtttgaatcctgacattcttgaaggcctacttggatctgtgggtggtgtcatggctttcctcactttgcatgaaatgctgcctcttgcatttgactattgtggccagaagcaagctgtcaaagctgtctttgtgggcatggcctgcatgtctgcaagcttgtacttcttggaagtcagcttaccaaaggagataagcttgtagcatcgcgctgcaggtactgggaggccatagcctgtcagtagatcctgaattctaggaggaggaacagcacaataaaaccatgaacagtgactactggtgtgccgccattgatattgtccatcttaccgtgaaaggagggagaaactgcatttccccagaatgtattccccagattcctcgtgggaccatatgaaagaattgaaaaatgtactgtagtactctgtcgtccggcaatggaagcttcgaagtcgtcaactaaactatttctagcactctcgtcggttgacaatggaagattctatgtaaaaacccatcagatagatgttaacctttaatctttaatttcttaaaagtacattgaaataagatactttgctttcaaacaccccctatatttagtttgaacc

SEQ ID NO: 124979 - DNA, 597 bp, Zea Mays
attgagagagagatcaccgtcgaaaagcagtctcccaattccaccgaataactaataacatctcctcgagcgcgaggccggcttccttggaccaatccagcagcaagcgacccggccagcaccagcagccatggagatgaagaaggtcctctgcgccgcgctcgtcgccgccgcctccgccaccgccgtgctggccgaggtcgcctccgagtcgccctccgaggcgcccgccggcgcggccgccggcgcggccggcggtgcggctggcccttccgccagcgccgccgccgccgccgcagtgcccgccgccgcggcgctcgtcgtctccttcctcgcctccttcctccactgagcgacgtaccgcgcggagtgcgggaaacctgggatggagcatcgtgtttggttcacccgattaataattaattaatcgttgttttatttatttatttattgcttgcggttgcctaattatgtgatcgtctgttgttccttccttcgttccttccttggtgatgtgtgggtcgccaagggggtttcgtttctgtaatcctgcctgatcgatgctaatactatgatcccaatttggtttttgcgatc

SEQ ID NO: 124980 - DNA, 1520 bp, Zea Mays
ggggcgtgcacactgcagacttacaacggcgggaaattttccgctcgctcccgccgccgctctcccgtgtatatcccagtcgcctgcgacctccgttcctctttcccagtcgccccccagtccatcaccacttctccattcctctttcccagtgcccccagtccatcaccacatccgttcaaatgggccgcaaccgcaagggccgcaaggctagggtttcgcacgacgccgacgccgacgccgacgccgatggcagcgaggatgagagggccaccactgcgggcaggagcctctacgagattctaggagttgagaagaccgcttctcaacaagaaataaagaaggcgtatcacaaattggctctgcgcctccacccagataagaatcctggggatgaggaagccaaagagaagtttcagcagctgcagaaggttatatccattcttggagatgtagagaaaagagctttatatgatgagactggcatcactgatgatgatgcactggtgggagaagctgcaaacaatcttcaggagtacttcagaacaatgtacaagaaagtcacggaggctgacattgaagaatttgaagctaaatatagagggtcagattctgagaaaacggacttgaaggaactctacacaaaatataagggcaacatgaacaggcttttctgcgcaatgatttgctcagaaccaaagcttgattctcaccgcttcaaggatataattgacgaggcgattggtgaaggtgagctgaagtcaactaaggtgtatgagaaatgggctaaaaagatctcagggatggagccaccaacaaatccgctagagaggagagtgaagaagaggaagaacagtgaggagaatgatctgatactggctatctcacagcgcagggctgagcggaaaaaacagttcaactccatcctctcgaacatcatgtccaagtgtgactccaaggcgagcagctcggagcccacggaagaagagtttgagcaggcgcaacagaggctggagagcagaagggccaagaggcgcaagtgatgctgctgccagccttcttgccctatgctgaacattgtctgaagcttttggtgtgacctgattttaccagcatgcaagtgatgtttctaagacccagctcagtttgagcgtgtcagggtggggtgtgtgtcatatctcttgtcctctcacgatacactatgtcgtatggttatcggcttatcaccttgccgagagggaagctctatctgaacttttaattccgtagcatttggcaagtactagtagattgcaatgtaatgtttattctacggtgagctgcctgccagaagctggtcccacatgcaagggtccttaattattatccagtttgagaatgcagtttattgattctcgatggatactatgagcaaacaggttaagtgatggtctgagctttgttgtttcccaacccatacttaaagttcttgggagtacaatgatgagcatcgtaagaggataggtaaactgttgatctat

SEQ ID NO: 124981 - DNA, 1471 bp, Zea Mays
ggggcgtgcacactgcagacttacaacggcgggaaattttccgctcgctcccgccgccgctctcccgtgtatatcccagtcgcctgcgacctccgttcctctttcccagtcgccccccagtccatcaccacttctccattcctctttcccagtgcccccagtccatcaccacatccgttcaaatgggccgcaaccgcaagggccgcaaggctagggtttcgcacgacgccgacgccgacgccgacgccgatggcagcgaggatgagagggccaccactgcgggcaggagcctctacgagattctaggagttgagaagaccgcttctcaacaagaaataaagaaggcgtatcacaaattggctctgcgcctccacccagataagaatcctggggatgaggaagccaaagagaagtttcagcagctgcagaaggttatatccattcttggagatgtagagaaaagagctttatatgatgagactggcatcactgatgatgatgcactggtgggagaagctgcaaacaatcttcaggagtacttcagaacaatgtacaagaaagtcacggaggctgacattgaagaatttgaagctaaatatagagggtcagattctgagaaaacggacttgaaggaactctacacaaaatataagggcaacatgaacaggcttttctgcgcaatgatttgctcagaaccaaagcttgattctcaccgcttcaaggatataattgacgaggcgattggtgaaggtgagctgaagtcaactaaggtgtatgagaaatgggctaaaaagatctcagggatggagccaccaacaaatccgctagagaggagagtgaacgcagggctgagcggaaaaaacagttcaactccatcctctcgaacatcatgtccaagtgtgactccaaggcgagcagctcggagcccacggaagaagagtttgagcaggcgcaacagaggctggagagcagaagggccaagaggcgcaagtgatgctgctgccagccttcttgccctatgctgaacattgtctgaagcttttggtgtgacctgattttaccagcatgcaagtgatgtttctaagacccagctcagtttgagcgtgtcagggtggggtgtgtgtcatatctcttgtcctctcacgatacactatgtcgtatggttatcggcttatcaccttgccgagagggaagctctatctgaacttttaattccgtagcatttggcaagtactagtagattgcaatgtaatgtttattctacggtgagctgcctgccagaagctggtcccacatgcaagggtccttaattattatccagtttgagaatgcagtttattgattctcgatggatactatgagcaaacaggttaagtgatggtctgagctttgttgtttcccaacccatacttaaagttcttgggagtacaatgatgagcatcgtaagaggataggtaaactgttgatctat

SEQ ID NO: 124982 - DNA, 129 bp, Zea Mays
ttatttttcttttttcttcaccagtcgcaatgtggcaatctctatacattcagtaaggatgtgctatttgtttggtaaactggaacatatatacccaatatacaattgcactgctatgtttaaatgaag

SEQ ID NO: 124983 - DNA, 420 bp, Zea Mays
atggcgcagaagcaccacggctcgcaccgcaaccggaacccttttctcctcggccacgttcaccgcctccgcccgacgatgacaacgacgaggctaaatgctgatgagctttacaagagaatcctacaggagattacaccatccggaaagtactatggtcatgttgttgcccgggttggtacaatggctgaggatcctataagattttacagaccattttgctattttttgtcaaaattaacaaaaagagttcttagtaggacctctgctattgtccaatggattgatttggtagccaatctaattggtattgcagtacaaagaatgaagtttgaagccatattgtactcgcagcagctacgacaaaagcaattgttcaatatactatgcagtggttatgttactgttggctcatgctga

SEQ ID NO: 124984 - DNA, 2521 bp, Zea Mays
gtacaccccccgatttaattggactaatgcatgctgaggatggatcagatggagatgctgctggggatgcccctcccggtgactcccggcttggagaagggcttgagcagctcgtacggcacgatcccggcgccgcagcggttcttgaggtccaggttgttgttgcactcgtcgatgaacccctcgatctccttcatcctgccgccgaacttctcgaacgccgccttcaccatgggctccgccagccacgacggctccgcgaactcccccatgtactcctcgtcgggcgagtgcgacgagaggatgtccagcgtcgtcatgaccttgatggcctgcatctgcgtgggcagcatgtccagcagcgtcgtctccggctgcttgaggaacttctccatctcctcgcccggcccgccctcctccaccggcatgttcttccggatggtggtcggccggttggggaagtagccggcgaagtggtactggccgaagttgacggccgagtggtggccggaggtgacccacatgatggtggtcagcgtctccaccaggctgtcgcgggtgtccagcacgggccaccacggctcgtccttcttgtcgccgtgccccacgttgcgcacctcgtcccagaacgccctcagctcggggtcggcggccacggcctcgtcggacttgtagtagacgttgacgtactcggacgcccactgcctgatggagtcccagaccaggagcccgtcgtgggcgtaggggtagtccttgatggtgagctccagctccccgtcctccccgcgcacggccagcccgcgcttgatgaggtcgttgggcagcgcctccgtgtcgaactgccacgtcgcgccgtacgccacggagctgagctcgacggcgtacttgcccggccagaaggactcctcgatgatgccgtcggcgttgatgagcgcctccctggccagcgcgttgatctccatggtgtagcggaagtgcgggtgcagcaggcggtacaccgggtgcagccggctcagctgccggttggcggcgatgatgtagggctccacgcagcagtgcgtgcgcagccagtggctcaccagctggtggtaccccgtgtcgtgggtcagcacgtgcgccttggccagcttccacagccaggcgtcggtggcgtcgggcccgtgcgtgaacgcccgcttccactgcggccgcgtcggcgacttgggccgcgtcagctcgatggccagcggcatcagcgtgcccaggtccgtcaggaagaagatggtgcgcgaggcgtagagcgtcgcgtcctgcagctcccgcaccttgtgcacgtagggcaggaacacgtcgtggtagtccaggatgaacagccgcttcgccgccagcgcctgctccacggtcagcgcgccgttcatctgcttctccaggatctccttggtgatggcggactccgctggcccgtacacctccgggtccagcttgctcttgatggggaactcagtcagcagctggatgcacagcgggttgagccccgcgatcgtctgcctcgcgaactcctcgtccttgaaccacgagaaccgcttactctctatcatctccggcacctcgaagcggaggacgtggtcggtggtgtcctccaccagcttgaccatgcgcgggacgacggtgcggatggcgtcgaacccggtctgcgccggcagcgggatgccgtcgctgaagaggtcgtcgatggcggggaagtgcgggaagcgcagatccttcttgttgatgagcagcgggcggagcgccggcagcagcgcgtgcaggccggagcgcagcgtggtggccccgaacgtgagctgcttcacctccgagaactgctcgtcgcggggcacgtagttgtggccctcgcgcatctccgtctcggggtccttcttggtcctggggcggccggtgcggcagcggcgcgggtatgggtactgcttgttgccgcccagcacgggccgctggtgggccgggttcttgtccgggtcgcccaggtcgttgtacacgtcgtagtcgtagacgcgctcgaacaccttgcgctcgccgtgcccgtcgccgcgcagcgcctgcaggtccttcttcctcaggtcctccagccccttgggcgtgtcggacggcaggtatgactgcacagaaaagtaagcagccgtgagtgtcagtcagcatacatgcatgcacgcggtcaccatgctgatcgacgtacgtaccttgagggtgaagaagatgcgcttctccgggttgtcgaacttggagtgcacccaggagttgcagtcgaaggtgacggcggtgctgctgtcgccgccggtgacgagcttgatctccttgatgaagacctccttgtggtgctcgttctccaccagcaccgcgcccaccggcccgaacgacgccggcaccttgaactccgcctcgtagtggccctcccgcagcgtcttgtgcgcgtacgccgtcacccgcgtcttctccacgcccgactctgcagtgcaccaccacaccacatgcatgatgcatgcatgct

SEQ ID NO: 124985 - DNA, 772 bp, Zea Mays
tcaagaaggcaaagtgatcagtttctagtagattgggcagctcctcatcttgatgatcttgattcattggaaagaattactgatccaagaataagtggctctatgccacctaaagctatctcttcattaggcattatcatcttgctttgcgtcaagcaatcaccagatctccgcccgcccatgacaatcataacggacaaattagtaaagcttgtcgaatcaacaggtcttcaaaagattagcacaacacgccacttggagattgatgctcaggatccctctttcataacaactcgaccttattttgagccgtcctctactgtcagtcagggtggaactgagagctgcatctcacggtgatgaatgcccgttcttcctctattcttctgggtcttatgctgccttatatagtcgatggcactccaagtatctcgagttctcaaccgtcgtcgcacctctttctgcatttcttatcatgccaattggtgatggtcaaagctgctgtgatgcaacgctctgactaccatggacgactggaatacaggtagacaccgccattgttatcaacggagaaaggactagaacaaaccccgccatcctgtcctggagaaactggttcaatcttggttagcggttacccgtacagttactactacttacgggagttctttgcccgtctatttgggacaagagtaacctgagctcgcgtggggatgatattttggatgctcttttctggtttgttcatatacgcagcaagcaagccttatta

SEQ ID NO: 124986 - DNA, 1721 bp, Zea Mays
ccgggcgattcgccccgctacggctgccttgctcctccaatccgcgatcggggtacgtgatccaagcgcgatctcgcgggtcggcgcggaattgggagaggaattcaaacggtgtcggaagcgtgcggttccccggaagctcccagaacgttcggggcctccctgctccggtccgttatccggctacacaagacgacctaggatttctcaaggggttggcgcggtggatttgttgggcgcgcgcgcgagcggttggaatgggggcgccgcgccacctccttgacgtagcgatgctctgcgccttgttcgtctccgccgcgtccttcaccgacccccctgatgcgttaggacttttggggttatatcacacattggagtcgccgtggcaactttctggttggacattccagggcggtgacccatgtggtgagggtggtgggagtaaacactggcgaggcgtcttttgcaagggaccatccattgttgcaataaatattagtgggctcggagttggtggatggcttggcccagacctgctcaagtttcagtcattgaaaaagctggacatgagcttcaataacattgctggcgaaatcccgtccactttgcccccaaatgttgaatacttaaatctggcagccaacaagtttgaaggaaatataccatcatcattaccctggttgcgctccctgaaatatttgaactttagctacaataaactctctggagtaattggtgatgtttttgttaatatggatagcttagaaacgatggatctgtcattcaatgctttcaatagtgacctaccaagatcgtttagctcattgactagtcttcgctatctttatctacagcataacgagttcacaggatctgtgattttgttagcaggccttccattgtcatccctcaatattgaaaataatcacttcagtggctatgttcctggaacatttcagtccattcctgagctgaggagactaagattatttcacatcaaaactcatattttccattttacagtccctacagcgaatgaggtcttgtactcttggagttctctattgattggcagtgatacttcctctagtaatggcattacatctgaaagagttcccaaaataaaaagttggttcaaggcatctaaaaaacttctaactgcaaaacagtttccagctgcagacattctagcggctaccaaggacttcaatgaagaatgttttattggtgaaggtctcactggtcgagtttacagaggtgaattttctgatggccagctccttgctatcaagaggattgacatggtagatctgtcattgtcagaacaagatgaattaatggacatgctttggaatgtctccagattaaaacaccccaatatcagtgcgctcgtgggatattgtgtggagtttgaacattgtgcacttctatatgaatatgcagaaaatggctctcttgatgatattttgtttgcaccagccacaagatccatggctttgtcatggaaagctcggatgaagattgctcttggagttgcctatgctctggaatacatgcacttgacatattcccctccagttgcccatggaaacattaaagctagaaatattttgcttgatgctcagctcatgccctacctctgtgactgtgggttagccaagttaagccattttgttagcaccacgagaatggtcagtgccctcacgtttcccagctactaa

SEQ ID NO: 124987 - DNA, 1637 bp, Zea Mays
atgccacctcgtagagctcggggtagtccgcaagctcctagtggggactcgatgagtccggcggcaatgttagccgcgatgcaggccatgcagcaggagttggcccttctgaggcaagccattcctgtcgcccctgcgggtgctgctcagggtgctggaggtggagaagtgcctgggggcgctgtccctgcgggtgctgttccaggtggcggggccgaggtgcctcttcatgtcagtggtctttctctgatgcagtggatgggcatgaagttggattcttttgatggcagtggtactccagtcgaggcggcagattggttgacttatgtggaggataagatgaatgtcttcgagattgcatatggagatcgggttcgctttggcactcaactgctgaagggagaggcgcaaatttggtggagaggcgtgcaggcaacgcactcctcctcaccaggagtcctatcatgggatgctttcatcaggcagttcgaaaggagattctacccggtcacctttctggagaaaatgaagattgacttgcagtcctacaagcaggagaagaagtctgtcacagagtatgaggtgggcttcaacaagatggtccgctttgtccctcatgtggcttataatgagatggagaaggcgagccagttccgtcaaggtctgaagccttctatcaggcatgcactaggggcctttccgttggtggacttccgtaccacggtggagcaggcgctgggtgtggagatgcaacaccagtacaccatggagtcgcagaagtcttcgggtgttgatcagcctcgtagccaggacacgaggaggggcaacactggaggtccagctcacaagaggggcaagtctcagcatcagcgccaccatccttaccgtggcaaatcttctgactcaggtacttcgggaggaagtactcagaggtttcggaccgttcctaagcccgggctggggctggtgtgtttctgctgtggagatgcgcatcgccgtgcagagtgccagtggagtggcaggtgttctatctgcagtcaggaccacaaggatgtcgtgtgtaggaggaatcccaatgggaagctcagatgggagccgataacttcctcctcttctcagggcactatcaatatgatgtcaagtcctgagcagcagttttcagttcctcttcctccacagcagctttatgtgactgggacttctcagttcgtgccgatgcaaggttttcctcagtatcaggttgtgcctactcctgcaccgtctacccctgtgctgactcagtttggagctccgcaccagcctcctccggtggctcagtggggttcttctgttaatttcactccgggagcttcctcttctgcgggtatttctggagcttatgtgctacccgctatggatggcagggagcaaggagacgtggtgacaggtacgatttcagttgattcatttgcagcccatgctctttttgactctggcgctagctattcgtttgtttcggaggattttgtgtcgcgggctggtctttcggtgcagaggttgggtcacccaattttggtcagttctgctaatggctccattagtagctgttcagtttgtcaggggtgttccgtcattcttgctgatgaggttttttcggc

SEQ ID NO: 124988 - DNA, 1499 bp, Zea Mays
tctagacacatggtatcaatgtccgtaagcccgccatctgaaatatagttagccctgcatgttattttcacagcacgcctaatgtttgtgctgtttttgtatttttgctaaatgctaggtcatgttagattttcttcaaatatctctaatgtccatccatattggtacatcatatgttcctcgattttcacatttaagaatgctgcttaatttttgttatcatcgtttgtaattatacattcaatatttagatggttcttctgttgcttatcctgataatattctcatcatgcagtacttatggttgtccctttggtgagggctgccattttgtccattacttccctggtgactaccgggccgtttcagaaatgaccaacctgggtggcgcaacaatcgcacctcctggaggaatgatgatggatgggccacctacacccatcgtgaagactcgcttgtgcaacaagtacaacactgcagagggatgcaaatggggggacagatgccactttgcacatggtgaaagtgagcttggcaagtctatgatggacaactatatgccaccccccatcggaccaccaccaaccggttattttgcacctccacctatggcacctccacctatggcgcctccacccatggcacctccacctatggcacctctacctatggcgcctccacccatggcacctccacctatggcgcctccacccatggcacctccacctatggcgcctctacctatggcgcctccacctatggcacctccacctatggcacctccacccatggcgcctccacccatggcacctctacctatggcgcctccacccatggcacctccacctatggccaaccctggtttggccactccagctagcttcggcgcttatgccacggccaagatcagtgtcgatgcgtcccttgcaggtggcatcattgggaagggtggagctaacataaagcaaatatcttccgtcacaggggccaaggtggtcattcaggaggaccgccatgaatcagacaccagcttgaaaaacattgagtttgagggcacctttgatcagatcaggaacgctagtgctatggtcatcgagctgattgttagcatcagtggcataggaagcaacttcaagaccaagatgtgtgagaacttcgcaaaagggtcatgctcttatggcggcaaatgccactttgcccatggtgagagtgagctgcgcaagcctgccgctgcttgagatccatgccctgtttcttacctcatagtcattagtcaatgtaactcaaaacttggcctctgatgatggatttgttggcttctttaggtctacgctaatgaattgctggcttcaggcctactactaaatttgctgacttctttagtccttcgctgttggccaactaaatctgttttctgcgtttgttcttgaatgttctcctatgatctaatcctctatttaggttcaaccagagaagtgttgatgctgatgatttgcata

SEQ ID NO: 124989 - DNA, 1405 bp, Zea Mays
ggcgccgctgttcgcaacccaagcagtagccgagccaacgaaggcgtgcgagcggaggcaatcatacatggacggcagccgcaagagggtggacgcggaagacgtcaaaggggattccaccggcgggaagcgattgcgagcatcggagtcatttcaaagtggcgtaggaagcaaagtgaagctatgcaccaattttttcagtacttatggttgtccctttggtgagggctgccattttgtccattacttccctggtgactaccgggccgtttcagaaatgaccaacctgggtggcgcaacaatcgcacctcctggaggaatgatgatggatgggccacctacacccatcgtgaagactcgcttgtgcaacaagtacaacactgcagagggatgcaaatggggggacagatgccactttgcacatggtgaaagtgagcttggcaagtctatgatggacaactatatgccaccccccatcggaccaccaccaaccggttattttgcacctccacctatggcacctccacctatggcgcctccacccatggcacctccacctatggcacctctacctatggcgcctccacccatggcacctccacctatggcgcctccacccatggcacctccacctatggcgcctctacctatggcgcctccacctatggcacctccacctatggcacctccacccatggcgcctccacccatggcacctctacctatggcgcctccacccatggcacctccacctatggccaaccctggtttggccactccagctagcttcggcgcttatgccacggccaagatcagtgtcgatgcgtcccttgcaggtggcatcattgggaagggtggagctaacataaagcaaatatcttccgtcacaggggccaaggtggtcattcaggaggaccgccatgaatcagacaccagcttgaaaaacattgagtttgagggcacctttgatcagatcaggaacgctagtgctatggtcatcgagctgattgttagcatcagtggcataggaagcaacttcaagaccaagatgtgtgagaacttcgcaaaagggtcatgctcttatggcggcaaatgccactttgcccatggtgagagtgagctgcgcaagcctgccgctgcttgagatccatgccctgtttcttacctcatagtcattagtcaatgtaactcaaaacttggcctctgatgatggatttgttggcttctttaggtctacgctaatgaattgctggcttcaggcctactactaaatttgctgacttctttagtccttcgctgttggccaactaaatctgttttctgcgtttgttcttgaatgttctcctatgatctaatcctctatttaggttcaaccagagaagtgttgatgctgatgatttgcata

SEQ ID NO: 124990 - DNA, 1344 bp, Zea Mays
ggcgccgctgttcgcaacccaagcagtagccgagccaacgaaggcgtgcgagcggaggcaatcatacatggacggcagccgcaagagggtggacgcggaagacgtcaaaggggattccaccggcgggaagcgattgcgagtacttatggttgtccctttggtgagggctgccattttgtccattacttccctggtgactaccgggccgtttcagaaatgaccaacctgggtggcgcaacaatcgcacctcctggaggaatgatgatggatgggccacctacacccatcgtgaagactcgcttgtgcaacaagtacaacactgcagagggatgcaaatggggggacagatgccactttgcacatggtgaaagtgagcttggcaagtctatgatggacaactatatgccaccccccatcggaccaccaccaaccggttattttgcacctccacctatggcacctccacctatggcgcctccacccatggcacctccacctatggcacctctacctatggcgcctccacccatggcacctccacctatggcgcctccacccatggcacctccacctatggcgcctctacctatggcgcctccacctatggcacctccacctatggcacctccacccatggcgcctccacccatggcacctctacctatggcgcctccacccatggcacctccacctatggccaaccctggtttggccactccagctagcttcggcgcttatgccacggccaagatcagtgtcgatgcgtcccttgcaggtggcatcattgggaagggtggagctaacataaagcaaatatcttccgtcacaggggccaaggtggtcattcaggaggaccgccatgaatcagacaccagcttgaaaaacattgagtttgagggcacctttgatcagatcaggaacgctagtgctatggtcatcgagctgattgttagcatcagtggcataggaagcaacttcaagaccaagatgtgtgagaacttcgcaaaagggtcatgctcttatggcggcaaatgccactttgcccatggtgagagtgagctgcgcaagcctgccgctgcttgagatccatgccctgtttcttacctcatagtcattagtcaatgtaactcaaaacttggcctctgatgatggatttgttggcttctttaggtctacgctaatgaattgctggcttcaggcctactactaaatttgctgacttctttagtccttcgctgttggccaactaaatctgttttctgcgtttgttcttgaatgttctcctatgatctaatcctctatttaggttcaaccagagaagtgttgatgctgatgatttgcata

SEQ ID NO: 124991 - DNA, 153 bp, Zea Mays
atgttgctcttgtattatccaacagtcaaaagggggaaaaaactctataacgcatgtttaattattatcagccatggttgggaaaaaacagcaactgttaaaatcttcaggcagccttgttattgcagtagttctccagccactccatggtaa

SEQ ID NO: 124992 - DNA, 1284 bp, Zea Mays
attgaaattttccgtttgcacctaccgagaggtgacgacgagtgaggagtctgtgtgaccagtgctcgccgtcgtcccctgcctctggccctctgctagccgctaggcgacgggcctttcgccgggcgacgggcacaccgcccctgttaccatggcagcgatgaatactggtatgggaggtttaggtggcaggccgatacatccacaagcaaatccttttggaactgccttgcagggtgctggaccaggattgatccgtactgggctagaaacatatggcggaaggattttagattcaagttctgagtttatgcagagcaatataacacaatatttgtccgaccctcagtactactttcaagtcaacagccagtatgtgaggaacaaactgaaggtcatcttgttccctttcttgcacaggggtcactggacaagaataactgaaccagtaggaggaaggctatcctacaaacctccagtccaggatatcaatgcaccggacttgtacatccctttgatggcatttggcacctacattgtagctgctgggtatgccttgggtgttcttggaaggtttacccctgaggcactgaccctacagttttctaaagggatacttgggtggtttctgcaagtcgtcctcatcaaaggtctgctgtactccctgggaagcggcgaagctcccttgctggacatcgtggcgtatgctggatattgcttcgctggcacttcccttgcaatggtggcccgcatcttctggagctacctgtattacttcatcatgccatggttctgcctctgcacgggagtcttccttgtgaagaccatgaagagggttcttctgggcgggccaaggagctacgagagacaccccggccggaaccactacttcctgatcttcttggcggtcgtgcaattccccatgctgttctggctcggcaacatatgtggctgacctttgatcctattggtcgggccacagacctgtttcttcttcttcttcagaataggcatgtgctacttctggcttgctgatgaatcttaggtttatcgtggagatggtacagaactattagctatagatatctgggcaatcgaattataaactgtttttgtttctgttagctatagaggcgaaaagtaaaaacgatcgtttgggataggataaagatgaactgcttcgtgtgtacccttttgtgtcacgagcggctagccacgaccctgcaatctgacttgttttttaatgatcactgctacttgatctttcagctttgggtcgatatt

SEQ ID NO: 124993 - DNA, 1940 bp, Zea Mays
atcttttatcgagtccaggccagcgaccgcgtttccgccttctcctccccttccacctccgatggccacaacggcgacaacgatggcgccggtgacggcgccggtggccacagccaacctcgaacctacaccaacacctctgcatccacgtcctgccgcgccacctcatctccgggcgctttccaccttggcccccgtcaagtcagaggctcctcccaccccctcgtcttctaccgccatcaccgccgcagccggagcggaggatccatcctacatcatcaccgtccctagttattcagcgtggttctcgttcgactccatccacgacacggagcgccgcctcctgccggagttcttcgtgggggaggccgccgcggcgtcagggtgccggggcccgcacgcgtacaagtactaccgcgactccctgatacggaggttccgggcgcggccgggtcgacggctcacgctcacggaggctcggaggggccttgttggcgacgtcggctcagtccgccgcgtcttcgatttccttgaggaatgggggcttatcaactacggtgctttgccatcggggtcaaagcaagctaaagagaagagggaagaggctgcacaacagtcctcgttgccttttggggcaattgcacccaggaagctctgtaccggttgccgcaccgtgtgtgggcttgcttactacgcctgcgacaaggcagatataagtctttgtgctagatgctatgtaaataataactaccggccgggcctgtctcctgctaacttcaagagagttgaaattactgaagatgcaaaaccagattggacagacaaagaaactcttcacttgcttgaggctgtcttgcattatggggaagactggaaaaaggtgtctgaacatgttagtagtcggtcagaaaaagattgtattgcaagatttataaggctaccttttggagaacagttcatgggacacaaggaggatagaatgaggtttgagaatactgatgacaatactgatgagcctggagcaaatgtctcaaaacgactacgtctcactccactagcagatgcaagcaatccgattatggctcaggttgcatttttatcagccattgtgggttccgatgttgcctcagctgcagcgcaagcagctatttctgcccaatcccgtgttgaccttaatgacggcgagattgaaacttcaataaatagcattaagcaagaagaatcatctcacacaaatgggctctcagccaacgtgttactgaaagaggcagctgctaatgcacgggcacaactcgagaaggaaaggaacagcatagagcaatctttatcaaacatagtagacgtccagatgaaggaaatccaagataaaatatgccggtttgagcagaaggagatgctgatggagaaagagcggcagcagctccattttctaagggatctacttttcacagaccaattggcagtcatgcagcatcaacaaaggagtccagctgtagccacagagtgcaagggtgatgagaagccaaagcccgtggctagcatgagttgatacgagtagatcctcagcgtagcatggtttcacttcagatgtagcattggagccgcgttcatccgcatctgccgttggtaggattggaactaatttaatatactacatataggccctggttctctattggatggtgtttctgttaaatttggcgtcccctttcccttcttgcaccacagatgcctggagtgcaagggaagttatgatgacgactaccgattaccacatgcttcactgcttgtgcgctaacacgttgatatctttgccagtggcgcaacaatcgtgtatttcttgaccaaaacatccacgcaaagctccggtagattcgatggtgactagcaaggaaatacatactctctgttaatttatattttatttgattttttgccct

SEQ ID NO: 124994 - DNA, 643 bp, Zea Mays
attgcatgctcccaggtcccagcgcacctgctccatccaggtttcaggcaagccgtcgaggccggccggcgatggatcgccaggcgagccgtcgaggccgccgccgggggcgccacgtccggctcggctcgcttctccgcctccgtgtgcggctgttcggcggcctcgccggcctcgttgcccggtgcctggaggagctcaactgctgccccacgaggaggactacgacgaggaggaggaggagtcataagatggcggtcagccacggcgacaggcgccaccaccgacctgcgccagcagagagggaggagaactccctccatgcagaggccattgccgattgcttggagtttatcaagagatcctacctgcctgcggcggctggagctggtggtgatcgcaagccggatcgctagctagtagctacccttcttgccccggtttcggaaccaaaatttggcacccacttcctcccagaattccttggtcccagacagaccaggtcccaagtgctctgctcctgtagttttttttttttttttttgtacagtgctctgctctctgctcttgtagtttgtacatatagcagttttgcgagtgacctctgttctgttgtttcgtgttgtgtgcatcaagagtgacc

SEQ ID NO: 124995 - DNA, 600 bp, Zea Mays
tcaagcagtagatggatactaagtttcagtcccagtagtggaaattatttgttattcagaatcaagtaccggcggccggagatcgactgatgcatgagagtgctttgtggtggtggtgctcctcccatggttatcgatcgacaggtggtctcggaggtggtgtccacgttcctgctggtgttcgtcatgtgcggggcggcagggatctacggtagcgacaaggaccgcatctcgcagctggggcagtcggtcgccggcgggctcatcgtcaccgtcatgatctacgccgtcggccacatctcgggcgcgcacatgaaccccgccgtcacgctcgcgttcgccgtgttccgccatttcccctggatccaggtacgcgacaatgagtccaggatctggccgtcgtggccctcctcggagcgagggcagtggaggcagcaatggggaaccggcgaggagcgggggcggtggaggcagcaatggggaaccggtggcggaggatccaaatggggaggggagatgaaagaagggagagagaaggggatggtggcctcacacgagggttccaaagtgaaagaagctggtcgtcggatggccgcgtga

SEQ ID NO: 124996 - DNA, 777 bp, Zea Mays
atggagatggaatttgtctctggaggtataacagaactctgcccaggaacatggttatgcactgatacaccatttattagctttcggcacagctgctgcttcaatgtctcatgccttagtttgccatgtcgagaccttgctctaactaattcaatgcaagatccaattaactgcttcatgaaaacatcaatgccattattcaacaaattagcacactctatcgagaccccttccaacccatttgctcctgccacttcgtctgtccttttcttcattgacaaagtatcacagagttcaccatcttcaatacaagtatcagaggtggtctcggaggtggtgtccacgttcctgctggtgttcgtcatgtgcggggcggcagggatctacggtagcgacaaggaccgcatctcgcagctggggcagtcggtcgccggcgggctcatcgtcaccgtcatgatctacgccgtcggccacatctcgggcgcgcacatgaaccccgccgtcacgctcgcgttcgccgtgttccgccatttcccctggatccaggtacgcgacaatgagtccaggatctggccgtcgtggccctcctcggagcgagggcagtggaggcagcaatggggaaccggcgaggagcgggggcggtggaggcagcaatggggaaccggtggcggaggatccaaatggggaggggagatgaaagaagggagagagaaggggatggtggcctcacacgagggttccaaagtgaaagaagctggtcgtcggatggccgcgtga

SEQ ID NO: 124997 - DNA, 651 bp, Zea Mays
atgcgacgctccgtggcttgtgcccccaccgccgcctccatcaccttctccgccatcggcatctctgtccttggtgcggcaagcttgaacttggttacagctgtagcaaatctgacgggcaccaagtttgacttcttggcctactcgtcggcgctcaagcatttggtacttgggcagttctttcttgttcaagtatccttatcttcatggtggcaacatgattattctggtcaccatggaaaactactctttacatatttggatacggacagacaagcagagaaacaccagttggtcaagatgttagctggtttccagctcggtgtgatcaggtcacttgcactctctattgcatcttcagttgctattgtcatctgcaacaaagctctcatctgcacgcttggttttctgttcgctacaacattaacaagctgacatctgatggtgtccttctgcacccttcatgtgggatgtgacatagcgcttgcattttttagcccaagatagttgatggacaaacaatgatactctttgggttgctgaatagcacgtcaattagccttctcaacctgagtttcggattcaactactggattctaccaggtaagctcgtttaggtactatcactactacaaattatgttatatgaga

SEQ ID NO: 124998 - DNA, 579 bp, Zea Mays
atggcgtcgccgcaagcagacgaagagatagtggcggtgctcgacgaggagactctagcgctgatgggggtcagcaacgccgccaccgcagcgcgggtggcggtgggcgccgagtgggagaagttcaaggagaacgtgcggccgctcaagcgcgggcacgacgtgtccaaactcaaccacgcgctcgctcaaggcacacgccaatccctcccagcgcaccgctctcgtcgaagcccgcaaaaagatgatcgaggcaatctacgagtaccgaggcgaggatccgctccaaccgtggctggactgcatcaagtgggtccaggagtcattcccgaccggcggcgacagtgcgtgcggaccttatggcacgacgagcgctacaaggacgacatccgctttctcaaagtgtggctggaatacgctgggaactgtgctgatgccgaggtgacatacaggttcctggaggccaaccagattgggcagggccatgccatctactacatggcttacgcatcgttgatggagtcaaagaacaagttgaggaaagctaatgagatctttgatcttggtatagctaggtga

SEQ ID NO: 124999 - DNA, 2285 bp, Zea Mays
cgtcacatacccatccacagaatccgccgctccgtccccgcgtttcccagaaagacgatggctcccccgcctcagccggagctccccgcggcagcgctcgcgctcctcgtcctcctcctcgccgccgcggtgccggcgcgcgcgcagcaggagtacgaggccaacaaacagaacgcttgctacgccaccaacgccagctccgtcctcggttacacctgcaacgccaccgccgcctccactccggcctgcgagtcctacctcatcttccgctcgtccccgtcatactacaacacgccggtctccatctcctacctcctcaactcctcccctgccaccgtcgccgccgccaacgccgtacccacggtgtccccgctcgcggcctccagcctcgtcctggtccccgtcccctgtgcctgcacgcccggtggctactaccagcacaactcctcctacaccatcgagttccagagcgagacctacttcatcatcgccaacatcacctaccagggcctcaccacctgccaggcgctcatcgcgcagaacccgctccacgatagccgaggcctcgtcgccgggaacaacctcaccgtgccgctccgctgcgcctgcccctcgcccgcgcaggctgccaaggggttcaggtacctgctctcctacctcgtcatgtggggagacggcgtgccatcaatcgccgccaggttccgcgtcgacccccaggccgtgctcgacgccaacagcctcaccgccgacgacatcatattccccttcaccacgctgctcatcccgctcaaggccgcgcccacgccggacatgctcgcgtccccggcgccgccgccgtccccgaccccgccgcagcccacgcccgcgccgtcgggcgggtcggggagcgggaaatgggtcggcgttggcgtcggcctcggttgcggcgcgcttgcgttggcagcaattctgggcctgctcttcttacggaccaggcggcggcggggacagcggttcgcggatggggaaagtgtccgtcaaggcagcaaggtggtcattgacgtgtcctcgtcggcggagtacggcgcgctggcgtcgggaaagcagaccagtaatacgaccacgtccacgacgtcctcagcgacgaggtcgctggtggccagcgacgtgcgcggggccgtggagtcgctgacggtgtacaaatactcggagctggagaaggccaccgcggggttcgcggaggagcggcaggtgccgggcacgtcggtgttccgggccgtcatcaacggcgacgcggcggcggtgaagctggtggccggcgacgtgagagacgaggtcagcatcctgatgcgcgtcaaccactcctgcctcgtccgcctttccgggctctgcgtccaccgcggcgacacctacctcgtcttcgagttcgcggagaacggcgcgctcagcgactggatccacggcggcggcggcagcaccctccggtggaggcagcgcgtgcaggtggcgttcgacgtcgccgacgggctcaactacctccaccactacaccaacccgccgtgcgtgcacaagaacctcaagagcagcaacgtcctgctcgacgccgacctccgcgccaaggtgtcgagcttcgggctggcgcgcacggtcgccgcgtccgacggcggcgcgcagctcacgcgccacgtcgcgggcacgcagggatacctcgcccccgagtacctcgaggacggcctcatcacgcccaagctcgacgtgttcgccttcggggtcgtcctgctcgagctgctgtccgggaaggaggctgcgttcgcggacgccggcacgggcgaggagacgctgctgtgggaggccgcggaggaggcgctggtggcggacggcggcgaggacgtggaccgcgccaaggtgcgcgcgttcatggacccgcgcctgcacggggacttcccgatcgacctcgcgctcgccatggctgcgctggcgctgcggtgcgtggccacggagccccgcgcgcggccggccatggacgaggtgttcgtctcgctcacggcggtgcacaactcgacgctggactgggatccctccgattacggcacctccggttcttcgatggtcgggcggtagtagaaattaaaagattacatagaatttgaacagttttggaatcgagatgtgttatactagttagaaagcacaaataaaaatgtatctttggatccgtcaatttttcggattaaagtcagttgtaaactgctgtagttataataaatcgagacaacaattctataaaaaaagtcactggtacgaac

SEQ ID NO: 125000 - DNA, 6593 bp, Zea Mays
ttgttcaagtgtctagacataaaattgaaacaaattgatatccagaaatagaagtttcgcattcactacagtagcttttatcattgtcattattattatggagcactccttgtcattgccatgctagctgtttttcttgtcagtttggtttgtgctttgatcatcatttacttgaaagatccattcaaagaaggcacatttgatttcttgaaatccaatttgctatcttgggctgtaacttatttaaacttcaggtcctctttctgaccaaactagcaattatgttctgcaagctggaatgtatttgattgctctgacagtaacaatgtctgtgaatctggtagaagctttctgctaagtgctaacctaatcatacagacactattatcataaggtggttaatatgttcttgtgactcctgcagacaaaatatcaccgatggaccccagttgacagttgccaacttgccacattttgaggggggtcacttgcagaatactactctttatgatggaatgcagtttatgccagcatttgatcttgcccagtgttttggcatgagacaaaattttacttccatggatcaagatttaattgctgatggaaacgtaccacaaagatcagctcatttacgcagaagaagagatcttccacaaacatcaacattacccaaggttgcagtgaaccatgagttaggaagtgctggcacgtctatggatccatcattttttaacaatacaatcaaacaaagtcctagtgaaaacagaagttccttaaagcctccaatatttcttatggagaacagtaatcatcagccacatcatcatacagttgcactacctgttcaatatagtgattttttcattaccagcttgggagaaattgacaatcggacaagttaccacaattcataccagatatggccagttgggtttacgtcttactggcatgatagagttactggttcactgtttgagtgtgaagtgcacgatggagggaattttggacctttgtttaagatgagaaggttaccgtgttcagcattccaacttccggatgcatcaaccacagtgtgcctaaatgttgttaggaacgctgatacaatagaaacgaaggaagatttctctgagacgaatcaagatttcttatcatgtctaggtaatgatttggagggtaaagaaagtttagggtgcagtaatgtagaaactaaggatatgacagtgccagatgtgctgtcagatcctggctctttcagttgggcaccgaccaatgatgcaaatatgtatgacaaaattggtgacttcagttatgaaggaacatcaccttcctcagtctggaggatgatttcttgtgctatgatggaagcctgtgaaaaaatgtacaaggagcatggccatttggtattattctgcactcacagtagtgaaaaatctccatttgactatgaaagtggacctcagcgcactgatggtcctttcaatctattggctaagttttgctcatcaaatgggcctaaggtaccacagtttatagaaaaggagaatgatgtgcagtcaacttgtgcattacttaaagaatggctgtatccagacagaatcgggtttgatttggaatttgttcaagaatttgtggaatctcttcctaaatccggggcttgttcacactatcagttcttgtgtaacaggactggaattaactcttcactgacgattgcaagtggcacactggtagctgttaataaaaatagtccaatgcatgcgagacatggatctgtagtgagtgggccgcaggatcatgctcagcctagctcttctagcatccgtgagcttcctccaggaaatcctattagccgcaagcttgcaccagaattggctggggatgttttccagatattggagtttcttggacgatttgctgaaatcatcggcctgaaagaacttccttcaattgagcaagtagaagatgaactcattgacccatggccaatgcatccaaataaaaatgacatccacaactacatggatcacaatccaccgatgaattcacctgctaatgtttcttcatcgtactcgaatggcgaatcagcacgagaagctgctcaaaataagttggctgcccagacacttgggagatgtagtggtttagtgctgcctgagatccacattgcactcttgaaggttcttttcaccgaacttgtatctagagtcgcaatttttgtggatccaagcattgatttaaaagaatcaaaatccagacgaggaagaaaaagggacactgatactctaacaagagagttaaagattgatatgctgactgctaacaatttgacttggccggagttggctagaagatatattttagctgtttcttccatgagtggctgcatggatttatctgatatttctagtcgagaaggagtgaaattgttccgctgcctacaaggtgatggaggtatcctgtgtggagctctacccggggttgttggcatggagaaggatgcatcgctacttgcagaggctgaaacattgatatgcaattcttcagcaaatgaagggaataccgtctttatgatggattacaaggatactgatattgtagattctcctgaggagcctgctagtgacactacgttgccagattgggtgaaatcattggagcctgtgagaaaattgccaactaatgtgggaacaagaataaggaagtgtgtttatgaagctttggagagaaaacctccagaatgggcaaggaaaattttggagcactcaatcagtaaagaggtctacaagggtaatgcatctggaccaaccaagaaagctgttttatccgtcttgacagaggcatgccgtacaaaagtaccccagaatacagaaaaaccaagaaaagagagaaatattatctccatctcagaggctgtcctgaaaaagtgccgtattgccctgcggcgtgctatttcctctgatgaatcaaagcagtttgctaatttgcttggaacaactctaacaaattccaatgagaatgaagatgagggcatccttggatttcctggtatggtatcccgccctttggatttccgcacaattgatataaggttggctaagggagcttatcgcggatcttgggaggcttttcttgatgatgtacaagaagtaatttgtaatctgcaaactgcatttgctgatcgacctgaagtgctgataatggttgttgcactgtctgagagttttgagtcattgtataagacagaggtacaagaccttgttgagaaatttgacagatatctaagcaatgaaaatgatagctcagaaatccaccaggagctacaagatgctctcacggcagcaaacaataaactgccgaaagcaccatgggaggatggtgtctgcaaagtctgtggaatcgaccgtgatgacgagagcgttcttctatgtgataattgtgactctgaataccacacttattgcctgaacccaccactggcacgcataccgcttggaaactggtattgtccatcatgtactgcccaaactcatgttgcagtgcaagaacaaaagaagtgccttggggaggaagctcatgtttttattgagaaactcaacaagttagctgttgcgatggatgagaaagagtactgggagctaaccgtagcagagagaatctatttgctaaaatttctatgtgacgaattgcacaacacagctctcatcagagaacatctagatcagtgttcagacaagtcaaatgatctccagcagaaattacgtcacctgaattatgaactgaaagagttaaggtatcgggtagaaataaaaaatccttatgccacacaaagtagatggatgaaaaatgaccaagtaagcaatagttcaggactcgtggagaatcagcagcgtgctatgcccacagcctcagagcatcttgaagaggctgaacaggttaatgttggagttaacctgaacaaccctgctgaaggggttcctgctgcactattggatgtgggtaaaccttgcagtactgacaatggcatatccagcacatctgttattgaaggaaataaatctttggggctttcagaacaaccatcaaagataattactgaccagactgatcgggactctattgccgaaggatccaatagttgcgagaaatcattagttggcaaaagtggtacttgtgatccgaatgtgggagagactcatgctgctacagttatcaatgcaccaaatggagatttacctgatgaaaatgctatgacattgtcccaagataatattgaaacatcgacatctaaactggttgaccatgatgctgatatgaacgaatcaaataatttattggagaggatttcacagttgcatggttcaattagcacagtagagtcacagcttagtatggcatccttgagaggagagtgcctgggtagggattctgttggtcgattgtactgggttacaggaagaccttgtaagcgtcctcgtcttgttgcagatggaagcatgatgatacccaaggacagagacattagcatggttacaagccattctcagtcaacattcgatagaggttggaattcggcatcacttgttatttatgaatctgatgaagaaatgaagtgtcttgttgactggctaagggacattgatccaagggagaaggatctgaaagactctatcttgcactggcaaaagtctatttatcgccaggctagtttccccatcactgatcctccagtgtccaagttttcaaagagtgagccacttatggagcttccaaacaccaatgcttttatagttttggagcaaaagtatggtctgcaaacggatcaggacactagtgagctatccaaaaggagaggaacgaagtcaaggtcgggttctgaagaaagagtatatcgctgcgactgtttagagcctatatggccttctcgacaccattgcttaaattgtcatgaaacttatctcacattgatggaatatgaagggcataatggtggaaaatgcaccagcagtaacgactgtcctaatgaaagtaaagaaattgatgagccgaaactgaagggcagcaagtctgatataaaggaaaaagatcctgtagttcataattgttccgttgaaccatctaacagtggaaaattggagtcatgcccttatgactttgaagaaatttgtagaaaatttaccacaaatgattcaatcaaggagacggtgaaggagattgggctgcttggctcaaatggaattccatcttgtgtaccttcacctgcatatttccttgacccgccagttctgctaaatgaaagtaaaagaaatgacgataaaccaaatgattggacttcctcattgcaggaatgccaagctgtgtctgccaaaatgtcagggcaagagggatctcaagttggccaagatttttctggcaatgcaggtgatgaggagttgccaaaatctaagaagcctgtcagggatagtacttcagccaaggaagcaccttcaacagacatatccacaagattgctaactgttaatgggggattggttccagagtcatcactgatgcctgtaataggcaggaattttcatatcctgaagcagctaaagattaacttgcttgacatagaagcagctttgcctgaggaagcattcagagcctcaaagtctcagcaaataagaagacgttcatggcgtgcttttgtgaaggatgcagaattaatatcatatgtggtattggcaatcaatttcttgcagagcatgataaaagccgagtttctgaagaaagattggtggtactggtcctccttcactgcagctatcaagacaacaactgtatcatcgcttgcgctcaggatttacaccctcgacgactgcatcatgtacacaaaggatccagctccaaacctgcagccagctgacaatgcaaggtctggaaacaaggggaagaggaagaaagacatagattcatgagcatcgtaaccacaatgctcctggcttcccctgtagattctatctatctgcatttagaggcttctcagttctctggcagcataacaacgcggtcaggtagattggagatatagatggtagtggtcaggtagattggagatatagatggtagtgatacaggtcgcaacctatgtgtgacctctttcttactgtacattccagtgtcacagcaagggtgcagccatgatttgcccgtttcagtcttgtcctacttactggcctgccattgcgcgatatctgctgttgctaaggctcaatctctgtaaattctactcgagggatggcaccgggcaagtgctggtgtttaatctgttgcccgatgtgttgatctgttctaggggattagaggaggaatgctaggtcggtaggatttaccccatttctaccctgcttcattttattttagtggtggcagtgggtagtcgtagttttttcttttcttttcttttcagagctgggattgtttgatggatgtcccctgcggcatctgactgctttagggaatttgatacatgacgagtgtaatattttttttgacatagaagttgtaactaaaccgaaactaataatgatgaatgaaaatgaatccctgttcctttc

SEQ ID NO: 125001 - DNA, 77 bp, Zea Mays
gacaacgattgccactctcgacttctttggcaatcacttttttgatcttgttgatgcgactgcatgccatgacaatc

SEQ ID NO: 125002 - DNA, 979 bp, Zea Mays
acctcctccccctcgaggcaatgccgagcgcccttaacctagcctgagttcgagctcaatccccattccgtcatggatcggccgccgcatctcgtcatcgacctcaacgaggccccgccgccgccgtcgagcgacaccccgccggcgcaggccccgtcgccgccgcaggagttggctccgcccgtccaagctcctcctcctcctcctcctccgccgccgccgccgcagtttcctcctctcctgccgccgcagctgcccctgggtgcgcccaaccaacaggtgcggctccagcaggaggccctcgacgtggtgcttcgggtccaccgccccctcgaactgaggaatacaccttttgggcccatagggaacgtgcccgccggcttgctccctggtctggggctgccgctgctccctctgcagccgccggcgcctcaccctggggaggcgggttggggcaacccgccggccccctgctcgtcctgcggtcgccaggagattctggggggaaccttggtctgcgacgcgtgtgacagggggttccatcccaactgcgtccgcgtctggccgcctctcttccccccgcccccgccacccggcccccctggcgcccggcggccccgtgccgccgccaacgaggactggatctgccctgcgtgtgagaggcgtggcgctcgctccacccgctggaagctaggtgcagttgagcttgacatcaacgctgctccgccagaggaccccgtcacagtcatcgccaatgacatccgcaggcagttacttgagctctttttaatcattattatcattgattatattgatagtatatgcttggccatcgaactccttagtctcagaggctatgagtccgagtaatctgctgcttgtaaaacgctggtgcctaagcaatcggtgatgttaagagtgatgaacactgaacagcagaacaggggataatccgttgaaccttgttattatttgttct

SEQ ID NO: 125003 - DNA, 513 bp, Zea Mays
gggtccctgccctgctgccgctgccgctgcggcctctcccacctccacctcgccgagccttgtccgcaggccagcggcttcctctctgagcctggcgttctcacgagccacggcaccgtgcctggcgaccacgcggttgaggtcgacaaggagcctctggttggcgccaaggagctcggcggcccgcaacgacagctcgtgcaggcgccgctgcctccgggcgcgcgacctccgcgcggacgatcggttggacgccagccttctcctcttcctctcggcagacaccgagctgacgggggtggcaatagcagcgccgccatcgcagctgtgtgggtagtagtagtacgcggggtcgaggccggcgaccacgtcgaagtcgaacgagctggaataatcgtgggcgggaagaacaggaccgttccgcggcaggaagaggctggccaggtcctccagcccagggacgactgggagtgggagccttgctagattggccgccgcgcagctctgttgcat

SEQ ID NO: 125004 - DNA, 957 bp, Zea Mays
actactatgatgctgtgacctgacaaatccttatattgatagagcggaggcgcaggcgctgtcagtggagccacagaaggtgcaggagacgatgcagccgaatgcccggtagaagataggactgggcgaggcacgtcttggtgaggcggcaatcccaggccgactggtgccagcaaacagggtcgcaagctaaccaacagaaggagatcgaacgcctccccggcatcctgtcagcggcaccaagaagatagtaacgtgccagcgttttagcatctggtcactgacccattaactactgtttttcacggcagtgtcggaatttgttcaacctctgcagcagcttcatctgcaaagtttcgaatctaaaactcgatagccttttcaccctctcttaaagttttgtttggaatgctgtgcttcatctgcaactcccttttgttttgggagcaaagcgccaaagcaggatgaccgggcgctttcctcgtaccgatgaggcccacacaactttctctggagcacatcctaatcagtagttagtcacagttaacccgcggcaactgcatggtgagctttggagctctggaccatggagcactcgtcacctcgaggcttcagttggttttgcatacgatttgtagtcatgtctgccatttggacctaagactgtaatcctgattggctgagcagagataatgcctttctttctactgtgcgctatccgttattgtaactgcactgtacacacaccaacacgcagagataactcatactcactcggttcttttttatttgtcacattttaatttaaaaaatgaattaatgagtgataaatattcaagaacggagatactcactcggttcttttttatttgtcacattttagtttaaaaaataaattaatgaacgacaaatattcgataacggatataatacagagatagtagtagccaaataaaa

SEQ ID NO: 125005 - DNA, 2202 bp, Zea Mays
atggcgtatggttcttctcgcttccttatttttttctctctctctaaaatccatatcaaatgggctcaagttgggcccactgacctaggccaggccaggcccaacccaacgtttccagtgtctcaaaaaccaaccggacgacgacccggcggtcctcacccagtcgtcacccccacggacccttctcaagaaccacttccgccattgcctgcttcgtgcttcttcccaatggcgggtatcgccggcgacgatcccttcggtttcgactccgactccgactccggggacgacggcccggtctgctacgacccattcgaagactgtgatggcgacggggacgaggacgaggacgcgggacttgtcggcggccactttgcgctcagctacgggggcggcgggcagtatcgcatctcagatttcgctttccgcggcggcgaaggagacggaggcgacgtcctcgtgggccagcgccagggacccctgtcctcccacgacgaacccattctcgaaaccctaggccgctcattcgactccgacggaggtctcagccaattctacccccacctctttcctgcatcgcaactcgtcgaggacacctccggggaggaggaggaggaggaggagatgatttcccgaaatgctctgggcggcgtagggtccgaattcgagcggggagcggtcgatgaggagactgccgacgacgacgaggacgggatcgtgctcatgctgaacgggtttaccctcgattcggggccgcctgttggtggcttccagggcccggtggacgccgttgaggaggccaccagcgacgacgatgtgggcgaggtgggtgggctcatgctcagcgggttcgacctccgagcgccagcgccacacgccacgcggcccttccgaatggtggtgggcggcgaggacaccgactccgacgacgccgacctcaacctcgtcgacgctctcgcgcgccgcgtcagggaggctacacggcggctgccggcatcccgtgcggtggtggacggcttaccggaggttgcgctcagcgaccaggaggcctcgcacggctgcgctgtgtgcaaggatgccgttgtggcggggcagagtgtccttaggctcccctgcaaccactacttccatggggagtgcatccgcccgtggcttgccatcaggaacacctgtcctgtctgccggttccagctcccaacgggtgacgctgctgagtatgattcgccacggagcacgactggtggtgttgttgtgtctgtgccgcaacaacacagcgcaccagcacagagcggaggcgcaggcgctgtcagtggagccacagaaggtgcaggagacgatgcagccgaatgcccggtagaagataggactgggcgaggcacgtcttggtgaggcggcaatcccaggccgactggtgccagcaaacagggtcgcaagctaaccaacagaaggagatcgaacgcctccccggcatcctgtcagcggcaccaagaagatagtaacgtgccagcgttttagcatctggtcactgacccattaactactgtttttcacggcagtgtcggaatttgttcaacctctgcagcagcttcatctgcaaagtttcgaatctaaaactcgatagccttttcaccctctcttaaagttttgtttggaatgctgtgcttcatctgcaactcccttttgttttgggagcaaagcgccaaagcaggatgaccgggcgctttcctcgtaccgatgaggcccacacaactttctctggagcacatcctaatcagtagttagtcacagttaacccgcggcaactgcatggtgagctttggagctctggaccatggagcactcgtcacctcgaggcttcagttggttttgcatacgatttgtagtcatgtctgccatttggacctaagactgtaatcctgattggctgagcagagataatgcctttctttctactgtgcgctatccgttattgtaactgcactgtacacacaccaacacgcagagataactcatactcactcggttcttttttatttgtcacattttaatttaaaaaatgaattaatgagtgataaatattcaagaacggagatactcactcggttcttttttatttgtcacattttagtttaaaaaataaattaatgaacgacaaatattcgataacggatataatacagagatagtagtagccaaataaaa

SEQ ID NO: 125006 - DNA, 2048 bp, Zea Mays
gtgctggttgcctccttgttgcaaactgaccaatccaaagtatgttccagagggacccttagccataagggatgcatgtgtgcccttctccacaacaattcctttttcaagcacagtgatctggtcacagttctggattgtgctgagcctgtgtgccaccacaatgcttgtcctgccaaccatcactcggtccaatgcctcttgtaccaccttctctgactggctgtccagtgcacttgtagcttcatccagtagcaggattgcagggttcttcaggatggcacgggcaattgcaatgcgttgtttttggcctcctgagagctgcacacccctctcaccacaccatgtgtcatatccatccttgaggttgctaatgaagtcatgtgcattcgcagaccttgcagcattctcaatttctgcttcggttgctgtttctgtaccatacacaatattttctcttattgtacctgcaaatagtgttggttcttggctgactaatccaatatgtcgacgcagggctctgagattgtatgttttgatgtctttgccatcgatcttcactacccccctaagtgggtcgtagaacctctctataagacctatgatagtcgacttaccagaaccactttgcccaacaagggctgttgacttgcctggttggatgctcaaggagaaacctttgaatataatcacatctggccttgatgggtatgcaaagtcaactcctttgatgtcaacctcaccttttagcttctctggtttgtacccctcagggttatcagggtcaatttcggtttccctgtcaagaacagcgaatactgaagctactgcatcagcacccttagcaaggtctgttgtcatgctacctgcatctgcaatcacacgccctgtgcttactagtatcatgctcttcagtaagacacggcgagcataaaagcaaacaatgataaggggttgcactgctatcatgacaagggccaaacgccaagcgatcaccagacccatagtgcaggctatgagaactgcagaaactgtctggatcactagagccattcgatcacccacaagagacctcacctgccgaaaaatgtatatgtattgtcaggtactatttcttttaataatattgcataagcttatctttggttcgtataattaccacgttggcatccttggcaagttgtgagcatatggcaccactggagttctcatcacggtcaaaccacccaatctcaaaagtgaggatttttgcaagcatctgttctctcactctctttgtgaggtattcccccatggcaccgaagttgtaatgttgcccaatattgatcaagaatgagagcactgcaagagcaacaaagatgagtgcgtaggtccttgttttgtccttgatctcatcatggtctgccaagaagtagattgagatcatgctgcccatggcatatgcatatgcaggttgtatgcctccaaacacaattgcactgaaacttcccatcagagcctgcttccattctggtgcattaagcatcagtaacctcctgaatgatgggatgggaggctttggcttctcggcaatattatcattttctgcgtcacccattgaccgtcctgagcttgacctgctagctgcagagaacctcctgctcatgctgtggctgctagattgccccacagcagatgtacttacagttccaccaacctgattggcctcccttgaatctctggtctgctgaaggcggacaagagatgtgtagagcccattctcattgtcaatgaggtcatcgtgggatcccagctccttgacctcaccgtattgcatcacagcaatcatgtcagcattccggattgtggagagccgatgtgcaatgacaatggttgtcctgccaacagaagccaggtcaagtgcctcttgcacaacacgctctgactctgtgtccaatgcacttgtggcttcatcaagcaggagaatcttgggtgacttaaggatagctctggcaatagcaatcctctgcttctgtcctccagacatttggacaccacgctcacccacc

SEQ ID NO: 125007 - DNA, 465 bp, Zea Mays
atgccgtcgacctcccagttgtcgttgtcctcgtcccgagccttggaggtcgcgtcggcgtcttcttctgggaacctcggctcgtccatcatacgcctgcgacggttgcggcgtccggcctcgcgcgccttgcgcttcttctcgtctgtcttgctctcgtacctccggcggcgcttgatctcctgcagcacgccggcgcgcatcacctcccgccggaacctgcgaaagatggactcctccccctcgttctcgtccaccaggatctgcacattgaaccccttggccgccaccaccgccgtcggcgcccggcgcgccacgtgcaccacggacggcggcgagctcttccccgagaacggagcgagcggtagctgcagcagcgtgctcagcagggagctcgttgcgggggcggccatggctgctggcctgctgcgagttcgtgggtctcggttctgcgttcttggatag

SEQ ID NO: 125008 - DNA, 1396 bp, Zea Mays
aatattctaagacacctggtggacgctgttctcacgaagcccgccgttcggagttctacaatcccaaatagcatcgtcatcgcaaaatgcaggcgctcctactccccgcgcgggccgcgccgccgccgccggcgatccttcggcagcgtgcggtttccgcgtccacgtgtgcgtcgcagggctgccgcctcctactcggtgcctctggttgtctcagctgtggggtaagatctcggctgcgcctcacagtggtggcggcgtcatcgtcctcgtcgggaccgctatacccgacgcctccacccaccgaggaggaggtggagcgggtcaagctcgagcaggttatgaggagactagagaaaacagcaaggtatttcaagaatttgggtaccctggggttctggtcccagttggtgtgcacaattgtctctgctggaattttggcattctctacagttgtaacggggaaggtgacagcaccctttacattctatgcgactgctgctggtattgctgctgcttttatctcatccttctggtcatttggttacatccgtctctctgaaaggcttagaagaacatcaaaggaacctgctaaggctcctccacgcgccgatgttgttaatagcctgaaaaatggcattgtgctgaatattctcgggatgggcgccgctgttctgggcatgcaagccaccgttggtgctttggtagcaaaagctctcacaacctctgcagttccctattatcaggctgctgctccaggccaaagccctgtgttggccttagatgttttcctagttcaggcttcagcgaacaccatcctgtcgcatttcctcgggctggcgagctccctggagctgctgcgctcggtgtcgctgcctccagcagaagctgccgcccctgccggggcctgagccatggcccgtgggcggcagggtcaaggaagaaccttcgttccctcggcggcggcggctctggtagacgtagacgctctcgctgttgctgctccggattgtgtgtacagctcgcatcaagcttggtacatactacacacacatcgatgccttgcccttcggttcagctggaaccaacgtgtctgtctgcctagttcccgccgggcgtgaggcgagctcttgcatgagcacttgcgagttgcgaatcacatgatgtgtgtggcgcatgtttgctgtacaagtgagcgactgggttccctcctagtcattgtacccgcttcgctggtcgggtataaaaaacggacagtataaatatccattttttatacggattcgggcccctttaagtctagtttgggaacaccatttttctaacggagtgtttggatcccttcattttagaagaattggaatttactaaataaagtaacttatttagtttggaa

SEQ ID NO: 125009 - DNA, 141 bp, Zea Mays
gcgctactaccgcacagctgtagtgtcgtccacaagttctaggcgaccgctggtgctgccacaatgtcgccgccacccgcaagatctagttccaagcgacgcccgccatctgcaaggttcgtcgtccaggtctagctctta

SEQ ID NO: 125010 - DNA, 2357 bp, Zea Mays
ggtcattccagcactcgattcaacaacaccgatttttgcatcatctttcaccatggagctaataaagaagcgtttgaaggagttcgggatcttcctctcatcaaggcttaaggttttaagaattaaaaagagatttcaggctggaccttttgaagttgaacccatccgtgtaactcattcaattcctgactgttgtggcttagtgcttcgttgtggtgatggcataattttccatactggtgactggaaaattgatgaatcaccagtggatggaaaaaattttgaccgacaagcattggaggaactctctaaagaaggtgttactcttatgatgagtgactcaacaaatgttctatcccctggaagatcaatcagcgaatctgttgttgctggttcattgttgcgacatatttcggaagcaaaaggaagagtaattacgacacagtttgcctcaaacatacatcgaattgggagcatcaaagctgctgcagatttaactggtcgaaaaatggtatttgttggaatgtcactcaggacataccttgaagctgctttcaaggatggaaaggcaccactggatccatcaaccttgatcaaggtagaggatatggatgcgtatgcccctaaagatcttttggttgtcactacaggttcacaaggagagccacgtgcagctctgaatcttgcatcttatgggggaagtcacgctcttaaactatcaaaagaggatgtccttctttattcagctaaggttattcctggaaatgagacacgggtaatgaagatgatgaatcgtctcactgatcttggcccaaaaattatcatgggtaaagattctggcctgcatacctctgggcatgcctaccgagaggagctggaggaagttcttcggattgttaaaccacaacatttcttgcctgttcatggagaactcctatttctcaaagaacatgaatcacttggaagatcaactggcatacggcacacaactgtaataaaaaatggagaaatgcttggtgtatcgcatctaagaaacagaagagttttgtccaatgggtttgtttcattagggaaggaggatcttcagctcatgtatagtgatggtgataaggcttttggtacatccactgatctctgcattgatgagagactgagaatcgcatctgatggcattatttttgtcagcatggagatcttccgacctcagaaggaacatggtttagcgcagtctggtttgaaaggaaaatttaagattacaacaagatgtctatggcttgataatggaagattgttggacgcactctacaaagcagctcatgctgcattgtcaagctgtcctgtgaattgtccacttagtcacatggagaggatggtagctgaaatcttgaggaaaatggtacggaagtatagtgggaagaggcctgacgtcattgcggttgctatggagaacaccacagcaagtttctcagaacacctcgatgctaaatcatctggaaattttggaccttcctcagctactagccatctgagcatgagtccagctatgagtcttgaaggcagttataaaacacacccagacaacccagaggtggaagctgaagaaacccttcctgaggccgcgagaacagcaccggatgatgcaaccacaagttccaatggtgaagcattcttctcttcagatttacatcagcctaaaacattggagcacttctgggagtcattcaaatctcctacagctgttaaaattgcacggattgtcaatggggggaagaagcaaaatcttggcaagattggcataatgggtaaggactcatcaatccagtcagctcccgctccagctaaatcttcaaaaaagaacaagtggaaacctgaggaaatcaagagcttaatacagatgcgtggcgagatgaatgagagatttcagagcgtgaaaggaagaatgatcctgtgggaggagatttccgacaacatgttgaagcaaggaataagtcgtactccggcacagtgcaaatcgctttggacatcgttagttcagaaatacgaggaaagcaaggacgcggagagcatgaagacgtggccgtatttcttggccatggataggatcctatcgcagcaaggggaaatggcaaccaaaggatagagaaggctgtagcttagtggtagacgtttattagaacatttgatatgttgtagcagagcccagtcagtgtagtgaggatataagatgaaatgtactgtgtacaggtactgaggtacagcacctggcaatttattgggaccggattcccttgttctgagtaaggtcgacggtcggtagctcgagatcgagatggcgatttactgtgcgtgtgcatcaa

SEQ ID NO: 125011 - DNA, 2259 bp, Zea Mays
ggtcattccagcactcgattcaacaacaccgatttttgcatcatctttcaccatggagctaataaagaagcgtttgaaggagttcgggatcttcctctcatcaaggcttaaggttttaagaattaaaaagagatttcaggctggaccttttgaagttgaacccatccgtgtaactcattcaattcctgactgttgtggcttagtgcttcgttgtggtgatggcataattttccatactggtgactggaaaattgatgaatcaccagtggatggaaaaaattttgaccgacaagcattggaggaactctctaaagaaggtgttactcttatgatgagtgactcaacaaatgttctatcccctggaagatcaatcagcgaatctgttgttgctggttcattgttgcgacatatttcggaagcaaaaggaagagtaattacgacacagtttgcctcaaacatacatcgaattgggagcatcaaagctgctgcagatttaactggtcgaaaaatggtatttgttggaatgtcactcaggacataccttgaagctgctttcaaggatggaaaggcaccactggatccatcaaccttgatcaaggtagaggatatggatgcgtatgcccctaaagatcttttggttgtcactacaggttcacaaggagagccacgtgcagctctgaatcttgcatcttatgggggaagtcacgctcttaaactatcaaaagaggatgtccttctttattcagctaaggttattcctggaaatgagacacgggtaatgaagatgatgaatcgtctcactgatcttggcccaaaaattatcatgggtaaagattctggcctgcatacctctgggcatgcctaccgagaggagctggaggaagttcttcggattgttaaaccacaacatttcttgcctgttcatggagaactcctatttctcaaagaacatgaatcacttggaagatcaactggcatacggcacacaactgtaataaaaaatggagaaatgcttggtgtatcgcatctaagaaacagaagagttttgtccaatgggtttgtttcattagggaaggaggatcttcagcatggagatcttccgacctcagaaggaacatggtttagcgcagtctggtttgaaaggaaaatttaagattacaacaagatgtctatggcttgataatggaagattgttggacgcactctacaaagcagctcatgctgcattgtcaagctgtcctgtgaattgtccacttagtcacatggagaggatggtagctgaaatcttgaggaaaatggtacggaagtatagtgggaagaggcctgacgtcattgcggttgctatggagaacaccacagcaagtttctcagaacacctcgatgctaaatcatctggaaattttggaccttcctcagctactagccatctgagcatgagtccagctatgagtcttgaaggcagttataaaacacacccagacaacccagaggtggaagctgaagaaacccttcctgaggccgcgagaacagcaccggatgatgcaaccacaagttccaatggtgaagcattcttctcttcagatttacatcagcctaaaacattggagcacttctgggagtcattcaaatctcctacagctgttaaaattgcacggattgtcaatggggggaagaagcaaaatcttggcaagattggcataatgggtaaggactcatcaatccagtcagctcccgctccagctaaatcttcaaaaaagaacaagtggaaacctgaggaaatcaagagcttaatacagatgcgtggcgagatgaatgagagatttcagagcgtgaaaggaagaatgatcctgtgggaggagatttccgacaacatgttgaagcaaggaataagtcgtactccggcacagtgcaaatcgctttggacatcgttagttcagaaatacgaggaaagcaaggacgcggagagcatgaagacgtggccgtatttcttggccatggataggatcctatcgcagcaaggggaaatggcaaccaaaggatagagaaggctgtagcttagtggtagacgtttattagaacatttgatatgttgtagcagagcccagtcagtgtagtgaggatataagatgaaatgtactgtgtacaggtactgaggtacagcacctggcaatttattgggaccggattcccttgttctgagtaaggtcgacggtcggtagctcgagatcgagatggcgatttactgtgcgtgtgcatcaa

SEQ ID NO: 125012 - DNA, 713 bp, Zea Mays
gctcggccaactcttcgattcgtaatttcgcgaaaattacagccagtgccaccaccttccttatcctgggcctcggacggacaggcccgaacgagccacttcgagcgtaccgccgccgccgccgcccgccatggtggcgctcgcctcactctcgtctctctgtccctgcggcatcgcccgccgccgcgctgctgccgcctcctcacccgccgccgtttccatctcgtgctgtgccgtcgcgaccccgtcctcctctgggaaagggccccaggaatctagaaccccccgaagaaggctgaggaaaactgagggtgcctccaagagcttggaagattcggtcaagcgaaagatggagcagttttatgaagggtccgatggtcctcctctgcgagtgctccccatcggcggtcttggcgaaataggcatgaattgcatgcttgtggggaattatgaccgatatatcttgattgatgctggagttatgttcccggagtacgtaatggaaaccatatctttctcctgcttacactacagttcagctcctattatttctaatgcctttcttatatagttttgtgtgtacaacaacttaactttttttttgaaggagaatagaatttgtttatttggacggctgtattgcattgagcccttaaacgatttatatagagtacatgatttgggagacaaggtaacccagggatacatatggg

SEQ ID NO: 125013 - DNA, 1328 bp, Zea Mays
ttttgtttccctgtaacagtagttatttatgtgtgttgttttgacattgcagggtacttcatatgagaatatgacggtgatagttaaggactacgtagaaggtttgataaacaagtatccttactggaacaggacactaggagcagaccacttcttcgtcacctgccatgatgtgggtgtgagagcatttgaaggacttaaattcatggtgaaaaactctattagagttgtatgttcgccaagctataatgttgactttataccgcataaggatattgcccttcctcaagtactgcagccgtttgccctacacgaaggaggaaatgatattgacaacagggtaattcttggcttttgggctggccatcgcaattccaaaataagggttatcctagcacgagtttgggagaatgacacagaacttgctatcagcaacaatcggatcagtagagctattggagagctagtttatcagaagcagttttaccgtaccaagttctgtatctgtcctggtggttcacaagttaacagtgcacgtatatctgactcaatacactatggttgtgttcctgttattctgtcagactactatgatctgcctttcaatgatgcccttgactggagaaagtttgcagttatacttagggagagagatgtgtatcaactgaagaatatcttgaaatctatatcacaggaggagtttatttcattgcataaatcgctagttcaggtgcagaaacactttgtgtggcattcacctcccgtctcctacgatgcattccacatggttatgtatgaactgtggttgcgtcataatgtaattaagtactgaagcctctcagcctcttgagttttgattgataacccaaatgactgatctatcagaaagacactaccaagtctgacagcctgctgttgctaccttgaaaacggcaatttggttatttgctctttgaatatccagctggatggatcattgaatataatgttagctatgcatggtgcaacgaagagcatgtccaagaaagagttggccgctgtccagcatatatgacaaaactgtagtcctggttaattgatagattagctgattcttttaacaatagttagccttctcatatttcaatcttttcttatatttcacagaacagcttggttgattgtatgtagtttccccgtgcatttttttttgttcaatggcttcaggcatgtaaggttgtctcacataacaacgttttgcacggctatatgtacggtctgctggagagagcctaagtaatgcatgtataatacaatattattgataagaaacatagtttaattccttc

SEQ ID NO: 125014 - DNA, 1799 bp, Zea Mays
ctcagaaaacccctcaaattctccgctcccttcgatccacccccgcatcgcaaggagtcctccacttcactcctcctgcccacttccggtgatggccggccgcctcacgggcgccgccgcgtcctcaccgctttcccgcgcgctcctcctcctcgccgcgctcgggctcttctccatctccttcctctcactccgctccctccgccccgcggcggaccccgcgctcgcggccgccgccgacaagtcccgccccctcctccggctccactcctcttcgacggtgtatcactctccggaggcgttcgcggtggggtacgcggagatggagcggagcttcaaggtgtacatctacccggacggcgaccccaaaacattctaccagactcctcgcaagctcacggggaagtacgccagcgagggctacttcttccagaacatccgagagagccggttccgcaccgatgaccccgaccaggcgcacctctttttcgtccccatatcgccccacaagatgcgcggcaagggtacttcatatgagaatatgacggtgatagttaaggactacgtagaaggtttgataaacaagtatccttactggaacaggacactaggagcagaccacttcttcgtcacctgccatgatgtgggtgtgagagcatttgaaggacttaaattcatggtgaaaaactctattagagttgtatgttcgccaagctataatgttgactttataccgcataaggatattgcccttcctcaagtactgcagccgtttgccctacacgaaggaggaaatgatattgacaacagggtaattcttggcttttgggctggccatcgcaattccaaaataagggttatcctagcacgagtttgggagaatgacacagaacttgctatcagcaacaatcggatcagtagagctattggagagctagtttatcagaagcagttttaccgtaccaagttctgtatctgtcctggtggttcacaagttaacagtgcacgtatatctgactcaatacactatggttgtgttcctgttattctgtcagactactatgatctgcctttcaatgatgcccttgactggagaaagtttgcagttatacttagggagagagatgtgtatcaactgaagaatatcttgaaatctatatcacaggaggagtttatttcattgcataaatcgctagttcaggtgcagaaacactttgtgtggcattcacctcccgtctcctacgatgcattccacatggttatgtatgaactgtggttgcgtcataatgtaattaagtactgaagcctctcagcctcttgagttttgattgataacccaaatgactgatctatcagaaagacactaccaagtctgacagcctgctgttgctaccttgaaaacggcaatttggttatttgctctttgaatatccagctggatggatcattgaatataatgttagctatgcatggtgcaacgaagagcatgtccaagaaagagttggccgctgtccagcatatatgacaaaactgtagtcctggttaattgatagattagctgattcttttaacaatagttagccttctcatatttcaatcttttcttatatttcacagaacagcttggttgattgtatgtagtttccccgtgcatttttttttgttcaatggcttcaggcatgtaaggttgtctcacataacaacgttttgcacggctatatgtacggtctgctggagagagcctaagtaatgcatgtataatacaatattattgataagaaacatagtttaattccttc

SEQ ID NO: 125015 - DNA, 1445 bp, Zea Mays
acgcagggtggctaggagttgagtcgtgcagaagagacaaaggtcctcacttggctaagctagacacgtacgagtgcaggaaacaagataagtcgcggtttgcgacggcgagaagcgccggatgagtgtccactgtccacaagtccagattccaattccagtccgatcgtgagctcagctcagctccgctagtcctctccccgcacgcaccaccaccagcagcagtccagcaccatgggcggcgccctgctcctcacgctgctcctcgcggccgtgcccctctccttgggcggcggcggcggcgcgcacccgggctactccgacgacgacgagagcgcctgcacggtggacgcgggcgcggagctgctgcggcggatggaggagcgcgggcccgacaggcgcatcatcgacatcacgcacgcggtcgtgccggacctgccggcgttcgccacgggggcggtcgcggggcccatgctgcgcctcagggagtccatggcggacgggtccgagtacaacctgtcggagctgcggatggagtgccacaccggcacgcacgtcgacgcgcctggccacatcaaccaggcccacttcgccgccggcctcgacgtcgacacgctcgacctccacgtcctcaacggacctgcattgctagttgatgtgccaagaaacacaaatataacagctgaagcgatggaattcctaaacatcccgagaggggttcgccgagttctgttcagaacactgaacactgacaggaagttgatgtggaggaagggaggtgacatgagctacgttgggtttacagaggatggcgcgcagtggttagtcgacaacaccgacataaagctagttggagttgacggtctgtcagtggcatcatttgatcacctgatctctgcccacgtggtctttttcaaaaccccggatataatccctgttgagagcctgaatctggacgacatcgaggcggggatatacatgctgcactgtctacctctcaggctggtcggagccgagggtgcaccgaccagatgcatcctcatcaagtgatcgttcctcggccggcctgctcttgctgccttgctggaggtggcgacactggaccatgccagctgagctggtgctccgtcgtgggtcgcgtggccaatatttggctcgcatgcagtcgtcgatctatatggaacagaacactgcatgcctatgtagatacgcttgtatggacaataaaggaaccgcagtacttctgtcgatgaaatacttttgggtgagccggtaatctaaaacaccaggcctacaggttaagctggaggccctggaaggctgaggctagcggctggggatggatccagatttttattcgaatgctatttttttggtcatatttctttgattgtaaacaaataacatatatgattttctatatctctactactctatatgagtcc

SEQ ID NO: 125016 - DNA, 998 bp, Zea Mays
tcaacgcttaaaaagtaaaaaccctccggcggcggtggggttcctgttcctccggtggaagctcccggcgctcaaatccggcgaaagaaaagaggggaaagaggcaggagccggctcaaatggacagcggaagcgattccgacggcgctcccgaggagctcaccgccgtccagggtgttgagaagcacgaagagatcagtcaagttgagaaggatagtgccatcagagtaacacgggaaggaaaggagcggaggaaacgctgggcccaacgaagaacatcctctaaaccagataagaaggcaccaaaggaagtagtagaagatgaaggtaccaaacaaagcgaggagacagatactatgcctggaatgctccccactagtgtaattgaaattctagcagctcgtgagaagcaaaccttcgcatcagattctgaggaagaaaatgtaaagcagaaggtccagaaaaggaagaagaggatgaaaactgctgggcctgaaactattctgctgaaagatgtccggtcaacacagcacgtgaagaacgcccttgatttcttggagcaaaggaaaaaacaggttccgagatcaaatgcagttttgaagaatgccagtaaggctttgcgtctcctatcttcgaaaggtaattttctaagttaaccgtgtggtaggatagcacatttttcagagtatgtgtttagaccatcatctcaacagcagatatggtcgagatactttggaccgatgtatttgaatggaatcgatctggcacgtgagatgtgatgcagtatatcctttggtgtggaagtgtgatgattagcacacgtgtgagttttagttatctatttttgtggatttgcgctgcaaatttctgaagaaaactctgaaagatctccaaattttgatagccatgtggcacttcttgtatcagactatcagagggttgtcgtgttgacttgttgtatactctttctattaccattcgtctggagatgttttacc

SEQ ID NO: 125017 - DNA, 1257 bp, Zea Mays
tggtaacaatttcagctgcgtcattccagttgacatgcataacattcatgatgcagttatatgttcagttatgaacttatgatgctatggttcctcatcatcgtccttcgtttgagcaccagtgacgagctcttctgtcaaagaaaatagcccgacaatctcctttttagcctcgagaatcacattaagtttcctttgtggttccaattcagaagcaccttcactaacgtttgaatctaaattggtaccagaatcagttctaccacttctcaagaatttcttagtcacatccgcaagcttcttcaacatagtgctagcagctagtgcctccatctccacagattccatctcatgcttttggagctccgcttcaccagcaatgttgtcttcggttgcctcatcagcaactctagacagtttcctggtgccataggggtctatggatagctcttccaacttgtctagttccttgtccctaacatctaaccttccaactactgccttcaactctcgatctttggcgtcaagcgctttataagcagcagtcagatccatgtccttctgtcgcagggattcttttaacatgtctatgtcagcctccagttggttatgcttatgcaaactgtactcaagggctgtgctcgtgcttaaaatttcatcatccagcaagttataaatgttgaattcttcgcctttgacagaacctatgagattgctagtaagctcgactatcttttgaaccacagattcagcttgcgagcgtcctaatctcatcttatccaattcatcctgcatcaattgtatgcattgctctttatcctgtaattcagttctaacttggaccagttgatcctccttgctatttatcagctgctgaagttcaacaacttcgctgttaacttcatcaagttttctttgtgcctccagaagctccaaatccttctctcgaacagcaaattgtatggaatccaccttcaatttcatatcttcgacttcatgcctcgcctctaacagctcagtctcttttgtttcaacaagcttttgtgaattgaagtaatccttctccttctgaactacctcctcttgaaggaacgccacttccttagttttctgttccaagatctccctttctttggttaacatagcctctaggaactcaaccttctccgtttcctcaagtaactgagattcaagttcactacaacgagattgtacagtactgagctcatttgactttccttgaatctccagctgggc

SEQ ID NO: 125018 - DNA, 1053 bp, Zea Mays
gaacgcataccgcatgtcctctctcctgtgttgctcgcctccccaactccccgtcgcgctttctcctagtgaggctactgggtgaccgccgcctctgccgccctacgccaggttccaggtcttcgtcactccctttcattatcttcgtcgtctcattcgccggcgacgagcacccaccagaaatcatagctgctttgggtatggaggcgctgtttgggagcaataaccatggcggccacaaggccgctgatttggcctcgcttataattacccaggttgccttggaggtgccaaggttacttgggctccttgccatgattctgcataatgaaatctttacatctggtggagaccagaatttgattactaggattctgggcaaaagcgaagatgaaactaatcctgagaacaaagatgatggagagtccgatgatgataatgatgatgaaggagacgatgatgatgctgaaaacgaggaggaagatgatggtggtgatgagggatcagatgacaatgagaatgaggaagatgacgatggagatgatgatgatcctgcagccaatggcgaagggggaagcgatgacgacgaagatgatggtggagaggatgaagaggatgatgacgacgacgacgatgatggggacgatggcaatgaggaagaggaggaagaatctgaagaggatgatgatgatgatgaagtcccccaaccacctactaaaaagaggaaatgatcaacggctgcgacgagtggttgcttacacgcaggaatgctgcctgttcgtccctgcgcagcagtttactgtttagtgggtagagttttttagcttggtcgtggacaattcatagcctagtttggaaacaaaaaagaaacatttaattgtgcatgtactattaaaccattcctttaatcatgtatctcagattgctatcatggtttctaaattgtgtttgcctaagttttgtattgcaatttaacaatgttcttgtgcaacctgatggtcgtggtacgttatgcctggttgcaaggatagatcagaatttctggatgaatct

SEQ ID NO: 125019 - DNA, 967 bp, Zea Mays
ataccgcatgtcctctctcctgtgttgctcgcctccccaactccccgtcgcgctttctcctagtgaggctactgggtgaccgccgcctctgccgccctacgccaggttccaggtcttcgtcactccctttcattatcttcgtcgtctcattcgccggcgacgagcacccaccagaaatcatagctgctttgggtatggaggcgctgtttgggagcaataaccatggcggccacaaggccgctgatttggcctcgcttataattacccaggttgccttggaggtgccaaggttacttgggctccttgccatgaatttgattactaggattctgggcaaaagcgaagatgaaactaatcctgagaacaaagatgatggagagtccgatgatgataatgatgatgaaggagacgatgatgatgctgaaaacgaggaggaagatgatggtggtgatgagggatcagatgacaatgagaatgaggaagatgacgatggagatgatgatgatcctgcagccaatggcgaagggggaagcgatgacgacgaagatgatggtggagaggatgaagaggatgatgacgacgacgacgatgatggggacgatggcaatgaggaagaggaggaagaatctgaagaggatgatgatgatgatgaagtcccccaaccacctactaaaaagaggaaatgatcaacggctgcgacgagtggttgcttacacgcaggaatgctgcctgttcgtccctgcgcagcagtttactgtttagtgggtagagttttttagcttggtcgtggacaattcatagcctagtttggaaacaaaaaagaaacatttaattgtgcatgtactattaaaccattcctttaatcatgtatctcagattgctatcatggtttctaaattgtgtttgcctaagttttgtattgcaatttaacaatgttcttgtgcaacctgatggtcgtggtacgtta

SEQ ID NO: 125020 - DNA, 388 bp, Zea Mays
tacctgaggggcatggatcagccggagccgacgatgatgttgttgatggggatgaagatgagcttgacaaagaagccgacgaatcccatgacgatgaagccgatcgcagtgcgcgcggcgaccttgcagttacccttgcggtcgggcttgtggcagcgcttgacgaggcggatgctgtccttggcgaactcgcggagcgggtcgaccaccgagtcaacagcgtccatagcggcgcggggagggagagaagatctcgagggggaggggaggcgctcttcgcttgcttggagacgacgacgcggtggtggcttttgcgcgtgctctgcctttcacgaggcggatgagtgctgaaattttggagctcaatgttcgttttctttccgaattt

SEQ ID NO: 125021 - DNA, 2624 bp, Zea Mays
catcctggaacaagtggatggatggaacagtggcgcaagtgagagtgactgacgatgtgctacttcaatttgaacattttgaatcagtgcaatgcaacggccgtttggtcttcaatcatggcctgggggactattcgcttcccagatctctcctcccacttgcaagttgcaaacttgcagtcgcagcagcgcaaaacggccaagggggcccccatctcttccatcaccgcccccaaatttcaatttcccgcacgctcctcctccgctcctccatcctcaccttctcgccgaaaccaaccgccgcagccgccgccgccatggggggttcgcacagccgcgaggacctcgacctatccgactctgactccgaggacgccgagtccccccgggcttccgacaactcctccgactacggcacgcctcccccggcctccgtctcctccaagttagccagcggcgcaggggcggctacccccgcctccatcgacgccatcgaccgccacctccgccagctccacctcaagtacaacgagcccatctccccgaaccctagctccgggcccacccccagcgctaaccccgccgcgctcaacgccgtcaagctctacctccacatcggcggctcctctccctccgccaagtggatcgtctccgaccgcctcgccgccgcctccttcgtgcgcgccggcgccggcgccggcgacggcgacgacgaggatgacgacgcccccgccgccggcgggccgtggtgcctcgtcgtgggctcgaagatccgggccagggtcgggcccgagctgcagctcaaggccttccccgcgcagcgccgggtggatttcgtcgccgacggcgtatgggccctcaagttcctgcactccgacggcttcggcgacttctgcgcgaagcaccacagctgtatgtttgagaacagctacggcgtcgccgccacggacgagggccgcgccaaggtattcgggaaggacttcgcggcgtgggcgcgcccggaggacggcgacgagtcgatatgggaggacgccaccgacggcttctccccgggccccaagggcagcccgatgcccccgcggacaccgctactgaaggccgtgctggaggatctgcgggagtttgaggagcccgtcgaggaaggaagtggaatcaagagccttgcgcttggcgcgctggacaacagtttccttgttggagacaagggcattgaggtcgtgaggaatttcgagcatgggatacatggaaagggcatgtccgtgaagttttctggagggagcacaaacttctcgacaccgaaaaaggctcttcttatgcgggccgagaccaacatgcttctgatgagcccagccactgatggaaagccacacgccaagggggtgcatcagttggacattgagacggggaaggtggtttcagaatggaagtttgagaaggatggagcagatattaacatgagggatatcaccaatgatagcaaaggtgctcagctggattcgtctgagtccaccttcttgggactggatgacaaccagttgtgccggtgggatatgagagatcgcaggggcattgtacagaagttggcaagtgcgactgaatcgccagtgttgcagtggactcaggggcatcagttctcccgggggacaaactttcagtgctttgcttcaactggtgatggttcaattgttgttggatcattagatgggaaaattcgcttgtattctaagagctctatgaggatggcaaagacagcctttcctgggttgggttcgcccattacccatgtcgacgtgacatatgatgggaagtggattcttgggacaacagatgcgtacctgattcttgtatgcaccatcttcatcgacaaagatggaaaggagaagactgggtttagtggtagaatggggaaccgtattgctgctccaaggctgctgaagctcaacccactggactctcatctagcaggagcaaacaacaggttcagggagggaagattctcttgggtgacggagaacgggaagcaggagcggcatctagtggcgacggtggggaagtacagcgtggtgtggaacttcctgcaggtgaagaacagccaccacgagtgctaccagtaccaggaggggctgaagagctgctattgctacaaggtgatccccaaggacgagtccatcgtggccagccgcttcatgcacgacaagtactcggtcagcgactccccggaggctccactggtggtggccacgcccatgaaggtcacctccttcagcatatccagcaggcactaactagcctccttgctccgccccgcaacttcgctgccggccgacgcgttccccttggctcctcggcctccggtgatctggtaacattttgttaagcaattgtttgtgcgacggttgcctgttccattgccttctaagttggttcaaattaattagtgatttgctgtgttgagtcgatacgcaacgttgaagaggggatggtagtgtctgttgggttagctacatattgctgaacaatctgatttagctgtgaggaagtggctaatggttgtaagaaagctgaaagttgtttgattaaaataattgttaactatggattatgtcagactacgatggtggtcg

SEQ ID NO: 125022 - DNA, 2377 bp, Zea Mays
catcctggaacaagtggatggatggaacagtggcgcaagtgagagtgactgacgatgtgctacttcaatttgaacattttgaatcagtgcaatgcaacggccgtttggtcttcaatcatggcctgggggactattcgcttcccagatctctcctcccacttgcaagttgcaaacttgcagtcgcagcagcgcaaaacggccaagggggcccccatctcttccatcaccgcccccaaatttcaatttcccgcacgctcctcctccgctcctccatcctcaccttctcgccgaaaccaaccgccgcagccgccgccgccatggggggttcgcacagccgcgaggacctcgacctatccgactctgactccgaggacgccgagtccccccgggcttccgacaactcctccgactacggcacgcctcccccggcctccgtctcctccaagttagccagcggcgcaggggcggctacccccgcctccatcgacgccatcgaccgccacctccgccagctccacctcaagtacaacgagcccatctccccgagctgcagctcaaggccttccccgcgcagcgccgggtggatttcgtcgccgacggcgtatgggccctcaagttcctgcactccgacggcttcggcgacttctgcgcgaagcaccacagctgtatgtttgagaacagctacggcgtcgccgccacggacgagggccgcgccaaggtattcgggaaggacttcgcggcgtgggcgcgcccggaggacggcgacgagtcgatatgggaggacgccaccgacggcttctccccgggccccaagggcagcccgatgcccccgcggacaccgctactgaaggccgtgctggaggatctgcgggagtttgaggagcccgtcgaggaaggaagtggaatcaagagccttgcgcttggcgcgctggacaacagtttccttgttggagacaagggcattgaggtcgtgaggaatttcgagcatgggatacatggaaagggcatgtccgtgaagttttctggagggagcacaaacttctcgacaccgaaaaaggctcttcttatgcgggccgagaccaacatgcttctgatgagcccagccactgatggaaagccacacgccaagggggtgcatcagttggacattgagacggggaaggtggtttcagaatggaagtttgagaaggatggagcagatattaacatgagggatatcaccaatgatagcaaaggtgctcagctggattcgtctgagtccaccttcttgggactggatgacaaccagttgtgccggtgggatatgagagatcgcaggggcattgtacagaagttggcaagtgcgactgaatcgccagtgttgcagtggactcaggggcatcagttctcccgggggacaaactttcagtgctttgcttcaactggtgatggttcaattgttgttggatcattagatgggaaaattcgcttgtattctaagagctctatgaggatggcaaagacagcctttcctgggttgggttcgcccattacccatgtcgacgtgacatatgatgggaagtggattcttgggacaacagatgcgtacctgattcttgtatgcaccatcttcatcgacaaagatggaaaggagaagactgggtttagtggtagaatggggaaccgtattgctgctccaaggctgctgaagctcaacccactggactctcatctagcaggagcaaacaacaggttcagggagggaagattctcttgggtgacggagaacgggaagcaggagcggcatctagtggcgacggtggggaagtacagcgtggtgtggaacttcctgcaggtgaagaacagccaccacgagtgctaccagtaccaggaggggctgaagagctgctattgctacaaggtgatccccaaggacgagtccatcgtggccagccgcttcatgcacgacaagtactcggtcagcgactccccggaggctccactggtggtggccacgcccatgaaggtcacctccttcagcatatccagcaggcactaactagcctccttgctccgccccgcaacttcgctgccggccgacgcgttccccttggctcctcggcctccggtgatctggtaacattttgttaagcaattgtttgtgcgacggttgcctgttccattgccttctaagttggttcaaattaattagtgatttgctgtgttgagtcgatacgcaacgttgaagaggggatggtagtgtctgttgggttagctacatattgctgaacaatctgatttagctgtgaggaagtggctaatggttgtaagaaagctgaaagttgtttgattaaaataattgttaactatggattatgtcagactacgatggtggtcg

SEQ ID NO: 125023 - DNA, 1153 bp, Zea Mays
ttgcagcaaaatattgtcccgagatgccgtaatggcgaagcaagctgtcctccttcccatggctgcactggcactggttcttggagcacttgcaaccattcctgcaggtgtgcgatccatcggcgtgtgctacggcatgaacggcgacgacctgccgtcggcgagcgacgtggtgcagctgtacaaggacaacggcatcgactcgatgcgcatctactccccggacaccgacgtgctccaggcgctgagcggctcgggcatcgccgtcaccgtgggcgtccccaacgcggacgtgggcggcctcgcctcgcgcccctcggccgccgccgcctgggtccagagctacgtgctggccttcccggccgtccagttccgctacatcgccgtcgggaacgaggtcgtcgcgggggggcgcgtcctgctgcccgccatgcgcaacctcgaccgcgcgctctccgcggccggcctcgccgacgacatcaaggtgtccacggcggtggcgatagacgtggtcggcagcagcttcccgccctccgcgggcaccttcgctccgtctgcgggctacatggcgcgcgtcgcgcggtacctgcagagcaccggcgcgccgctgctggccaacctgtacccctactactcgtacatcagcgacccgggcgccgtcgacatcaactacgcgctcctcgccatgcccgccggcacggtggtggtgcaagacggcgggtacagctacgacagcctgttcgatgcgatggtcgactgcttctactccgcgctggagaacgccggggccgggaacgtcaccgtcgtcgtgtcggagagcgggtggccgtcggccgggagcgacgcggccaacacgaccaactcgcaggcctacagccagaacctcatcaaccacgtcggccagggcacgccgaagcgccccgggcccatagaggcctacatattcgccacgttcaacgaggaccagaagcttggagacgacgagacgcggcggcacttcggcttgttcaacaaggacagatcgctcgcgtaccccatcgattttgtcaacccataacagcaggatcatcaatctcgttctctcttcaatgttccaaaattggtgatgtgcactttttgttaaaaccagtagaaatgcacgcaggttcgtatg

SEQ ID NO: 125024 - DNA, 1078 bp, Zea Mays
tgcactaggctcacaatctcgaagctactagctatatcttctcttagtttgctcgtcaccaccggaaatggctacggcgacgactaagccggcggcggggcgcggcgggaggcgctacgcgctgctgctggcgctctgggactcggagtacgccaaggaggtgtacggcgggtactacaacgtctttgtcgccgcgttcggcgccgacgacgtcgtcggcggcggtggggagggcccggccggcgataggtggcactgcttccgtgtgattgccggcgagttccctgcgccggaggacctggcgtcatacgacggcttcgtggtgagcggcagcccgcaggacgcgcacggcgacgagccatggatccggcgcctctgcgcgctcatccagaccgtccacgccatgaggaagcgggtgctcggcgtctgcttcggccaccaggttctgtgccgagcgctgggcgggagggtcggcagggctaggaacggctgggacgtcggggtgaggaaggtgacgtttgcgcgagaccgcctggagggccttgagttcctcggggacctcgtcgaggagcttccccggagcgcctccctcatcgaggttcaccaggacgaggtgtgggagatcccgcctgcggcgacggtgctggcctactcggagaagacgcgcgtggaggtgttcgcggtcggggagcacgcgctgggcatccagggacacccggagtacaccgtcgacatccttcacaacctcatcgaccgcctcaccaggcagaacgacatcaggaggagcgtcggcgaggaggcgcggcggacggttgcggagaccggcgggccggaccgcgctttctggaccgcgctctgcaaaggttttctcggagggggaggggcgggaggagaccgtccgcagccgtctgctgctctgcctgcggtgcgggagacggcgccgccggaggtgacgactagctgcgccgtcgctggttgcttcgccagcgccgcaggtgcaatggtccagatggcgcgcagcaactagttatggctagggctgcccaaaatcttgagtacctggttcctttttgctgca

SEQ ID NO: 125025 - DNA, 228 bp, Zea Mays
tcaccagcgaacgaagaaatcgatctgagcctggaaggatctacaccccacgcttacccaccatctcccattccttgtaggtcatccaggaaccaaagtgcctctaccagcattggccccgaggacgatggagatggcaaggtggccggggaggttgtcgcagcctctatctcggtcacgcactcaccccctcgcctagcgcacgctctacatcagcggcgtggatga

SEQ ID NO: 125026 - DNA, 596 bp, Zea Mays
ttggtgcggcccatactccaattaggtttgggcggcccatggtcgcgcgcacagcagccgtttcttcctccgtccgcacgatggagcgcccaaccgtccgttccggccgcccctcggtcagctccacgacggcacgacctcagctctccaacctgggcctcggctactccatcgccatcgcgctcggcttcctcatcctgttcgcctccttcctgctggctttctacttctgcttcggccgcggcggggactactgggccggggaagcagtcaccacggcttccagctccggccacctctccatcaccgtcccgcgcgtgctctttgtcgcggaggggtccgagtcccccgaagacgacgcttacccctcctcctccgccgccgcggcctgctcccccgtcgggctcgacgcggccgccatcgcttcctaccccaaggtcgccttctccagcagggccgccgaggccgacgccatgtgctccatctgcctcagcgagtacagggacggcgagacgctgcgcgtgatgcccgagtgcaggcacggcttccacgtcgcgtgcctcgacgcctggctgagccggagcgcgtcctacccc

SEQ ID NO: 125027 - DNA, 4193 bp, Zea Mays
ccttcccacacgtagtagaaaaaaaaacccatccatcccgcttccttgattcagcctaggacgactgaatcaaacccatacgtgatcggaggagttggattgcctcccgcctctcggaggtcgcttccatctattaatcaagaaattccaaacttctcgcccaaatccgtgcggacttggtgaagcagggtaaattgggccaggagacgtcggtcccggccacggagtccccctccccttcaggccgttcttgttgggggagataaaaggattcggtgcgtctgatcggaggcgtgggagagaaggcctcggcagacgttgttggctcgtgctcttcttcgacggacggaggctgtcgtgctggagaggttaaagtgtttggtgtttcgtgttgaactgtgcgcgtgcggtggttgcttcgtttggtggtatatggtagaactgtagattttgatctggactgcgtgaagcaaaagaagggaaaaaaaaaaagaagattcggttttggagtgaagttgtggctagtcgggaatcgcaaggaagatgagttccgggtcggcggtgacaggcggtggtgcggaggaggcggcggcggtgccgctggggcagaagctgattgtgcacgtggcggagaacggccacaccttggagttccagtgcggcggcgacacgctcgtcgaggccatccagcactccatccagctccactgcgaaataccccctgccgatcagctcctcctctgcggcaacatctccctcgacggcgccaacgcgctcgccacctacaagcttccgcgggacgaccgtgaggtcttcctctacaacaaggcccggctccttgcggactcccggcccccggcgccggagtccctctacatccctgagccaaatattcctccgccgccccggccgcagggctcaccaccttcggacgcatctgcagaccccgcgctgaaggcgctggtatcctatgaaacaagattcagatatcacttccaggtcgccaatgcggtgtatcaatctagtttggcaaaatttgagctgtgcaggcggcttctgcgggaggggcaggtccaggagcgagcgctggacacagcagggagcaacctagagcacacattccggaaactctcacagaggtattcagaatttttgcggtgcttcacacaacagcaccgttcacatgttgagatgctggccaatttcgagagagatgtgcagaagctgcgtgctgttaggctgcacccagccctgcaaagtgaggggcggcattgcttgatggaccttctcaaggaaaatgacctgaggaaattggctgacgaatgcttctgctcacataagaagtttgaggttaaggtgtcacagctgaaggcaaacttcttggagctgaagaagagggtggaaggcttattccatgccatgagctcaggtgggtgcaaggatgttgagaagctgataaaggagcaccagggagtcattggtgaccagaagatcatcatgcaagctctaagcaaagatgtggacacctcaaagaagcttgttgatgactgctcaagttgccagctatctgcttctctccgtcctcatgatgcagtctcagcggttggccgtatctacgaagtgcatgaaaaggataacttgcccagtatacgggattttgatcagaggcttacaaaattgcttgagaaatgcaaggacaagaagaatgaaatgaatactttggtccatgtttgcatgcaaagagtaaaatcttctcagattagtatcaaaggcatgatgagtgaactcgttgcattccaagaggtgatgggtcatcaagaagattttgataatctgaaaatagtcagtggcttgggtcatgcatatagagcttgtgtcgccgaggtagccaggaggaaatcgtattttaagctgtatactggattggctggaaaatatgctgaaacgttggcaatcgagtgtcaaaacgagaaaacaagacgagaggattttcataggacatggagcaggtacattccagatgatgtcatgtgttccatgggactctttgattctccaagccagtgtgatgtaaaagttgctccttttgatcttgatcttcttcccattgatgttgatgatgtggaaaagcttgctccccagtctatactgggttcttttttaaaatctgagagatcacagctagcaaagcctttgctaagcaattctaccagtggaaatttgaacaaatctgaacaacattctctgagtgctgatgataagatggatttccaagattttctggggggctatgatactattgacattgcaggaactagtaagttagaagtggaaaatgccaggctaaaagcagaacttgcttctgcaattgcaattctctgcggtgctggatatggatatgagtctattgacgaagggcaaattgatgctgtattgaaaaaagcaagggaaaaaactgctgaggcacttgctgcaaaggatgagtttgcttaccagcttcagtcattgctcactgcaaagcaggaaaaatgcttggcatatgagaagcggatccaggatcttgaggaacgcttaaccaaccagtacatgcaaggtcacatggtgtcgggaagcaaaggcatgtctgattccctgctttctgcatttaaaagtaatgagtgcaacctggatttatctgaaggcaggcaaccccaaatacgtgatgaatcaagtgtggccatggatgaggtctcttcaacatctgaacagccatctaaacaaacagaaggtggcgatgagaatatgactgacatttcgggtgcactgaacttgcagttgatcgattcagcagcatgtactaatctggatgctttcatgacagaactgccacgtgataatgaacacaagattgtaaacatcaataaggaaggacacatgttgacacaacttactatggctgatacttctgatgttcctatagaagatcctcttagcaacttaaactcaagaactgatgatcatcatgccctagagttgagggataaggagctccttgtgtcagagctgcaaaacacgcttgatcaaaaatcaaaacagttgggtgaaactgaaattaaacttagtgccatgatggatgaggttaattctctgaagaaagaacttgaacaaacccggggccttcttgatgaatctcagatgaattgtgcgcaccttgaaaactgtttacatgaagcaagagaagaggcccgaacaaacaaatgttcagctgacagaagggctgttgagtatgatgctctgcggtcgtctgctttgaggatacatggtttgttcgaaaggctaaataactgcatcactgcaccaggtgtgactggctttgcagagtcactgcattctttggctgcctccttggcaagctctgtaaagaaggatgaagctgataccactgttcagtttcaacaatgcatcaagatcctggcggacaaagtttatttactgacacgacagagtgctgagctgctagaacgctattcagctatgcaggcagtacatggaggtatcacaaaagagctggatgagaagaaagagctgattaagaatctctacaataaacttcaacaagaaaaacaggccagcaaagagaagatatcatttggtcggtttgaagtccatgagcttgctgtctttttccgaaaccctgctgggcactatgaggcgatcaaccggaactgctcaaactattatctgtctgaggaatctgttgccttattcacggagcaacactcgcagcacccagtgtacataatcgggcaaatcgttcatattgagcggcgcgtagcgcgtccagaccagatgggaggagctccacgccctgatagcagtggcggccatcggtcgcccgcatccatgctcaacccctacaacctacctgggggctgtgagtacttcgtggtgactgttgccatgctgcctgatgctgccagttaaaacaaaacaccttcctgatcctgcctgacaattggctgttgaaatgaagggagaaaactgtcaaagtgtcaactgtatatatactaaaatttattgccatttgactctcaattctcagttgattcctcaagtgttgtttgtatgtatggtcatattcactgtgtaaataaactcggctactaatgctaggcatctcttcgttcaaactatttattctcctcaatgccaaa

SEQ ID NO: 125028 - DNA, 243 bp, Zea Mays
gaagggaagcgaatccaaacgatggagaagaagaaggtggcgatcccgctggtgtgccacggtcactcgcagccggtggtggatctcttctacagccctgtcacacccgatggttacttcttcatcagcgccagcaagggcagaaaacagttggcacttggcaggatgtaccttaatggatatgtaggccacacagttgatttctggagaacacaaggcattttaactaatcccactccttga

SEQ ID NO: 125029 - DNA, 255 bp, Zea Mays
atgggccgcccgagcgccagtgtggccgtgtcctgccacagccgcgcctccatctccttctccgtcagccgtcgccgcagcgccgagatccgctccgtgtcccgccggtgccggagctcgtgcagccgccgctccagctccgtcgcggagacccctcccttgtgccgccgctcgtggctcgtcgtcgctcgcgtcggccacggcgcctcctcgctgggcactcccgccgcaggcgccgacccgccctccctctag

SEQ ID NO: 125030 - DNA, 211 bp, Zea Mays
tacctggtggcgctcgtcgcggctaagggcccgaagaagacctgggcgtagccgcgtagggcagcaacgacggcggcccagtcgtctccacgagagagagggggagggggagggggagggggagacaggagagggagcgcacgcgaggagcaatggaggaaccgaagaggaatacgctgggcctgggcatatagggaaaatcatcttttaa

SEQ ID NO: 125031 - DNA, 180 bp, Zea Mays
ggccagctaattttagcccttcgtaccaccatagccgaggctccaaggcaaaggacacatagaggatcagcaaggaagaaggggttgaagccacaagggcgctttccaaatccatggctagcttacgcttacggcttacggaaatatcataggggattgataggggcaagggggtgcctg

SEQ ID NO: 125032 - DNA, 712 bp, Zea Mays
aattcaggacacaacagaagcgagcaagggaaacggatcgatacatccgatccgacgacggcgttacgtacctcaagctcgtcgttttccttggacagcgcctcgcaagctccctgtagatcccgcatctcctgcacacacacagccaagcaagaacaacaggccggagtcagtagaaccgccaccgggacataatcgagagcacagcacctgagatgaggagcggtgtgtgactgtgacctcgcggagcctctcgttgtccacggcgagtgaccgcaccagctgctgcatctccggcagcctctgcatgataatgagaggtagattttaggtcacaggaccatcttgctgacaatgaggtagatgttgctgacaatgaggtagattttttgttggctttgtcctaaagattccactttgcgttgttcaccctcctagctagcctcctccccctctcaccctctcaaatttcaaacgcagacagatatatagctgttgctgctggtgacttctaagggtgtgtttggtttgacttttggctttggcttttgcccccctaaaagtcaaaagccaaccaaagggctggatccaggaagcagctttttctaaaagccgactttcccgtagtgcaaatctgaaagcaccactggatctgcttttagtggcttttcggatggaactgtgaaaacatatatcgaagattttttaacga

SEQ ID NO: 125033 - DNA, 327 bp, Zea Mays
atggagtcgccgtcgccgtcgtcgtcgctgagcgcgctgcggcacaggctgagggccaccgtgtgctgctgcttcggccagggcggcggcccgggcgagcggacgtggtggcgccgccgcgcgggcgtcggggagttccggtacgacccgctcagctacgcgctcaacttcgacgagggcgacctcgacgtggaggaggaggagcaacagcagcagcggggagtccacgcccaccgcggcgacggcctgctctaccacggcttctcgtcgcggctgtccacgccggccgtggtcgtcgaggtcgcgtagccgtctagcgctagcgcc

SEQ ID NO: 125034 - DNA, 324 bp, Zea Mays
gaaaaagtaaatagaaagcaacgctgttaactccacatatcttttgctcattttactgtgatcctttagaagcttgttcttgcacttttaattctagacaaataatcccttgaataattataacaggcctttgtggaacggaagtggaaattggagattattttgcagtacttttcaaaatattgtggcaaggtattctaaatttactcttcaatgacctcacttgtcccaaatacagattcttttttttttaaatctggttaagataaaaatgacttgattattgcagcttatgctggtttcttgtaggcttattggtatcag

SEQ ID NO: 125035 - DNA, 227 bp, Zea Mays
cacaataagacaagcgtcgggacgggagtcgatgctgccagggcctcaagaggacggacatggaggttggcacgggtagcatggatgccacgtcggtggtcgtcctccccaatgtcgaaggctcaggggctgaaggagcaggaaggcttccccttcccttcgtcgccgcaaccgcgtccttcatcgacttatgcgacacatacatacggtcatacggaccggggtga

SEQ ID NO: 125036 - DNA, 1035 bp, Zea Mays
atggcgcccttcctcctcgccctgctcgccgtcctcctccccgcggcgccgcccagcctcggagccggctacggggaggggggcgcgggcaccatcaacatcaccaagaccctcgccggcttcccggagttcagcgtcttcagcgccatgctgaccgagaccagcgtcgcgctcgccatcaacagccgcgacagggccaccgtgctggcgcccaacaacacggccgtcgccgcggcgttcggcggcctgccccacatcccgcgctcgttcctggcggacctgctcgcgctccacgtcgtgctcgattacgtcgacgagcccaggctgggcgcgctggagcgcgggcgcacgggccgaggctccgtggtcaccacgctgctgcaggtgatgcgcgccgttccgcggggcaccggcttcctccgcgtctacgccgggcgcgacgggcgcgccaccgtctcctccgccgcgcccgcggggctccggaacgccaccgtcgagcgggtggtcgccgcgcagccgtacagcctcgccgtgctgcaggtgagcggcttcgtcgtcccgccgggcatcagggtccccaagccgttcccgccgccaagggcgaggcacatggcagcgccccccggccaggcgccggtggctgcgcccggaccccagcaggaaccgttcgttggttccggcccgctggtcccgtccccgatcaggccggtgcctacgccaaacctcacaaatactccgccggcgctaggtgagacaggaattattccgattcctagcgtgcacggcggcatggcagccaaggttccatcgcccgccggacgcagtgctacgagctggtggaatggagtagctgtggcgttcggtatcatgacatgcctcaatttgcatttgtaagctagctagatccatttaatatttttttaccatgcctgtgtagtaagtcgtcagtttgctataatttgcaacaatgcaatttcatttctatgatctcagcagcaatttcatttctatgatctcagcaaccagagccgattg

SEQ ID NO: 125037 - DNA, 894 bp, Zea Mays
atggcgcccttcctcctcgccctgctcgccgtcctcctccccgcggcgccgcccagcctcggagccggctacggggaggggggcgcgggcaccatcaacatcaccaagaccctcgccggcttcccggagttcagcgtcttcagcgccatgctgaccgagaccagcgtcgcgctcgccatcaacagccgcgacagggccaccgtgctggcgcccaacaacacggccgtcgccgcggcgttcggcggcctgccccacatcccgcgctcgttcctggcggacctgctcgcgctccacgtcgtgctcgattacgtcgacgagcccaggctgggcgcgctggagcgcgggcgcacgggccgaggctccgtggtcaccacgctgctgcaggtgatgcgcgccgttccgcggggcaccggcttcctccgcgtctacgccgggcgcgacgggcgcgccaccgtctcctccgccgcgcccgcggggctccggaacgccaccgtcgagcgggtggtcgccgcgcagccgtacagcctcgccgtgctgcaggtgagcggcttcgtcgtcccgccgggcatcagggtccccaagccgttcccgccgccaagggcgaggcacatggcagcgccccccggccaggcgccggtggctgcgcccggaccccagcaggaaccgttcgttggttccggcccgctggtcccgtccccgatcaggccggtgcctacgccaaacctcacaaatactccgccggcgctaggtgagacaggaattattccgattcctagcgtgcacggcggcatggcagccaaggttccatcgcccgccggacgcagtgctacgagctggtggaatggagtagctgtggcgttcggtatcatgacatgcctcaatttgcatttgtaa

SEQ ID NO: 125038 - DNA, 758 bp, Zea Mays
gacgtgcccaatatcatcattattgtacgtacaacgagctagtagcaggtgcgagcaacacggctgcagccatctcgccgaatggcggcagcggcggcggcagctgcctcgacgtcctggacaacggccagataacgagcagcgcgacggcggcggcaccgacggcgctatctctggcagcgccgcccccgccgctgcatcacgagctgcatcacgagaaggacgggagcctggactccgtgctgatgcagcggcgggttcattattggtccatggccggcggcgggacgacgacgacgaagagcatcgctgtttcatcacctcgctggtgacgcagacccagcagcaacagcagcacggcggcaacgtcttgtcgtgctcgtcgatcggtgtcagatcagcgcagaacggcggccagcaacggtttctttgaggtggacttcatctagtgcgatgcatgcacgtaaaaggggcagggaaaagcatatagcgtcgctgtattgtttctgagatgggaaggatgcatggcgtgaggaaagcaacaaaggctagggtttggttggttccactctagctaggggtggctagcagccttttctttttactgtgtttagtacttgggctagctagtgctagacttctctgttatattaattactagagggaaaaatataatgctggtgtagtatgtgtattcctttttcctgttgctaacaatgtgtatatactattacgtgcatgcatctgagtttacaact

SEQ ID NO: 125039 - DNA, 1797 bp, Zea Mays
cttcaagtcaagtcttctttaattaacaacaaggccaccaccacattcaaacgcacacgtacataggggcagctagctcgctcttggttccttttcctccgtcgttgctcaggtccctcctcctgcacacccagagtgtgcatgcgtgagagtacatatatatagtaggagaatgatgatgatgaacaccagcgccgccatgtcgccaccaagtaccgacgtcgtcgtcgacgacttctccctcggcgccatgcatcagccgtacgtcgtcggcttccacgccgacgccggcatgcgcatcatgcccagcgtcgtcgtcgataggccgctgctccagcagaacaccgacctattagaagagtacgacagtttcgacttcgcggccacggggctactaccgttaccgttccaagaactacctggtctcctgccccccgcgaattacctgccgctgccaacgccaagcatggccatgtcgccgccgtcgctgaggctgctgacgctcccgggcgtgccagtgcctacggcggcggcggatgtcgtgtacggcggattgggcgggggcggcgcgggagggccgtcgttcctgaagcgggagcacggcgtcggcagcggcggcgggaggatcggcggcctgaacctaggacgccgcacctacttcacccccgccgccgtggaccggctgctcggcggcggcctaggcggcgtgggcctcggcatgagcgtgctggggctcggggtcggcgccgctcaccaccaccagcagcagccgccgcggtgccaggccgagggctgcaaggccgacctctccgccgccaagcactaccaccgccgccacaaggtctgcgagttccacaccaaggccagcgccgtcgccgccgccggcaagcagcagcgcttctgccagcaatgcagcaggtttcatgtgcttgcggagtttgacgaggccaagaggagctgccggaagcggctcaccgagcacaaccgacgccgccggaagccgatcagcgcacagggcaataatgaccactcgtcgccgccaccgccggcgccaaagaaagcggatacttgcataaccacctcgtacaacgatgaccccaagacaggtgcgagcaacacggctgcagccatctcgccgaatggcggcagcggcggcggcagctgcctcgacgtcctggacaacggccagataacgagcagcgcgacggcggcggcaccgacggcgctatctctggcagcgccgcccccgccgctgcatcacgagctgcatcacgagaaggacgggagcctggactccgtgctgatgcagcggcgggttcattattggtccatggccggcggcgggacgacgacgacgaagagcatcgctgtttcatcacctcgctggtgacgcagacccagcagcaacagcagcacggcggcaacgtcttgtcgtgctcgtcgatcggtgtcagatcagcgcagaacggcggccagcaacggtttctttgaggtggacttcatctagtgcgatgcatgcacgtaaaaggggcagggaaaagcatatagcgtcgctgtattgtttctgagatgggaaggatgcatggcgtgaggaaagcaacaaaggctagggtttggttggttccactctagctaggggtggctagcagccttttctttttactgtgtttagtacttgggctagctagtgctagacttctctgttatattaattactagagggaaaaatataatgctggtgtagtatgtgtattcctttttcctgttgctaacaatgtgtatatactattacgtgca

SEQ ID NO: 125040 - DNA, 1875 bp, Zea Mays
ccagagccagagctgctagctctcaatctatctgtctctctccctctatgcccggccccccttcaatgccttcaacttcaagtcaagtcttctttaattaacaacaaggccaccaccacattcaaacgcacacgtacataggggcagctagctcgctcttggttccttttcctccgtcgttgctcaggtccctcctcctgcacacccagagtgtgcatgcgtgagagtacatatatatagtaggagaatgatgatgatgaacaccagcgccgccatgtcgccaccaagtaccgacgtcgtcgtcgacgacttctccctcggcgccatgcatcagccgtacgtcgtcggcttccacgccgacgccggcatgcgcatcatgcccagcgtcgtcgtcgataggccgctgctccagcagaacaccgacctattagaagagtacgacagtttcgacttcgcggccacggggctactaccgttaccgttccaagaactacctggtctcctgccccccgcgaattacctgccgctgccaacgccaagcatggccatgtcgccgccgtcgctgaggctgctgacgctcccgggcgtgccagtgcctacggcggcggcggatgtcgtgtacggcggattgggcgggggcggcgcgggagggccgtcgttcctgaagcgggagcacggcgtcggcagcggcggcgggaggatcggcggcctgaacctaggacgccgcacctacttcacccccgccgccgtggaccggctgctcggcggcggcctaggcggcgtgggcctcggcatgagcgtgctggggctcggggtcggcgccgctcaccaccaccagcagcagccgccgcggtgccaggccgagggctgcaaggccgacctctccgccgccaagcactaccaccgccgccacaaggtctgcgagttccacaccaaggccagcgccgtcgccgccgccggcaagcagcagcgcttctgccagcaatgcagcaggtttcatgtgcttgcggagtttgacgaggccaagaggagctgccggaagcggctcaccgagcacaaccgacgccgccggaagccgatcagcgcacagggcaataatgaccactcgtcgccgccaccgccggcgccaaagaaagcggatacttgcataaccacctcgtacaacgatgaccccaagatagcaggtgcgagcaacacggctgcagccatctcgccgaatggcggcagcggcggcggcagctgcctcgacgtcctggacaacggccagataacgagcagcgcgacggcggcggcaccgacggcgctatctctggcagcgccgcccccgccgctgcatcacgagctgcatcacgagaaggacgggagcctggactccgtgctgatgcagcggcgggttcattattggtccatggccggcggcgggacgacgacgacgaagagcatcgctgtttcatcacctcgctggtgacgcagacccagcagcaacagcagcacggcggcaacgtcttgtcgtgctcgtcgatcggtgtcagatcagcgcagaacggcggccagcaacggtttctttgaggtggacttcatctagtgcgatgcatgcacgtaaaaggggcagggaaaagcatatagcgtcgctgtattgtttctgagatgggaaggatgcatggcgtgaggaaagcaacaaaggctagggtttggttggttccactctagctaggggtggctagcagccttttctttttactgtgtttagtacttgggctagctagtgctagacttctctgttatattaattactagagggaaaaatataatgctggtgtagtatgtgtattcctttttcctgttgctaacaatgtgtatatactattacgtgca

SEQ ID NO: 125041 - DNA, 498 bp, Zea Mays
gatgccacggaaaaggatgttgcagatgtcgagggaccagtccttggcggagtgttaactctttttactggacgtacaatgggatttacagttactttttcagcaggaggtggtgatggcaatcgtggaggtggagatggaggtggcggtgttgagggtggtggtggcggaggtggaggtggaggaggtggaggtggagaattgctatttcgagcagtagatccactagaagagtttgatgctgcattagatggtgaaggagatcctgaaggggatgaagaggacgatggtgtttgtgttggtgagcctgtaggtgaagagggtgaggtggagggagctatgctggtattaaaaggattcccatcatttctgtacgcaaaagaagttaatgagttatatgtaactggtccaatcatcaaagtgttgaaggatagggcagaatgtagagaaggaaaaacaggactaattgggctgcaccaagaagtttgctataggtaa

SEQ ID NO: 125042 - DNA, 1830 bp, Zea Mays
tctctccttcctctcacattccactagaacactcccaccaggccaccacctccacctcgtcgtctcccaccaccgccgcgcgcgagccctagcccgatctagccggcggcaggcactagatcccgccgcttgcggcatcccgggacgcgcctcgccgaattcgccgctcctcgcactgcaacacgcccggaccactgttactgcatgccatgtagtattttattattggtggaggttgtcaccacaagacatatgttgtgatttctcgatggcgaggagatgaaacaggtgtgggggcggagcagcaaggacatgacaaccatgccccctccgcgccaccgtggcgctgctaagaagcccatgtggatcatagtgctattgtcgttggtttgtgttgcccttatgggggcctatgtctacccaccacggcactactctgcatgctacttctttgcttcgagtgtctgtaccccgttcaaggattggctacctgctgttgttcgggagcgaactgatgaagagatagtgtcatccgtggttattaggaatctcctttcgatgcctatggctgtgtcgaagaacccaaagattgcctttatgttcttgacaccaggttcattgccttttgagaagttgtgggaggaatttttacagggtcatgatggtcgatattccatctatatccatgcatctcgtgaaatacctgtacattctagctccctctttgttggacgtgaaattcgcagtgaaaaggtagtatgggggaggatttcgatggttgatgcagagaagaggctgttagcaaatgcattggaagatgtcgataatcaattttttgtcttgctttctgacagctgtgttccagtacatacatttgattacatatataattatctgatgggaacaaatgtcagcttcattgattgcttcctggatcctggcccacatggaactggaaggtattccatggaaatgcttcctgaaatagaacagagggacttcaggaagggtgcccagtggtttgctataacacgaaggcatgctttattgattctggctgacaacctttactacaataagttcaagctgtactgcaagccagcagagggacgcaactgtattgctgatgagcattatttgccaaccttcttcaatatggtcgatcctggtggaatagctaactggtcagtgactcatgttgattggtccgagggaaaatggcatccaaggtcatatagagctgcagatgttacctatgaactcttaaagaacataacgtctgtcaatgagaatttccgcattacaagtgatgataagaaagttgtgacacggatcccatgtatgtggaatggaacaaaaagaccatgctacctttttgctagaaagttctacccagaatctctgaacaacttgctgaagctattttccagttacacatcggcttgattcaacattttttttgttcatttggcctaggagattcccctagttttttttttctgcttcatgtaaattgtgaaattgatacttagaggcttaacacagagttacgggtacagggccagtgatgtaattctgtgagtcccttggtagggctgaggtgctgtttgtttagtattgacctgccctccctgtcgttcttggtgccgtctgttaggttcctagcgcccattccctgagtaacagggtttttgtcagttattactgattaattctttgtagacatgaagagattacgaaatcagttacacttcatagtttaacctggacttgtttcgagttctagtggcagttgtactcttctgatgagtacggcatcatgttctcatt

SEQ ID NO: 125043 - DNA, 1814 bp, Zea Mays
tctctccttcctctcacattccactagaacactcccaccaggccaccacctccacctcgtcgtctcccaccaccgccgcgcgcgagccctagcccgatctagccggcggcaggcactagatcccgccgcttgcggcatcccgggacgcgcctcgccgaattcgccgctcctcgcactgcaacacgcccggaccactaaaaaagaggcaactctggggcataacgtacttcaccttgattacaggttactgcatgccatgtagtattttattattggtggaggttgtcaccacaagacatatgttgtgatttctcgatggcgaggagatgaaacaggtgtgggggcggagcagcaaggacatgacaaccatgccccctccgcgccaccgtggcgctgctaagaagcccatgtggatcatagtgctattgtcgttggtttgtgttgcccttatgggggcctatgtctacccaccacggcactactctgcatgctacttctttgcttcgagtgtctgtaccccgttcaaggattggctacctgctgttgttcgggagcgaactgatgaagagatagtgtcatccgtggttattaggaatctcctttcgatgcctatggctgtgtcgaagaacccaaagattgcctttatgttcttgacaccaggttcattgccttttgagaagttgtgggaggaatttttacagggtcatgatggtcgatattccatctatatccatgcatctcgtgaaatacctgtacattctagctccctctttgttggacgtgaaattcgcagtgaaaaggtagtatgggggaggatttcgatggttgatgcagagaagaggctgttagcaaatgcattggaagatgtcgataatcaattttttgtcttgctttctgacagctgtgttccagtacatacatttgattacatatataattatctgatgggaacaaatgtcagcttcattgattgcttcctggatcctggcccacatggaactggaaggtattccatggaaatgcttcctgaaatagaacagagggacttcaggaagggtgcccagtggtttgctataacacgaaggcatgctttattgattctggctgacaacctttactacaataagttcaagctgtactgcaagccagcagagggacgcaactgtattgctgatgagcattatttgccaaccttcttcaatatggtcgatcctggtggaatagctaactggtcagtgactcatgttgattggtccgagggaaaatggcatccaaggtcatatagagctgcagatgttacctatgaactcttaaagaacataacgtctgtcaatgagaatttccgcattacaagtgatgataagaaagttgtgacacggatcccatgtatgtggaatggaacaaaaagaccatgctacctttttgctagaaagttctacccagaatctctgaacaacttgctgaagctattttccagttacacatcggcttgattcaacattttttttgttcatttggcctaggagattcccctagttttttttttctgcttcatgtaaattgtgaaattgatacttagaggcttaacacagagttacgggtacagggccagtgatgtaattctgtgagtcccttggtagggctgaggtgctgtttgtttagtattgacctgccctccctgtcgttcttggtgccgtctgttaggttcctagcgcccattccctgagtaacagggtttttgtcagttattactgattaattctttgtagacatgaagagattacgaaatcagttacacttcatagtttaacctg

SEQ ID NO: 125044 - DNA, 2598 bp, Zea Mays
atggcgtacggcgaccgcgtcaccaccttcgaggactccgagaaggagagcgagtacggctatgtccgcaagatttggttacctgcgggttctcggcttgggatttgggtggtgttggcggttactgtcgtggatctcttgggcgtggctggccttgtccaggtggtgctggcctgctgggatctagccagcattggtggtcaggtctctggacctgtggttgtggctgatggaatgggtggtgctgccatgtatgaacttgttcgtgtcggacatgataacctcattggggaaattatccgtcttgagggcgattcagctacaatccaagtttatgaggaaacagctggactgatggttaatgaccctgtattgagaacaagaaagcctctttcagttgaattgggacctggaattcttggaaacatttttgacggtatccagcgacctctaaaaaccatcgctattaagtcaggagatgtgtatattcctcgtggtgtttcagttcctgcccttgacaaagatgtattgtgggaatttcagccaacgaagctaggtgttggagatgtcatcacaggtggagatctatacgctactgtttttgagaacacattgatgcagcaccatgttgctcttccaccgggttctatggggaaaataagttacattgcaccagctggccagtacaacctgcaggacacagtgctagaattggaatttcagggcataaaaaagaaatttaccatgcttcagacatggcctgtgcgttcaccaaggcctgttgcatcgaagcttgctgcggatacacctcttctgacagggcagcgtgtactggatgcactattcccctcggttctgggaggcacttgtgctattccaggagcatttggctgtggtaaaactgtcattagtcaggcactttccaagtactccaattccgaagctgtggtttatgtgggctgtggtgaacgaggaaacgagatggctgaggttctcatggactttccccagttgacgatgacattgcctgatggccgtgaggagtctgtcatgaagagaacaacactggtggctaacacatcaaacatgcctgtcgctgctcgtgaagcttccatttacactggaattacaattgctgagtatttccgtgatatgggctacaacgtcagtatgatggctgactccacctcccggtgggctgaggcattgcgtgagatctcagggcgtttggctgaaatgcctgctgatagtggttacccagcttacttggctgcacgtttggcatccttttatgaacgtgctggtaaggtaaaatgtctgggaagtccagacaggaatggcagtgtcacaattgttggagctgtctctcctcctggtggtgatttttcagaccctgttacctccgcaaccctcagtattgttcaggtcttctggggtttagataaaaagctcgctcaaaggaagcatttcccatctgtgaattggctcatttcctattcgaaatactccaaggcccttgagtctttttacgagaaatttgatccagatttcattgatattaggacaaaagcacgtgaggtgttgcagagggaggacgatctgaatgaaattgtgcagcttgttggtaaagatgcgctggcagaatctgacaagattacgctggagacagcaaagcttttgagagaagattatttggcacaaaatgcattcaccccatatgataagttctgcccattctacaaatccgtttggatgatgcgcaacattattcacttcaacacattggcaaatcaggctgtggagcgggcagctggtactgacggccataagataacatacagtgtcataaagcatcggttgggggatctattttatcgcctagtatcccaaaagttcgaggatcctgcagaaggcgaagaagctttggtcggcaagtttaagaaactgtacgacgaccttaccactgggttccgcaacctagaagatgaggcacggccccgttgcgctcggctcagtgcggaggccgtcgcgggccgtcgttatgtgccttcgccgccgcgcgatccagatgctcctggacgtctccttcgcctacgcgctggatgtattgttcctcgaatcgccctcgttaagtccgggaaggccgaggtggatcccacggttgagcctcgccgatgcgcaggtcttaattttgtgctggaacagaatacccttaagtccatagagatagagctaacagaagagatggcgcctaacttgctgcagaccgatatggttatgcagtttggtctgctagtattccaggtgttgaattttggagatcagggcaaaattcaggaagccatggttcaaatgcatataagagaagaagagactgtgatctgtatctatggacagaaccttgatttcgtgttggtggaagttagtcttaacaatatggtaccagagacttcgacaaactatgatttgttaaatcacatactgaatgaacttagagtccctcttatcgcggctacacgtgagaggatcatgcacctgatgactgtgaagatataagcagccatctctaggtgggtgattaactgattatttgtactg

SEQ ID NO: 125045 - DNA, 2334 bp, Zea Mays
aaaatcgacgacgacgtctaatctatttaaggctgaaatccaccttgcctgcgtggccctcctccccatcgcgtctgtccgctacccctccccgaccagatcgctacgagacgccgcgcgatccgacccaggccgacgccgacgacccctctcgccgccggcggccatggcgtacggcgaccgcgtcaccaccttcgaggactccgagaaggagagcgagtacggctatgtccgcaaggtctctggacctgtggttgtggctgatggaatgggtggtgctgccatgtatgaacttgttcgtgtcggacatgataacctcattggggaaattatccgtcttgagggcgattcagctacaatccaagtttatgaggaaacagctggactgatggttaatgaccctgtattgagaacaagaaagcctctttcagttgaattgggacctggaattcttggaaacatttttgacggtatccagcgacctctaaaaaccatcgctattaagtcaggagatgtgtatattcctcgtggtgtttcagttcctgcccttgacaaagatgtattgtgggaatttcagccaacgaagctaggtgttggagatgtcatcacaggtggagatctatacgctactgtttttgagaacacattgatgcagcaccatgttgctcttccaccgggttctatggggaaaataagttacattgcaccagctggccagtacaacctgcaggacacagtgctagaattggaatttcagggcataaaaaagaaatttaccatgcttcagacatggcctgtgcgttcaccaaggcctgttgcatcgaagcttgctgcggatacacctcttctgacagggcagcgtgtactggatgcactattcccctcggttctgggaggcacttgtgctattccaggagcatttggctgtggtaaaactgtcattagtcaggcactttccaagtactccaattccgaagctgtggtttatgtgggctgtggtgaacgaggaaacgagatggctgaggttctcatggactttccccagttgacgatgacattgcctgatggccgtgaggagtctgtcatgaagagaacaacactggtggctaacacatcaaacatgcctgtcgctgctcgtgaagcttccatttacactggaattacaattgctgagtatttccgtgatatgggctacaacgtcagtatgatggctgactccacctcccggtgggctgaggcattgcgtgagatctcagggcgtttggctgaaatgcctgctgatagtggttacccagcttacttggctgcacgtttggcatccttttatgaacgtgctggtaaggtaaaatgtctgggaagtccagacaggaatggcagtgtcacaattgttggagctgtctctcctcctggtggtgatttttcagaccctgttacctccgcaaccctcagtattgttcaggtcttctggggtttagataaaaagctcgctcaaaggaagcatttcccatctgtgaattggctcatttcctattcgaaatactccaaggcccttgagtctttttacgagaaatttgatccagatttcattgatattaggacaaaagcacgtgaggtgttgcagagggaggacgatctgaatgaaattgtgcagcttgttggtaaagatgcgctggcagaatctgacaagattacgctggagacagcaaagcttttgagagaagattatttggcacaaaatgcattcaccccatatgataagttctgcccattctacaaatccgtttggatgatgcgcaacattattcacttcaacacattggcaaatcaggctgtggagcgggcagctggtactgacggccataagataacatacagtgtcataaagcatcggttgggggatctattttatcgcctagtatcccaaaagttcgaggatcctgcagaaggcgaagaagctttggtcggcaagtttaagaaactgtacgacgaccttaccactgggttccgcaacctagaagatgaggcacggtgaactgctgtagattttgtgtaagacaataatggctgccaaatgttttataaggtacggaagttgtagattgagaccatgtatgagaattttccccaccgctactcatttctttgccaccactattttagtcatcagtgctggatgggcaccctgtttatttcgacgtaccctttattgctagcattgtaataagcgatgggcatgcttgtagttgaataagtacaatgtccatgtattcaaacatcagcgtcatgtttatttgtttgttgaaaaaactatgttgcctttttggaatttgttcg

SEQ ID NO: 125046 - DNA, 1591 bp, Zea Mays
aaaatcgacgacgacgtctaatctatttaaggctgaaatccaccttgcctgcgtggccctcctccccatcgcgtctgtccgctacccctccccgaccagatcgctacgagacgccgcgcgatccgacccaggccgacgccgacgacccctctcgccgccggcggccatggcgtacggcgaccgcgtcaccaccttcgaggactccgagaaggagagcgagtacggctatgtccgcaaggtctctggacctgtggttgtggctgatggaatgggtggtgctgccatgtatgaacttgttcgtgtcggacatgataacctcattggggaaattatccgtcttgagggcgattcagctacaatccaagtttatgaggaaacagctggactgatggttaatgaccctgtattgagaacaagaaagcctctttcagttgaattgggacctggaattcttggaaacatttttgacggtatccagcgacctctaaaaaccatcgctattaagtcaggagatgtgtatattcctcgtggtgtttcagttcctgcccttgacaaagatgtattgtgggaatttcagccaacgaagctaggtgttggagatgtcatcacaggtggagatctatacgctactgtttttgagaacacattgatgcagcaccatgttgctcttccaccgggttctatggggaaaataagttacattgcaccagctggccagtacaacctgcaggacacagtgctagaattggaatttcagggcataaaaaagaaatttaccatgcttcagacatggcctgtgcgttcaccaaggcctgttgcatcgaagcttgctgcggatacacctcttctgacagggcagcgtgtactggatgcactattcccctcggttctgggaggcacttgtgctattccaggagcatttggctgtggtaaaactgtcattagtcaggcactttccaagtactccaattccgaagctgtggtttatgtgggctgtggtgaacgaggaaacgagatggctgaggttctcatggactttccccagttgacgatgacattgcctgatggccgtgaggagtctgtcatgaagagaacaacactggtggctaacacatcaaacatgcctgtcgctgctcgtaaagcatcggttgggggatctattttatcgcctagtatcccaaaagttcgaggatcctgcagaaggcgaagaagctttggtcggcaagtttaagaaactgtacgacgaccttaccactgggttccgcaacctagaagatgaggcacggtgaactgctgtagattttgtgtaagacaataatggctgccaaatgttttataaggtacggaagttgtagattgagaccatgtatgagaattttccccaccgctactcatttctttgccaccactattttagtcatcagtgctggatgggcaccctgtttatttcgacgtaccctttattgctagcattgtaataagcgatgggcatgcttgtagttgaataagtacaatgtccatgtattcaaacatcagcgtcatgtttatttgtttgttgaaaaaactatgttgcctttttggaatttgttcg

SEQ ID NO: 125047 - DNA, 2422 bp, Zea Mays
aagacatcttgcaactatccgatcacaagaagctcacaaaatcacaacacacatctcttcacaacacgatactcctaaaaaaaaacgaaataaaatcgacgacgacgtctaatctatttaaggctgaaatccaccttgcctgcgtggccctcctccccatcgcgtctgtccgctacccctccccgaccagatcgctacgagacgccgcgcgatccgacccaggccgacgccgacgacccctctcgccgccggcggccatggcgtacggcgaccgcgtcaccaccttcgaggactccgagaaggagagcgagtacggctatgtccgcaaggtctctggacctgtggttgtggctgatggaatgggtggtgctgccatgtatgaacttgttcgtgtcggacatgataacctcattggggaaattatccgtcttgagggcgattcagctacaatccaagtttatgaggaaacagctggactgatggttaatgaccctgtattgagaacaagaaagcctctttcagttgaattgggacctggaattcttggaaacatttttgacggtatccagcgacctctaaaaaccatcgctattaagtcaggagatgtgtatattcctcgtggtgtttcagttcctgcccttgacaaagatgtattgtgggaatttcagccaacgaagctaggtagtgttggagatgtcatcacaggtggagatctatacgctactgtttttgagaacacattgatgcagcaccatgttgctcttccaccgggttctatggggaaaataagttacattgcaccagctggccagtacaacctgcaggacacagtgctagaattggaatttcagggcataaaaaagaaatttaccatgcttcagacatggcctgtgcgttcaccaaggcctgttgcatcgaagcttgctgcggatacacctcttctgacagggcagcgtgtactggatgcactattcccctcggttctgggaggcacttgtgctattccaggagcatttggctgtggtaaaactgtcattagtcaggcactttccaagtactccaattccgaagctgtggtttatgtgggctgtggtgaacgaggaaacgagatggctgaggttctcatggactttccccagttgacgatgacattgcctgatggccgtgaggagtctgtcatgaagagaacaacactggtggctaacacatcaaacatgcctgtcgctgctcgtgaagcttccatttacactggaattacaattgctgagtatttccgtgatatgggctacaacgtcagtatgatggctgactccacctcccggtgggctgaggcattgcgtgagatctcagggcgtttggctgaaatgcctgctgatagtggttacccagcttacttggctgcacgtttggcatccttttatgaacgtgctggtaaggtaaaatgtctgggaagtccagacaggaatggcagtgtcacaattgttggagctgtctctcctcctggtggtgatttttcagaccctgttacctccgcaaccctcagtattgttcaggtcttctggggtttagataaaaagctcgctcaaaggaagcatttcccatctgtgaattggctcatttcctattcgaaatactccaaggcccttgagtctttttacgagaaatttgatccagatttcattgatattaggacaaaagcacgtgaggtgttgcagagggaggacgatctgaatgaaattgtgcagcttgttggtaaagatgcgctggcagaatctgacaagattacgctggagacagcaaagcttttgagagaagattatttggcacaaaatgcattcaccccatatgataagttctgcccattctacaaatccgtttggatgatgcgcaacattattcacttcaacacattggcaaatcaggctgtggagcgggcagctggtactgacggccataagataacatacagtgtcataaagcatcggttgggggatctattttatcgcctagtatcccaaaagttcgaggatcctgcagaaggcgaagaagctttggtcggcaagtttaagaaactgtacgacgaccttaccactgggttccgcaacctagaagatgaggcacggtgaactgctgtagattttgtgtaagacaataatggctgccaaatgttttataaggtacggaagttgtagattgagaccatgtatgagaattttccccaccgctactcatttctttgccaccactattttagtcatcagtgctggatgggcaccctgtttatttcgacgtaccctttattgctagcattgtaataagcgatgggcatgcttgtagttgaataagtacaatgtccatgtattcaaacatcagcgtcatgtttatttgtttgttgaaaaaactatgttgcctttttggaatt

SEQ ID NO: 125048 - DNA, 1562 bp, Zea Mays
acaaacgctgttggagacggggacacgtgtctgtcaacatttttctttttacagcagatatatggatcatttgcatgtcttgcgagttacagctgcaggcttcagttacggattgaagcattcgtcgtccctgccggagatctcgcgctctcgttccctcgcacccatctccatctcgagcagcagctcgtcgtacccgaagacggccaaggcgccggcctcagcgatggcacccagcgccgcggcgagccccacgcagaccttcttcttcccctcgtcctcgttgaaccactcctcgcccccgccgctgcgctgccgcttcgcggccgacgcgacggcggcggccgcctcagcggccgcgtccacggccctggccgccggctccacgtccacggcctccaccgcgcgcgcccagctcacgatcaggcgcggcatgttctcgccgtccttgacgcagctccgcgcccagccccagagcgcggccgcgtacgcgcgctgcgactcggcccaggcctccagcgccgcgcgccagccgcggagctccgcgccgagcgcgcccgcggccgcggccgcgcgcgccacgcccgggggcggcggcggccccctggtaccacctccttcgcgtaccgggtcgggccgggcggctgcggccgcggcggccgaggccgtgagcagcgcgatcgagtcgtcggcggtgcgcttcatcacccggtgcgcgtcggcgatcactctccacatcctcgccaacctgatggagcaacaaatattacaaaagtgttgcaataattcgttcgcgtggccgtgctgttgcgtggttcgaatcgaggaagcacgtaccctcgcacgagctgcaggagctgcggcaggagctcgtcgtcgcgcaccgcggcgatcctcctggacacggcgtcgacggatgtgagggagatgtccagcttggtgcggaggtccctgacggcggccctcgtcttgtcgatggcgaacggctcggcgccactggcgtcctggctcctcagcagcgcgcacttcttctcgtaggccagccggactcgctcccctgcctttcgttcacgttgggaaactctcagctcagtcttaagcctgtcaaggctctccttgtggctctggaacagctcgaacggctccggcgggacctcgggggcgccctgctcctcgccgtcgtccctcgggacaggtggttgaactgtctagatagaagagagcagtggtcaatggaaaggatctcaatgtactggcaatgtcgctgtcagaaacagagcgcttacctctcctctggtaggggacaacctccagcagcacggaggcctctttggcagtgtcaaggatcttcatgagatgcccctggatgtccctcacggcctccgccatgctcgccgggggccggtcgacgtacacggtgaagccaggcgcgccatgctgctcgatttctgcgcttgccagcaccctcagctcgttgctcacatggtccacctttctccccacctgctccctcgacggcgccgccacctgtgctgctactgctgcctgttcaccctcctcct

SEQ ID NO: 125049 - DNA, 492 bp, Zea Mays
atgggctctttctggtggaagagcatgatcaagcttcttcccaactttaagggactggcactcccagtcattggcaacgacagatcaatttcgttctgggaggatcagtggagtcagaacatcccaaggcaaaaattcccagaattattctctttgttcaaaaacacaaaattgactattgaagaagctaaagagcaggatcagttcgctgatgcgtcgcttaagggcagtcagtcttggggcacagctcacgcgttcctcagagcactgatgcgggcggcgagttcgtcgaaatccggcatgctcggatgcacgttccccctcgacatctctggctgcatggacatggaccgagcagggggcttcgccttcgccttcaccttggggcttgcggattctgaaggcaaggatgcggctctttcagggcggtgtgcagacccttctcctcctttgctagacagttctccggcttcgtcgccgcgctggtcgtga

SEQ ID NO: 125050 - DNA, 2022 bp, Zea Mays
atggcgcggtcgcggccgcacgaccacatcatccgcgccgccttcaccctcgccttctccgccgctattctcctatcgtcgccggccacggcggccccctcggagggcgacgtgctggtagcgttccgggacacgctgcgtgggccggacggtgcgccgccgggcccgctgcgaaactggggcaccccagggccgtgccggggcaactcctcctcttggtacggcgtgtcgtgccatggcaacggctccgtgcagggcctgcaactggagcggctcggcctggcggggagcgcgcccaacctggacgtcctcgccgtgctcccgggcctgcgcgctctcagcctcgctgacaacgcgctcaccggcgcgttccccaacgtgtccgcgctcgccgtgctcaagatgctctacctgtcacggaaccggttgtccggcgccatccccgagggcacgttcggccccatgcgcggcctccgcaagctgcacctctcctccaacgagttctccggccccgtcccggagtccatcacctcgccgcggctgctggagctgtcgctcgccaacaaccacttcgagggcccgctgccggacttctcccagccggagctcaggttcgtcgacgtctccaacaacaacctctccggacccattccagcagggctcagccgcttcaatgcaagcatgttcgcaggcaacaagctcctctgcggcaaaccgctggacgtggaatgcgacagctcggggtcgccgcgctccggcatgtcgaccatgacgaagatcgccatcgcgctcatcgtcctcggcgtgctgctctgcgccgcgggcatcgcctccggctccctcggccgccgaaaaagaaagccgaggcgcgcgggggccgagaggctgggcagcggcgaccagacgccctccaacccgaagctcaacaccgcgccggccgtcaacatcgagaacgcggccagcaccagccagccgcgcgccgctgccgcggccgggggcgccgccgccgccgccgccgcggggaagcgcccgcgccgcgacgagcacgggcggctggtgttcatccaggagggccgcacccggttcgagatcgaggacctgctccgggcgtcggccgaggtgctgggcagcggcaacttcgggtcgtcgtacaaggcgacgctctgcgagggccctgccgtggtggtgaagcggttcaaggacatgaacggcgtcgggcgggaggacttctcggagcacatgcgccgcctcggccgcctcgcccaccccaacctcctcccactcgtcgcctacctctacaagaaggaagagaagctcctcgtcacggattacatcgtcaatggcagcctcgcgcagctcctccatggtaaccgagggtcgctcttggactgggggaagcgtctgcggatcatcaagggcgcggcgcgggggctggcgcacctgtacgacgagctgccgatgctgacggtgccgcacgggcacctcaagtcctcgaacgtgctgctcgacgccgcgttcgacgcggtgctgtcggactacgcgctggtgcccgtggtgacggcgcagatcgcggcgcaggtgatggtggcgtacaaggcgcccgagtgtatggcgccgcaagggaaaccgtccaagaagagcgacgtgtggagcctggggatcctcatcctcgagatactcaccggcaagttcccggcgaactacctccggcaggggcggcagggcaacgccgacctggccgggtgggtgcagtcggtcgtcgcggaggagcgcaccggcgaggtgttcgacaaggacatcacgggggccaggggctgcgaggccgacatggtgaagctgctccaggtcggcctggcctgctgcgacgccgacgtcgaccggaggtgggacctcaagacggtcatcgcgcgcatcgacgagatccgggagcccgagcccgccgccgccgccgacgacgagtcgtcattatcgtcctaggcgagcacccgcgtgtgtacttgaccaagcaaatcccaccgatcg

SEQ ID NO: 125051 - DNA, 1094 bp, Zea Mays
caatgaaccatgagtaggacctatattgtttttgctgattgcttgggttcttgtaacccagatttcatgccctgtcagagtttgatcagaagaagaggagctgcaggaggcgtctgtctgatcacaatgcccgccgccggaagcctcagccagatgcattcgcctttgcctctgcaaggctgccttcgtcgtcgttcgatgataggaggcaaataagttttgtctggaataaagctcctgttagccatcctttcacttctccatgggacagctcatctgagctccctcatgcaaaggaaataagagaggtgtcaacgaaagttgggacaattactggacaagttcatttggataaatcttacgtgtccaatgctgttccatcacttacccatggcaaagatgagccttggccaatgaaaggtccggacatgtctatagctgcttcaaaattcgatggagcaccggatcttcagcgtgctctctctcttctgtcagttggcgcctgcggattgcccgatcctgtacaccaaacatcttgcgtcatccaattcactagtgccagcgagaacagtggcgaccttcatctatcacatggagcgaactctggtctagcgtcatgcggtgatggacagcatatagcttctcagcctcaggctcagctggttcggtttaccatggataccagcaacagtgtctatgagcccagtttcttcagtgtaaaccagataaattaagcgttgaagacacacgccacttggtcatttggataaatagccctgaagatggcctgagcttgtgcaagaagttcttcaaccaaccaccggacataaggatctatctgttaatgttatctgtgtatttattagccatacctgaattaagttgaacccaatctaggccagcttatgtgcaatatgcagttccaacctgtgattgacccattttttctgttgtttctttgcccgtgatgtgactgctctggaacttaagtgtgatactgttgtagttacactttactgccctgacaatcatgtcaaacggctggatatctttgaaactgtccttgatgaatctggacgtgtattttgtgtgtg

SEQ ID NO: 125052 - DNA, 1092 bp, Zea Mays
caaagaaaaagtattgggatgcgaaaaaacgtgagtggaaaataaagaaaaaaaggaggcccaaatataaagaagaccagccttttttttctattccaaattccgtttcccccgtctcttcttctgcacagtccacactgttcacttccggccccctcccccgcacctccctccgatcccccaaatcccgaattgaccaacccaaagccgtcgccccgcatggagtggacggccccgaagcgcgccgcctcgccgccctcgcctccgctcctctgggactggggaggagaccacgccggcgccacgggctcgggctcgggctcctccggcgacgccccggcgcggcgcggcgggagggagcgggaggcgaagcgcgccagggccgacgacggcgaggtgaggtgccaggtggaggggtgcgggctggacctcagcagggtcaaggagtaccaccggaagcaccgcgtctgcgaggcccacaccaagtccccccgcgtcgtcgtcgccggtcaggagcggcgcttctgccagcagtgcagccgatttcatgccctgtcagagtttgatcagaagaagaggagctgcaggaggcgtctgtctgatcacaatgcccgccgccggaagcctcagccagatgcattcgcctttgcctctgcaaggctgccttcgtcgtcgttcggtaatgtgttcatatcttaacttaagtagtgcttgaaatttgctagcagtggacactggcaaaatggtggtgatgggctcttagccagctgcatgtacagcaacgccaatagatgtcttgttgcgcaaatggcaagctttctatcttttatacttggcaataagttgctgttgcgtttcttcatggaaatatatacaaactaaactagacattttttttgacgggcaaaagctgtagggggaacccctacagcagcaataaatatactccctccgttcttttttacttgtcgcgttttagttcaaaaataaactagcggccagcaaatattcaaaaacggaggtagtatatattaaaaaagaaagagaacttgtactgagagaaggtgaaaccaccaaaagggcagagaaaga

SEQ ID NO: 125053 - DNA, 481 bp, Zea Mays
aggctgtctaatgttcaagaatcaaccactagaaaacgagggggatctccggatcatgtttgggccaattgtgtgcactaataaaactaccttaattctaggaggtcaaccaagggatgcagcttcattttcagatgagcttgaagaagatgatctagaattagtgggagagaacccaactatggttacgatatgttccgcatgcgttgtatcgtgtttcgttgactacatgattcgttagttaatgattacgacctcattgctagtcgaggtgtgtcaacgaaggaggtcttagcaatgttcctttgggcatgtggtgaaccgcagtcatttagacaacttaggaacaagtttgggtactctttggaaaccattagtcacaagttcagtgaagtgctcgaggcactttttaggatgtcaaatgatgtaattaggccaaaggatccataattcattgagatacactcgagacttagggaga

SEQ ID NO: 125054 - DNA, 202 bp, Zea Mays
gagtgtcaatacgctttggactgcatcaaccctgaaaacaaacctgaacccgacgacgactatgtgttgtcagacttgtcttggcctgagtcatcgacggaacccgaatttgatgagccattcgacttcgttgcgcattttgaaaaaatgtggggagtcgaatatgactctgatcagatatcgtcgtttagtgacaacgaac

SEQ ID NO: 125055 - DNA, 542 bp, Zea Mays
agaagcgggcttccgtagaaagctgggctagctgggcatctgtccagtccttggctctcgccacgctagggtttctttggtccccgctgcctcgcatcgctcctgtctcgccttctaggcggagctgggattcttctcaatgacgacaacgagattctaagttcttcacgacgattctgatcccttcaaacttcatcgatagttagcatttgttatccatgatttgtcgtagtgaattgaagtttttggatcgagttcatcggattccagccgatgtacaccgagagatcccctttcatactttccagcataggtagattgcatttttttcgtccattcggtgtagcgaatcctcgtttgagtacagagttcatcggattcgcctgcttctgtagcgcccaaaccttctccactccattgacatcctaaaccgtggtattcctttccaaaaccctaatggttagtggattcgtttgtctcaggtacttctccaaagatccagttcaagttggtgtccccgcacaatcgagttaaccaaggta

SEQ ID NO: 125056 - DNA, 547 bp, Zea Mays
agaagcgggcttccgtagaaagctgggctagctgggcatctgtccagtccttggctctcgccacgctagggtttctttggtccccgctgcctcgcatcgctcctgtctcgccttctaggtttctcgcatgctcgcccaacatccctctgtttcctccgttgtgctgcttacccatgtgttctttctttcctcgtgtaggcggagctgggattcttctcaatgacgacaacgagattctaagttcttcacgacgattctgatcccttcaaacttcatcgatagttagcatttgttatccatgatttgtcgtagtgaattgaagtttttggatcgagttcatcggattccagccgatgtacaccgagagatcccctttcatactttccagcataggtagattgcatttttttcgtccattcggtgtagcgaatcctcgtttgagtacagagttcatcggattcgcctgcttctgtagcgcccaaaccttctccactccattgacatcctaaaccgtggtattcctttccaaaaccctaatggttagtgg

SEQ ID NO: 125057 - DNA, 1953 bp, Zea Mays
aattatagcaaagagtcggaagaggtgggcccttccctccggcgtccgccgccgtcaccactcgtcgttttcctagttcgcacacccatccgccggcggcctccccccgtctcgatagtcgataccaggttctaaatggcgatggcgatgatggctatgcgacgcgcggtggcgctcggcgctcgccacatccccgccgccgcagcctcttcgttccgagtcgtctccctccgccacatgagcgcggacgcgggcgccgcgatggagaagatccgcgccgccgggctgctcaggacgcaggggcttatcgctgggcagtgggtggacgcctacgacggaaagaccattgaggtgcaaaatccagcaactggtgaggtcctggcaaacgtgtcctgtatgggcagcagagaaacatctgatgctattgcttctgctcacagtacattctattcttggagtaaactcactgcaagtgagaggagcaaggcactaagaaaatggtacgatctaattatttcacacaaggaagagcttgcacttctcatgacactggagcaggggaaacctatgaaagaagcccttggtgaggtcaattatggtgcaagtttcatagaatattttgcagaggaagcaaagcgtatatatggtgacatcattcccccaactttatctgatcgcagattgttggttttgaagcagcctgttggggtagttggagctattacaccatggaattttccattagcaatgataacccggaaggttggaccagctttggcctgtggctgtactgttgttgtcaagccatcggagttcacacctctgacagcattagctgcagcagatcttgctcttcaagcgggaataccagcgggtgcattgaatgttgtgatgggtaatgctgctgagataggtgatgcgttgctgcagagtacacaggtcagaaagattacattcactggatcaacagctgttgggaaaaaactgatggctggatctgcaaatactgtgaaaaaggtctccttggaacttggtgggaatgcaccttgcattgttttcgatgatgcggacattgatgttgctgttaaaggcagtcttgctgccaagtttcgtaacagtggacagacatgtgtttgtgcaaacaggatattggtgcaagaaggtatctacgaaaagtttgcaaaagcattcatccaggctgttcagagtttgaaggttggtaacggtctagaagagagtacatctcagggtcctctgattaacgaagctgctgttcaaaaggtggagaagttcataaatgacgcgacttcaaagggagcaaatgtcatgctaggtggtaaaagacacagcctgggaatgtcattttatgagccaactgtagtagggaatgtcagcaatgatatgcttcttttcagagaagaagtttttggtccagttgcaccccttataccgttcaaaactgaggaagaagcagttcatatggccaacgatacaaacgcaggcttagctgcatacatatttaccaagagcatacctcgttcatggcgtgtatctgaatctcttgagtacggcttagttggggtaaacgagggaattatttcaacggaggtggcgccatttggcggagtaaagcagtctggtctagggagagaaggatcgaagtacggcattgacgagtacttggagctcaagtacatctgcatgggcaacttgggttgagtcctgaagtcggcctctagctcgaaacactcggcagatgatgaacggagaaaccaggcgtgcttagaagggcgtgagttgcgtttagctgcaagatcggtcatgatggattgatggctgtgggagagcagttttagaataaatcgaataagccgcggagcattaaataaaagaagtggaaatgagatgtaaatggcgtggaactataaagtatggcttcaccttcgaacctgt

SEQ ID NO: 125058 - DNA, 864 bp, Zea Mays
gtgccaatccaaaccctagccgtcgctagcctaccgctccctcccggcgctcgcccagtagcgcgccgacgcagtgccctcgcccctagccgttgcccccgccgtcgcgccgcggcagctgtgccgcgcacctcgcccttgcagtcaaagaaggcttctcctcctcctgctgacgttggtcgccggagaaggtcgtactgtccggcgccggcacggccacagacgacggggccaatgccaccgacgcgagcccaccggccggcgcgccgctcaacgtgcgggcaaggaagtggtggcggttcccggctacggaaggcctcgtcacgggcagcgagcggagtgtgcccaactcgtcggacccactccacaaccgctgaagcgcctgtgtcagccgcctgccattcatgctgcttcgacctctactgttagttatatcgtacctctggtcgcatgctttttggctgcacaatgtggcttggtattcagacttcagagaattgaattgcgtatacgagtaaatgtagctgattttggtctagctggtttgccgtttcgagcgtttgtaaacacaaattcgttggcagtttacaccatgccgtgtgtatataaattccctgaaatctgtgtcttcgctcagttcacaacagtttcaagattctatgatggtagtatactgtatgtctgtatgtgaatccctgttttttttcagtttctcttgtaatctaaatattttacagctggtgcactgtgacgactgaaggcaacataaaacctgtggttgcatgcagggagtagggaagccacttttgatctcttcttgaagtcagctgagtatttggactgtgcagttcatcatgtactcat

SEQ ID NO: 125059 - DNA, 1483 bp, Zea Mays
atgggggacgatggtggtgacattagtcactccatcaaccacgatttgaggctactcggagaacctagagtccctgagagtcgtgctactgccactaccgaccatgctagtggcagtggtagcagtgttgcagctcctatcgacctcgtcgtcggggaatctgacgctggccaaggcgcagaagctcctgcggaggttggtcagggctccagcgaccacaagaggtgtaacacctcaaaggtatgggatgattttgagcctgtgtacacgattaagaacggcaagagggtaaggattggtgggaagtgtcagtggtgcaaagtaactttgtctgctgtgtcttctagtggtactggccatttgcttaggcatcaacgtgattgcaaagtaaaaaatgctaggatgggcaagcagtccatgattaagttcaaccctgatggttctgttcctaattttgattattgtccccatcgtgctagaactgagatgtgtagattgattgctaggcttgatcttcctctaaattttgctgagtcctctacttttgaggagtacatcaaattatcccataatcctggcttcaaatctgtgaccagacagactacatctagggatatggttaagtactatactgatcgtcgtaaggttatagctgattgcttgttgtctgctttgtccattgcgattacttctgatatttggtcaggaaatgctaaagaggactaccttagtgtagttgctcattacattaataaggattggatgttagaaaagagaatcattggccttaggctcatagagtctgctcacactggtgtcaacattgctggccatatctataatgttattgatgattttggatgcactagcaaagtgatctctatcactttggataatgcatcttctaactctagagctatggagaagcttaaacctctactgtctggttatgttggtagtcttttgttgcatcaacgttgtgcatgccacattatcaatcttattgtgaagtctggcttgaaacgacttaagccttacattgaagcatttagaactactatttcattcctaaactcctctaatcagcgcattgctgcttataagagtccacgccgcagcaagctctggtgcatgcataagttttgtagactcagaactgtcctcctaccttgacagtgacattcttcagaagtttgaggatgatttcaacctcttaaactggtggcatgagcataaactaacctttcctgttctctcaatattagctagagatgttatttcagttcatgtttcaacagtatcttccgagtctgcttttagtctttgtggcaggatcatcgaggaacgacgacgacgattagccccagagatggttgagatgctcctttgcatcaaggactgggaactaggtgatgcaagagctcaacactctgcccaggacaaagaattagaggatgcatttgaaggactgtatcttgatgag

SEQ ID NO: 125060 - DNA, 600 bp, Zea Mays
cgacatatgggtgacgacactggcgcgaacatgcccccctggggcgggctctacggtggctgcggcgcgccggcggcggcggcgggcgggtcggcgtcgagcccgacccgcgcgcagcccggcgggcgcgtcgggaagccgcccgcgcggcggcggtcccgcgcgtcccgccgcgcgcccgtcacgctgctcaacacggacaccgccaacttccgcgccatggtgcagcagttgaccggcgtcccgccggggccctgcggccccggcggcgagtacggcgcgccgctggtggtgcgcccgtcgccgacgtcggtcgtcgcgccgttcggccacccgcaccggcccacgtcgctgcagagccagctcttcatgccgcagccgcagctgcagcagcagtactacggcggcggcggctacggcggggaggacggcatggcgccgttcctgcacggcggcttcgagtcctcggcggaggacgggctgctgctgcagagcatgatgcagggggcggagaccacggtggtgcccaccgccccgccggcctccgctaacagcggcaatggcggctacagcttgggctgatcgatcggcccctctgcc

SEQ ID NO: 125061 - DNA, 2019 bp, Zea Mays
caggtccagtggccagtgaccacgctccaccccattgctctggctctgtgctgtgcagctgtgctgccgggctcctgcgccatggccgcggccacgctgctccagggcccagccgccgcctcgccgcgtctcggcgccgcggcttcagcgccgtccgcgtcccacgggaggcgtcgcctcaccttcagcttcaggtgccagtcgaccagcgtcgacaagcagcaggagcggccgcccaagccgaagcagcggaacctgctcgacaacgccagcaacctgctgaccaacttcctcagcggtggcaacctcggggccatgcccgtcgctgagggcgcggtcaccgacctcttcggcaagcccctcttcttctcgctttacgactggttcctcgagcatggctctgtctacaagcttgcttttggacccaaatcgttcgttgttgtctctgaccctatcgttgctagacacatcctccgggagaacgctttctattatgataagggagttctcgctgaaattttaaaacccataatggggaagggtcttatacccgctgaccttgatacctggaagcaaaggagaaaagttataacacctgggttccatgccttattcatagaagctatggtgaggacatttacgagatgttcagagagaacaatatcaaagcttgaggagcttactgaaagtgaaggccgtgaacaaaattcgactattgtggaccttgaagctgagttctccaatttggcacttgatatcattggattgggtgtgttcaattttgattttgactcggttactaaggaatctcctgtaataaaggcagtgtatggaacacttttcgaagctgagcaccgttccaccttctacatcccctattggaatcttcctttgacaaaatggatagttccaaggcagcgcaagttccatagtgacctcaaagtgatcaacaattgccttgataaccttataaaaaatgcaaaggagacgagacaggaagctgatgtggaaaagctccagcaaagggactactcttctctgaaggatgccagcttgctgaggttccttgttgacatgaggggagctgacgctgatgatcgccagcttcgagatgatcttatgacaatgcttattgctggacatgaaacaactgctgctgttctgacatggtctgtttttttgctagcccagagccctaccaggatgagaaaagcccaggcagaggttgattctgttctcagcaatggggcaattactgtcgaatctcttaagaaactggagtacataaaactgattattcttgaagctcttcgcttgtatcctcagccaccattgttaatcaggcgttctctccggccagacaagttgccaggcgggtgcaatggagcaaaagagggatatgaaataccagctgggaccgatatatttgtttcggtatacaacctccacagatccccgtatttctgggaccggccaaatgagtttgaacccgagaggttttccgtcccgaagaaggacgagagcatagaaggctggtctggttttgaccctgaccggagtcctggcgcaatgtaccccaacgagatcatagcggacttcgctttcctccccttcggcggagggcctcgcaagtgcgtgggggaccagttcgcgctcctggagtcgacggtggctctggccctgctgctgcggaagttcgacgtggagctgagagggtcgcccgacgaagtggagatggtgacaggcgccacgatccacacgaagaacgggctgtggtgcaggctgaggagaaggacttgacgggccaacattagctttgcagtttgcactgagtgagaagtagctctcgtgcttgactcctgtgatgtgctttaggcgagctaaactgcatcgcagacagaccagtggatgggaaccgtgtacactgaaaacatatcttgtaggcttgtagcgtaacaggtgcaaccacaacaatatattatttatctatctatctaattgagcttgacattccggtgc

SEQ ID NO: 125062 - DNA, 1035 bp, Zea Mays
caggtccagtggccagtgaccacgctccaccccattgctctggctctgtgctgtgcagctgtgctgccgggctcctgcgccatggccgcggccacgctgctccagggcccagccgccgcctcgccgcgtctcggcgccgcggcttcagcgccgtccgcgtcccacgggaggcgtcgcctcaccttcagcttcaggtgccagtcgaccagcgtcgacaagcagcaggagcggccgcccaagccgaagcagcggaacctgctcgacaacgccagcaacctgctgaccaacttcctcagcggtggcaacctcggggccatgcccgtcgctgagggcgcggtcaccgacctcttcggcaagcccctcttcttctcgctttacgactggttcctcgagcatggctctgtctacaagcttgcttttggacccaaatcgttcgttgttgtctctgaccctatcgttgctagacacatcctccgggagaacgctttctattatgataagggagttctcgctgaaattttaaaacccataatggggaagggtcttatacccgctgaccttgatacctggaagcaaaggagaaaaggttagaaagttataacacctgggttccatgccttattcatagaagctatggtgaggacatttacgagatgttcagagagaacaatatcaaagcttgaggagcttactgaaagtgaaggccgtgaacaaaattcgactattgtggaccttgaagctgagttctccaatttggcacttgatatcattggattgggtgtgttcaattttgattttgactcggttactaaggaatctcctgtaataaaggttggtatatctgtagttctatcttatgtttatttgtgcataggatgtataatgtgtgctcgtatagagaaagtgactgaaagtagagaagaatattcataatttatgactatcttggacagtattggattgctgctactttcctcttctctgcttttaggagcttctgtttccattgtgcaggcagtgtatggaacacttttc

SEQ ID NO: 125063 - DNA, 737 bp, Zea Mays
atcaacaaagttcagttgagttcaatgctcagccatgaagagaaatgagatcgcagcagcagccatggttttgctcttgttgacgttgggcgctgaggcccagatctgttactcgcggagcaagaccttcaaggggtggtgctaccacagcaccaactgcatctccgtttgcatcaccgagggggagattagcgggttctgccagcatggaatttgcatgtgcacctatgagtgtctcacgggtaacgaagctagcctgcctggtggtggtggtggtggtgaagacccacagttattacacgtcgccacgccaaacggtgatggggctagaccactgtcacttgaggatgacaagaaagagacatcgacagagacggctatgaggggcgccaagagccatagtccgcgctacatgaggaggtagctgacagtagagcggctggtttcgtgggatggtgctactctcttctacatgctaattgagttgatgaataataaattggttgtgtttacttaattatagggcggctgagcaatgtttgtgtttgttcttatccaaatcactatccgatgaaacgacatatgcgaatgcccacgactttggttggctctcaatctcagttttcattcttgctgaagttttgagtctgtttgctcttgtgttcttccctctcctctctttgtaatcttatgaagaaccatcgagttcttgtgtgaggatttggtttgaggattga

SEQ ID NO: 125064 - DNA, 306 bp, Zea Mays
atgaagcttgagatgacagcagcggccatggtcttgctcctgctgacctcgggcgccgaggccaaggtctgctactcgcgtagcaggaccttcaaggggtggtgctaccacagcatcaactgcatcgccatctgcatcaccgagggcgacaccagcgggttctgccaggccggggcctgcatgtgcacttatgagtgtctcaatggtgtcgtcgccggtggcggcggtggcggcggacagcatccatcggttggctcatcgcgtggtggtggtgctgaggctaaagcagccgtcccgtcagtgtag

SEQ ID NO: 125065 - DNA, 1676 bp, Zea Mays
acacgtgtcgcccgtcggttgtcgaagcaagcaaaaaggatggccggtggtggcgtccaaagtccaaagccagttttttatttatttctttcttttttttactaaccagagagggaatcagtttggctgcagctgcacggatttggcggtttgcaccccacccgacgttgctttgcccgcaacctctgcttgccacgaccacgacccacgatgcagtgcagtggggcagccagatccagttcctgggcgtcctcctcctcctccattccggccctctcgcccgtccgtctcctgcccccgtccctggtcggaccacgagagccccggactgcgttcacctctgccttttgttcacccctcttgtctcgtgcgtgcgacaacaactgggcgaccgccgccgccgccctacgccaggtgcgcaggtcttcgtcggatccttcgccggcgaggcgacgagcacccaccaggtgatgcccccggcttaattgaatgggctctcttctcaccaggactggcatcctgccatggctccaggccaagatcgttgatcccgtgctgcaggtcatcagaaggggagcagaacccaagcaactggccttctctgctgccctcggtgtcacgattgggatctttccgatatgtgcttgatcgtccctttcttgcgtttgggtgaagccgtcactggcagcgggcacttccccttgacagccgacgcattgaagaatgttctcaccggtcatgcctcaaaggatgtgctaatgagcatcgtccatgcgatgctgggttggcttattgctgcaccaattgtactggtcgtgctgtacgccgtttcgttcccttgtttcaaggtcctggtcaacaggtttggtggtattccttcgagccccaggaccccaatcaaagcggtgtagccagtgcctggccggatcctctgcagttacatccgtggacatagctgcagatgtgtcgctgacatccggggccggccgtggcgtggccccaaacgtcagtgactcgacgtaattgcagaggaaacggtttcagccagtgaggcatgctgaatgcccctggaattgtgtgcaccaagttctttgtgatgccgtcggattgagatgggttccggcatcatgttgctcggccatcccaggcactggcgaataaatatgatgacttgagaggcatgtgtcctctgtgattgtgtatgctggtttcacaaccatatatagcgagatgcgtatttatgaatttatgaagtcttgataaataaagctaggaagcacaggggtcacggaccattgtgccattcttcccgatgtaggcgtgggttgtgttcagctaaattttctgtgggcgttgtacatgcttgcaggaattcagtgccagctgtttgaaatttgaatcataggttcagtggcaaggcaacttggtgcttaagaatcctactaaaatgcactcactacgtttcaattataagatttttctagatgtatgccaatatatcggtgatattagatgttttcatcttattcccatcgaggaatgttgtctttacaaccatccgatgtaactctaagttgtaatgagcagtaagcgtcatattattctagaggaattttttgttgaaacaggtgaggaagtttttattataaccaattccttctctgaagtttttggcc

SEQ ID NO: 125066 - DNA, 1782 bp, Zea Mays
acacgtgtcgcccgtcggttgtcgaagcaagcaaaaaggatggccggtggtggcgtccaaagtccaaagccagttttttatttatttctttcttttttttactaaccagagagggaatcagtttggctgcagctgcacggatttggcggtttgcaccccacccgacgttgctttgcccgcaacctctgcttgccacgaccacgacccacgatgcagtgcagtggggcagccagatccagttcctgggcgtcctcctcctcctccattccggccctctcgcccgtccgtctcctgcccccgtccctggtcggaccacgagagccccggactgcgttcacctctgccttttgttcacccctcttgtctcgtgcgtgcgacaacaactgggcgaccgccgccgccgccctacgccaggtgcgcaggtcttcgtcggatccttcgccggcgaggcgacgagcacccaccaggtgatgcccccggcttaattgaatgggctctcttctcaccaggactggcatcctgccatggctccaggccaagatcgttgatcccgtgctgcaggtcatcagaaggggagcagaacccaagcaactggccttctctgctgccctcggtgtcacgattgggatctttccgatatgtgggaccactgttattcttggtgctgttgttgtagcaatgttgggaagtcgttgcaatgctgttactcttatggttctaaatttggccgccactccaattgaactaagcttgatcgtccctttcttgcgtttgggtgaagccgtcactggcagcgggcacttccccttgacagccgacgcattgaagaatgttctcaccggtcatgcctcaaaggatgtgctaatgagcatcgtccatgcgatgctgggttggcttattgctgcaccaattgtactggtcgtgctgtacgccgtttcgttcccttgtttcaaggtcctggtcaacaggtttggtggtattccttcgagccccaggaccccaatcaaagcggtgtagccagtgcctggccggatcctctgcagttacatccgtggacatagctgcagatgtgtcgctgacatccggggccggccgtggcgtggccccaaacgtcagtgactcgacgtaattgcagaggaaacggtttcagccagtgaggcatgctgaatgcccctggaattgtgtgcaccaagttctttgtgatgccgtcggattgagatgggttccggcatcatgttgctcggccatcccaggcactggcgaataaatatgatgacttgagaggcatgtgtcctctgtgattgtgtatgctggtttcacaaccatatatagcgagatgcgtatttatgaatttatgaagtcttgataaataaagctaggaagcacaggggtcacggaccattgtgccattcttcccgatgtaggcgtgggttgtgttcagctaaattttctgtgggcgttgtacatgcttgcaggaattcagtgccagctgtttgaaatttgaatcataggttcagtggcaaggcaacttggtgcttaagaatcctactaaaatgcactcactacgtttcaattataagatttttctagatgtatgccaatatatcggtgatattagatgttttcatcttattcccatcgaggaatgttgtctttacaaccatccgatgtaactctaagttgtaatgagcagtaagcgtcatattattctagaggaattttttgttgaaacaggtgaggaagtttttattataaccaattccttctctgaagtttttggcc

SEQ ID NO: 125067 - DNA, 1304 bp, Zea Mays
gcattcagctcggcagtgcccctgattttgcatgcacgtctcctccatggctccacctgctccttgaatgaggttgttgacaaccttctgttggaatgctgtgcaggggagcagaacccaagcaactggccttctctgctgccctcggtgtcacgattgggatctttccgatatgtgggaccactgttattcttggtgctgttgttgtagcaatgttgggaagtcgttgcaatgctgttactcttatggttctaaatttggccgccactccaattgaactaagcttgatcgtccctttcttgcgtttgggtgaagccgtcactggcagcgggcacttccccttgacagccgacgcattgaagaatgttctcaccggtcatgcctcaaaggatgtgctaatgagcatcgtccatgcgatgctgggttggcttattgctgcaccaattgtactggtcgtgctgtacgccgtttcgttcccttgtttcaaggtcctggtcaacaggtttggtggtattccttcgagccccaggaccccaatcaaagcggtgtagccagtgcctggccggatcctctgcagttacatccgtggacatagctgcagatgtgtcgctgacatccggggccggccgtggcgtggccccaaacgtcagtgactcgacgtaattgcagaggaaacggtttcagccagtgaggcatgctgaatgcccctggaattgtgtgcaccaagttctttgtgatgccgtcggattgagatgggttccggcatcatgttgctcggccatcccaggcactggcgaataaatatgatgacttgagaggcatgtgtcctctgtgattgtgtatgctggtttcacaaccatatatagcgagatgcgtatttatgaatttatgaagtcttgataaataaagctaggaagcacaggggtcacggaccattgtgccattcttcccgatgtaggcgtgggttgtgttcagctaaattttctgtgggcgttgtacatgcttgcaggaattcagtgccagctgtttgaaatttgaatcataggttcagtggcaaggcaacttggtgcttaagaatcctactaaaatgcactcactacgtttcaattataagatttttctagatgtatgccaatatatcggtgatattagatgttttcatcttattcccatcgaggaatgttgtctttacaaccatccgatgtaactctaagttgtaatgagcagtaagcgtcatattattctagaggaattttttgttgaaacaggtgaggaagtttttattataaccaattccttctctg

SEQ ID NO: 125068 - DNA, 1728 bp, Zea Mays
acacgtgtcgcccgtcggttgtcgaagcaagcaaaaaggatggccggtggtggcgtccaaagtccaaagccagttttttatttatttctttcttttttttactaaccagagagggaatcagtttggctgcagctgcacggatttggcggtttgcaccccacccgacgttgctttgcccgcaacctctgcttgccacgaccacgacccacgatgcagtgcagtggggcagccagatccagttcctgggcgtcctcctcctcctccattccggccctctcgcccgtccgtctcctgcccccgtccctggtcggaccacgagagccccggactgcgttcacctctgccttttgttcacccctcttgtctcgtgcgtgcgacaacaactgggcgaccgccgccgccgccctacgccaggtgcgcaggtcttcgtcggatccttcgccggcgaggcgacgagcacccaccaggactggcatcctgccatggctccaggccaagatcgttgatcccgtgctgcaggtcatcagaaggggagcagaacccaagcaactggccttctctgctgccctcggtgtcacgattgggatctttccgatatgtgggaccactgttattcttggtgctgttgttgtagcaatgttgggaagtcgttgcaatgctgttactcttatggttctaaatttggccgccactccaattgaactaagcttgatcgtccctttcttgcgtttgggtgaagccgtcactggcagcgggcacttccccttgacagccgacgcattgaagaatgttctcaccggtcatgcctcaaaggatgtgctaatgagcatcgtccatgcgatgctgggttggcttattgctgcaccaattgtactggtcgtgctgtacgccgtttcgttcccttgtttcaaggtcctggtcaacaggtttggtggtattccttcgagccccaggaccccaatcaaagcggtgtagccagtgcctggccggatcctctgcagttacatccgtggacatagctgcagatgtgtcgctgacatccggggccggccgtggcgtggccccaaacgtcagtgactcgacgtaattgcagaggaaacggtttcagccagtgaggcatgctgaatgcccctggaattgtgtgcaccaagttctttgtgatgccgtcggattgagatgggttccggcatcatgttgctcggccatcccaggcactggcgaataaatatgatgacttgagaggcatgtgtcctctgtgattgtgtatgctggtttcacaaccatatatagcgagatgcgtatttatgaatttatgaagtcttgataaataaagctaggaagcacaggggtcacggaccattgtgccattcttcccgatgtaggcgtgggttgtgttcagctaaattttctgtgggcgttgtacatgcttgcaggaattcagtgccagctgtttgaaatttgaatcataggttcagtggcaaggcaacttggtgcttaagaatcctactaaaatgcactcactacgtttcaattataagatttttctagatgtatgccaatatatcggtgatattagatgttttcatcttattcccatcgaggaatgttgtctttacaaccatccgatgtaactctaagttgtaatgagcagtaagcgtcatattattctagaggaattttttgttgaaacaggtgaggaagtttttattataaccaattccttctctg

SEQ ID NO: 125069 - DNA, 1592 bp, Zea Mays
acacgtgtcgcccgtcggttgtcgaagcaagcaaaaaggatggccggtggtggcgtccaaagtccaaagccagttttttatttatttctttcttttttttactaaccagagagggaatcagtttggctgcagctgcacggatttggcggtttgcaccccacccgacgttgctttgcccgcaacctctgcttgccacgaccacgacccacgatgcagtgcagtggggcagccagatccagttcctgggcgtcctcctcctcctccattccggccctctcgcccgtccgtctcctgcccccgtccctggtcggaccacgagagccccggactgcgttcacctctgccttttgttcacccctcttgtctcgtgcgtgcgacaacaactgggcgaccgccgccgccgccctacgccaggtgcgcaggtcttcgtcggatccttcgccggcgaggcgacgagcacccaccaggcatgcgcacccccttctctctctctctctctctctctcttccttttctgctatttggctatctgtattcggatccgagagccgattttattactaattaacttttttttttgcaaaaaaatatattggttgtgcatgtgtactgtacacccatgtccttcaactccaccaacaggtgatgcccccggcttaattgaatgggctctcttctcaccaggactggcatcctgccatggctccaggccaagatcgttgatcccgtgctgcaggtcatcagaaggggagcagaacccaagcaactggccttctctgctgccctcggtgtcacgattgggatctttccgatatgtgggaccactgttattcttggtgctgttgttgtagcaatgttgggaagtcgttgcaatgctgttactcttatggttctaaatttggccgccactccaattgaactaagcttgatcgtccctttcttgcgtttgggtgaagccgtcactggcagcgggcacttccccttgacagccgacgcattgaagaatgttctcaccggtcatgcctcaaaggatgtgctaatgagcatcgtccatgcgatgctgggttggcttattgctgcaccaattgtactggtcgtgctgtacgccgtttcgttcccttgtttcaaggtcctggtcaacaggtttggtggtattccttcgagccccaggaccccaatcaaagcggtgtagccagtgcctggccggatcctctgcagttacatccgtggacatagctgcagatgtgtcgctgacatccggggccggccgtggcgtggccccaaacgtcagtgactcgacgtaattgcagaggaaacggtttcagccagtgaggcatgctgaatgcccctggaattgtgtgcaccaagttctttgtgatgccgtcggattgagatgggttccggcatcatgttgctcggccatcccaggcactggcgaataaatatgatgacttgagaggcatgtgtcctctgtgattgtgtatgctggtttcacaaccatatatagcgagatgcgtatttatgaatttatgaagtcttgataaataaagctaggaagcacaggggtcacggaccattgtgccattcttccc

SEQ ID NO: 125070 - DNA, 1223 bp, Zea Mays
taatagcagcctcagattctgctcagctctcactcagacgccacctgttcttccttcctctcctctctgcaacgcgtcgggaagcagctgccagccatggcaatggcgtcgtcgtcgagcgggctgaggagctgcagcgcattgggcgtgcccagcctgctggcgccgtcgacgtcgtcgtcgtcccggtccggccgcctgccgttctgcgcccacgccaccacctccggccgcgtcaccatgtccgcggagtggatgcccgggcagccccgccccgcccacctcgacggctcctcgccaggtgacttcggcttcgaccccctgggcctggccacggtgccggagaacttcgagcggttcaaggagtcggaggtgtaccactgccggtgggccatgctggccgtgccgggggtgctggtgccggaggcgctggggctgggcaactgggtgaaggcgcaggagtgggcggccgtccccggcgggcaggccacgtacctgggcgccccggtgccgtggggcacgctgccgaccatcctggcggtcgagttcgtggccatcgccttcgccgagcaccagcgcaccatggagaaggaccccgagaagaagaagtaccccggcggcgccttcgacccgctcggcttctccagggaccccgccaagctcgaggagtacaagctcaaggagatcaagaacggccgcctcgccatgctggccttcgtcggcttctgcgtccagcagtcggcgtacccgggcaccggtccgctcgagaaccttgccgcccacctcgccgacccctggcacaacaacatcggagacatcatcatccctagatcgatctccccttgacaattatattggttgattattacgactaggcactaggcactgcctgcctgcgtgcaggagcagtacaacgacgacgacggcgagtcggcgacttccctcccgcccggaaagctctcgtaatctaaaggaaaaggaaattggtaccatgttgtgcacttctagcatgcatgacagcaatcgcaagcttcttcctcagccactaacctctatgtacattttcagcgcaagatcattgtcgacagtagtatacataaaagtgtacacaatatactgaacaaacaaccaagacacaagtgaatgtaatttggcaaagtacagtaagatccatgcataaacaaacaccatatggcatgtcttaccttgacaagatctcccag

SEQ ID NO: 125071 - DNA, 97 bp, Zea Mays
ggtccgcgcgtgcgcaggggcggcggaaggtcgccggcggcgcctggatctcgctcccgggagggacccgtcggggaggagagatcctaggagttgt

SEQ ID NO: 125072 - DNA, 384 bp, Zea Mays
ttatgtacaaatgtgtgtttcattgttatagtactatgtccgtgctttgcacacaatcatatttgatacccataaaaaatatatattctatacacatttggatcttctatacacatttagatctcgacatgtctcattccctccaacgaaataagtccaagaaattatgtttgagacctaaatgacctcagaacaaatgtttacattctgacaaatctttttaagatgctagaacatattcgatctttagaaataaccatagattccaatatgaaaaatcagcttgctgacatttccttggctccacggtgtcgttgtcaccgccacacaagaacatcggtccctcgtagccgccacaatacgccctccctacaaccacgtgca

SEQ ID NO: 125073 - DNA, 420 bp, Zea Mays
atgcctccacagaccatccgaaatgcaggtcaagatctacgctcgcgcatccaaaccaaatcccttctggaggttctggtcgtcggctccccaaccatgaggctgcgccggaatcacggagcggagcggagatcgccgcgccggaatccggacaaatccatcagatggtctggccgattcgcgcgagctccttttccagctcgtccaggccaccgacctcctccagctcctttggtcccaggaagagcccatacgggacgccctcaaaattgtccatatggtgtatctgctcgcgacgtcaccgaggagggagatggccggcacggcgttgacgatggcgaacacgtcgttgagctcgaatgggccctcgcacgaccggtggtgcgactcgtgcatgtgccacagggaggcgtgccatag

SEQ ID NO: 125074 - DNA, 163 bp, Zea Mays
cgttcacggagtcataaccaaacagcaccctggagtaaacgaaacctagcatctactctaatgcacgaaacggttgtgactcataaccatatatatgatgatccacatccaacgcacataatataagcatacgatggatatatctactcaaactcatttggag

SEQ ID NO: 125075 - DNA, 1805 bp, Zea Mays
cttttaatttcatttcctctcttttgacgacggaaacgaggcacgatcacacgctgaacgcttccgccccgccgccaccttccccgctctcctccctccgctcgcctccgcttccgttccgcgccctgcccccggaaggcaagcaaagccctcgctacttgcggagcgtcgttggtcaaaccctagcacacgtacgagcaggccagccccgcccgctcccattcccaggccctcatccatggcggcgctctccgtgcccctccacgccgccgccggatcccgcgccgccgcggccgaccccgtcaaggttccgtgcgtgaggagcactggttcagcccatttcggccgcgccttcccctccgtcgcggtctcctctttggctgcgaggcacatcgagccgatgagagcgatagctacacaggcgccccctgccgtgccacaatatttgagtggcgagaagacaaagatcggcatcaacggctttgggcggattggcaggttggtcctgcgaattgcaactagcagagacgatattgaagttgtggctgtgaatgaccctttcgttgatgctaagtacatggcctatatgttcaagtatgactctactcatggcccgtttaaaggttctatttgtgttgtggatgattcaaccctggagatcaatgggaagaaggtcacaattacaagcaaaagagatcctgcagagattccatggggtaactttggggctgaatatgttgttgaatcttctggtgtctttacaacgactgataaagcatcagcacacttaaagggtggtgctaagaaagtggtgatatctgcaccatcagcagatgctcccatgtttgtagttggagttaatgagaatagctatgattcgaagatgaatgttgtttctaatgcaagttgcaccaccaactgccttgctccacttgccaaggttgtacatgaggaatttggcatcgtggagggccttatgacaactgttcatgccacaacagccacccagaagaccgttgatggtccttcaatgaaggattggagaggaggacgtggtgctggccaaaacataattcctagctccactggtgcagcaaaggctgttggaaaagttctgcctgagctgaatggaaagctcactggcatggccttccgagttccaacaccaaatgtctctgttgtggacttgacatgccggattgagaaaaacgcctcctatgatgatgtgaaagcagccatcaaggcggcatcagagggtgcactcaaaggtattcttggctacacagacgaggacgttgtttccaatgattttgttggtgattctaggtcaagcatctttgatgccaaggctggtatcggactgagctcttctttcatgaagcttgtgtcttggtatgacaacgagtggggctacagcaaccgggttctggatctgatcgcccacatggctctcgtcagtgccgccgccaagctctgatgtccgtactcgtttctccagtagtagcttagaaaaaaagactgcaattttgacggccattttctgttagctgttgtttggaataagatcaaatgctggaacacttcgaactcgcgcgagactggactcagatccatggcctgtattttagttgtagaagtgggcaaatttgcaccgtagtaccctggcatggttatatgcggaattgttgattgatgagtcgttgtacggtttgtcgacttgatgatatgttgatgtgggagcccctgaatgaggcggtattaatggaaatataggatggcaatggcaatccgtcgacttgcaccct

SEQ ID NO: 125076 - DNA, 1168 bp, Zea Mays
ttacattacatttttgcaaacgcagaaaaaggcgaaacaaggccacaccaccagctgaccgccgaacggaacgagcccggcgggcggaagggagagagcgcgccagagcggcgccgaacaaccctcgtccaccgcactctcctggaccgtggccatggccatggccgccgcgtcccgatcccgggcgctgtgggcgtcccgcgccgccgcctacctcaggatctccaccttccccagggccttctccaccgtgctgaaggatctgaaatatgctgacactcatgaatgggtgaaggttgagggcgattcagcaaccgtggggattactgaccatgcccaggatcatctgggtgatgttgtctacgtggagctgccagaagttggcgtcagtgtatcccaggggaagaacttcggtgctgtcgagagcgtgaaggcgaccagtgatatcaattcaccagtgtccggagaggtggttgaggtgaaccggaagctaagcgaggagcctgggttggtgaacgcaagcccgtacgagaaggggtggattatcaaggtcaagctcagcgattcaggcgagctcagttcgctcatggatggtgacaagtactcgaaattctgcgaggaagaagacggtcattgaagaaatcagagggtcttctgaacaccaaggacctctgtctcaagctctatcactgctttctggtctggacacctgctgtgacaaatttaaattggcaaggttcattgcatggaataaattagttaggatttgccctattctaccagggcttgggaaatccgagcttgtgttgtgagtggcgtggtcaagtttgattatgtctttttagttgtaatctcgtgatttccttctttttttaaaaaaaaatatttatctttttgattccgtgctagtatgcaaatttcttggtccttttgcgaatggttcggcgttcattactgtgcatagtgaacagacagggggctcatgcgtttatacagaaagattgcaccatctgtttcgctaaaaaggtatctccattgtcgaaaattttgcaagaaatatctgtttaatgaatcttatgacaatccaatccaacgatggaacatcttttgtaccgagaattcctacaaccttgttgtcgatagttcaacattggtaggaatttgcgca

SEQ ID NO: 125077 - DNA, 1521 bp, Zea Mays
actgtagtggagctggagcgcgcacgcacacacgagtacacgacacgagacacaagccgggaattgaagcatcaagccctttctctgagcgccgatggcacggtatcttctcgcccccacttccacctcctcctctacctttctccccaaggatggagtcaagaactcgccgacgtcacggcccctccgcctccgtgcgctcggctccaggaccagcaaggcgcggcacatcatggcggtggcgtccgagcaggccgcgccgccggccaggtaccccaaggtggccgcccctaccaccggcccgatccccgccgccgagctgctcggagtcatcgaggccgccgcaaaagctggggccgatgttataatggaagctgttaataagccacgcaatatccactataaaggtgttgcagacctggtgacagacacagacaagttgagtgaatcagtcattttggaagttgtcaccaagaacttcaaagaccacctcatacttggggaggaaggcggccttgttggagattccctatcagagtacctctggtgcattgaccctttagatggaacaacgaactttgcacatggttaccccagcttttctgtgtccattagtgttctcttccgtggaaagcctgctgcttctactgtggtggaattttgtggcgggcctatgtgctggagcacccgtacaatttctgcatctgctggcggaggagcttactgtaatgggcaaaagattcatgtcagtcagacagacaaggtggaacaatcacttctcgtcacaggttttggatatgaacacgatgatgcctggacgaccaatatgaatctgttcaaggaatttactgacattagcaggggagtgcgaaggctagggtctgctgctgctgacatgtcccacattggacttggtattacagaagcttactgggaataccgacttaagccatgggatatggctgctggcgtcctgatagtagaggaagctggtggggtggtaactcgcatggacggtggagagtttacggtcttcgatcgctctgttcttgtttccaacggacttgttcatggacagcttttggaccggatcggccctcctactgaagaccttaagaagaaagggatcgacttctcgttgtggttcaagcctgacaagtacccgactgacttttgagctgcatcaagggcaccaccaccagccatgggccaccataataaagcagccatcatttttttttgggaaatttggatctgtaatcttttaatggtatagatccaattattccttttttttggggggtgtccttcaagaagaaacaataatgtttttagttcaatagcactgtacttgtaatggcaatacgatgtacagttcttcgactcgagtttcaaatcagagtttcaagagagccaagctcctgaaagaacagagcttcacaactgaacatggaatgtgcccccattgctctggcttttcgattgttacatgtatcggacgagatcgagattttggaagag

SEQ ID NO: 125078 - DNA, 351 bp, Zea Mays
atgcttgtaacattccacgcagcactgcagagtgcagagcataactcagcgaaagaaactctatctacaggtgacatgcggctgaaaaacggagttcatatggtgggctggcggccaccaccacctggaccattctttagacggttcttgatgcagaggacggcgcaaaaggcccctctactcggcgttttcgtcgaggtggataagcttcccgctgatcctcctggcaagatggaccaccatacaattacatacaggcatcagcacacctacgtgattccatttcgtacgaacacatctagctgctccagtaaccagcagaactccaaaccggaacaccgaacaccctag

SEQ ID NO: 125079 - DNA, 1075 bp, Zea Mays
gtatttataagcgtgttttgaacttttgattagacattgaccctgattagtttcgtgcttaacagtattgaatgcttttcaggtagttaacttcagaggaaacgttcagacacggttaaggaaactcaaggagggagatgtctctgctacattgttggcactggctggattaaggcggctaaatatggcagaaaatgcaactgctgtactatcagtggaagaaatgcttccagcagttgcccaaggtgctattggaatagcttgccgaagcaatgatgacaaaatgatggagtatctatcagcgttgaaccatgaagataccagattagctgttgcatgtgaaagagaatttttggcagttcttgatggtaactgccgaactccaattgcagcctatgcttaccgtgacaatgatgggaattgctcattccgcggtctattgtcttccccagatggatctaaagtatttgagacaacaagaagtggaccgtactcttttgacgacatggttgagatgggcaaagatgctggtcatgagctgaaggcaaaggctgggcctggcttctttgatagcttgcaatgaaaagaatgagcggccatgagcaatttcaattgtcactcttttgggtagaaacagagggcccaagtagagtgttgagaggtttgtttttgtttattctttctcctactagttctgctagagaagggtgtacctggtgtagtggtgagctgagtcatcaggtcgcgggttcgaagcatccagtctccgtatttgtgggagaaggtttgtctcggtttatctcttttccgctactcatatgggagaaatgtgggagcctcagtctgctcttttttttttccatactagttctgctagtgccttgtactatcactcgtattgagcagccccattcagctttataaaaatacagtaaaaacaaagaagctggtatggattaaagaacgaacaagttgattaatgtgatgtttactccggatctagatataaaaatgtgcatatgcatatttcccccacgttgttccaatataacattgtcatccatttttatgtttt

SEQ ID NO: 125080 - DNA, 1767 bp, Zea Mays
atgctgagtgggacacaaaatagcagagtacagtagccctagctgtggttggccaatcctgacacattatcctctccacctcttcagaatccggacctcggcagagtccagtactccagtcccttgtgcatctcggcctctccactctcctttccacgcccgtccagtcctctaatctgacccctcttctccagccggccggagatggtctcgctgcgatgcacaaccgcgcaccactccctcctcggctcgccgacctgcctcgcgcgcccgcggcggcgggcgtgccccgtcgtgcgcgctgccgtcgccgtggaggccggcgcgcaggccaaggtctcactcatccgaattgggacgcgtgggagtcctcttgctcttgcacaagcccacgaaactcgagaaaaactgaaagccacacactctgagttagctgaggagagggccattgagatcgtcatcataaagaccacaggagacatgatcttggacaaaccccttgcagacattggaggcaagggtttattcaccaaggagatagatgatgcgctcttgcagggaaggattgatatcgctgttcactctatgaaagatgttccaacatatctacctgaaggcacaatattgccctgtaacctaccacgagaagatgtcagagacgcattcatatgtttgactgcaaattcgcttgcagagcttcctgctggcagtgttattggaagtgcttctctgcggagacaatctcagattctctacagatatccatcactgaaagtagttaacttcagaggaaacgttcagacacggttaaggaaactcaaggagggagatgtctctgctacattgttggcactggctggattaaggcggctaaatatggcagaaaatgcaactgctgtactatcagtggaagaaatgcttccagcagttgcccaaggtgctattggaatagcttgccgaagcaatgatgacaaaatgatggagtatctatcagcgttgaaccatgaagataccagattagctgttgcatgtgaaagagaatttttggcagttcttgatggtaactgccgaactccaattgcagcctatgcttaccgtgacaatgatgggaattgctcattccgcggtctattgtcttccccagatggatctaaagtatttgagacaacaagaagtggaccgtactcttttgacgacatggttgagatgggcaaagatgctggtcatgagctgaaggcaaaggctgggcctggcttctttgatagcttgcaatgaaaagaatgagcggccatgagcaatttcaattgtcactcttttgggtagaaacagagggcccaagtagagtgttgagaggtttgtttttgtttattctttctcctactagttctgctagagaagggtgtacctggtgtagtggtgagctgagtcatcaggtcgcgggttcgaagcatccagtctccgtatttgtgggagaaggtttgtctcggtttatctcttttccgctactcatatgggagaaatgtgggagcctcagtctgctcttttttttttccatactagttctgctagtgccttgtactatcactcgtattgagcagccccattcagctttataaaaatacagtaaaaacaaagaagctggtatggattaaagaacgaacaagttgattaatgtgatgtttactccggatctagatataaaaatgtgcatatgcatatttcccccacgttgttccaatataacattgtcatccatttttatgtttt

SEQ ID NO: 125081 - DNA, 1227 bp, Zea Mays
atgctgagtgggacacaaaatagcagagtacagtagccctagctgtggttggccaatcctgacacattatcctctccacctcttcagaatccggacctcggcagagtccagtactccagtcccttgtgcatctcggcctctccactctcctttccacgcccgtccagtcctctaatctgacccctcttctccagccggccggagatggtctcgctgcgatgcacaaccgcgcaccactccctcctcggctcgccgacctgcctcgcgcgcccgcggcggcgggcgtgccccgtcgtgcgcgctgccgtcgccgtggaggccggcgcgcaggccaaggtctcactcatccgaattgggacgcgtgggagtcctcttgctcttgcacaagcccacgaaactcgagaaaaactgaaagccacacactctgagttagctgaggagagggccattgagatcgtcatcataaagaccacaggagacatgatcttggacaaaccccttgcagacattggaggcaagggtttattcaccaaggagatagatgatgcgctcttgcagggaaggattgatatcgctgttcactctatgaaagatgttccaacatatctacctgaaggcacaatattgccctgtaacctaccacgagaagatgtcagagacgcattcatatgtttgactgcaaattcgcttgcagagcttcctgctggcagtgttattggaagtgcttctctgcggagacaatctcagattctctacagatatccatcactgaaagtagttaacttcagaggaaacgttcagacacggttaaggaaactcaaggagggagatgtctctgctacattgttggcactggctggattaaggcggctaaatatggcagaaaatgcaactgctgtactatcagtggaagaaatgcttccagcagttgcccaaggtgctattggaatagcttgccgaagcaatgatgacaaaatgatggagtatctatcagcgttgaaccatgaagataccagattagctgttgcatgtgaaagagaatttttggcagttcttgatgttctgctagagaagggtgtacctggtgtagtggtgagctgagtcatcaggtcgcgggttcgaagcatccagtctccgtatttgtgggagaaggtttgtctcggtttatctcttttccgctactcatatgggagaaatgtgggagcctcagtctgctctttttttttt

SEQ ID NO: 125082 - DNA, 1315 bp, Zea Mays
atgtcgctgacttcgtacgagggggctctacggcgcggcaccgactgcaaccaaattctcgcctcgcctcacacccaccggacgcttcttggcctcttccactccgtcgtccttgcagccgcggcggcagactccgacagctccacaaagtcatccgaagctcattcattcagcaatagcgacgttaagactgttcttggttctggaacacaatatgctaatggatttgcagtggcggatattgaacgatcatctctaatcctatgcggtaaagcatttgctgattcagctatagtgaaagatgcaattactgctatgatagccccgatactgtctgcaagaggaggtctcccggttccaggatgctctggtgccataccatctatatgtaagccctctcctggccaggctgcctaccatttcttggctggatatcatgatggaaaatttgtcctagcgtacagcaaagcctcctctcctggtgacccacttgcacttgcaagttccttgttttcacatttaaaagaagatgatacaccaatatatttgatcaacgctaagcactcttaacagtacattgacacggtaatattgcatccttttatgtattgttcactttgccttcaaggaacggatagggcagcggcttgactccagggtgactacgctcgtcaggatgctcgcttgagccttctgtgcccccctccaagaccccaacagtggcagcggctacattcgccacagctccacgacgatctccttggtgctccgtatagttattacacgatatcaacttagagcattttagtagacatagagggtcctaatttggtctttctaccaaagctttcatttgaaggcaatataaggagaaacatatcaaagtttgagcaatctcacctccaacaagctgtgcttcatggatttggaagggttctggtggcccctcgttcaggtctggcaaggcttcatggatcagcccatatggtggctcctcgttcatgtttgtgaaggaggcctctcctcgacctggtgtttgttaatctctggtgttttctctctcaaacatagttacatagattacaggatgctgtcacttaatccaaccttttgctggtgtgaaagccaaggctgcttttccagcggcatagagtacacaacgacttttaagcataaaaggagttacatttcaggggtagaacaacggaatcaaatccgcattcaattgatttttcttcatatatcgtctgtcagcgatcagtatgcattacaatatgtaattggggattgaccgaaggagcgctgacagttactt

SEQ ID NO: 125083 - DNA, 1596 bp, Zea Mays
cgcatctgcaagatattagaatcccgcctgcgtcctccgcctgaacgcagagccttctattgcggcgccggcgccggcgccacgacccttctccgccagtccccactagagggcttagaactgcgtggaccacccggcgcctcttggcctctctcgctccgtccttgcgggcgcgacgacggcctccgacagctccgcaaagtcatccaagcctggaacaggatgcgcgtcagctactggttgctgtgtcgaagataacaaattttcaaagctgtcgacctccagggatccaaaaatctccctcccaggtggtgctgcctgctgcgtgcaggggagtgagcgtggctgcgtgggcaccctcggggtcggatctgaagaggaagaaggctgtcgcgctgacctcgactcgatgacggccagaagataaccgacgacatcggaccgcatccgcgcctcctcgagaagggcgccaacgtcatccttgctagccacctgggctgtcttctcatggacgcggcgaagaagcggttggtttgttcttcagcatgtgcgaggagggagtattaccagattcgaccacttttattgtggttctgtctgcctgtagccatgctggactagtagatgaggggatacatatcttcaattccatggagagtgagcacaatgtcccccgggacaccaagcactatggttgcatggtggatcttttcagcagagcagggcttgttcgccgtgcttatgaattcattagcatgatgcctttcgaaccaaacttggagattcttggggccctgctgagtgcatgcagtatcaataatgaactggagattggggagctcgtgctcaataagattgacatggtctgctcctacaaaggaggtgctggtgtgcttctgtcaaatatatatgctaaccaaaatctgtggcatgaagtggataccattagaaggaagataaggactgaagcaattgtcaggaagccacctggtcatagtttgattgcagcagaagtttcttccatgactttctgattggtaattgcatagatttgcttttaatgaagctgtggtcctgattttgcgaaggaggcttggggtgtttgctttcaacaatccctgtaggccagtcgaaatggaaggtgttatgaggagggtgatcacttcggacaacatctgctttgtaaatgctgcggtgcgattgccaagaagctggctgagcttacaacgctaacggatgtcacaaccatcgtcggctaggctggctgacaagatgagccacatttggaccggtggtggcgcgagcgagcttggagctcttggaaggcaaggcgctaccaggtgtccttgtccttttgtttcggaccatggtgtaacactgcaaagcttatggtttgtattggacttgggataggcttgccgtcgagttttggtagatgagtggtgaataagcttgatctataccactgttaccccctcacctaaaagaactatacaactgctgtcgttacctctcgttggctaccatggtgcactgccatcacttggatgacaaaatcgtcgccatgcactgattcaatgcaatttattccatgcc

SEQ ID NO: 125084 - DNA, 920 bp, Zea Mays
cgcatctgcaagatattagaatcccgcctgcgtcctccgcctgaacgcagagccttctattgcggcgccggcgccggcgccacgacccttctccgccagtccccactagagggcttagaactgcgtggaccacccggcgcctcttggcctctctcgctccgtccttgcgggcgcgacgacggcctccgacagctccgcaaagtcatccaagcctggaacaggatgcgcgtcagctactggttgctgtgtcgaagataacaaattttcaaagctgtcgacctccagggatccaaaaatctccctcccaggtggtgctgcctgctgcgtgcaggggagtgagcgtggctgcgtgggcaccctcggggtcggatctgaagaggaagaaggctgtcgcgctgacctcgactcgatgacggccagaagataaccgacgacatcggaccgcatccgcgcctcctcgagaagggcgccaacgtcatccttgctagccacctggaggcttggggtgtttgctttcaacaatccctgtaggccagtcgaaatggaaggtgttatgaggagggtgatcacttcggacaacatctgctttgtaaatgctgcggtgcgattgccaagaagctggctgagcttacaacgctaacggatgtcacaaccatcgtcggctaggctggctgacaagatgagccacatttggaccggtggtggcgcgagcgagcttggagctcttggaaggcaaggcgctaccaggtgtccttgtccttttgtttcggaccatggtgtaacactgcaaagcttatggtttgtattggacttgggataggcttgccgtcgagttttggtagatgagtggtgaataagcttgatctataccactgttaccccctcacctaaaagaactatacaactgctgtcgttacctc

SEQ ID NO: 125085 - DNA, 1999 bp, Zea Mays
atcggaccgcatccgcgcctcctcgagaagggcgccaacgtcatccttgctagccacctggtgagtcacctccccaccatcatgtcgaaataaatctttgactcgtgggttctgtgtttttttaattttagcctacttcaacgaactaactggtggtggttgttgttgttgaaacgacgaatacagaattacagatgcgattgtgacttgcatcattgcatgccgccgccatggtctcgccctcccatcccagcgtgggcggctgccaactccctcttccgccgccaccgccgcctgcagcccctcctcttcccggccgtctctcactgcgaccacctccgcgttctgtcccactgcctcgtgtccggcctcgcccgcaaccccttcgttgcctcccgccttctcctcgcatcctccagcctctccctccccttctccctcaccctcctcgcctatctcccggcctcctcgctctcatcgttctccttcaactcgctcatccgcgcctccccaccgcgcctcgcgctccgcctgtttgacgaaatgcgcagccgaggagtccccacggacccctacaccttaccgctcctgatcagcgcctgttcctgcagcggttttacactgtgccagtctctgcacgggcagggcttccgtcttggctacaattgccacgtattcacccagacggcgctgttgaacgcgtacctcaagtgcgggtcggtggccaccgcttgcagggtgttcgaggaaatgccggtgaaggatgtggttgcgtggaccagcatggtgtctggttatgtagactccaggatgtacttaaaagccgtcgaggtatttaacgagatgagaggtgctgatgatcttgtgtggcctaatgaggccacagtggtgtcacttgccactgcctgtgctggtctgggctcgctggagcatgcaaagggtctgcattcgtatgtggagaaggctgggttggaggacgagttaattgtcaggaatgcattggttgacatgtatgggaagtgtggctgcattgagtcggcacatagattgttttgtttgatgcgtgagaaggacttgcattcatggacaacaatgatttcagggctgtcttctcatggacgcggcgaagaagcggttggtttgttcttcagcatgtgcgaggagggagtattaccagattcgaccacttttattgtggttctgtctgcctgtagccatgctggactagtagatgaggggatacatatcttcaattccatggagagtgagcacaatgtcccccgggacaccaagcactatggttgcatggtggatcttttcagcagagcagggcttgttcgccgtgcttatgaattcattagcatgatgcctttcgaaccaaacttggagattcttggggccctgctgagtgcatgcagtatcaataatgaactggagattggggagctcgtgctcaataagattgacatggtctgctcctacaaaggaggtgctggtgtgcttctgtcaaatatatatgctaaccaaaatctgtggcatgaagtggataccattagaaggaagataaggactgaagcaattgtcaggaagccacctggtcatagtttgattgcagcagaagtttcttccatgactttctgattggtaattgcatagatttgcttttaatgaagctgtggtcctgattttgcgaaggaggcttggggtgtttgctttcaacaatccctgtaggccagtcgaaatggaaggtgttatgaggagggtgatcacttcggacaacatctgctttgtaaatgctgcggtgtaagtttttgctgtactgtaatatttgatgattttaatttttagcagatggagaggtcacatacggtgctttatagcacctgtgttttgaaacagtatgtgatggaacaccaccagaaaaaggctccggatcatgaattttcttgtgcctgaaaaacagtagagaaaccaattgatacttcatactttacctctc

SEQ ID NO: 125086 - DNA, 104 bp, Zea Mays
aatggggcccctggcacccagctaacagctacaatttgacagcgcctcccccccaaacagtgacttttgctgtgttctataggctagagctaataatacgaagt

SEQ ID NO: 125087 - DNA, 243 bp, Zea Mays
atgagttgcggggcaagagaaagcaagatcttttcagcaagtgacggtgtagtaacttcagcaatgattgtcttgagggctatactagcggtatcccgatgctggtcctttccatttatcaacttatcacaaagtttattggtcatctccacaaccctgtcctcaccaaccttcttgacgagtggggccaagcatttaacagctaaaccagaaacatctcccgaagcatcctcaagttgttga

SEQ ID NO: 125088 - DNA, 793 bp, Zea Mays
tcccactcccctccctcccgcatcaccagccaaacgccacctcgtgctgccccgagctcccggcctccgcagtcaggaacatccttctttctcccgagctcctactcctccacgtacgctcggagcttgccataggacgccagtcgtcagccatgaagcggctcctgaggcggctctcccgcacggtatcggtatcggtggcgggggaggacggaggcccggcggcgcggcccagcagcaaacacaagcaccggaggaggaggaaggggaagaaggcgggggcggtgccggagggccacgtgcccgtgtgcgtgggcgaggagggcggccccgcggagcgcttcgccgtgcgcgccgagctgctcggcgagccgcccttggccgcgctgctccgccgcgccgcgcaggagtacggctacgcgcaccctggcgcgctccgcatcccctgccccgtcgacgacttccgccgcctcctgctccgcctctcccacggcccctcgtcgcccgcgccggatgctatgcctagggcctaggcgcaggcgcaggcgttcctcgctcctgccctgctagccaagccagtggagtactactactagcagtagctgcttgctggcagaactagctgcagccgggtgtcctttttttttaccggcccttctagttctaggactcgtcagtgtgtgcgctagggaatctggttggagaattcggcattaaccgtccctacctccctcgatttgaggctggctgtccatggtgatttacattattgatgactattgaggcagtagtg

SEQ ID NO: 125089 - DNA, 130 bp, Zea Mays
accagggcgctacacggtgggggggatgcgccttcctccatggcagcagggagttggaaagacgtccacgttgaccgaaccttcgttcgtccatggcggccagactggggaaaatgggcagcagcacgag

SEQ ID NO: 125090 - DNA, 1514 bp, Zea Mays
actggcagcatgttgccaccgacagaaactggtttatttccctcttttcttcttcttggaactggaggctatcctctagcttgggaattgggaatctcacctgcaagattcgttttttttttggctaatccagtccggcgacctaggtctctcggcttgtccgcagcccgccggtcagtaatggcgcaggatgatccggttgtttctgctcagtggctgcacgagcacctagggatgcctgatgttaaggtaaaaaaaaaacatctagtttgcgtgttcatattcacttcagagacacttcagtaatgcttccttcatcgaagaagaaagttcagagatatacttcttctatcccctgcgttactggttttggatgcttcctggtacatgccggtagagaacagggatccatggaaagaatatcaggtggcacacatccccggtgcgctattcttcgacttagatggcatagttgatcggacaactgatttaccgcacatgctgccatcagaagaggcttttgcagcagcaatttctgagctggatataaaaaaccaggataaagttattgtctatgatggaaagggattcttcagtgcacctcgtgtttggtggatgtttagagtgtttgggcacaagaaagtctgggtactagacggcggtttgcctcagtggcaagcttctgggttcaacgtggaaaaggccagccctgacgatgacgcagttctgaaatcaatcgctgcaaacagggctgtcaaaagggtttataatggtgaacagacaaatacaatctcgtttcagactgaatttcagcctaatctattctgggcactggaaaaggtcgcacaaaacgtcactgctaagacgtaccaacagatagatgccagagcaaagggcagattcgacggcgtggcgccagagccacgggaaggggtaaggagtgggcatataccaggaagcgtctgcgttccgttccccgagatgttcgacggcgcaccaccgagccttctcctccccgccgacgagctgcggcggaagtttcagcacgcaggaatctccctggaccgacccatcgtcgtgacctgcggatccggcgtgactgcctgcatactcgctctggggctgtacaggatcggaaagcgtgatgtgccagtctacgatgggtcctggacggagtgggagggtcagtcggactccgattaccccaaagtcaccgctcctggtacagcttgagcgtctgggactgggagttggcagttttagactgccagcatgatggcattgtgtttgcgacaggctgaaccgattttatcgagcactggaagcattgtattcgctactggtaggcctgctaatggcaaaaattccaacccacgcccacccatacccaaatctaataacttgatattcatcccactcccacccaaaaatataagaagaaaattaaacctaacccatccaatgatattattgatccctaaaccaacccgtaattgggtggaaacccataaaaa

SEQ ID NO: 125091 - DNA, 1628 bp, Zea Mays
acctcacaagtccaaatcagtttgtctgctccgcccgttgcccgtggcccgtcggtctctcttgcagtctcgccgctccccttcctcccccgcaggaatccgaatcagtaagtccggcgacctaggtctctcggcttgtccgcagcccgccggtcagtaatggcgcaggatgatccggttgtttctgctcagtggctgcacgagcacctagggatgcctgatgttaaggtaaaaaaaaaacatctagtttgcgtgttcatattcacttcagagacacttcagtaatgcttccttcatcgaagaagaaagttcagagatatacttcttctatcccctgcgttactggtatgtggagaatataacagtttggttgtctatcaatttgatattcccttttatgtgttgtgttcttattactcccagaaataattagagggttagggacatatgtgctttgtgacagttatcagcttgttttaggttttggatgcttcctggtacatgccggtagagaacagggatccatggaaagaatatcaggtggcacacatccccggtgcgctattcttcgacttagatggcatagttgatcggacaactgatttaccgcacatgctgccatcagaagaggcttttgcagcagcaatttctgagctggatataaaaaaccaggataaagttattgtctatgatggaaagggattcttcagtgcacctcgtgtttggtggatgtttagagtgtttgggcacaagaaagtctgggtactagacggcggtttgcctcagtggcaagcttctgggttcaacgtggaaaaggccagccctgacgatgacgcagttctgaaatcaatcgctgcaaacagggctgtcaaaagggtttataatggtgaacagacaaatacaatctcgtttcagactgaatttcagcctaatctattctgggcactggaaaaggtcgcacaaaacgtcactgctaagacgtaccaacagatagatgccagagcaaagggcagattcgacggcgtggcgccagagccacgggaaggggtaaggagtgggcatataccaggaagcgtctgcgttccgttccccgagatgttcgacggcgcaccaccgagccttctcctccccgccgacgagctgcggcggaagtttcagcacgcaggaatctccctggaccgacccatcgtcgtgacctgcggatccggcgtgactgcctgcatactcgctctggggctgtacaggatcggaaagcgtgatgtgccagtctacgatgggtcctggacggagtgggagggtcagtcggactccgattaccccaaagtcaccgctcctggtacagcttgagcgtctgggactgggagttggcagttttagactgccagcatgatggcattgtgtttgcgacaggctgaaccgattttatcgagcactggaagcattgtattcgctactggtaggcctgctaatggcaaaaattccaacccacgcccacccatacccaaatctaataacttgatattcatcccactcccacccaaaaatataagaagaaaattaaacctaacccatccaatgatattattgatccctaaaccaacccgtaattgggtggaaacccataaaaa

SEQ ID NO: 125092 - DNA, 1390 bp, Zea Mays
ggcgtggctaccctacctcacaagtccaaatcagtttgtctgctccgcccgttgcccgtggcccgtcggtctctcttgcagtctcgccgctccccttcctcccccgcaggaatccgaatcagtaagtccggcgacctaggtctctcggcttgtccgcagcccgccggtcagtaatggcgcaggatgatccggttgtttctgctcagtggctgcacgagcacctagggatgcctgatgttaaggttttggatgcttcctggtacatgccggtagagaacagggatccatggaaagaatatcaggtggcacacatccccggtgcgctattcttcgacttagatggcatagttgatcggacaactgatttaccgcacatgctgccatcagaagaggcttttgcagcagcaatttctgagctggatataaaaaaccaggataaagttattgtctatgatggaaagggattcttcagtgcacctcgtgtttggtggatgtttagagtgtttgggcacaagaaagtctgggtactagacggcggtttgcctcagtggcaagcttctgggttcaacgtggaaaaggccagccctgacgatgacgcagttctgaaatcaatcgctgcaaacagggctgtcaaaagggtttataatggtgaacagacaaatacaatctcgtttcagactgaatttcagcctaatctattctgggcactggaaaaggtcgcacaaaacgtcactgctaagacgtaccaacagatagatgccagagcaaagggcagattcgacggcgtggcgccagagccacgggaaggggtaaggagtgggcatataccaggaagcgtctgcgttccgttccccgagatgttcgacggcgcaccaccgagccttctcctccccgccgacgagctgcggcggaagtttcagcacgcaggaatctccctggaccgacccatcgtcgtgacctgcggatccggcgtgactgcctgcatactcgctctggggctgtacaggatcggaaagcgtgatgtgccagtctacgatgggtcctggacggagtgggagggtcagtcggactccgattaccccaaagtcaccgctcctggtacagcttgagcgtctgggactgggagttggcagttttagactgccagcatgatggcattgtgtttgcgacaggctgaaccgattttatcgagcactggaagcattgtattcgctactggtaggcctgctaatggcaaaaattccaacccacgcccacccatacccaaatctaataacttgatattcatcccactcccacccaaaaatataagaagaaaattaaacctaacccatccaatgatattattgatccctaaaccaacccgtaattgggtggaaacccataaaaa

SEQ ID NO: 125093 - DNA, 1393 bp, Zea Mays
ggcgtggctaccctacctcacaagtccaaatcagtttgtctgctccgcccgttgcccgtggcccgtcggtctctcttgcagtctcgccgctccccttcctcccccgcaggaatccgaatcagtaagtccggcgacctaggtctctcggcttgtccgcagcccgccggtcagtaatggcgcaggatgatccggttgtttctgctcagtggctgcacgagcacctagggatgcctgatgttaagaaagttcagagatatacttcttctatcccctgcgttactggttttggatgcttcctggtacatgccggtagagaacagggatccatggaaagaatatcagatggcatagttgatcggacaactgatttaccgcacatgctgccatcagaagaggcttttgcagcagcaatttctgagctggatataaaaaaccaggataaagttattgtctatgatggaaagggattcttcagtgcacctcgtgtttggtggatgtttagagtgtttgggcacaagaaagtctgggtactagacggcggtttgcctcagtggcaagcttctgggttcaacgtggaaaaggccagccctgacgatgacgcagttctgaaatcaatcgctgcaaacagggctgtcaaaagggtttataatggtgaacagacaaatacaatctcgtttcagactgaatttcagcctaatctattctgggcactggaaaaggtcgcacaaaacgtcactgctaagacgtaccaacagatagatgccagagcaaagggcagattcgacggcgtggcgccagagccacgggaaggggtaaggagtgggcatataccaggaagcgtctgcgttccgttccccgagatgttcgacggcgcaccaccgagccttctcctccccgccgacgagctgcggcggaagtttcagcacgcaggaatctccctggaccgacccatcgtcgtgacctgcggatccggcgtgactgcctgcatactcgctctggggctgtacaggatcggaaagcgtgatgtgccagtctacgatgggtcctggacggagtgggagggtcagtcggactccgattaccccaaagtcaccgctcctggtacagcttgagcgtctgggactgggagttggcagttttagactgccagcatgatggcattgtgtttgcgacaggctgaaccgattttatcgagcactggaagcattgtattcgctactggtaggcctgctaatggcaaaaattccaacccacgcccacccatacccaaatctaataacttgatattcatcccactcccacccaaaaatataagaagaaaattaaacctaacccatccaatgatattattgatccctaaaccaacccgtaattgggtggaaacccataaaaa

SEQ ID NO: 125094 - DNA, 1276 bp, Zea Mays
tcagctccaatctttagccttactggcagcatgttgccaccgacagaaactggtttatttccctcttttcttcttcttggaactggaggctatcctctagcttgggaattgggaatctcacctgcaagattcgttttttttttggctaatccagtccggcgacctaggtctctcggcttgtccgcagcccgccggtcagtaatggcgcaggatgatccggttgtttctgctcagtggctgcacgagcacctagggatgcctgatgttaaggttttggatgcttcctggtacatgccggtagagaacagggatccatggaaagaatatcaggtggcacacatccccggtgcgctattcttcgacttagatggcatagttgatcggacaactgatttaccgcacatgctgccatcagaagaggcttttgcagcagcaatttctgagctggatataaaaaaccaggataaagttattgtctatgatggaaagggattcttcagtgcacctcgtgtttggtggatgtttagagtgtttgggcacaagaaagtctgggtactagacggcggtttgcctcagtggcaagcttctgggttcaacgtggaaaaggccagccctgacgatgacgcagttctgaaatcaatcgctgcaaacagggctgtcaaaagggtttataatggtgaacagacaaatacaatctcgtttcagactgaatttcagcctaatctattctgggcactggaaaaggtcgcacaaaacgtcactgctaagacgtaccaacagatagatgccagagcaaagggcagattcgacggcgtggcgccagagccacgggaaggggtaaggagtgggcatataccaggaagcgtctgcgttccgttccccgagatgttcgacggcgcaccaccgagccttctcctccccgccgacgagctgcggcggaagtttcagcacgcaggaatctccctggaccgacccatcgtcgtgacctgcggatccggcgtgactgcctgcatactcgctctggggctgtacaggatcggaaagcgtgatgtgccagtctacgatgggtcctggacggagtgggagggtcagtcggactccgattaccccaaagtcaccgctcctggtacagcttgagcgtctgggactgggagttggcagttttagactgccagcatgatggcattgtgtttgcgacaggctgaaccgattttatcgagcactggaagcattgtattcgctactggtaggcctgctaatggcaaaaattccaacc

SEQ ID NO: 125095 - DNA, 1266 bp, Zea Mays
ccgtcggtctctcttgcagtctcgccgctccccttcctcccccgcaggaatccgaatcagtaagtccggcgacctaggtctctcggcttgtccgcagcccgccggtcagtaatggcgcaggatgatccggttgtttctgctcagtggctgcacgagcacctagggatgcctgatgttaaggtaaaaaaaaaacatctagtttgcgtgttcatattcacttcagagacacttcagtaatgcttccttcatcgaagaagaaagttcagagatatacttcttctatcccctgcgttactggttttggatgcttcctggtacatgccggtagagaacagggatccatggaaagaatatcagatggcatagttgatcggacaactgatttaccgcacatgctgccatcagaagaggcttttgcagcagcaatttctgagctggatataaaaaaccaggataaagttattgtctatgatggaaagggattcttcagtgcacctcgtgtttggtggatgtttagagtgtttgggcacaagaaagtctgggtactagacggcggtttgcctcagtggcaagcttctgggttcaacgtggaaaaggccagccctgacgatgacgcagttctgaaatcaatcgctgcaaacagggctgtcaaaagggtttataatggtgaacagacaaatacaatctcgtttcagactgaatttcagcctaatctattctgggcactggaaaaggtcgcacaaaacgtcactgctaagacgtaccaacagatagatgccagagcaaagggcagattcgacggcgtggcgccagagccacgggaaggggtaaggagtgggcatataccaggaagcgtctgcgttccgttccccgagatgttcgacggcgcaccaccgagccttctcctccccgccgacgagctgcggcggaagtttcagcacgcaggaatctccctggaccgacccatcgtcgtgacctgcggatccggcgtgactgcctgcatactcgctctggggctgtacaggatcggaaagcgtgatgtgccagtctacgatgggtcctggacggagtgggagggtcagtcggactccgattaccccaaagtcaccgctcctggtacagcttgagcgtctgggactgggagttggcagttttagactgccagcatgatggcattgtgtttgcgacaggctgaaccgattttatcgagcactggaagcattgtattcgctactggtaggcctgctaatggcaaaaattccaacc

SEQ ID NO: 125096 - DNA, 1749 bp, Zea Mays
ggcgtggctaccctacctcacaagtccaaatcagtttgtctgctccgcccgttgcccgtggcccgtcggtctctcttgcagtctcgccgctccccttcctcccccgcaggaatccgaatcagtaagtccggcgacctaggtctctcggcttgtccgcagcccgccggtcagtaatggcgcaggatgatccggttgtttctgctcagtggctgcacgagcacctagggatgcctgatgttaaggtaaaaaaaaaacatctagtttgcgtgttcatattcacttcagagacacttcagtaatgcttccttcatcgaagaagaaagttcagagatatacttcttctatcccctgcgttactggtatgtggagaatataacagtttggttgtctatcaatttgatattcccttttatgtgttgtgttcttattactcccagaaataattagagggttagggacatatgtgctttgtgacagttatcagcttgttttaggttttggatgcttcctggtacatgccggtagagaacagggatccatggaaagaatatcaggtggcacacatccccggtgcgctattcttcgacttagatggcatagttgatcggacaactgatttaccgcacatgctgccatcagaagaggcttttgcagcagcaatttctgagctggatataaaaaaccaggataaagttattgtctatgatggaaagggattcttcagtgcacctcgtgtttggtggatgtttagagtgtttgggcacaagaaagtctgggtactagacggcggtttgcctcagtggcaagcttctgggttcaacgtggaaaaggccagccctgacgatgacgcagttctgaaatcaatcgctgcaaacagggctgtcaaaagggtttataatggtgaacagacaaatacaatctcgtttcagactgaatttcagcctaatctattctgggcactggaaaaggctagtgactttttttaacctcaaagtactagctttgcatgggtagaaaatgaataatgtatcagtctggtcatatgatccccttttgctttctttgatttaacattgatgccccacccaaaattccgtggaactccataaacttgatcgattctctgaagtaataggatcagctctgaattctgtaaatatgatcaactcaaaaaggagctatgaagatcatgactaagcgaaacattaatgctagtcccatgcaaactgagttgttcgattcatgcgacaggtcgcacaaaacgtcactgctaagacgtaccaacagatagatgccagagcaaagggcagattcgacggcgtggcgccagagccacgggaaggggtaaggagtgggcatataccaggaagcgtctgcgttccgttccccgagatgttcgacggcgcaccaccgagccttctcctccccgccgacgagctgcggcggaagtttcagcacgcaggaatctccctggaccgacccatcgtcgtgacctgcggatccggcgtgactgcctgcatactcgctctggggctgtacaggatcggaaagcgtgatgtgccagtctacgatgggtcctggacggagtgggagggtcagtcggactccgattaccccaaagtcaccgctcctggtacagcttgagcgtctgggactgggagttggcagttttagactgccagcatgatggcattgtgtttgcgacaggctgaaccgattttatcgagcactggaagcattgtattcgct

SEQ ID NO: 125097 - DNA, 1401 bp, Zea Mays
agtttgtctgctccgcccgttgcccgtggcccgtcggtctctcttgcagtctcgccgctccccttcctcccccgcaggaatccgaatcagtaagtccggcgacctaggtctctcggcttgtccgcagcccgccggtcagtaatggcgcaggatgatccggttgtttctgctcagtggctgcacgagcacctagggatgcctgatgttaaggtaaaaaaaaaacatctagtttgcgtgttcatattcacttcagagacacttcagtaatgcttccttcatcgaagaagaaagttcagagatatacttcttctatcccctgcgttactggtatgtggagaatataacagtttggttgtctatcaatttgatattcccttttatgtgttgtgttcttattactcccagaaataattagagggttagggacatatgtgctttgtgacagttatcagcttgttttaggttttggatgcttcctggtacatgccggtagagaacagggatccatggaaagaatatcagatggcatagttgatcggacaactgatttaccgcacatgctgccatcagaagaggcttttgcagcagcaatttctgagctggatataaaaaaccaggataaagttattgtctatgatggaaagggattcttcagtgcacctcgtgtttggtgatgttcaggatgtttagagtgtttgggcacaagaaagtctgggtactagacggcggtttgcctcagtggcaagcttctgggttcaacgtggaaaaggccagccctgacgatgacgcagttctgaaatcaatcgctgcaaacagggctgtcaaaagggtttataatggtgaacagacaaatacaatctcgtttcagactgaatttcagcctaatctattctgggcactggaaaaggtcgcacaaaacgtcactgctaagacgtaccaacagatagatgccagagcaaagggcagattcgacggcgtggcgccagagccacgggaaggggtaaggagtgggcatataccaggaagcgtctgcgttccgttccccgagatgttcgacggcgcaccaccgagccttctcctccccgccgacgagctgcggcggaagtttcagcacgcaggaatctccctggaccgacccatcgtcgtgacctgcggatccggcgtgactgcctgcatactcgctctggggctgtacaggatcggaaagcgtgatgtgccagtctacgatgggtcctggacggagtgggagggtcagtcggactccgattaccccaaagtcaccgctcctggtacagcttgagcgtctgggactgggagttggcagttttagactgccagcatgatggcattgtgtttgcgacaggctgaaccgattttatcgagcactggaagcattgtatt

SEQ ID NO: 125098 - DNA, 1518 bp, Zea Mays
gtccaaatcagtttgtctgctccgcccgttgcccgtggcccgtcggtctctcttgcagtctcgccgctccccttcctcccccgcaggaatccgaatcagtaagtccggcgacctaggtctctcggcttgtccgcagcccgccggtcagtaatggcgcaggatgatccggttgtttctgctcagtggctgcacgagcacctagggatgcctgatgttaaggtaaaaaaaaaacatctagtttgcgtgttcatattcacttcagagacacttcagtaatgcttccttcatcgaagaagaaagttcagagatatacttcttctatcccctgcgttactggtatgtggagaatataacagtttggttgtctatcaatttgatattcccttttatgtgttgtgttcttattactcccagaaataattagagggttagggacatatgtgctttgtgacagttatcagcttgttttaggttttggatgcttcctggtacatgccggtagagaacagggatccatggaaagaatatcaggttttcagcatcaactataacgtgtctcatcttcctttttgagataatttttggagctaaggtgttctaatatccgcaggtggcacacatccccggtgcgctattcttcgacttagatggcatagttgatcggacaactgatttaccgcacatgctgccatcagaagaggcttttgcagcagcaatttctgagctggatataaaaaaccaggataaagttattgtctatgatggaaagggattcttcagtgcacctcgtgtttggtggatgtttagagtgtttgggcacaagaaagtctgggtactagacggcggtttgcctcagtggcaagcttctgggttcaacgtggaaaaggccagccctgacgatgacgcagttctgaaatcaatcgctgcaaacagggctgtcaaaagggtttataatggtgaacagacaaatacaatctcgtttcagactgaatttcagcctaatctattctgggcactggaaaaggtcgcacaaaacgtcactgctaagacgtaccaacagatagatgccagagcaaagggcagattcgacggcgtggcgccagagccacgggaaggggtaaggagtgggcatataccaggaagcgtctgcgttccgttccccgagatgttcgacggcgcaccaccgagccttctcctccccgccgacgagctgcggcggaagtttcagcacgcaggaatctccctggaccgacccatcgtcgtgacctgcggatccggcgtgactgcctgcatactcgctctggggctgtacaggatcggaaagcgtgatgtgccagtctacgatgggtcctggacggagtgggagggtcagtcggactccgattaccccaaagtcaccgctcctggtacagcttgagcgtctgggactgggagttggcagttttagactgccagcatgatggcattgtgtttgcgacaggctgaaccgattttatcgagcactggaagcattgtatt

SEQ ID NO: 125099 - DNA, 1910 bp, Zea Mays
ggactaccagaacttgctgcgaggataaagtagtcaaacgatcgttgtctctatctgaaagcattaaaagttggtggcactccatgttccttatcttatgaacccaaaaacccagtctacaatatttgtatccaaagtcccttgttcctcatcggatttcatccccaatctacgataaacgaaagtcatagctcctgtcatttgcttcgaaaaaaaattctataactgatttagatgccggcaaaacgtgtttggaacttaacaatatctttttcccagctctagtttatcacaacttgcttggaaccaaaaggttttattattgttggtgaagttgtgtgcttgacatcctcaaactccgatacaggatttcaggttcttgatgagcaatactgtataaaccatggcttcatagtggccaacatgatttaataagcatcatgccccttcgtttgtattccaaccttgttcttataataaatagaaggaatgctcttatgacagtttggatatttaaaacggatggagtaaatatttatataattccttggcgtaatggcgtggctaccctacctcacaagtccaaatcagtttgtctgctccgcccgttgcccgtggcccgtcggtctctcttgcagtctcgccgctccccttcctcccccgcaggaatccgaatcagtaagtccggcgacctaggtctctcggcttgtccgcagcccgccggtcagtaatggcgcaggatgatccggttgtttctgctcagtggctgcacgagcacctagggatgcctgatgttaaggtaaaaaaaaaacatctagtttgcgtgttcatattcacttcagagacacttcagtaatgcttccttcatcgaagaagaaagttcagagatatacttcttctatcccctgcgttactggtatgtggagaatataacagtttggttgtctatcaatttgatattcccttttatgtgttgtgttcttattactcccagaaataattagagggttagggacatatgtgctttgtgacagttatcagcttgttttaggttttggatgcttcctggtacatgccggtagagaacagggatccatggaaagaatatcagatggcatagttgatcggacaactgatttaccgcacatgctgccatcagaagaggcttttgcagcagcaatttctgagctggatataaaaaaccaggataaagttattgtctatgatggaaagggattcttcagtgcacctcgtgtttggtggtaagctgaagtctgtatccagtatccacctcatcaaaatggtgaaaccagtagaaaaacttgctattcagttgtgcagttgatataagaagtattcaaaatgacgatcttatcaaggacactattcctttgtcataagagttttctgattgtttcacttaactaacatgatttcgttcaagatgttcaggatgtttagagtgtttgggcacaagaaagtctgggtactagacggcggtttgcctcagtggcaagcttctgggttcaacgtggaaaaggccagccctgacgatgacgcagttctgaaatcaatcgctgcaaacagggctgtcaaaagggtttataatggtgaacagacaaatacaatctcgtttcagactgaatttcagcctaatctattctgggcactggaaaaggctagtgactttttttaacctcaaagtactagctttgcatgggtagaaaatgaataatgtatcagtctggtcatatgatccccttttgctttctttgatttaacattgatgccccacccaaaattccgtggaactccataaacttgatcgattctctgaagtaataggatcagctctgaattctgtaaatatgatcaactcaaaaaggagctatgaagatcatgactaagcg

SEQ ID NO: 125100 - DNA, 2056 bp, Zea Mays
ctgtcctgtccctgtcgcctgctcacgttccattcatcgcccggcttcagcgaagccaagtacagtgctcgatcgcacgctgtctgcctgcccccgccactggatgcgcctcgccgccggcaatggcgtccgccgtagctagcagcgtgcacgcgggacccgccgcggcaggggccttgacgttcgggtggctcggcccgcgcctgtccctgggcggccgcgacgcctccgccaccgccgcggaggcggaggaacccgccgcggcgtccaatgcggcggagccggcgatctccaaggacttcatcgacttcgagttctgcctcggcgtgtcgtccaccacgatgctgcccgcggacgagctcttcgccgacggcaagctgctgccgctccgccccccgcaggcggccgccgcccgcggggtggagaggcggcgggacaccgcgctggtcgaggaggtcccggccgcaccggagctgagccgggcggcgcgactctccgcgcccgaggcggcgctggacctggacccgtacgtgttctcgcccaaggcgcccacgtgctctagccggtggcgggagctgctgcggctcaggaaggccggccagacgccgtccgcgtccgcgtcgcccccggcatcccccgcggcgaccccttcgtcgagggcatccagctcctcggcggccaggtcgctgaagctgctcctccagcggagcggcggcggccgcgtggcggacctcgccgcggcgcctctcctgctgcgcgacagctccgactcggaggcgtcgctgtcgctcacgtcctcccgctactcgctctcgtcgtcgtcgtcgtcgtccgggcacgaccacgacgacttcccgcgccactccctcgactccgtggacccaaccccacgtccccgcatccgccttgtccgctcccacccccaggcgccgcagccgcaaccacacccgcccgtctctgcttcggcctctgctcccgctcccgctcctgcgcgcgccgcgcatagccccgctcgccgccgcccgtctccgtcgccctcgccgccgccgccgcagcagcagcagcagcaggcaagcgtgatctcggtagactccccccgcatgaacgcctcaggcaagatcgtgttccagggcctagagcgcagctccagctcccccgccggcagcgcccactcgtccatgcggtcgcggtcgcggtcccggtcccgcgtgatggaccggtcctactcggccggcgtccgcgccacgccggtcgtgctcaacgtcccggtgtgctcgcgcccggtgttcggcttcttcaaggacaagaaggaagccgcggcggccgccgcgcggtcgcggtcggcgctgggccggaggacgacgacgacgacgactgctgcggccggtggagtgggcggcagagatctcggcaatggtaaactgacatcgttcgttttggctgactaaaagagctagtaggcgacaattagctagtggttcttcggccgcgacaaggaaatagatcaaaaggagtttgaggacttgggggtagaagaggtgggtgggggcttagtttgggatctcgtccggagaagagagacgattgggtggatagtttcggtcagctgatttcgtttcgtgaggcaaatagttttgcgagcagtttgaccaaacaccccgggaccgttttgctcctgtaatgcaattatgcaaatcctgcctgccccgtggtctttttgctagtcttccccgtatgatcctttgtagtagtccactgtactaggctaccagcacatttgttgacctttttaggctctggcaggtccgcagtgaggagaaaaagaaaagaaaataagcttttgtgcatttgtttgtttgtttgtctgccagttctttgccgtaccagcacgcacatttgtgtgaactgaaaagctgggtggaaaaaaagaagagaaagggactttgtatgttttagtaaacatgaaacatcgcaattgtgtttgtcattgcctggttaatgagcgtgtaaaaccgagctgagattctcggcttgatcgaagaagaagaaaaaaaaa

SEQ ID NO: 125101 - DNA, 1548 bp, Zea Mays
tttttcagaacatgttagaagccagggaagatcggtgaaatgcttgcattgatataataagtccaggctgaagttattgagctgacagcactaagatataatagtttgagaatctcaatgggttgcttttctacattttgcaagaaaagaagggcaacgcggcaaccaagttcccaccataatgaagacgtacctggctgttcaaatataacaaaatacacttacaaggagctagtaagggcgacaaataactttaacccattgaacaaaattggtgagggtggttttggttccgtttacaagggacagctcaggaatggtacagttattgctgtcaaggtcctttcgtcggagtcaagacaaggagtaagggagtttctgaatgaactcgtggcaatttccgacatctcacatgataatcttgtgaaactttatgggtattgtgcggaaggagaccaaagaatccttgtttacaatcatcttgaaaataatagccttgcacaaacacttctaggctccagccacagcaatatccagtttgattggaaaacacgagtaaatatttgccttggcattgcacggggattagcatacctccatcatggtgtcagtccccacattgttcatcgagacattaaagcaagcaatatacttcttgatagggaccttaccccaaaaatctctgattttggtctagcaaagcttcttccaccaaacgcaacacatgttagcacaagagttgcaggaacactgggttatttggctcctgagtatgctattcgaggacaggtgacacgcaaatcagatgtgtacagctttggcgtgctgcttctggaaattgtttgcgggagatcaaacagcgatacaagattagcatacggagatcagatactcctcgaaaagttcccagagatcaccaacggggctctcctcttgcagacatggatgcactacgagcaggggagtctggagaggatcatagacaggtccttgggcggcggcgacctggacgtggcgcaggcctgcaggttcctgaaggtcgggctgctgtgcacgcaggacgtgacgaggcaccggcccgacatgccgagggtcgtcgccatgctgacgggcgagtgggacgtcgagccggagacggtcagcaagcccgccataatcagcgacttcatggacctcaaggtcaggagcacgaggaaagcgagcgacaacgtggccacgccgcctacgtcctcctcgacgttcctgtcctccctcatggcgcactcctcgcccttgctgtcgaacgagtccacgcaggcctccatggcgttcaccggggtgtcggatcgcgagtgatccttgatcccttcgtcaaagactggtcaggctggctggtagtgacctgagttggttggaggtgtggaagacatgtgtagtgtaggcaggcaggcacagatggatttaattgcttcgtttgtaggcgcaacatcattgttgagtcaaaaggttcaagtacatgtgaggaaactgctttgtgtgcaattttggattgaagacgcgattcttttt

SEQ ID NO: 125102 - DNA, 1512 bp, Zea Mays
tttttcagaacatgttagaagccagggaagatcggtgaaatgcttgcattgatataataagtccaggctgaagttattgagctgacagcactaagatataatagtttgagaatctcaatgggttgcttttctacattttgcaagaaaagaagggcaacgcggcaaccaagttcccaccataatgaagacgtacctggctgttcaaatataacaaaatacacttacaaggagctagtaagggcgacaaataactttaacccattgaacaaaattggtgagggtggttttggttccgtttacaagggacagctcaggaatggtacagttattgctgtcaaggtcctttcgtcggagtcaagacaaggagtaagggagtttctgaatgaactcgtggcaatttccgacatctcacatgataatcttgtgaaactttatgggtattgtgcggaaggagaccaaagaatccttgtttacaatcatcttgaaaataatagccttgcacaaacacttctaggctccagccacagcaatatccagtttgattggaaaacacgagtaaatatttgccttggcattgcacggggattagcatacctccatcatggtgtcagtccccacattgttcatcgagacattaaagcaagcaatatacttcttgatagggaccttaccccaaaaatctctgattttggtctagcaaagcttcttccaccaaacgcaacacatgttagcacaagagttgcaggaacactgggttatttggctcctgagtatgctattcgaggacaggtgacacgcaaatcagatgtgtacagctttggcgtgctgcttctggaaattgtttgcgggagatcaaacagcgatacaagattagcatacggagatcagatactcctcgaaaagacatggatgcactacgagcaggggagtctggagaggatcatagacaggtccttgggcggcggcgacctggacgtggcgcaggcctgcaggttcctgaaggtcgggctgctgtgcacgcaggacgtgacgaggcaccggcccgacatgccgagggtcgtcgccatgctgacgggcgagtgggacgtcgagccggagacggtcagcaagcccgccataatcagcgacttcatggacctcaaggtcaggagcacgaggaaagcgagcgacaacgtggccacgccgcctacgtcctcctcgacgttcctgtcctccctcatggcgcactcctcgcccttgctgtcgaacgagtccacgcaggcctccatggcgttcaccggggtgtcggatcgcgagtgatccttgatcccttcgtcaaagactggtcaggctggctggtagtgacctgagttggttggaggtgtggaagacatgtgtagtgtaggcaggcaggcacagatggatttaattgcttcgtttgtaggcgcaacatcattgttgagtcaaaaggttcaagtacatgtgaggaaactgctttgtgtgcaattttggattgaagacgcgattcttttt

SEQ ID NO: 125103 - DNA, 1542 bp, Zea Mays
tttttcagaacatgttagaagccagggaagatcggtgaaatgcttgcattgatataataagtccaggctgaagttattgagctgacagcactaagatataatagtttgagaatctcaatgggttgcttttctacattttgcaagaaaagaagggcaacgcggcaaccaagttcccaccataatgaagacgtacctggctgttcaaatataacaaaatacacttacaaggagctagtaagggcgacaaataactttaacccattgaacaaaattggtgagggtggttttggttccgtttacaagctcaggaatggtacagttattgctgtcaaggtcctttcgtcggagtcaagacaaggagtaagggagtttctgaatgaactcgtggcaatttccgacatctcacatgataatcttgtgaaactttatgggtattgtgcggaaggagaccaaagaatccttgtttacaatcatcttgaaaataatagccttgcacaaacacttctaggctccagccacagcaatatccagtttgattggaaaacacgagtaaatatttgccttggcattgcacggggattagcatacctccatcatggtgtcagtccccacattgttcatcgagacattaaagcaagcaatatacttcttgatagggaccttaccccaaaaatctctgattttggtctagcaaagcttcttccaccaaacgcaacacatgttagcacaagagttgcaggaacactgggttatttggctcctgagtatgctattcgaggacaggtgacacgcaaatcagatgtgtacagctttggcgtgctgcttctggaaattgtttgcgggagatcaaacagcgatacaagattagcatacggagatcagatactcctcgaaaagttcccagagatcaccaacggggctctcctcttgcagacatggatgcactacgagcaggggagtctggagaggatcatagacaggtccttgggcggcggcgacctggacgtggcgcaggcctgcaggttcctgaaggtcgggctgctgtgcacgcaggacgtgacgaggcaccggcccgacatgccgagggtcgtcgccatgctgacgggcgagtgggacgtcgagccggagacggtcagcaagcccgccataatcagcgacttcatggacctcaaggtcaggagcacgaggaaagcgagcgacaacgtggccacgccgcctacgtcctcctcgacgttcctgtcctccctcatggcgcactcctcgcccttgctgtcgaacgagtccacgcaggcctccatggcgttcaccggggtgtcggatcgcgagtgatccttgatcccttcgtcaaagactggtcaggctggctggtagtgacctgagttggttggaggtgtggaagacatgtgtagtgtaggcaggcaggcacagatggatttaattgcttcgtttgtaggcgcaacatcattgttgagtcaaaaggttcaagtacatgtgaggaaactgctttgtgtgcaattttggattgaagacgcgattcttttt

SEQ ID NO: 125104 - DNA, 1126 bp, Zea Mays
tttttcagaacatgttagaagccagggaagatcggtgaaatgcttgcattgatataataagtccaggctgaagttattgagctgacagcactaagatataatagtttgagaatctcaatgggttgcttttctacattttgcaagaaaagaagggcaacgcggcaaccaagttcccaccataatgaagacgtacctggctgttcaaatataacaaaatacacttacaaggagctagtaagggcgacaaataactttaacccattgaacaaaattggtgagggtggttttggttccgtttacaagggacagctcaggaatggtacagttattgctgtcaaggtcctttcgtcggagtcaagacaaggagtaagggagtttctgaatgaactcgtggcaatttccgacatctcacatgataatcttgtgaaactttatgggtattgtgcggaaggagaccaaagaatccttgtttacaatcatcttgaaaataatagccttgcacaaacacttctaggctccagccacagcaatatccagtttgattggaaaacacgagtaaatatttgccttggcattgcacggggattagcatacctccatcatggtgtcagtccccacattgttcatcgagacattaaagcaagcaatatacttcttgatagggaccttaccccaaaaatctctgattttggtctagcaaagcttcttccaccaaacgcaacacatgttagcacaagagttgcaggaacactgggttatttggctcctgagtatgctattcgaggacaggtgacacgcaaatcagatgtgtacagctttggcgtgctgcttctggaaattgtttgcgggagatcaaacagcgatacaagattagcatacggagatcagatactcctcgaaaaggtcagatgacgctctagagtacagttgacatgtctttccatcgctgcttgtgtagttgaagaattttgtttcgcgattgttgatttttttaggcaattactgtaggggggtcccctacagtgttcatcaaccaaggagtatatttacagattgttgatttatagcactactttctattatctgaaaatgagtacgacaatgatgatgcatgattcgggtgcgc

SEQ ID NO: 125105 - DNA, 3863 bp, Zea Mays
accactcgtcgggttaaaacttaaaaccccgaggagtctagtctctcgagggcatacgaggcgagcaggagccggcagcacgaggaagacagaagaagcaaagcgaagcaaggcgacctcctcctcccctgctgcacagagtgggccggggccacggttgcaggaagcagtgtccgtcagtagcagcggcggaggtgctccgcggtcctggttcagtagttctccccctccggccgtggcagcggtcggatctgcgtcgcggcggcggaaagcaccccctccccgcctggagcccggagccgccgtccttctgaagctcggcggcgtcgagatctgagttcggtcgcgcggagaggaggtttcgctgtgccggcgtgcttctcccggagccgcgcgcggaggcggcgcctttgctgcgcattgccgttccgtccgtcccgtcccgtcaagctctaaggcttccgaagaattgaaaccggggttcttgggctttgcgcctcgcgcctcgcgccgtgatgtaaacttgatccctcggatcgaaaaggccgtccctttgcgccggccggccggccggaggtttggcgctgttcggcggaggagcaagtggcggtgctcaatccggaccacgccgcgcacgtgcttggaaaaggagcgtggtttggtgtacaaggaagggcagcaagggcccttgcctccccccttccctctcctctccattccggtgcgcgcctggaacgcgtcttgtgggtcggccggcgagcggagcggcgggaggagaatgaagctctcgccgtcggccagcggtggcctccaggaccagccggcgtcgccggaagaagctgaagagcacaagtgcctgaattctgagttgtggcatgcatgtgctggccctctagtttcattgccttcggtcggtagtcgagtggtgtattttcctcaaggccacggtgagcaggtagcagcatcaacaaataaggaaatggaggctcagatccccaactatcctagtctacctccgcagcttatatgccaactgcataatgtgactatgcatgctgatgctgagacagatgaggtgtatgcacagatgacactccagccactcagtccacaagagctcaaggacccatttttgcctgctgagttaggcactgccagcaaccagccaacaaattatttttgtaaaacactaactgcaagtgatacgagtacacatggtgggttctctgttccacgccgagcagctgagaaggtgtttcctccactggatttcaatcagcaacctcccgcacaggagttgattgcaaaagatcttcatggcaacgactggaaatttcgccatatttttcgaggtcagccaaagcggcatcttctgacaacaggttggagtgtctttgttagtgcaaagagactggttgctggcgactctgtcctttttatctggaatgacaacaaccagctgcttctgggaattcgccgggcaaacagaccacaaaccgtcatgccatcatcagtactttctagtgatagcatgcatattggcctgctcgctgctgcagctcatgctgcatcaacaaatagccggtttactatcttctataatccaagagcaagcccttgtgaatttgtcatacccatggctaagtatgtgaaagctgtgtaccatacccgtatatctgtgggcatgcgtttccggatgctttttgagacggaggaatctagtgtaaggcgttatatggggacaattacaggaataagtgatcttgatcctgttcgctggccaaactcgcactggcgctcagtaaaggttggatgggacgagtcaactgctggagagaagcagccaagggtatctctttgggagattgaaccgttgacaacttttccaatgtatccatctccttttgctcttggattaaagcgcccatggcctgcaggcctgccttctttatacggtggaaggggtgatggcttgacctcttctcttatgtggcttcgagacagggcaaacccgggtttccagtcactgaatttcagcgggcttggtatgagtccctggatgcagcctaggctggataattccttacttggtctccaatctgacatgtaccagaccatagcagcagcagcagcattacaaagcactacgaagcaagttccaccttcagcaatgcagttccaacagcctcagaacattgctgatagatctgctcttctatcaagtcagattctgcagcaagtacaacctcggtttcagcaaatttaccctcaaaatctcaacgaaaacaaaattcaaggtcatacacaacctgagtacctccaagtccaacagcagcttcaacgctgccaatcatttaatgagcagaagcctccgatgcatccacagcaacaacagcaggaaccacagcagcagcaatgcgtccaaacaccacaggatcaacaaatgcaagaacagaagcatctgcacaacttccactccttgccagatgcattatcggccttttctcagctttccccagccactcactccccaccttccgcattgcagacagttccagcattctcgcatcaacaaaacttcccagatacaaacattagctctctctcaccatctactggcccttcaatgcatggcatgttggggagattaccttccgaagcagcttcgagcctcccatgtgtggcaatgaacgcccctgtatcggtatctgacccatggtcatccaagagagttgcagtggagtctgttaacccttgtcgacctcatgtttcaccacatatagaacatttggatatggcgacgtgtaacatgccgcagagctctgcactagcaccattacctggacgggaatgcctagtggatgaagatgggtgctctgatcctcaaaatcacctcttgtttggtgttcacatagactcgcattcacttctgatgcaagggggcattccagcccttcagaatgataacagttcaggcactattccatactcaacctccaatttcctgagcccttctgagaacgatttccccttgaatcaaccgctacgcagcgcgggctgcttagatgagtcggattatcttccatgtgcagagaatgccgaacaggcaaatcaacagtttgcaacctttgtgaaggtttacaaatccgggaccgtcggaaggttgctcgacatcactagattcagcagctacgacgagctccgtagcgaggtggggcgtctgtttggcctcgagggccagctggaagaccctctgagatcaggctggcagcttgtatttgttgacagggaggacgatgtccttctggttggcgatgacccatggcaggaattcgtgaacagtgtgtcctgtataaagatactttcaccggaggaggtccagcggatgggaaagccgggcatccagctcctgagctcggctccttcaagaaggctgggcaatggctgcgacagctacgcgagcatgcaggagccgagaggcctggacgctgggatggcgccggtgggttcggtcgagttctgaagacggcggagggaagcccaccatggccctcgggtcgaggattactctccctcctgtatgtttctgcagcacttgctagctctgcgacttggaacaaagcacgtagatcaaatggagctctgtgctgctccccgtctgatgatgtcttatggtatagactcgtagcagtaactactacatgttgtatacatgccggcacttcagttcttatcgagtagcaataccgctagtttagtccatccaatcaactacgttcttgttcctatgatcctgttgttgcgatgcagtaaaaccttttttttgtcataataacctgtatattgaaactgttcttggctcc

SEQ ID NO: 125106 - DNA, 1401 bp, Zea Mays
gcatttcggccctctgcctgccaggctgccacaccgccccaagcagatccgggggccctgcccggtccagcggtcctgccactttcgtctgcctcttgctccttcgcagctccgccccgctcctcgccgctgtggcctggtccctttatataacgcctcccccttcctgtccgcgcccctcctccgctgccctcctcgcctccctcgattcagggttcagcgaattcggacagaacccggcgtgtccgtgtcgaccgacccgtccccctgcaagtctgcgacgagtctcctgccgctcttcccggccgggcgaaatggacggtgtcgttgtcaggagggtcatcccttcggataacagttgcctcttcaacgctgtgggctacgtgatggagcacaaccgaaataaggcttctgagctcagacaggtcatagcagcaacagtcgctggtgatcctgagaaattcaatgaagtgtttcttggcaaaccaaatgaagcgtattgtgcttggattttggatcctgaaaagtggggaggagccattgagctctctattctatctgaatactacgggcgtgaaatcgcagcatatgacattcagaccacccgctgtgatctctatggtcaggagaagaattacagtgaaagggccatgctcatttatgatggtttgcattatgatgctctcgctatgtctccggctgaaggtgcacctgaagaatttgaccagacaatcttccccgttaatcatgaccgttccattggtccagcagaaggccttgccctcaacttagtgagggaggcgcaaaggaagaggagctacactgacactgcaaacttcactctgcgctgcggggtgtgccagatcggcgtcatcggtcaacaggaggctgtggaacatgcgcaagccactggccacgtcaacttccaagaatacaaatgacagtacaagatcagactgttgtgctgtaaacttgaccatcatttggttccaactgatattctcctcccgttggatatggttggcgctacattgtatcacagtgtaattcttacggggcaaacagaataatggtcaccttcgttctggacaatgtctatcttgcctgccaatgtcggttgaaattgaaagagcctacaatccattgtcgttctacatgccagaagaggtttgttggcccatgggccggatctatattgggcggtgtggcccggctgtatcatatctggtttatctattaggctttattcggttatttcaattctatgtggattggagtgtattggaatgtattgagatgtattttgacttgttatggatttaaaccgactcaataccattcaatccacatggtttaacggtgaaacgaacaagtccttaacgattttttttttcaaaattc

SEQ ID NO: 125107 - DNA, 614 bp, Zea Mays
acccccacgcaattcccacatctcagcttcgccgccgccctcgttcgcccagcccagccgcctcctcccgtcctccgcctgtccatggaccgccgccatcgagccgtaccttactccgcgcgccagcagcagcagcggttcctccggcccggcgcgctcgcgcggctccgggactcgaggatcgtcgcccgctccgtccggtcgtcggcgtgcctcttgctcccgcggtccgcccctccgtctccgtcccccgcgcccccggtcgtcgccgcggacgagctggccgccgcaccgcgcttcctggggaccacgagcggctctggacggtacccgctccgcaggagggtcgtcgccgccaggggcgtggcgttctcgccgtcgtcgccgtagcctggcacggacggaggcgccgtagctgagaacttgtgactagatttgtgtttagttcagtattgctgtgcagatgtttttgcactttcttggtttacttaaaaaaaaagactagagatttgaggaaggaataatcactccgtttttttttgcttggttcctgattcaactgttcaatcttcacctcgctggcaagatgcgatctggaagcagttgctgacata

SEQ ID NO: 125108 - DNA, 2174 bp, Zea Mays
gctgttcactgtttactgttcagcgcgtgtgcgggtctggaatctggatagagtagagtgtggaactccgagccgccgctcccccgaccccgatctaccagcttcgtgtgtgagcaccgtgccgcggtgattcgattgcccgcgctcgcggtttccgtcgtcgtcgtcgttctctcatcgtacggcggccatcgctagctactgccgctggatggcggtaataaccaggcccgaggggtaggagcggtagttgtttaactgcggcgggcggaggcaagtggcgtgttccggtggactggcactctgacacggtcggttgctgtgcttcgcgtcgcatctaccgacccctcacccacatggaaagcgaggaggtgagctgcagctgcgacggagactgagcgagaagccccccctccctccctccttccttcgacgtcaagctccgccccactccatggattcgatctgggaggcgaggagctgaggccaggacagggggaggagctgctggggggcagggacaggatagcgcggctaagcggcaacggcggcagccatgagctggagacgaggcggaagcggaggcgatggcggggtctcgaggaggtgggccgtcctgctctgcgtcggcagcttctgcctcggcctgctcttcaccaacagaatgtggacgctgcctgaggcaagtgagattgctaggccgaatgcgaatgtggaggaaggcaccgtgccgattgccgcggagtgtggttctaaaaaggtccaagaaaagcaggattacagagatattttacaggttcaagatagccatcatgatgtacaaacactggataagacgatagcaagcctagagacagagctctcagctgcaagatcgctgcaggaatccctgctgaacggctcccctgtcgcggaagagtataaagtttctgaatcaatcgggaggcgaaagtaccttatggtgatagggatcaacaccgcattcagcagccgcaagaggagagactccatacgttacacctggatgccccaaggtgaaaagaggaaaaagcttgaagaagagaaggggatcattattcggttcgtcattggccacagtgctatatcaggtggaattgttgatagagcaatcgaagcagaggacaggaagcatggggatttcatgaggatagatcatgttgaagggtaccttgcattgtcaggcaaaaccaagacctactttgctacagctgtttcactatgggacgccgacttttatgttaaggttgacgatgatgtccatgtgaacatagcaacgctcggacagattctgtcgaaacatgcattgaagccgagagtgtacatcggatgcatgaaatctggacctgtcttatccgaaaagggcgtgagatattatgaacccgagcactggaagttcggcgaatcggggaacaagtacttccggcatgctaccggtcaattatatgctgtttcaaaggacctggcgacttatatatctataaacaagcatatccttcacaagtacataaacgaagacgtttcgttaggatcttggttcatcgggctagatgttgagcatatcgatgaccggaggctttgctgtggcactccgcctgattgcgaatggaaggctcaggcggggaacgtctgcgccgcgtcgttcgactggaggtgcagcggcatatgcaactccgagggaaggatctgggaggtccacaataagtgcgctgagggcgagaaggcgctgtggaacgccactttctagcacacacacaaaataaaaaaggaagcagcaacagaagctgctatataatagatcaaaccattttggtttgttgtctgtacattgtcccacggtttgtgtgtacgtaattcattgtaggtagctgcgggtttttttttttggttgttgttgtaacgggcgaaagcggaccaccattttaggtagtgtctgtcagccggtgccggtgaagatgatggagaaggatatggtgtgagcggtgatgtattcttttgtgcggtaaatgtgtggaggtggtcatcttgttgtgccgatctcctgtactgcatgtatggctgccgagatacgtgagaccgacaaacactttcgtgccataaaagtagagctagtaaataaatctggtaattgctgtccactctatgccgtaaaagaa

SEQ ID NO: 125109 - DNA, 2242 bp, Zea Mays
gctgttcactgtttactgttcagcgcgtgtgcgggtctggaatctggatagagtagagtgtggaactccgagccgccgctcccccgaccccgatctaccagcttcgtgtgtgagcaccgtgccgcggtgattcgattgcccgcgctcgcggtttccgtcgtcgtcgtcgttctctcatcgtacggcggccatcgctagctactgccgctggatggcggtaataaccaggcccgaggggtaggagcggtagttgtttaactgcggcgggcggaggcaagtggcgtgttccggtggactggcactctgacacggtcggttgctgtgcttcgcgtcgcatctaccgacccctcacccacatggaaagcgaggaggtgagctgcagctgcgacggagactgagcgagaagccccccctccctccctccttccttcgacgtcaagctccgccccactccatggattcgatctgggaggcgaggagctgaggccaggacagggggaggagctgctggggggcagggacaggatagcgcggctaagcggcaacggcggcagccatgagctggagacgaggcggaagcggaggcgatggcggggtctcgaggaggtgggccgtcctgctctgcgtcggcagcttctgcctcggcctgctcttcaccaacagaatgtggacgctgcctgaggcaagtgagattgctaggccgaatgcgaatgtggaggaaggcaccgtgccgattgccgcggagtgtggttctaaaaaggtccaagaaaagcaggattacagagatattttacaggttcaagatagccatcatgatgtacaaacactggataagacgatagcaagcctagagacagagctctcagctgcaagatcgctgcaggaatccctgctgaacggctcccctgtcgcggaagagtataaagtttctgaatcaatcgggaggcgaaagtaccttatggtgatagggatcaacaccgcattcagcagccgcaagaggagagactccatacgttacacctggatgccccaaggttctagtactaaaatatactcatacatgccatccatggatagctaataatatactatttcaaatcaggtgaaaagaggaaaaagcttgaagaagagaaggggatcattattcggttcgtcattggccacagtgctatatcaggtggaattgttgatagagcaatcgaagcagaggacaggaagcatggggatttcatgaggatagatcatgttgaagggtaccttgcattgtcaggcaaaaccaagacctactttgctacagctgtttcactatgggacgccgacttttatgttaaggttgacgatgatgtccatgtgaacatagcaacgctcggacagattctgtcgaaacatgcattgaagccgagagtgtacatcggatgcatgaaatctggacctgtcttatccgaaaagggcgtgagatattatgaacccgagcactggaagttcggcgaatcggggaacaagtacttccggcatgctaccggtcaattatatgctgtttcaaaggacctggcgacttatatatctataaacaagcatatccttcacaagtacataaacgaagacgtttcgttaggatcttggttcatcgggctagatgttgagcatatcgatgaccggaggctttgctgtggcactccgcctgattgcgaatggaaggctcaggcggggaacgtctgcgccgcgtcgttcgactggaggtgcagcggcatatgcaactccgagggaaggatctgggaggtccacaataagtgcgctgagggcgagaaggcgctgtggaacgccactttctagcacacacacaaaataaaaaaggaagcagcaacagaagctgctatataatagatcaaaccattttggtttgttgtctgtacattgtcccacggtttgtgtgtacgtaattcattgtaggtagctgcgggtttttttttttggttgttgttgtaacgggcgaaagcggaccaccattttaggtagtgtctgtcagccggtgccggtgaagatgatggagaaggatatggtgtgagcggtgatgtattcttttgtgcggtaaatgtgtggaggtggtcatcttgttgtgccgatctcctgtactgcatgtatggctgccgagatacgtgagaccgacaaacactttcgtgccataaaagtagagctagtaaataaatctggtaattgctgtccactctatgccgtaaaagaa

SEQ ID NO: 125110 - DNA, 925 bp, Zea Mays
acacgctcgcgattcaacaaagacgtacgtacatgcacaaaactagagcgagctgtgtgtgtgtgtgttcgtcatttcctcgatcatggcgaaggcgcaggcgcaggtggcggcgaggttcatgatggaggcgccgccgccgcaggtggtgtcggtcatgcggcggaggaaggcgccgaggagcctgagcaccatcgccgaggacgacagggagatgctggcgccgtgcgggtcaccgtcggaccacggccacgcgcaggcgcaggtggcggcgaggttcacgacggaggtggcgccgccgcaggtggtgtcggtcatgcgacgaaggaaggggccgaggagcctggacaccatcgccgaggacgacagggagcagcagctggcgtgcgggtcgccatcggaccacggcctcgcgacggcgtggtcgtcgctccagaggataccgacgccaccgcagccgccgcgggagcgcgcaggtgggtccgtgacgagggacctcagcaagaacttcttggactcccacggctgccagcaggccagcggctgggagggtggacacatgctaggccaccggcgagccgtgcatgcgctggagcttcacaaggtcggagcttgttgaagagggaagagagaaaatctagcttagctgcagtgagcttgttcgggagaaatatatttgtaccacttccacacgtgcgctcatgcatgatacttcctccgtttttttatttaccacattttagtaaaaaatgaactagcggctgataaatattcaaaaacggagataatattattttggcttagctttatcacgcgtgatgtggagagtatatatgtttgctgtgaagttgtttttcatccagcttcaatttcgcttgaaataactgtaatagttaatcaaaataaacatacgatattctctcta

SEQ ID NO: 125111 - DNA, 1018 bp, Zea Mays
gcacacgctcgcgattcaacaaagacgtacgtacatgcacaaaactagagcgagctgtgtgtgtgtgtgttcgtcatttcctcgatcatggcgaaggcgcaggcgcaggtggcggcgaggttcatgatggaggcgccgccgccgcaggtggtgtcggtcatgcggcggaggaaggcgccgaggagcctgagcaccatcgccgaggacgacagggagatgctggcgccgtgcgggtcaccgtcggaccacggccacgtacatacacataactagagcgagtagagataccgtctcttactgtgtgtgtgtgtgtgtgtgtttatcaactcctcgatgcatggcgaaggcgcaggcgcaggtggcggcgaggttcacgacggaggtggcgccgccgcaggtggtgtcggtcatgcgacgaaggaaggggccgaggagcctggacaccatcgccgaggacgacagggagcagcagctggcgtgcgggtcgccatcggaccacggcctcgcgacggcgtggtcgtcgctccagaggataccgacgccaccgcagccgccgcgggagcgcgcaggtgggtccgtgacgagggacctcagcaagaacttcttggactcccacggctgccagcaggccagcggctgggagggtggacacatgctaggccaccggcgagccgtgcatgcgctggagcttcacaaggtcggagcttgttgaagagggaagagagaaaatctagcttagctgcagtgagcttgttcgggagaaatatatttgtaccacttccacacgtgcgctcatgcatgatacttcctccgtttttttatttaccacattttagtaaaaaatgaactagcggctgataaatattcaaaaacggagataatattattttggcttagctttatcacgcgtgatgtggagagtatatatgtttgctgtgaagttgtttttcatccagcttcaatttcgcttgaaataactgtaatagttaatcaaaataaacatacgatattctctcta

SEQ ID NO: 125112 - DNA, 860 bp, Zea Mays
atatttaagctccagccccaagacatcacatcacatatccgttgtggcagcagccttcgtgcaggcatggcgagctcatcttgtgcactgctgggtctggcctgcttcgtgctcctggcggcggcagccggcgccacgcagtacaaggtcggcggcgacaatggctgggccgtgccggacgccaccgccgagtcgttcaacacctgggcggagaagaccagcttccagatcggcgacagcctcttgttcgtgtaccccaaggacaaggactcggtgctgctggtggagccggccgactacaacgcctgcaacacctcctcctacgacaagcagttcgacgacggcagcacgtccgtggcgctggaccgcgccggcgccttcttcttcatcagcggcgtcgaggccaactgccgcgccaacgagaagctcatcgtcatggtcgccggcgcgggcgcgccggcgccggccccggaccggcagggctccggctcttcctcctccccgtcgacgtccgcgccggtaccctccaagggtggcggcgccccggtgccgccgtcctcgcctaaggcccccgccgccaagaactccacggccaagggcgcgcctcccgccgccggcaccgacaggaacggcgctggtgctggactcgccgtggcaggcctcgtcgcctcggttgcaggatgcgtcgcccacgccatgcttgctctctgaaaccgaaaactgctggatgcagtgcagtcgccgtgtagtgtaacaaaccgtgtgggattgtgaacagagtgtatctttcgtgttcgttgcgattcagcgggaaaaaacaaatttaattgaatgctcgactgcaatgtgatcatggcgct

SEQ ID NO: 125113 - DNA, 1249 bp, Zea Mays
gaacctcctccactccagcacgtacaagagctctcgccaaagcctaaatttagctacgacccgcgtagcttctcacgtactcaccacccatggcgaagccaagtagctacggtcttgcgcttcttgcttgcgccgccgtcgccgctgcggtcgccggcggaacgcagttcacggtcggcggcgccaatggctggagcgtgcccgccgccggcgcggagcccttcaatgcttgggcggagaggacgaggtttcagatcggagacgccctagtgttcgtgtaccccaaggaccaagacgcggtgctgctggtggagccggcgggctacaacgcgtgcaacacgtcgtcgtacgtgaggaagttcgacgacggcgacaccgtggtcgcgctcgacagcgccggcccgctcttcttcatcagtggcgtcgaggccaactgccgcgccgacgagaagctcatcgtcatggtcctcgccgcccgcagcaacggcaccggcgcgccggctccgagcacggcgcccccgcctccggctcccgccagctccgcgccgcccacgccggcgtcgcccgctcctaagggcgcccccccgaccacggcggcgtcgcctccgccgccctcggcctctgctcccgcaacgacaccggccacgccgccgcccgccgcgtcggcggcgccccctgctccgagggcgtcgtcaaccccgccgcctccatctgccccggccggtgccccgccggcgcccgcggcaagctctccggctccgagcgcacatggggcgacggataactccacgggcacgccgtcgtcgcctcccgccggctcctccaaggacaagaacggcgccgccttcacggtggccacaggtttggccagctcgttcggaacctgcatccttggctacgccatgcttgctctctgaagtgaagtgggccgccgtggaagactccagtaaatatgtgtgtgtttacgtgtaatttaattgagacatgcgatttgtgcatgttattgctagatcttgcattcgttttccgccggatgaataagaaatcaaccattcgttattcctgagatccggttggttaacacttagtatgggctcgtttggttggtgcctgggcaggggatgctggccaggagcccaggaggtccatctagcttcagactcggttccttgatcgagtccgggaacatatacagcattctccattttgttcctgactttcttattaattaactttctatgttccatct

SEQ ID NO: 125114 - DNA, 111 bp, Zea Mays
ttttttttctgtttttgccatgttcaaaatggagtgaacacagccaccttcgttttatctgtcacctcacaatctttatggaattctgatttctaatccagtgaggtagaa

SEQ ID NO: 125115 - DNA, 1389 bp, Zea Mays
tgttttctttcgtttttttaaattcaaacaacatttattcatgattaagccatatgcggtcgcacgatagttttgggtaacgagaacacaactggtccatgaaaccagctcagtcacgactcacgacacaaaccatacaaatactttgaaagacagcaccatccatgggcaatggcagagacactagataacccagatacagcagcagcttcaacgactgatggcttaataaccaccgcgaagacggagcaccaggtggagggtgctctccttctggatattgtagtctgcaagggtgcgaccatcctccagctgcttgccggcgaagatcagacgctgctggtctgggggaatcccctccttgtcctggatcttagccttcacgttgtcgatggtgtcagagctctcaacctccagggttatggtcttgccagtcaaggtcttcacaaagatctgcataccgcccctcaggcggagcaccagatggagggtgctctccttctggatgttgtagtcagccaaggtgcgaccatcctccagctgcttgccggcgaagatcagccgctgctggtccggggggataccctccttgtcctggatcttggccttcacattatcaatggtgtcggagctctcaacctccaaggtgatggtcttgccagtcaatgtcttcacgaagatctgcattcctcccctgaggcgcagcaccaggtggagggtgctctccttctgaatgttgtaatccgcaagggtgcgtccatcctccagctgcttgccggcaaagataagacgctgctggtccggcgggatgccctccttgtcctggatcttggccttgacattgtcaatggtatctgaagactccacctcaagagtgatggtcttgccagtaagggttttcacaaagatctgcataccacccctaagacgcagcaccaagtggagggtgctctccttctggatgttgtagtcagcaagggtcctcccatcctccaactgcttgccggcaaagatgagacgttgctggtcaggtgggatgccctccttgtcctggatctttgccttgacattgtcaatggtgtctgaggactccacctcaagggtgattgtcttgccagtcaaggtcttgacaaagatctgcatgcctcccctaaggcgcagcaccaagtggagggttgactccttctggatgttgtagtcagcaagtgtgcgtccgtcctcaagctgcttgccggcgaagataagccgctgctggtcaggagggatgccctccttgtcctggatcttagccttgacattgtcaatggtgtcagaagactccacctcgagggtgatagtcttgccggtgagggtcttcacaaagatctgcatctgcaaggaaaccaaaaa

SEQ ID NO: 125116 - DNA, 2358 bp, Zea Mays
accaagttaacattcaacaaaccaaacacgttaagctgtaagccatagtgggaaactgagcctgacagaatcaagttaacattcagcaagaaacggtagaaagcaagaacctggaggggtccaataaacaccagcgaatcaaatttgatcccaggcagttaattaggagatataaccagaaaaaaacataatgagcagacttttaagttcaaatatcaaacttcataaggattcaagccatactgctgcagaagagttttgggtacaacacagaggacacaacaggtccattaaaccaacgaagccacaaccacgattcatgacacacaaaccacagatgtttattagacgacgacatccatatagaggtacaccagagggcaccagacgacgcagatacccaggtacagcagcagcttaaatgaaccatggcttactgaccaccgcggaggcggagcaccaggtggagagtgctctccttctggatgttgtagtctgctagggtgcggccatcctccagctgcttgccggcgaagatcagacgctgctggtctggggggatgccctctttgtcctggatcttcgccttcacgttgtcgatggtgtcggagctctcaacctccagggttatggtcttgccagtcaaggtcttcacaaagatctgcataccacctcgcaagcggagcaccaggtggagggtgctctccttctggatgttgtagtcggcgagggtacggccatcctccagctgcttgccagcaaagatcaggcgctgctggtccggtggaatgccctccttgtcctggatcttggctttgacattatcgattgtgtcagacgactccacctccaaggtgatggtcttgccagtcaatgtcttcacaaagatctgcatgccacccctgaggcggagcaccaagtggagggtgctctccttctggatgttgtagtcagccaaggtgcgaccatcctccagctgcttgccggcgaagatcagccgctgctggtccggtggaatgccctccttgtcctggatcttggccttgacgttgtcaatggtgtctgaggactccacctcaagggtgatcgtcttgccagtaagagtcttcacgaagatctgcatgccacccctgagacgcagcaccaagtggagggtgctctccttctggatgttgtaatctgcaagggtacggccatcctccagctgcttgccagcaaagatgagccgctgctggtccggtggaatgccctccttgtcctggatcttggccttgacattgtcgatggtgtccgaggactccacctcaagggtgatcgtcttgccagtaagtgtcttcacgaagatctgcatgccacccctgagacgcagcaccaagtggagggtgctctccttctgaatgttgtagtcggcaagcgtgcgcccgtcctcgagctgcttgccggcaaaaatgagccgctgctggtccggagggatgccctccttgtcctggatcttggccttgacattgtcaatggtatcagaagactcgacctcaagggtgatagtcttgccagtcagagtcttcacgaagatctgcatgccgcccctgagacgcaacaccaagtggagggtgctctccttctgaatgttgtagtcggccagcgtgcgcccgtcctcgagctgcttgccagcaaaaatgagccgctgctggtccggagggatgccctccttgtcctggatcttggccttgacgttgtcgatggtgtcagaagactccacctcgagggtgatagtctttccagtgagggtcttgacgaagatctgcatgcctcccctgaggcggagaacaaggtggagggtgctctccttctggatgttgtagtcggcaagtgtgcgcccgtcctcgagctgcttgccagcgaagatgagccgctgctggtccgggggaatgccttccttgtcctggatcttggccttgacgttgtcaatggtgtcagaggactccacctcgagggtgatagtctttccagtgagagtcttgacgaagatctgcatctgcataagaatcaccaaacaacagggtgactatcaacaaaaaagaacagtctcaaaggaaataaacagcatatgaactatgaaggcgccatgcatgctcatcacactgggtattcaaaatctacacatagctgcagcatatgccaccatacaagtacatcaaaatcataataattagaagacatactgatatattagaatatataggtactcaagaacgattaaatcatagtagcatgttacttcatgtatctaagcatgtatatacatctatctaagtaccagtaaaatcaagataatttaagacatactgatttattaga

SEQ ID NO: 125117 - DNA, 1615 bp, Zea Mays
acttctaacacttttcccgtctcccccttcctcgccgcctccactacagggctttgctcctcccaactctcgaaaccctacccacgcgatgagagatcgatcggtcgagcgcgaattccccagccgcgagcggggggatcggccgccgcccggggtgctgggtcccccgcgccgcgggccggcttacaagacgaagttgtgcgcgctgtggcagcgcggcggctgttcccgcgacacatgcagcttcgcgcacggacacgccgagctccgccggttccccggatcgcgcacctcgttcccaccccgcgccgggagaagagattatagaggtggtgactttagagataggtttgataggaggcgctcacctcataggaggcattcccctgatggagattccaggggccatcgctcccttcgtgaccgacgaccaaattcccaagaaagggaatctagctattcacggtctcccagtaggaagagtgaaatgaggcatgataagaagcctgatgatggagaaactaactcatctaggagtctcagtgtctctgacaataatgatgatagaaaaaaggagacactgttaagtggtgatgataaagaggatcacgaaatacagctcaaacaaataagacaggacatggaacttttgcgtgatgataaatctctcttggagataattttggatgagaagaatgctgaagtgcgcaagatttctagcagattaaatgatcttgatctgcagttaaggaaggagaaagaggaatgccacaggatgacctcaaaaattaaaaagttccttaaagcccatgctcgctttttgaaagcacaggaagaattaaaaaggtcacaagctcgttttgagagactcggtgatttacttgcttcagatattctgaagcgtggtgctaatgaagaagtttctagtatcaatgttgatgaagatccaaatgttccttatgaaaggagcccaaatgctgctatagctaagaagagatcaataccatactcaacaagtgaagaagcgaaagccgtgaagaaaagaagagagcgggactctgacacaactaggccagataaatataggtttgaaggtactattgcaggatttgaaaaactaagcaagggaaccgagccaacaaaatctttatatttgaagaagaaactgtgggaagatgaaaaggataagataggcaactttgtctcctcagccaacaccgacaagtacgaggctgatgacgaggaagtcgacgtggaatgattagaatgccgagatggtactggaatgagctatatagctctcgcgcctgtgtaaagcattatgtaatatgtatttgatgctggagtttaccttgcataaaaagaatcgtcattaatgatccttggtggatgcggtttaagcactcaacttttttgttaatttgatgaaggcaacatgccctgttacctgtacctaatataccacgtggtggctagctagccagccttgtcagtgccctggtacttttgggtggtcttgctgtgctgttcgcggcacttgaaaactgatgttttgtaggactgatgttttgtaggagtattatttgaatggtagccgttgatcttcggctgttga

SEQ ID NO: 125118 - DNA, 1841 bp, Zea Mays
gacggcattacctaaaccataccatagaccatcaatcacttctaacacttttcccgtctcccccttcctcgccgcctccactacagggctttgctcctcccaactctcgaaaccctacccacgcgatgagagatcgatcggtcgagcgcgaattccccagccgcgagcggggggatcggccgccgcccggggtgctgggtcccccgcgccgcgggccggcttacaagacgaagttgtgcgcgctgtggcagcgcggcggctgttcccgcgacacatgcagcttcgcgcacggacacgccgagctccgccggttccccggatcgcgcacctcgttcccaccccgcgccgggagaagagattatagaggtggtgactttagagataggtttgataggaggcgctcacctcataggaggcattcccctgatggagattccaggggccatcgctcccttcgtgaccgacgaccaaattcccaagaaagggaatctagctattcacggtctcccagtaggaagagtgaaatgaggcatgataagaagcctgatgatggagaaactaactcatctaggagtctcagtgtctctgacaataatgatgatagaaaaaaggagacactgttaagtggtgatgataaagaggatcacgaaatacagctcaaacaaataagacaggacatggaacttttgcgtgatgataaatctctcttggagataattttggatgagaagaatgctgaagtgcgcaagatttctagcagattaaatgatcttgatctgcagttaaggaaggagaaagaggaatgccacaggatgacctcaaaaattaaaaagttccttaaagcccatgctcgctttttgaaagcacaggaagaattaaaaaggtcacaagctcgttttgagagactcggtgatttacttgcttcagatattctgaagcgtggtgctaatgaagaagtttctagtatcaatgttgatgaagatccaaatgttccttatgaaaggagcccaaatgctgctatagctaagaagagatcaataccatactcaacaagtgaagaagcgaaagccgtgaagaaaagaagagagcgggactctgacacaactaggccagataaatataggtttgaaggtactattgcaggatttgaaaaactaagcaagggaaccgagccaacaaaatctttatatttgaagaagaaactgtgggaagatgaaaaggataagataggcaactttgtctcctcagccaacaccgacaaggtcaaagaatctccggtcaaacatgttttgccctccactggtatggctgctcatgctttggacgatctgtttgaagctgttgaactggaggatagacgtgacacatcaatagaaaatgatgctgatgacgaaactaggtcgcctgttatgcccccacaaccaccaccggtggttaatacttacgagcagtacgaggctgatgacgaggaagtcgacgtggaatgattagaatgccgagatggtactggaatgagctatatagctctcgcgcctgtgtaaagcattatgtaatatgtatttgatgctggagtttaccttgcataaaaagaatcgtcattaatgatccttggtggatgcggtttaagcactcaacttttttgttaatttgatgaaggcaacatgccctgttacctgtacctaatataccacgtggtggctagctagccagccttgtcagtgccctggtacttttgggtggtcttgctgtgctgttcgcggcacttgaaaactgatgttttgtaggactgatgttttgtaggagtattatttgaatggtagccgttgatcttcggctgttga

SEQ ID NO: 125119 - DNA, 2397 bp, Zea Mays
taacacttttcccgtctcccccttcctcgccgcctccactacagggctttgctcctcccaactctcgaaaccctacccacgcgatgagagatcgatcggtcgagcgcgaattccccagccgcgagcggggggatcggccgccgcccggggtgctgggtcccccgcgccgcgggccggcttacaagacgaagttgtgcgcgctgtggcagcgcggcggctgttcccgcgacacatgcagcttcgcgcacggacacgccgagctccgccggttccccggatcgcgcacctcgttcccaccccgcgccgttgctgcagatagaaaataattctcacaagtggaagcttgttgcagtctgcagaattaggcggcattcttactggttgccttttgatttaactaccattcaaattagcagactcctgagcagatttattagattcaactgctgccagaggataagatgacttttatatagattcttcagttggcatttcaacgatttattgtgacctgtaatgcttgtccctacatcaagaaggtgggcatatcagtatcttggatgatgactccactgaatgatgtccataatacatttgatgtgctatggtcatgtgcttagcagctttaacggttaattgcacatacccttgaatattgtgcatcagttagatcattgggaagtgttattctcactggtaattgcaagttattgtaattcttgcaagtcgccgcggaagatatctggacaaatgatagtagatttatattgtgatattgggattatagaagacatcaacttgtcataattgttatgtgatgttgttcatggtcttcatcaatttgattttcaacaatcaacattatgagtttggtatcatcttaatgggtatgtcagtggtttcataccatactttggtatctacccatggcattaatttttggctctactttgttgtggctaatgatattatcctggagacccttctacttattgtgcattgaattatcttatagctcaaaggctgtgggagaagagattatagaggtggtgactttagagataggtttgataggaggcgctcacctcataggaggcattcccctgatggagattccaggggccatcgctcccttcgtgaccgacgaccaaattcccaagaaagggaatctagctattcacggtctcccagtaggaagagtgaaatgaggcatgataagaagcctgatgatggagaaactaactcatctaggagtctcagtgtctctgacaataatgatgatagaaaaaaggagacactgttaagtggtgatgataaagaggatcacgaaatacagctcaaacaaataagacaggacatggaacttttgcgtgatgataaatctctcttggagataattttggatgagaagaatgctgaagtgcgcaagatttctagcagattaaatgatcttgatctgcagttaaggaaggagaaagaggaatgccacaggatgacctcaaaaattaaaaagttccttaaagcccatgctcgctttttgaaagcacaggaagaattaaaaaggtcacaagctcgttttgagagactcggtgatttacttgcttcagatattctgaagcgtggtgctaatgaagaagtttctagtatcaatgttgatgaagatccaaatgttccttatgaaaggagcccaaatgctgctatagctaagaagagatcaataccatactcaacaagtgaagaagcgaaagccgtgaagaaaagaagagagcgggactctgacacaactaggccagataaatataggtttgaaggtactattgcaggatttgaaaaactaagcaagggaaccgagccaacaaaatctttatatttgaagaagaaactgtgggaagatgaaaaggataagataggcaactttgtctcctcagccaacaccgacaaggtcaaagaatctccggtcaaacatgttttgccctccactggtatggctgctcatgctttggacgatctgtttgaagctgttgaactggaggatagacgtgacacatcaatagaaaatgatgctgatgacgaaactaggtcgcctgttatgcccccacaaccaccaccggtggttaatacttacgagcagtacgaggctgatgacgaggaagtcgacgtggaatgattagaatgccgagatggtactggaatgagctatatagctctcgcgcctgtgtaaagcattatgtaatatgtatttgatgctggagtttaccttgcataaaaagaatcgtcattaatgatccttggtggatgcggtttaagcactcaacttttttgttaatttgatgaaggcaacatgccctgttacctgtacctaatataccacgtggtggctagctagccagccttgtc

SEQ ID NO: 125120 - DNA, 1696 bp, Zea Mays
gacggcattacctaaaccataccatagaccatcaatcacttctaacacttttcccgtctcccccttcctcgccgcctccactacagggctttgctcctcccaactctcgaaaccctacccacgcgatgagagatcgatcggtcgagcgcgaattccccagccgcgagcggggggatcggccgccgcccggggtgctgggtcccccgcgccgcgggccggcttacaagacgaagttgtgcgcgctgtggcagcgcggcggctgttcccgcgacacatgcagcttcgcgcacggacacgccgagctccgccggttccccggatcgcgcacctcgttcccaccccgcgccgggagaagagattatagaggtggtgactttagagataggtttgataggaggcgctcacctcataggaggcattcccctgatggagattccaggggccatcgctcccttcgtgaccgacgaccaaattcccaagaaagggaatctagctattcacggtctcccagtaggaagagtgaaatgaggcatgataagaagcctgatgatggagaaactaactcatctaggagtctcagtgtctctgacaataatgatgatagaaaaaaggagacactgttaagtggtgatgataaagaggatcacgaaatacagctcaaacaaataagacaggacatggaacttttgcgtgatgataaatctctcttggagataattttggatgagaagaatgctgaagtgcgcaagatttctagcagattaaatgatcttgatctgcagttaaggaaggagaaagaggaatgccacaggatgacctcaaaaattaaaaagttccttaaagcccatgctcgctttttgaaagcacaggaagaattaaaaaggtcacaagctcgttttgagagactcggtgatttacttgcttcagatattctgaagcgtggtgctaatgaagaagtttctagtatcaatgttgatgaagatccaaatgttccttatgaaaggagcccaaatgctgctatagctaagaagagatcaataccatactcaacaagtgaagaagcgaaagccgtgaagaaaagaagagagcgggactctgacacaactaggccagataaatataggtttgaaggtactattgcaggatttgaaaaactaagcaagggaaccgagccaacaaaatctttatatttgaagaagaaactgtgggaagatgaaaaggataagataggcaactttgtctcctcagccaacaccgacaaggtcaaagaatctccggtcaaacatgttttgccctccactggtatggctgctcatgctttggacgatctgtttgaagctgttgaactggaggatagacgtgacacatcaatagaaaatgatgctgatgacgaaactaggtcgcctgttatgcccccacaaccaccaccggtggttaatacttacgagcagtacgaggctgatgacgaggaagtcgacgtggaatgattagaatgccgagatggtactggaatgagctatatagctctcgcgcctgtgtaaagcattatgtaatatgtatttgatgctggagtttaccttgcataaaaagaatcgtcattaatgatccttggtggatgcggtttaagcactcaacttttttgttaatttgatgaaggcaacatgccctgttacctgtacctaatataccacgtggt

SEQ ID NO: 125121 - DNA, 2265 bp, Zea Mays
gacggcattacctaaaccataccatagaccatcaatcacttctaacacttttcccgtctcccccttcctcgccgcctccactacagggctttgctcctcccaactctcgaaaccctacccacgcgatgagagatcgatcggtcgagcgcgaattccccagccgcgagcggggggatcggccgccgcccggggtgctgggtcccccgcgccgcgggccggcttacaagacgaagttgtgcgcgctgtggcagcgcggcggctgttcccgcgacacatgcagcttcgcgcacggacacgccgagctccgccggttccccggatcgcgcacctcgttcccaccccgcgccgttgctgcagatagaaaataattctcacaagtggaagcttgttgcagtctgcagaattaggcggcattcttactggttgccttttgatttaactaccattcaaattagcagactcctgagcagatttattagattcaactgctgccagaggataagatgacttttatatagattcttcagttggcatttcaacgatttattgtgacctgtaatgcttgtccctacatcaagaaggtgggcatatcagtatcttggatgatgactccactgaatgatgtccataatacatttgatgtgctatggtcatgtgcttagcagctttaacggttaattgcacatacccttgaatattgtgcatcagttagatcattgggaagtgttattctcactggtaattgcaagttattgtaattcttgcaagtcgccgcggaagatatctggacaaatgatagtagatttatattgtgatattgggattatagaagacatcaacttgtcataattgttatgtgatgttgttcatggtcttcatcaatttgattttcaacaatcaacattatgagtttggtatcatcttaatgggtatgtcagtggtttcataccatactttggtatctacccatggcattaatttttggctctactttgttgtggctaatgatattatcctggagacccttctacttattgtgcattgaattatcttatagctcaaaggctgtggtaaggttacaggcttatgggtgacctatctctattagttcatattgacacattttttgttcagcttcatttatccttttcttgtataaatttttctctatcctgacttctagggagaagagattatagaggtggtgactttagagataggtttgataggaggcgctcacctcataggaggcattcccctgatggagattccaggggccatcgctcccttcgtgaccgacgaccaaattcccaagaaagggaatctagctattcacggtctcccagtaggaagagtgaaatgaggcatgataagaagcctgatgatggagaaactaactcatctaggagtctcagtgtctctgacaataatgatgatagaaaaaaggagacactgttaagtggtgatgataaagaggatcacgaaatacagataattttggatgagaagaatgctgaagtgcgcaagatttctagcagattaaatgatcttgatctgcagttaaggaaggagaaagaggaatgccacaggatgacctcaaaaattaaaaagttccttaaagcccatgctcgctttttgaaagcacaggaagaattaaaaaggtcacaagctcgttttgagagactcggtgatttacttgcttcagatattctgaagcgtggtgctaatgaagaagtttctagtatcaatgttgatgaagatccaaatgttccttatgaaaggagcccaaatgctgctatagctaagaagagatcaataccatactcaacaagtgaagaagcgaaagccgtgaagaaaagaagagagcgggactctgacacaactaggccagataaatataggtttgaaggtactattgcaggatttgaaaaactaagcaagggaaccgagccaacaaaatctttatatttgaagaagaaactgtgggaagatgaaaaggataagataggcaactttgtctcctcagccaacaccgacaaggtcaaagaatctccggtcaaacatgttttgccctccactggtatggctgctcatgctttggacgatctgtttgaagctgttgaactggaggatagacgtgacacatcaatagaaaatgatgctgatgacgaaactaggtcgcctgttatgcccccacaaccaccaccggtggttaatacttacgagcagtacgaggctgatgacgaggaagtcgacgtggaatga

SEQ ID NO: 125122 - DNA, 1428 bp, Zea Mays
acttctaacacttttcccgtctcccccttcctcgccgcctccactacagggctttgctcctcccaactctcgaaaccctacccacgcgatgagagatcgatcggtcgagcgcgaattccccagccgcgagcggggggatcggccgccgcccggggtgctgggtcccccgcgccgcgggccggcttacaagacgaagttgtgcgcgctgtggcagcgcggcggctgttcccgcgacacatgcagcttcgcgcacggacacgccgagctccgccggttccccggatcgcgcacctcgttcccaccccgcgccgggagaagagattatagaggtggtgactttagagataggtttgataggaggcgctcacctcataggaggcattcccctgatggagattccaggggccatcgctcccttcgtgaccgacgaccaaattcccaagaaagggaatctagctattcacggtctcccagtaggaagagtgaaatgaggcatgataagaagcctgatgatggagaaactaactcatctaggagtctcagtgtctctgacaataatgatgatagaaaaaaggagacactgttaagtggtgatgataaagaggatcacgaaatacagctcaaacaaataagacaggacatggaacttttgcgtgatgataaatctctcttggagataattttggatgagaagaatgctgaagtgcgcaagatttctagcagattaaatgatcttgatctgcagttaaggaaggagaaagaggaatgccacaggatgacctcaaaaattaaaaagttccttaaagcccatgctcgctttttgaaagcacaggaagaattaaaaagatattctgaagcgtggtgctaatgaagaagtttctagtatcaatgttgatgaagatccaaatgttccttatgaaaggagcccaaatgctgctatagctaagaagagatcaataccatactcaacaagtgaagaagcgaaagccgtgaagaaaagaagagagcgggactctgacacaactaggccagataaatataggtttgaaggtactattgcaggatttgaaaaactaagcaagggaaccgagccaacaaaatctttatatttgaagaagaaactgtgggaagatgaaaaggataagataggcaactttgtctcctcagccaacaccgacaaggtcaaagaatctccggtcaaacatgttttgccctccactggtatggctgctcatgctttggacgatctgtttgaagctgttgaactggaggatagacgtgacacatcaatagaaaatgatgctgatgacgaaactaggtcgcctgttatgcccccacaaccaccaccggtggttaatacttacgagcaggtgactaaccttgcatcctatgtccttcgaagaacagagtaaaaaaatggatttgcgt

SEQ ID NO: 125123 - DNA, 1825 bp, Zea Mays
gcactcctcaggtcctaggttcgactccccgttggggcgaatttcgggctatggttaaaaaaccccctcgtctgtcccacgccaaagcacatgtgtaaggcccggtcgcggtcgtttctcacatgggctacggtgccgctgtgtatgggtggggcaggggtttggggttttctcgacctgtgtgagaaggtcttcttcttaatataatgcccgagggctatctaccccccctccccgcaggtcgatttttgtttttaaattatgaagtttggaactcaaataactaaaaatatttaacattgaatattatgttaaagcatcctctctgaaaccattattttcatatttttgcaaactcacagttgtggcatttattcaccatactattcactgtattggcatatgcatgtaagatgtgcccctagagaacatgcaagcacattttatgtcaacgattactaagttcatgatgtggtatctgtttgtggttatctaatgtgtccaattctaatgcacttcttaaaaaaacaaccaaatctgcttgttacaaatataattgcttattctgataaaatattctgaatagaataagttacatacctctgaactcttatcttactgattttttgggttcccaataaatatgtgaaatatggaacatattgatattgtagcttacttttccactctctctcagtgaaatgaggcatgataagaagcctgatgatggagaaactaactcatctaggagtctcagtgtctctgacaataatgatgatagaaaaaaggagacactgttaagtggtgatgataaagaggatcacgaaatacagctcaaacaaataagacaggacatggaacttttgcgtgatgataaatctctcttggagataattttggatgagaagaatgctgaagtgcgcaagatttctagcagattaaatgatcttgatctgcagttaaggaaggagaaagaggaatgccacaggatgacctcaaaaattaaaaagttccttaaagcccatgctcgctttttgaaagcacaggaagaattaaaaagatattctgaagcgtggtgctaatgaagaagtttctagtatcaatgttgatgaagatccaaatgttccttatgaaaggagcccaaatgctgctatagctaagaagagatcaataccatactcaacaagtgaagaagcgaaagccgtgaagaaaagaagagagcgggactctgacacaactaggccagataaatataggtttgaaggtactattgcaggatttgaaaaactaagcaagggaaccgagccaacaaaatctttatatttgaagaagaaactgtgggaagatgaaaaggataagataggcaactttgtctcctcagccaacaccgacaaggtgcaatatttttcacgtgctaactcaattttatgatattatctatatcatgttgtcactgctggctggtttaacatggacaacatcctatctttgtgcatatgtttgaggtcgaccctcattgctctgttacctcttgcttactcattaaaacatcttaacaattgggtagcgatatataaaattgtgtagccttcctttgtcctcggtcctattagctcatcatgaccgttgttgacatgattcggactgtgcgtagtatgagctgaaacttttattgagtagataattttaaacttacaggtcaaagaatctccggtcaaacatgttttgccctccactggtatggctgctcatgctttggacgatctgtttgaagctgttgaactggaggatagacgtgacacatcaatagaaaatgatgctgatg

SEQ ID NO: 125124 - DNA, 118 bp, Zea Mays
ttctttttttttcattcagagttcggttggacaaattaagatggattgagatcttagttgttaaggtagaagcaaaagcaccaccactgaatcctatactttaaacggtgatagcagc

SEQ ID NO: 125125 - DNA, 1492 bp, Zea Mays
gcctcgctcccgtcgcttgacctgtactgtccccacggagatcacgacacgaaccgagcaagaaccgcacgagccgagcccagcagcaggatggcggcggcggcgagcgggaaggcgccgtcgctggtggtggcggcgagcatgggcgcggtggaggcgctcaaggaccaggcgggcctgtgccgctgggactacgcgctgcgctcgctctaccaccgcgccgccgccgcgccccggatccgcgcgctgtccgccgcgctctcggactccgtgtccgtgccggcggacgcgcccccgcgggcgtcgcggccaccgcccccgccggcgccgcgggacgcggacaggatgcgcaaggcctaccacctcgtgtgctggggccccaactgatcggcggccggcgggcgggcgggcgggcgccgactgcatgcctgtagctgtagcgcgcgcgctgaccaaggcctggctgggtgtggttgtctacttgtctgtagcttcttcttcttgttgttggctcctctcgtgtgtgtgtgtgttgctctcgctccgtccatcgattccatccgtgtccgtcggcagatgagatgagaatgagaaggcgatgtgaatgctcttccgtcgtttgggttccggagccgaggattccctaaacaaaaccaattttactacgtgcgctgcgtacaattccgtcgtttgggagctggcatgtccttgcgttgcgcgcacgagcgtcgccgacgcccgacggttaggcgcgctggctggaactggaaggaaggtggatatggctttgatgactgaatgactagtactgatgactcgtcggccagccggagaaagcagaggcgttgagtgcagtcgcggcgacaggctcatcaaagctgcactcaatgatgcgtgcccttgcctctcttctcttggtctggactgagctggagtggatcagccaggtgtccgaggacagcaggtgtgtcctgtagctgtgtagcaccgtccactgggctccagcctctatccagcactggcgtcgtcgccgctggtttgagctctggatcctcgccgatctgtcgagcagagaccagagatactacaaactgtaaccgcaagaaatgactctaaagatgatgggtttgatattccttggtgaagctacataaagcatgcaagggattgatatatcacgaagagaacaggtacagatagatcacgaagcagtggctgtggcaaccccacgttccagtcaatcctacatgcgcacagcagttccctgctgaccattcatagcgattgacgatggcatgctaatccttttgttgtaaagaaaaaaatttgaagaagaaatgtgtcgtgtagatttaggtggtgtttggttttctagagactattattttagtccattcgttttattttattttgttccttaaattatcaaattttaaaattagatatatgatttagttttgacaatttataaattaaaatataataaaataaa

SEQ ID NO: 125126 - DNA, 318 bp, Zea Mays
atgggtctgtttggttggtttctctcgccaacctggctgtgtgagccaggatcactggagtctggctctggagatgcgaccaatctgctcgtatctggtgagcctggcccaaggtgctttaaggatcgtgcgagtctggatccaaatctacatgcaagcaaccaaacacagagctcgcacgcgcatagcctggctcatagcaaccaaacagcagctacccgcatcccacgatgcaagcacgcgcagatgcaggcaaccaaacagacccaatgtgtcgtggggccagaaatactttgggatgccaacggaggtggataa

SEQ ID NO: 125127 - DNA, 611 bp, Zea Mays
ggtgcaagcaagaaggcaagggagcagcagcgcactagtatttagtatggtacagcagcacgtcgtagtacaggtgcacgtcgtagtatgtaggtgtatatataggtacagtacagtccgtgcggggcggattgcaggcagagcaaaacgagcaacgccagcgggagagcccggcggtacggtggcctctcgccgcttcacttgggtccccagagcagcaggtgcatcaccttggccgtcttgccgtggccgtggaggtggtcctcgcgcccgcgccacggcgacgacgccgacgccgacgtgccggcccgcggcagccgaagctgctccgcggcgtcgcgcgccagcgcgcgcagcgtggccagctcgggccacctgctggcggtagtgctctcgctcccgctgctcatggccgccgccgccgccgcgcccgaccgcccgtagcctctaactaaacccgctctcggggctcgccacttctcgtcgccgccgtggcgccgttggcagatggacaccgagccggccggtttatatagccatccatcgtccacaggcgccggcccgccccgtcgtcgtgtaggggcccagtggactggactggactgcactgc

SEQ ID NO: 125128 - DNA, 1773 bp, Zea Mays
cacatacgtacgtgtgaaggaccaacacgagggccgggcgcgcaccccccctctatctctcccgccgccgttgatctatcaccgggccgccggtccgtgactgtcgccagcggctgctggttgttgcttggttgcgtcgccgcgggacccgtgacccgggcgcaatgccgggagccgtgatcgtgcaccaccacacgaggtacaagacgtaccccggcgaggtcaccggcatcgccatcttctcgtgcttcatcgcctccgtcgccggctgcatcttcggctatgacatcggcctcacatccgggctgacgtcgacggagccgttcctggtcaagttcttcccctccatctacgaggagatgaagaggcaggtggtcgtcaaccagtactgcaagttcgacagccaggtcctgacgctgttcagctcctccctcttcctcgccgcgacggtggccaccttcttcgccggcccgatgacccgcgccttcgggcgcaagtggaccctgttcgccgccgcgtccgcgtacgtggtcggcgcgtgcatcggcggcgtgtccgtgaacttcccgatgctgctcacgggccgcgtcctcgtcggctccggcgtcggcatctccatccaggcggccccgctctacatctccgaggtggcgccggcgcagcagcgcgggatgctcaacatcctgttccagctcatgatcacggtgggcatcctgacggcgaacatgaccaactacctggcgtccaaggtctcgggcggctggggctggcgcatccccgtgacgttcggcgccatcccggccgccgtcatcgcgctgggcgcgctcgccatcccggacaccccggcgtcgctcgtcgagcgcggggacacggccacggcgcgcaagacgctgtcccagatccggggcgtcggcgacgtgcgcgaggagttcgacgacctggccgccgcgagcgaggacgccaaggccgtgcagtgcccctggcgggagctcttcttcggcggcaagtacaagccccagctcacgttcgcgctgctcatccccttcttccagcagctcaccggcatcaacgtcatcatgttctacgcgccggtgctcttcaagacagtcggcttcaagcagaacgccaccctcgtgtcctccgtcatcaccggcctcgtcaacgtcttctccaccttcgtcgccatcgccaccgccgacaagatcggacgccgcgcgctcttcctgcagggcggcacgcagatgatcatctcccagatccttgtggggacgttcatcgggctgcagttcggcatgagcgggacgggcgacatctcggagcagtacgccatgtgcatcgtgctgttcgtgtgcgtgtacgtggccggcttcgcgtggtcgtgggggcccatggggtggctggtccccagcgagatctacccgctggccgtgcggtcggcggcgatgagcgtcacggtggccgtcaacatgttcttcacggccttcatcgggcagatcttcctcacgctgctctgccacctccgcttcggcctcttctacttcttcggcgcctgggtgctgctcatgacgctcttcatcgccatgctgctcccggagaccaagagcgtgcccgtcgaggagatggcgcacgtctggaagaagcactggttctggcgcaagttcgtcatcgacaccggcaacgacgcccgcaacgccgagatgaggaagaggatagcgctagagatgagctgatcatcgtcgtccatgcatgcagtctccatcgcccatgcatcat

SEQ ID NO: 125129 - DNA, 4249 bp, Zea Mays
cggggtccgatccgacgcgagcgggcggaggagcgcgagcctagtgaccagcgcagcgcaccaccaccaacagcaacaagtagccagccactccagcaccagaacgcaacacagacacagagactagagagagagagtcccgaagcgagcacaagaggccaccgcacagcggccaggcggcgagcgagactcctccacacgtctctcccccttcccctccccttccgtttcctctgtagctgcgcccgaccgaacccccctaccccgtggaatcctcctccgatgcggcgccgataggggctggcggaggagcggaatggcggggcacggtgagaagcggcgccgtacgggaggggcccacgagaagccggaggaggaggaggaggaccgcatctcggatctcccggacgtcctgcgcctgcacattctgagcctactgccgctcaaatcggccatccgcaccggcgcgctctcctcgcggtggcgccgcctctgggcgtaccgctggccggagccctcctcggtgaccatccgcctcccccccggcgcggcgggggcggcggccgcggcgcgcgccgaggcgctggccgggatcgaccgccgcgggcggcgccgcgtcgacggcttctcgctcgccttccacgggggccagctggcgcacgcggacctcaagcgctgcgtcgattacgcggcggcgtgcgaggccgaggacctgcacctccgcgccgacggcggcgcgggcgccgcccggggctcgcgcggggccacgcgccgcccgggcgcgctcgccgtgcagttccccgtcgggagcccgctgctcgcgcgcctgtcggtgcgggggctcagcctcacggccgtcaacaacgccatggtcgccacgctcgaggtgatccacctgcactccgtcttcctcacggacgccgcgctgcgccggatggtcgccgcctgcccccgcctccgggagctcgacctccgttactgccgccgcctgcgccgtgtcgacttcagcagtgttggggtgcccaacctcagtagcttcaccgtcgtcgactgctcccgcaccaccgagctccgggtccctgtcgcgccccgtctccggtcgttccggttcagcggtaccttcctctccagcaacattctctctggagctaagggttctcttgagcatctctacctctgctctggcgggccagagaccggccttcccgccaccaacttgccctacgcagttcctcgcctgtcgaacctcactgtcctcaccctctgcagcattgctctccagtatgtttcttctttcacagccaaggccggctcggagggcaacctgcatggcttaagggagctccagttgctcacgttcgggatggccaactccaaccttgctgacatttatagcttcctcaagacctgcccgtgtcctcgcttggagcgtctctttgtgcagctcccgacaaacaccggtgatgcattcacggagaatttcttggaggtggcggaggaggatccaccaaaaggtggattagaaaacctttgcttagccaagctgacaaatttcaaggggcaccgcaatgagatgcaactagtaggatttctgcttagaaagtcttgtagtctgaagaaactatttctgattgctcctaaggaggatcaccctcaaggactccgcaagacactgtcagatacgctgcctgattttctaaaaaaagaaatattgcatctggaaagagcttcaacagatacgcagatatttttcagtgagcctgatgctcagacgcagcaattgcattcggaggtctttgtcaggttttagcttgaaatgaggaaatgctgttgtagtccagtttctgctcctatagttttagatttctagcctttagagaacagacatggggaaaaaagtatctgcaaggcatacatagttttgatatatgttttctttttgcaatttgtgttactaaagaagtcctgcatagcggttgaaatgagagctgttctgatcttccacattttcttcttctcatccctctcttctccccctgtttgtgttcgcgatctctttggagttggcttattataagttgctgttgtacacagccaaccatctattggaacacaacaaccttcattttatttgtcgtacaattgaattggtaggttaactttgtggttctagatagatggagcatgtgcatatctcttgcttaatctgggagttgcattatatttttcttttcagttttttcctaaataggtatagtttctgtttctgagctaagtttcatataacttgtcatctgtcttgagtcattcatgtaaaaaagatgtatcaggggaatcttataaaactgtctttttgtgcggttaggattatattaacctagtatatatggactctacatctgctttctctgtttgttgtatgggtgaaattattgttgcttagatgggacatgtgtcttaaagcgatataatcatatggacttctgtacattaaagctttctttcatattatatccatgatactgcagatctctaagggaactatcatttcttgtacttccatcctggttgtcttgtgtgtctgcaaaacctggaacacctctgaatgacagagctcctgccttttttcttaaaaaaataatatatagttgacagtctgttgttggcagtattggtttacatccttaaaatgtcatacacgggttgttcaggacttcaggtgaccaaattcatatgtgctcattttggtgttactggtgaggtggtgaggaggtgtatttattttgatgtcattgagttttagtggtggagctagatgagatgaaatgctttggactctggtgttcttagctagctttgcaggatgaaaccatatttgtggaaattctatggtgctccttttgtgaagtggaagccatatcaccgtagtgctttgcacttatgtcttatccttcaaaccatgcagagctgtagtgccatacatcatagcaaaatgatatggataatgttggtaaaggtgtctagtagctttgagaattcttatgcacttgtatgtttgaagcagccatatccgtgcatacccttcatatttttgaattgaatcaattatttctgaaactttaggctggccgctgcctaataatctccagctacaaggaatcatacttgatgcgaagttgtggaaatggatttttgatttatgcagcttggtgtttcaagatatattacaagtgacgtaaaatttatgtggttctgttgggagcaacatgttggccacttgactattaacatgcaatttaccgttgcttttttactcaatgtgtctatctgtactgcttcatatatggaaatgtaagttagcatactcttttagacttgttttaatatcaatagaaatgcacacttgaagtatacctttgcagcaagctgtgttcagtaaccagtaagcatttttactacttcctccattcctccaaattataagacttttttatttttctagatatataattttttctacgtacttagatatacattatatctaggtacatactaaaagtaatctatttaaaaaactaaaacgtcttatagtttggaatggagtaagtaaatcttttaaatactggatggaaaccattaatctattgtgatttctttctcaatgccagttttttcattaatctttgctattgtgtagtttgcaatcatagaacagatttgttggaaaagtactttacctatctattttctctatttacattgccaacttgtaaaacataggaataagagagtgcatacaatatcttaaaagagagtgatatgctgcttcagaaaagattgcttatgctgatgagaaaaaaaagaaggtatatcctactttgtgtgaattagtggtggggctactgggattgaccttgcagtggagatgcacaattttattattcaacccttgtagatatatccacactccaaactttgttaagatatgtgttattcaatctgaaagatatgttgttcgacctgtgtgagaactgagaactgagaaggtcttcttcttaatacaatacttggggttgtctcatcctccctaggtcgagttttttatattcattatcatttgaatgaatgttttgacagaaaaaatgggctaaaaagaactatattttgggacggagagagtatatgttagggcagagacaactcttgtttgcaacaccgctcttagctcttttgagtaatgtatgctaac

SEQ ID NO: 125130 - DNA, 2143 bp, Zea Mays
ccgcacagcggccaggcggcgagcgagactcctccacacgtctctcccccttcccctccccttccgtttcctctgtagctgcgcccgaccgaacccccctaccccgtggaatcctcctccgatgcggcgccgataggggctggcggaggagcggaatggcggggcacggtgagaagcggcgccgtacgggaggggcccacgagaagccggaggaggaggaggaggaccgcatctcggatctcccggacgtcctgcgcctgcacattctgagcctactgccgctcaaatcggccatccgcaccggcgcgctctcctcgcggtggcgccgcctctgggcgtaccgctggccggagccctcctcggtgaccatccgcctcccccccggcgcggcgggggcggcggccgcggcgcgcgccgaggcgctggccgggatcgaccgccgcgggcggcgccgcgtcgacggcttctcgctcgccttccacgggggccagctggcgcacgcggacctcaagcgctgcgtcgattacgcggcggcgtgcgaggccgaggacctgcacctccgcgccgacggcggcgcgggcgccgcccggggctcgcgcggggccacgcgccgcccgggcgcgctcgccgtgcagttccccgtcgggagcccgctgctcgcgcgcctgtcggtgcgggggctcagcctcacggccgtcaacaacgccatggtcgccacgctcgaggtgatccacctgcactccgtcttcctcacggacgccgcgctgcgccggatggtcgccgcctgcccccgcctccgggagctcgacctccgttactgccgccgcctgcgccgtgtcgacttcagcagtgttggggtgcccaacctcagtagcttcaccgtcgtcgactgctcccgcaccaccgagctccgggtccctgtcgcgccccgtctccggtcgttccggttcagcggtaccttcctctccagcaacattctctctggagctaagggttctcttgagcatctctacctctgctctggcgggccagagaccggccttcccgccaccaacttgccctacgcagttcctcgcctgtcgaacctcactgtcctcaccctctgcagcattgctctccagtatgtttcttctttcacagccaaggccggctcggagggcaacctgcatggcttaagggagctccagttgctcacgttcgggatggccaactccaaccttgctgacatttatagcttcctcaagacctgcccgtgtcctcgcttggagcgtctctttgtgcagctcccgacaaacaccggtgatgcattcacggagaatttcttggaggtggcggaggaggatccaccaaaaggtggattagaaaacctttgcttagccaagctgacaaatttcaaggggcaccgcaatgagatgcaactagtaggatttctgcttagaaagtcttgtagtctgaagaaactatttctgattgctcctaaggaggatcaccctcaaggactccgcaagacactgtcagatacgctgcctgattttctaaaaaaagaaatattgcatctggaaagagcttcaacagatacgcagatatttttcagtgagcctgatgctcagacgcagcaattgcattcggaggtctttgtcaggttttagcttgaaatgaggaaatgctgttgtagtccagtttctgctcctatagttttagatttctagcctttagagaacagacatggggaaaaaagtatctgcaaggcatacatagttttgatatatgttttctttttgcaatttgtgttactaaagaagtcctgcatagcggttgaaatgagagctgttctgatcttccacattttcttcttctcatccctctcttctccccctgtttgtgttcgcgatctctttggagttggcttattataagttgctgttgtacacagccaaccatctattggaacacaacaaccttcattttatttgtcgtacaattgaattggtaggttaactttgtggttctagatagatggagcatgtgcatatctcttgcttaatctgggagttgcattatatttttcttttcagttttttcctaaataggtatagtttctgtttctgagctaagtttcatataacttgtcatctgtcttgag

SEQ ID NO: 125131 - DNA, 846 bp, Zea Mays
tcggcgttgccaacgtctgcgctgagctccctcgaggcgatgctccactccctgatgcgagggtcagggtcacgaggaggaggagcgggggccgacgacgatgacgacacgcccgtccacgacgacactctctcctcctcgccgccgccgccgccacttccatcgcgtccgactccgcgcggccggcgcccttcgcggtcgcggcgcagagtccgggcgcaggaagacgtgacgacagcggcgacggagggtgtcgtctcgccctcggtgtcggtggtggaggagctggggagaaaggcggcggaggccgaggcgcggctgcgggagaaggaggaggagaacgctgcgctgaagcggcagatcgagagctaccatgtcaggtggctggagcacgagatcagggccaaggccctggaggaggcattccacgaacaggtggccgctcttcaggacgatgcgcggatggcccaaggaacagcgcacgaccgccgcggggccgggtcgtcggaagagacggcggccgaggaggatccgccgccggtgaggctgtggcacggccgggaccgcatgtcctcgtccgcgggtgccatgcggggtgcggtgggccgcctgctcgtcgtcgcggagttccggcggcaaagccgcacgctggagcacgccgcggagccgccgccgccgtggcagccggccgccccggtcgccaactccgccgccgacctcaagaagctcaaggcgcagctccgcgcgtgggccaaggactacaaggcccggctgcgcagggcccaggccgggatcggcagggatcgatggcgcaggggcaactgctggatccgaacgagcacttag

SEQ ID NO: 125132 - DNA, 2774 bp, Zea Mays
atattttccttccttctccactacctccacccagccatcttcccccactccaccaggccaccaccaccaccagtccaccacctctctctctctctctcctccctttttctcccctctttctgatgctttgacgccacagctcgcagcagctttggccgccccgcctctgcctctgccgctctgcgtgcctcccaccacctcctctgccactggctaaaagccgagggcggagctgtaggagaagagccgaagagaagggagcagagagaagcgcaggagaggggaccgccgaccaccgagggagccgggcaagatgttcgacagtctgctcaactccaagttctacaacaaatgcaagcacgcgatcaagtgcacccggacccggctggatctgctgcggcggaagaagcaagcgatggtcaagttcctcaagaaggacgtcgctgacctcctcaccagcggccttgaatcgcacgccttcgcacggatggaagggctgatcattgagatgaaccaagcatcgtgctatgatacgatagaagagtactgcgaatatattgtgaagcagctcagccacatgcagaaagagagtgaatgcccgcaagaagccttggaagctgtgtctactctaatatttgctgccgctagatttcctgatttgcctgaactgtgtgatctgagacatatattcacagagagatatgggagttctgtcgagccttttgttaattctgagtttgttcagaacctccagaataaatcatttactgatgaagagaagttgcgagtaatgaaacgtgttgctgaagaattctcagttccatttgatagcagggcactgcaatggaagataacttgtggctctcaaaataaacatgatcttccaaagaagagttcacttaaacatgatatggaacgagatggacacaaggttgataggcatgctgttcatgaaagaaaatcaaaagctatgcctgaaggctatgaacagaagcaggaaatgaacgtaaaacccaaagatatccatgtcgttcctgatggcattggccagttaggtgaaaaaaacagaaagaactactctgataaacctagtgagagaaggcacgtggataatcctttgcctcctttggacatgaaagaaaagaatggtcagaaagaaatgaagaaatctggcaaaaaggatagtgaccgtcggagggaactgatggatgtggaggtgttagacatcaatggcttgaaaaaacaggatgttggtgcgatgaaaccttccggtggccccgatcgtagttggggtcatgctgacctggggcttaaaactctgggcatagaaaaacaagaaattgatccaatttccaccttgaatggtaaagcagtgaacaagcctcctccttattctaagccctacagagcaccaatgggcgagaaggttgctgaagacaggcagcctgtgccagagaaggcaaccaatatgcgtcctccttatgttaagccaaattttgaaaaacatgcaaatcaaggcgcaaatggccacaagcagagtggcaccgaagaaacaatttaccagaagcgtgaaccaatctatgatcctgtctccgtgagaagtagggttccaagaccacctgcacatgctgatgaatatgctggaatggaggaaaagatggcaaaccaagcacctgatggccgaagaagacactcaagcaagaggaatggtgcccatgacaatcatgaccagagagttgcccatgttgtaccacccttagaaggcatgggggtcgatgacgatatcaacaacgcgaggccttttcatcgagttcctagcgagcgaagaaagcacaaaagcaggcagaacggatcgacgagcggcagtgactacaattgggccagcgaaggccacgagtctgatggcgacgatgtgaacacatcgatcgatttcggcaacctcctgccccgagcccccagttcgcacaggaaacacaggagccggagcgctgatcctcgcaaggcaggaggccgcggcgacgacgaggagaggatgatggacaagcttctgatgcactacagcaagaaagggctggacagggaggagcgcaaggagagagccaacaagtcccggaccctgttcccacgagacgaccagcgcggcgacggagccggagaactgtctagcaaaggaggaggagcatctgcacaccgccctgaaagagccgcatccttgccttcagaatccgcaagccccaaggcaaaggcgaaggcgaagccccctgctcggtccatgtccatgcagccagagatgtcgagggggaacgtgcatccgagcatgccggatttcgacgaactcgccgcgcgcatcagtgctctgaggaacgcgtgagctgtgccccaagactgactgcccttcagcgacgcttctgttgtttcaggaacaaacctctaccatggaatctgaaacctggtggtgcctgcgagtcacggcctcacgggggataagaggacactcgaggagatacaactgtggcctgttttcgcagcaatttttttttgtcttggtggtatacttgttctcgtgttgctctgagtgtgtcttggtggtagagtattgtcatcaggaagagttgttaagatgtggcaattcatagggataccatactaccataccgatagccagctacagcgatctggatgtggttgtttgttgtactcatagaacagatactgttggtgtgtaagatgtccattgatgctgctacgatgataaagaaattccttcttttatt

SEQ ID NO: 125133 - DNA, 3464 bp, Zea Mays
cgaattgcaaaaatctccagtcacaccacacgtcacgctcgcaccggcgggcgggcggcgccctgacggccgagggtcacgtcacacccaggcagcggctgcgctccagagataactagtgcggcggagggcgggatgctgctgctcaatccgtgtcctatcccaaaggaacatctggtcgtacaacactccgacaccgaagaacataccaaaggccaccgcaaagatgaccttatcggcgtactcttccgtggagacatcggtgactggaactgcatctgctgaattacagtggcgcatcagcgtagcgccgcacagctttgggtttccaaaaaagctagagtctggaaatgtgctaaactggcccccagttggaacaggcccttctagatcgttgctggaaatgttgaatttggaaaggaagtgaagcctctccagcacagaagggatttcaccggtcaaattattgtaggataagtctagcacctgcagattggtgaggttgccgactgattgtgggatctccccatgtaagttgttgaagctcaagttgagtgtaaggagtgcctgtagctggccaatctctggaggaattataccgttgaatttgttgtttcctagattcaacattttagggaagccactggttgtacggtattgaagaaacggtgccaggtagacaggaaacttaagtattattggggcagagtgagctgcctcaagcgttggcatctccatcagtgctgttggtatgtcaccagtgagattgttattggatatgtctagatagaaaagaaggtttaagctattaatccaggctggtattggtccactgagtttgttatcgtctaatagtaaagctcgcaagtttttgagcttagccagccagttaggtaacttcccatacagtggacatttatttatgccaagacccatgagattctcaaagccatgaaattcatcatcatctggcatggtctcatgcttgaagttgcccccaatcagcacgagagtgagtgtcctggacttactgaggatttgaagtgtatttctgatatttgtaaaactattgtgagcgagagctaggaatctgagggacttgagattgtttatccctgatgaaaattgaccatgaaggttgttgaaagataatcgcaacgcaataaggttgctgcaggagtagaggctctctggaattgttccagtgaatttgtttgacctgcaatctaaaaattttagattagacagggtggagaagttgacatggttgagatctccttggaagttgttgtctttaaggatgatggttgtgagatttgagcaactgctaagggctggtggcagctctccagacatgttgttattgtctaagtgaagctcctccagcctcttgagctgcccaatagaattcgggatcttgccatttagtccattccacccaagatcaaggatgaccaaatttctgagttttcctatacactcaggatcaagtgttccttgcaaatggttgttagggaaagagaggtgctctagtgaggtaacattgaagatctcagatggaagggtcccattgagttggttctggccagccttaagcactttcaaaccagagcaattaccaagctctgagggtattctaccaacgaactggttgtagctaagctcatggaattctccactgagcttgttaaagctgacatcgaggacagtaatgctgctggagagcaacagtgtcgatgggagtccaccggagagcaagttgccagataggttgagcttcaacaggccgttgagattgccaagtgagggtgatatgtgcccctcaaggcccatagcagctagtgagatgtctatgatagttctatctccattgcaaatgacaccctcccatagacagcagtttgtgtcattctgccatgaactggtgaggccagaggcttgagagagaccattgaggaactcgaagagggatgtcttctcctcttctttgcaggagctggcaggagaggccaagaagagcaatagcacaagactaacaccaagtaaagtgaaatgccgactgaatcaattggaatatggatgcacccctgtctagagatttgggaagaaaatgagtacaaggtagccctgtagttcccagatgtaaagggaaccatggggcttgagtgtacgcaggacatacagcaaggcttgctacatgctggtcatggcttcttcttgggagtgtcgcgtggatatggcatccgatcccgtcctgagtttgattggcaaattggttcacttaaaactttgtatctacccacagataggatatacttcaatagttgaattgaccaccggtgatcatatgccaaaggaagagaaaatgacttgcccaatcggtacagctagcgagttttgattcttttcttcttcctcttcgtcttcctcttctttgagaattttctgtgattcctgttgccttttcctttttgcggatcatggagagttggttcccactagttatccatcacatgcttttagctttcggagtcatggtggaaggagtgcaggatgggaaaaaaaatatccttgagctgacattccttgatattgagctcgttttagacatgcacaatatgcaaagtcgaagatactaaacggtccaccaatttacgccccttggctgccacaaaatctaggccctgcattctgctccagtgaaaagagtgtcatttagaattttgcacagttaacatgttattaaaactttggttgtcgacatcctttttgaacaattgaactttgaaagacggcttctctagattcgccttggaaagtattatgaagacattaaaatctagctaaatttgctgagggacattctaaaaaggcgggtattgctggaaggcatatgattttgatgctgagttggttggctgaaggatgataaggtcaagatttgatggagaccaggtcttcttaacaaagcctatgtcttaacctcctccgtcttagcctcacttctgaaagagtgaaagtggggtaaagaaaacctagaggtagaacccatttgagactgtgaatcttcaatctcggtttgaatgagcaagccctcaaaaaggctagtctgagaggagtctagaactagaactagaaaccgggctaaaatgcacatgatccaagtaaggagaggaagcggagatctagatcttgaatcgagaaagtggcttttttttctatcagaaaatggatcaaagcggatatgcaaaagagttttggttgcaacagaacaaaacagacgcagatacagatgtacgggttggtgggcgccgacggggccggggcctcgacggccgcagctgggacctcgtgggtggatgaggaggcgcatagcgcgttcgggtggtgggagcaatgggactgcgggagaggagcgggaggtggaggggggtgggcgaggtggcggcgcgccatggctcaac

SEQ ID NO: 125134 - DNA, 2654 bp, Zea Mays
cgaattgcaaaaatctccagtcacaccacacgtcacgctcgcaccggcgggcgggcggcgccctgacggccgagggtcacgtcacacccaggcagcggctgcgctccagagataactagtgcggcggagggcgggatgctgctgctcaatccgtgtcctatcccaaaggaacatctggtcgtacaacactccgacaccgaagaacataccaaaggccaccgcaaagatgaccttatcggcgtactcttccgtggagacatcggtgactggaactgcatctgctgaattacagtggcgcatcagcgtagcgccgcacagctttgggtttccaaaaaagctagagtctggaaatgtgctaaactggcccccagttggaacaggcccttctagatcgttgctggaaatgttgaatttggaaaggaagtgaagcctctccagcacagaagggatttcaccggtcaaattattgtaggataagtctagcacctgcagattggtgaggttgccgactgattgtgggatctccccatgtaagttgttgaagctcaagttgagtgtaaggagtgcctgtagctggccaatctctggaggaattataccgttgaatttgttgtttcctagattcaacattttagggaagccactggttgtacggtattgaagaaacggtgccaggtagacaggaaacttaagtattattggggcagagtgagctgcctcaagcgttggcatctccatcagtgctgttggtatgtcaccagtgagattgttattggatatgtctagatagaaaagaaggtttaagctattaatccaggctggtattggtccactgagtttgttatcgtctaatagtaaagctcgcaagtttttgagcttagccagccagttaggtaacttcccatacagtggacatttatttatgccaagacccatgagattctcaaagccatgaaattcatcatcatctggcatggtctcatgcttgaagttgcccccaatcagcacgagagtgagtgtcctggacttactgaggatttgaagtgtatttctgatatttgtaaaactattgtgagcgagagctaggaatctgagggacttgagattgtttatccctgatgaaaattgaccatgaaggttgttgaaagataatcgcaacgcaataaggttgctgcaggagtagaggctctctggaattgttccagtgaatttgtttgacctgcaatctaaaaattttagattagacagggtggagaagttgacatggttgagatctccttggaagttgttgtctttaaggatgatggttgtgagatttgagcaactgctaagggctggtggcagctctccagacatgttgttattgtctaagtgaagctcctccagcctcttgagctgcccaatagaattcgggatcttgccatttagtccattccacccaagatcaaggatgaccaaatttctgagttttcctatacactcaggatcaagtgttccttgcaaatggttgttagggaaagagaggtgctctagtgaggtaacattgaagatctcagatggaagggtcccattgagttggttctggccagccttaagcactttcaaaccagagcaattaccaagctctgagggtattctaccaacgaactggttgtagctaagctcatggaattctccactgagcttgttaaagctgacatcgaggacagtaatgctgctggagagcaacagtgtcgatgggagtccaccggagagcaagttgccagataggttgagcttcaacaggccgttgagattgccaagtgagggtgatatgtgcccctcaaggcccatagcagctagtgagatgtctatgatagttctatctccattgcaaatgacaccctcccatagacagcagtttgtgtcattctgccatgaactggtgaggccagaggcttgagagagaccattgaggaactcgaagagggatgtcttctcctcttctttgcaggagctggcaggagaggccaagaagagcaatagcacaagactaacaccaagtaaagtgaaatgccgactgaatcaattggaatatggatgcacccctgtctagagatttgggaagaaaatgagtacaaggtagccctgtagttcccagatgtaaagggaaccatggggcttgagtgtacgcaggacatacagcaaggcttgctacatgctggtcatggcttcttcttgggagtgtcgcgtggatatggcatccgatcccgtcctgagtttgattggcaaattggttcacttaaaactttgtatctacccacagataggatatacttcaatagttgaattgaccaccggtgatcatatgccaaaggaagagaaaatgacttgcccaatcggtacagctagcgagttttgattcttttcttcttcctcttcgtcttcctcttctttgagaattttctgtgattcctgttgccttttcctttttgcggatcatggagagttggttcccactagttatccatcacatgcttttagctttcggagtcatggtggaaggagtgcaggatgggaaaaaaaatatccttgagctgacattccttgatattgagctcgttttagacatgcacaatatgcaaagtcgaagatactaaacggtccaccaattt

SEQ ID NO: 125135 - DNA, 360 bp, Zea Mays
atggaggtttaccattgtggagtggtcacaggcgtggagcgggcagcgccagcggttgtcggccgatcaggggcggctgagcttgagctgggcgttgttggcctacggctggtcgctgcgtcatggcttgtaggcctgcgcgtgggcgaggaggtcgttgctgccaccgaggctcttgttctgcttgcgcttgcgcatctcgcggatcttggagaagtccatggagtagtccagcagtgccctgttcttcgtgttctagtccccgaacgtcggcacagtcatccaggcgttgttggcgctcgcatcctcatggcctcgctgctgcatgcaccaccaatgcacggggtcagtgagaactaa

SEQ ID NO: 125136 - DNA, 1487 bp, Zea Mays
aattatcgaaagcctcgcctcgtgctccagtccttccatttccccgttttccccgtgacagttgctgtgacagttgctgcgtcgcactcgcaagcctcgcctcgtgctccagtccttccatttccccgttttggctgcgtgcatgcccgcgtgttcccagaccgcaaggaatcaaatccgcccgccgcccgacatctcgcctcgccgcggcatttcctcaaacgccccgctcacagcgcccatgggctcccttccggtgccggcctcaacggaatgcaccccgcaggggcgcgccacggtgtcggcgtcggacctggcgccgctcttctccgcgcagcgccggcacctggaccacttcttcgaccgcctcgacatgtcgcaggcggcggcgttcgcgcaggtgctgctcgacgcgccgggcgccgtcttcttcacgggcgtcggcaagtcgggcatcgtggcgcgcaagaccgcgcagacgctggcgtcgctgggcttcgcgcgcgccggcttcctcgcccccgtcgacgcgctccacggcgacatcggcgcgctcttccccggggacgtgctcgtgctcctctccaagtccggcgcctccgacgagctgctcgcgctcgtaccctgcgcgcgcgccaagggaggctacctcgtctcggtcacctccgcggcctcgggggccgactgcccgctcgccgcggcctgcgacctcaacgtccacctcccgctgcagggggaggtgtgccccttcggcctcgcgcccgtcacctccaccgccatccagatggtgttcggggacaccgttatcgccgccatcatggaggcaaggcgactctccagggaccagtacgcctccaaccatcctgctggcaagatcggcaagaccctcattttcaaggttaaggatgtcatgaagaaacagaatgaacttcccctgtgcaaggagggagatatgataatggaccaactcaccgagctcaccagtaaaggttgtggttgtctgcttgtggttgatgaagagcatcatttgattgggaccttcactgatggtgatctccgccggacactgaaggcaagcgggccagctatctttagtctcacagttggagagatgtgcaacaggaatccaagaacaatcactgcagacgcaatggctgttgaagccatggagaagatggagtcaccaccttcacctgtgcagttcttgcctgttgtgaacgacaacaacgtcgtgtgtggaatcatcacactgcatggattggtctctgccggcctgtaaacttctgtggcaccatcaccttctgctggactgtaagctgacgtgccagcttacccagttcatacaacaagtggttctgtcgactcctcttcagtgtacgcttatgtatagtggtggataagaggaatatggtacactgctgttggttgtttatcaatgctatcgttttgtactttaatctaaaatgcccatttccttggtttctctt

SEQ ID NO: 125137 - DNA, 2150 bp, Zea Mays
gtggcgcagcagcagacggacgccaggtttttttccttttagaccgcaacctcaaaaccctagcttgtccctcctgctcccagatctcttccactcggccactccctagcacatcaaaccctagctccgcccagcccccaaccatgtcggcgatgatgatcatcctgctcaaggagggcacggacacgtcgcaggggcgcgctcaggtggtgagcaatatcaacgcgtgcacggcggtgggcgacaccgtgcggaccacgctggggcctcgggggatggacaagctcatccacgacgacaagggcggagtcaccatctccaacgacggcgccaccatcatgcgcctcctcgacatcgtgcaccccgccgccaagatccttgtcgacatcgccaagtcgcaggactccgaggtcggcgatgggacaactactgtggtgcttctagctgcagaattcttaaaggaagcaaaaccttatatcgaggacggggtgcacccccacagtctaattcgcagttatagaactgcaggcaatatggcaatccaaagggttaaagagctggcagttagcatagaaggaaaaagccttgaagagaagaaatcactgctagccaagtgcgctgctacaacactctcttcaaaacttataggtggtgaaaaagaattctttgcttctatggttgtggatgctgtccttgccattggcaatgatgacaggcttaatcttattgggattaaaaaggttcctggaggtaccatgagagactcttttttggtgaatggtgttgcgttcaagaagacgttttcatatgcaggatttgagcaacaaccaaagaagttccttaatccaaagattcttttgttaaacattgaactagaattgaaatctgagaaggaaaatgcagagatcagattgtctgaccctctgcaataccaatcaattgttgatgctgagtggaacattatttatgacaaactggataaatgtgtgaaaagtggagcaaagatagttctgtctcggctagctattggtgatcttggaacacagtattttgcagatcgagacattttctgtgctggccgtgtcactgaagaagatttgcaacgtgttgctgcagcaactggtggaactgttcaaacttctgtaaataatgtcatcaatgatgtactcggttcctgtgaggtattcgaggaaaagcaagtaggcaatgaaagattcaacatatttagtggctgcccttctggccagacagcgactattgttctccgtggtggtgcagaccagttcattgaggaagctgaacgaagtctccatgatgccatcatgattgtgaggagagcacttaagaactcgacagttgtgccgggtggtggtgctattgatatggaaataagcaagtatctcaggcagcatgcacgaacaattgctgggaagtctcagttctttgtaaattcatttgctaaagcccttgaggttattccacgccaactttgcgataatgctggatttgatgccactgacgttctcaataagctgaggcagaaacatgcatctggtgaaggtgctaattatggtgtagacataaacactggcggaattactgattcctttgcaaactttgtttgggaacctgctgttgtaaagatcaatgctataaatgctgcaaccgaagcttcctgccttattcttagcgtcgacgagacagtgaaaaacccaaagtcggagagcgcacaaggtgaggctgctgccggtgcgatggctggtcgcggtcgaggtgcaatgcgaggacgtggtggcaggggcatgcgcaggcgataaactgggtcaagtagatcatggtgagatttttttgcatgtttgcgagtgcttttgtgccttactgcacatgtatggacgctgcacttactattgtgcgcttttggttgtgaagcagtcgtagactttttttttgtttcagaagagatgcaccaggcgtttatcagtgtaccgtccgctggatgtgttatagtagacctgagctttggattctaatttgtttgacatttatcttggtttattggcttgtcttttgaacaatgagaaaatcagtgttgtagtttgcgatcctcgtgcgctcaagcgtaaaacatagacatgtgtgcttgtttggaa

SEQ ID NO: 125138 - DNA, 2200 bp, Zea Mays
gactaccattctacaagctatcacaagagtgttgtgggcttgtggcgcagcagcagacggacgccaggtttttttccttttagaccgcaacctcaaaaccctagcttgtccctcctgctcccagatctcttccactcggccactccctagcacatcaaaccctagctccgcccagcccccaaccatgtcggcgatgatgcaaccgcagatcatcctgctcaaggagggcacggacacgtcgcaggggcgcgctcaggtggtgagcaatatcaacgcgtgcacggcggtgggcgacaccgtgcggaccacgctggggcctcgggggatggacaagctcatccacgacgacaagggcggagtcaccatctccaacgacggcgccaccatcatgcgcctcctcgacatcgtgcaccccgccgccaagatccttgtcgacatcgccaagtcgcaggactccgaggtcggcgatgggacaactactgtggtgcttctagctgcagaattcttaaaggaagcaaaaccttatatcgaggacggggtgcacccccacagtctaattcgcagttatagaactgcaggcaatatggcaatccaaagggttaaagagctggcagttagcatagaaggaaaaagccttgaagagaagaaatcactgctagccaagtgcgctgctacaacactctcttcaaaacttataggtggtgaaaaagaattctttgcttctatggttgtggatgctgtccttgccattggcaatgatgacaggcttaatcttattgggattaaaaaggttcctggaggtaccatgagagactcttttttggtgaatggtgttgcgttcaagaagacgttttcatatgcaggatttgagcaacaaccaaagaagttccttaatccaaagattcttttgttaaacattgaactagaattgaaatctgagaaggaaaatgcagagatcagattgtctgaccctctgcaataccaatcaattgttgatgctgagtggaacattatttatgacaaactggataaatgtgtgaaaagtggagcaaagatagttctgtctcggctagctattggtgatcttggaacacagtattttgcagatcgagacattttctgtgctggccgtgtcactgaagaagatttgcaacgtgttgctgcagcaactggtggaactgttcaaacttctgtaaataatgtcatcaatgatgtactcggttcctgtgaggtattcgaggaaaagcaagtaggcaatgaaagattcaacatatttagtggctgcccttctggccagacagcgactattgttctccgtggtggtgcagaccagttcattgaggaagctgaacgaagtctccatgatgccatcatgattgtgaggagagcacttaagaactcgacagttgtgccgggtggtggtgctattgatatggaaataagcaagtatctcaggcagcatgcacgaacaattgctgggaagtctcagttctttgtaaattcatttgctaaagcccttgaggttattccacgccaactttgcgataatgctggatttgatgccactgacgttctcaataagctgaggcagaaacatgcatctggtgaaggtgctaattatggtgtagacataaacactggcggaattactgattcctttgcaaactttgtttgggaacctgctgttgtaaagatcaatgctataaatgctgcaaccgaagcttcctgccttattcttagcgtcgacgagacagtgaaaaacccaaagtcggagagcgcacaaggtgaggctgctgccggtgcgatggctggtcgcggtcgaggtgcaatgcgaggacgtggtggcaggggcatgcgcaggcgataaactgggtcaagtagatcatggtgagatttttttgcatgtttgcgagtgcttttgtgccttactgcacatgtatggacgctgcacttactattgtgcgcttttggttgtgaagcagtcgtagactttttttttgtttcagaagagatgcaccaggcgtttatcagtgtaccgtccgctggatgtgttatagtagacctgagctttggattctaatttgtttgacatttatcttggtttattggcttgtcttttgaacaatgagaaaatcagtgttgtagtttgcgatcctcgtgcgctcaagcgtaaaacatagacatgtgtgcttgtttggaa

SEQ ID NO: 125139 - DNA, 2013 bp, Zea Mays
gtggcgcagcagcagacggacgccaggtttttttccttttagaccgcaacctcaaaaccctagcttgtccctcctgctcccagatctcttccactcggccactccctagcacatcaaaccctagctccgcccagcccccaaccatgtcggcgatgatgcaaccgcagatcatcctgctcaaggagggcacggacacgtcgcaggggcgcgctcaggtggtgagcaatatcaacgcgtgcacggcggtgggcgacaccgtgcggaccacgctggggcctcgggggatggacaagctcatccacgacgacaagggcggagtcaccatctccaacgacggcgccaccatcatgcgcctcctcgacatcgtgcaccccgccgccaagatccttgtcgacatcgccaagtcgcaggactccgaggtcggcgatgggacaactactgtggtgcttctagctgcagaattcttaaaggaagcaaaaccttatatcgaggacggggtgcacccccacagtctaattcgcagttatagaactgcaggcaatatggcaatccaaagggttaaagagctggcagttagcatagaaggaaaaagccttgaagagaagaaatcactgctagccaagtgcgctgctacaacactctcttcaaaacttataggtggtgaaaaagaattctttgcttctatggttgtggatgctgtccttgccattggcaatgatgacaggcttaatcttattgggattaaaaaggttcctggaggtaccatgagagactcttttttggtgaatggtgttgcgttcaagaagacgttttcatatgcaggatttgagcaacaaccaaagaagttccttaatccaaagattcttttgttaaacattgaactagaattgaaatctgagaaggaaaatgcagagatcagattgtctgaccctctgcaataccaatcaattgttgatgctgagtggaacattatttatgacaaactggataaatgtgtgaaaagtggagcaaagatagttctgtctcggctagctattggtgatcttggaacacagtattttgcagatcgagacattttctgtgctggccgtgtcactgaagaagatttgcaacgtgttgctgcagcaactggtggaactgttcaaacttctgtaaataatgtcatcaatgatgtactcggttcctgtgaggtattcgaggaaaagcaagtaggcaatgaaagattcaacatatttagtggctgcccttctggccagacagcgactattgttctccgtggtggtgcagaccagttcattgaggaagctgaacgaagtctccatgatgccatcatgattgtgaggagagcacttaagaactcgacagttgtgccgggtggtggtgctattgatatggaaataagcaagtatctcaggcagcatgcacgaacaattgctgggaagtctcagttctttgtaaattcatttgctaaagcccttgaggttattccacgccaactttgcgataatgctggatttgatgccactgacgttctcaataagctgaggcagaaacatgcatctggtgaaggtgctaattatggtgtagacataaacactggcggaattactgattcctttgcaaactttgtttgggaacctgctgttgtaaagatcaatgctataaatgctgcaaccgaagcttcctgccttattcttagcgtcgacgagacagtgaaaaacccaaagtcggagagcgcacaaggtgaggctgctgccggtgcgatggctggtcgcggtcgaggtgcaatgcgaggacgtggtggcaggggcatgcgcaggcgataaactgggtcaagtagatcatgagatgcaccaggcgtttatcagtgtaccgtccgctggatgtgttatagtagacctgagctttggattctaatttgtttgacatttatcttggtttattggcttgtcttttgaacaatgagaaaatcagtgttgtagtttgcgatcctcgtgcgctcaagcgtaaaac

SEQ ID NO: 125140 - DNA, 1963 bp, Zea Mays
gtggcgcagcagcagacggacgccaggtttttttccttttagaccgcaacctcaaaaccctagcttgtccctcctgctcccagatctcttccactcggccactccctagcacatcaaaccctagctccgcccagcccccaaccatgtcggcgatgatgcaaccgcagatcatcctgctcaaggagggcacggacacgtcgcaggggcgcgctcaggtggtgagcaatatcaacgcgtgcacggcggtgggcgacaccgtgcggaccacgctggggcctcgggggatggacaagctcatccacgacgacaagggcggagtcaccatctccaacgacggcgccaccatcatgcgcctcctcgacatcgtgcaccccgccgccaagatccttgtcgacatcgccaagtcgcaggactccgaggtcggcgatgggacaactactgtggtgcttctagctgcagaattcttaaaggaagcaaaaccttatatcgaggacggggtgcacccccacagtctaattcgcagttatagaactgcaggcaatatggcaatccaaagggttaaagagctggcagttagcatagaaggaaaaagccttgaagagaagaaatcactgctagccaagtgcgctgctacaacactctcttcaaaacttataggtggtgaaaaagaattctttgcttctatggttgtggatgctgtccttgccattggcaatgatgacaggcttaatcttattgggattaaaaaggttcctggaggtaccatgagagactcttttttggtgaatggtgttgcgttcaagaagacgttttcatatgcaggatttgagcaacaaccaaagaagttccttaatccaaagattcttttgttaaacattgaactagaattgaaatctgagaaggaaaatgcagagatcagattgtctgaccctctgcaataccaatcaattgttgatgctgagtggaacattatttatgacaaactggataaatgtgtgaaaagtggagcaaagatagttctgtctcggctagctattggtgatcttggaacacagtattttgcagatcgagacattttctgtgctggccgtgtcactgaagaagatttgcaacgtgttgctgcagcaactggtggaactgttcaaacttctgtaaataatgtcatcaatgatgtactcggttcctgtgaggtattcgaggaaaagcaagtaggcaatgaaagattcaacatatttagtggctgcccttctggccagacagcgactattgttctccgtggtggtgcagaccagttcattgaggaagctgaacgaagtctccatgatgccatcatgattgtgaggagagcacttaagaactcgacagttgtgccgggtggtggtgctattgatatggaaataagcaagtatctcaggcagcatgcacgaacaattgctgggaagtctcagttctttgtaaattcatttgctaaagcccttgaggttattccacgccaactttgcgataatgctggatttgatgccactgacgttctcaataagctgaggcagaaacatgcatctggtgaaggtgctaattatggtgtagacataaacactggcggaattactgattcctttgcaaactttgtttgggaacctgctgttgtaaagatcaatgctataaatgctgcaaccgaagcttcctgccttattcttagcgtcgacgagacagtgaaaaacccaaagtcggagagcgcacaaggtgaggctgctgccggtgcgatggctggtcgcggtcgaggtgcaatgcgaggacgtggtggcaggggcatgcgcaggcgataaactgggtcaagtagatcatgaagagatgcaccaggcgtttatcagtgtaccgtccgctggatgtgttatagtagacctgagctttggattctaatttgtttgacatttatcttggtttattggcttgtcttttgaac

SEQ ID NO: 125141 - DNA, 1933 bp, Zea Mays
gcgcagcagcagacggacgccaggtttttttccttttagaccgcaacctcaaaaccctagcttgtccctcctgctcccagatctcttccactcggccactccctagcacatcaaaccctagctccgcccagcccccaaccatgtcggcgatgatgcaaccgcagatcatcctgctcaaggagggcacggacacgtcgcaggggcgcgctcaggtggtgagcaatatcaacgcgtgcacggcggtgggcgacaccgtgcggaccacgctggggcctcgggggatggacaagctcatccacgacgacaagggcggagtcaccatctccaacgacggcgccaccatcatgcgcctcctcgacatcgtgcaccccgccgccaagatccttgtcgacatcgccaagtcgcaggactccgaggtcggcgatgggacaactactgtggtgcttctagctgcagaattcttaaaggaagcaaaaccttatatcgaggacggggtgcacccccacagtctaattcgcagttatagaactgcaggcaatatggcaatccaaagggttaaagagctggcagttagcatagaaggaaaaagccttgaagagaagaaatcactgctagccaagtgcgctgctacaacactctcttcaaaacttataggtggtgaaaaagaattctttgcttctatggttgtggatgctgtccttgccattggcaatgatgacaggcttaatcttattgggattaaaaaggttcctggaggtaccatgagagactcttttttggtgaatggtgttgcgttcaagaagacgttttcatatgcaggatttgagcaacaaccaaagaagttccttaatccaaagattcttttgttaaacattgaactagaattgaaatctgagaaggaaaatgcagagatcagattgtctgaccctctgcaataccaatcaattgttgatgctgagtggaacattatttatgacaaactggataaatgtgtgaaaagtggagcaaagatagttctgtctcggctagctattggtgatcttggaacacagtattttgcagatcgagacattttctgtgctggccgtgtcactgaagaagatttgcaacgtgttgctgcagcaactggtggaactgttcaaacttctgtaaataatgtcatcaatgatgtactcggttcctgtgaggtattcgaggaaaagcaagtaggcaatgaaagattcaacatatttagtggctgcccttctggccagacagcgactattgttctccgtggtggtgcagaccagttcattgaggaagctgaacgaagtctccatgatgccatcatgattgtgaggagagcacttaagaactcgacagttgtgccgggtggtggtgctattgatatggaaataagcaagtatctcaggcagcatgcacgaacaattgctgggaagtctcagttctttgtaaattcatttgctaaagcccttgaggttattccacgccaactttgcgataatgctggatttgatgccactgacgttctcaataagctgaggcagaaacatgcatctggtgaaggtgctaattatggtgtagacataaacactggcggaattactgattcctttgcaaactttgtttgggaacctgctgttgtaaagatcaatgctataaatgctgcaaccgaagcttcctgccttattcttagcgtcgacgagacagtgaaaaacccaaagtcggagagcgcacaaggtgaggctgctgccggtgcgatggctggtcgcggtcgaggtgcaatgcgaggacgtggtggcaggggcatgcgcaggcgataaactgggtcaagtagatcatgactttttttttgtttcagaagagatgcaccaggcgtttatcagtgtaccgtccgctggatgtgttatagtagacctgagctttggattct

SEQ ID NO: 125142 - DNA, 113 bp, Zea Mays
ttttttattttttttcctttatgggtgtttgggactattctacaggaacaatggatcattaactaggttgaaagtcgcctagagggggtgaatatggcgaatctaaaatttac

SEQ ID NO: 125143 - DNA, 1050 bp, Zea Mays
atgacggccacgaagctcaacccggccgcggcgccgttcccttgcccctacccctactacgcgccgccgcccccgttcccgctcccgggcgcctgcccgcctacgctcccgctcgtcacctactcctacgtcttgtccccgcagggccgcctcggcttctacctcccggtgcggcagtactcgtccccgccggtcccacgcaagggcgtctccgcggcgccgcaccacggccgcctcccgccgcccaaagtcatggcggccttctccgggccctgcggcgcggggaagcgccaggctgcggcgcctccggtggccgccgccgcgcgtgcccaggtgccggcggcgccgcgcaagccgcggcaggaagcggggagcaggagccacgccgtggcgccgcggcagaaagcggagagcaggaggagccaggccgtggcgccgtggccacggaaggcggctggtccccgcgcgcgcctcgccgcgcagcgtgaggcgcccccgccgccgtccctctacacgaagcggccgctgcattgggtgaagccgaagccctcggagctcggcgagtgcactaccatcatgctccggaatatccccaataagctcaggagcggcgatctgatcagtttgctcgacgagcagtgcgcgcacgccaacagggccgccggctccgtcgtcgcggcgtacgacgtcatgtaccttccgatggacttccggaaggaagcgaactttggctacgcgttcataaacctgacgacgccggcggccgccaaggtgctctactgcgcgttgcaaaactgcggctggaaagtgcagggctccaagaaggtcatcaggatcgaccaggccgcgcagcagggcaaggcgacgctggtgaggcacttggagaggatgcggctggagtgcgacaaggacgagttcctgccggtgcagttctcgccgccgcgcgacggcgtgaacgtccccgccgcgccctgccgcatccgcgtgcagccgctggccctcggcgaggggcgcgggcctcgtcccaggccgaggcccaaggctgcttag

SEQ ID NO: 125144 - DNA, 1992 bp, Zea Mays
caagaagctaaaataaacctcaaattcttaaacctgacccttacgccttcgctcgcgccgccgccgccgccgccgctacgccccgcacctcgcttcatttcgtgtcgccaagatgacgaagcgcactaagaaggcaggaattgttggcaaatatggaaccaggtatggtgctagcttgcgtaagcaaatcaagaagatggaggtatctcagcattccaagtacttttgcgagttctgtgggaagtttgctgtgaagaggaaagcagttggaatttgggggtgcaaggactgtgggaaggtgaaggctggtggtgcttacaccatgaacactgctagtgcggtcaccgtcaggagcacgatccgccgcctgagggagcagactgaagcatgatatagctctttatattattggggtttcctgtagttgctcttgtcaggcatgttgtgggggccttatctagtggaaatgtggaatcactgtactggctgttttgccgagacaatgctccttatatttggtttatgctctaggatctcaaagttgtgttaagatttgcccttggttaccgttctgaatctgacaagtgatatttcatcctatgccatcttgacgtcgaatttggttgtggttttctatgcgcttggctgtgtcaatggtttgctattctgttcttgaaattctacagatactgctgcgtctctgctggttgagtctggtttagatagcaaccagtccttattattggtctttcaagttcaagtcaactaaaatgcgacaaataaaaaaaagaatggagggagtatataactgttcaagtcaaccaatccttattacgcctgcacttgtgtccaaaaagaaatgccccggagctattattggtctgttgccagataagcagtgacgacgcagcatcgaaggtcagagacgacttttttgcgagaacgagcatcaagctgacggaatggagcattattccgataaaaaaaaggtatagccagaactcttgcatcctggtgatggtaaactgccgtgccagtataaacgcgaaggcaggtcacacatactcacaagtccgtcccatctcaggtcatccatccatccatccctgcagcaatggcgtctgcagtgaccagcagcgacaaggagcaggccgtccctaccatcgacgctgacgaagcgcacgcgctgctgagctccggccatggctacgtggatgtcaggatgcggggggacttccacaaggcgcatgcgcccggtgctcggaacgttccctactacctgtccgtcacgccgcaagggaaggagaagaacccacactttgtagaggaagtggctgccttctgtgggaaggatgatgtcttcattgtggtagctattcactcatataaataaataaataaatgtactagtactctataaatagatagatacgcctgtaatcaaggagttgtcgtgtagggttgcaacacggggaacagatccaggttcgcgacggcagaccttctgaacgcggggttcaagaacgtgaggaacctgcaaggtggttaccgctcctttcagcagcgagctcaacagcagtagacatcacgtcctgaaggtatgccagggatgctgcagttgaacgacacatttgcctacctccaggaaaccgtttatctccagcagctctctatcacacctcatactttaaattttactttgtaaacagtgctgtctaccgtcccacctcatactttaaattgtactttataaacaattctgtctaccgtataaaatattacaaacctcttgttttgcatatgcacgatctgttggtcccagccttacaaggtatattcaactgtagaaacaagtctctgtagcatgcgttacaaggaattggactacatgatgcactttgacatatgaatttcctatatgtgcctggcaaaactctgtggcgacatgattgttttaccatcatagcctgacacataaaaaagcaaaaaata

SEQ ID NO: 125145 - DNA, 1811 bp, Zea Mays
caagaagctaaaataaacctcaaattcttaaacctgacccttacgccttcgctcgcgccgccgccgccgccgccgctacgccccgcacctcgcttcatttcgtgtcgccaagatgacgaagcgcactaagaaggcaggaattgttggcaaatatggaaccaggtatggtgctagcttgcgtaagcaaatcaagaagatggaggtatctcagcattccaagtacttttgcgagttctgtgggaagtttgctgtgaagaggaaagcagttggaatttgggggtgcaaggactgtgggaaggtgaaggctggtggtgcttacaccatgaatgcggtcaccgtcaggagcacgatccgccgcctgagggagcagactgaagcatgatatagctctttatattattggggtttcctgtagttgctcttgtcaggcatgttgtgggggccttatctagtggaaatgtggaatcactgtactggctgttttgccgagacaatgctccttatatttggtttatgctctaggatctcaaagttgtgttaagatttgcccttggttaccgttctgaatctgacaagtgatatttcatcctatgccatcttgacgtcgaatttggttgtggttttctatgcgcttggctgtgtcaatggtttgctattctgttcttgaaattctacagatactgctgcgtctctgctggttgagtctggtttagatagcaaccagtccttattattggtctttcaagttcaagtcaactaaaatgcgacaaataaaaaaaagaatggagggagtatataactgttcaagtcaaccaatccttattacgcctgcacttgtgtccaaaaagaaatgccccggagctattattggtctgttgccagataagcagtgacgacgcagcatcgaaggtcagagacgacttttttgcgagaacgagcatcaagctgacggaatggagcattattccgataaaaaaaaggtatagccagaactcttgcatcctggtgatggtaaactgccgtgccagtataaacgcgaaggcaggtcacacatactcacaagtccgtcccatctcaggtcatccatccatccatccctgcagcaatggcgtctgcagtgaccagcagcgacaaggagcaggccgtccctaccatcgacgctgacgaagcgcacgcgctgctgagctccggccatggctacgtggatgtcaggatgcggggggacttccacaaggcgcatgcgcccggtgctcggaacgttccctactacctgtccgtcacgccgcaagggaaggagaagaacccacactttgtagaggaagtggctgccttctgtgggaaggatgatgtcttcattgtgggttgcaacacggggaacagatccaggttcgcgacggcagaccttctgaacgcggggttcaagaacgtgaggaacctgcaaggtggttaccgctcctttcagcagcgagctcaacagcagtagacatcacgtcctgaaggtatgccagggatgctgcagttgaacgacacatttgcctacctccaggaaaccgtttatctccagcagctctctatcacacctcatactttaaattttactttgtaaacagtgctgtctaccgtcccacctcatactttaaattgtactttataaacaattctgtctaccgtataaaatattacaaacctcttgttttgcatatgcacgatctgttggtcccagccttacaaggtatattcaactgtagaaacaagtctctgtagcatgcgttacaaggaattggactacatgatgcactttgacatatgaa

SEQ ID NO: 125146 - DNA, 1914 bp, Zea Mays
caagaagctaaaataaacctcaaattcttaaacctgacccttacgccttcgctcgcgccgccgccgccgccgccgctacgccccgcacctcgcttcatttcgtgtcgccaagatggtacgtcgcttcacctcttccccccaatcttctggatgcctagttccttgttgcgcgagtagtgttgccttggtagcccagcttcggtttgatgtgtatatggctagctgtggatgcctagttatgtctggccgcttgttatgatgtgctgtgcgagatcttagtgtttgacttcatagtccagctccagtttgatgtgttcggctagctccatactttaatttttcgggataggaacatgtccagcgatcatactctgtgattcgtctggaaagtatcagttgacaagatagcgatgagaaaggtttggtttgtaccatttgtttttcgggaatgtatctctaagaatttcttatatcatcataaatctggatgtgtcaatctatcatcactaacctatatgctcagtatatcatatttgttagattataaagtttgaccaatcgaaaacaatgttacaagtatatgtgaatatacataatatttcatgagttctcttaggtatgttgcatgtgtggttttcatcctgctgcttgtgcaatttccaagagattggaaacatacattgttagtttagtataatggcaaactagttttctcataccaaactgggtgaaaataaacatttcttgtaaattcactttggtcatctgacacctttgccgtgtaatctgaagccattccgctgcacctggcagtatggaacatgaaagtagtatgcggtgcaaagtttagccttttaatatctcatgtataaaacagcggtgtataatagttttccccgtgtgcaggttttaattgttatgcctttgctttttcaatgtataatgggtaatttttctctttctgctattggagagttaatcgcagctaactcaactatttttttaccgttccacatatctagtgtttaagaagttatatttcccttgttgattgttaacctacttgtgtgtctaaaagtagtgttcaagctacagttctacacttccgagttatattgagtagctgtgtaatttattttgcttttataatccctatgcagacgaagcgcactaagaaggcaggaattgttggcaaatatggtacatgttagagtatgatatttcccgatttgtcaatctgggacatgaagttaacatcgcaaattataatgttacaggaaccaggtatggtgctagcttgcgtaagcaaatcaagaagatggaggtatctcagcattccaagtacttttgcgagttctgtgggaagtttgctgtgaagaggaaagcagttggaatttgggggtgcaaggactgtgggaaggtgaaggctggtggtgcttacaccatgaacactgctagtgcggtcaccgtcaggagcacgatccgccgcctgagggagcagactgaagcatgatatagctctttatattattggggtttcctgtagttgctcttgtcaggcatgttgtgggggccttatctagtggaaatgtggaatcactgtactggctgttttgccgagacaatgctccttatatttggtttatgctctaggatctcaaagttgtgttaagatttgcccttggttaccgttctgaatctgacaagtgatatttcatcctatgccatcttgacgtcgaatttggttgtggttttctatgcgcttggctgtgtcaatggtttgctattctgttcttgaaattctacagatactgctgcgtctctgctggttgagtctggtttagatagcaaccagtccttattattggtctttcaagttcaagtcaactaaaatgcgacaaataaaaaaaagaa

SEQ ID NO: 125147 - DNA, 667 bp, Zea Mays
cttgttgattgttaacctacttgtgtgtctaaaagtagtgttcaagctacagttctacacttccgagttatattgagtagctgtgtaatttattttgcttttataatccctatgcagacgaagcgcactaagaaggcaggaattgttggcaaatatggaaccaggtatggtgctagcttgcgtaagcaaatcaagaagatggaggtatctcagcattccaagtacttttgcgagttctgtgggaagtttgctgtgaagaggaaagcagttggaatttgggggtgcaaggactgtgggaaggtgaaggctggtggtgcttacaccatgaacactgctagtgcggtcaccgtcaggagcacgatccgccgcctgagggagcagactgaagcatgatatagctctttatattattggggtttcctgtagttgctcttgtcaggcatgttgtgggggccttatctagtggaaatgtggaatcactgtactggctgttttgccgagacaatgctccttatatttggtttatgctctaggatctcaaagttgtgttaagatttgcccttggttaccgttctgaatctgacaagtgatatttcatcctatgccatcttgacgtcgaatttggttgtggttttctatgcgcttggctgtgtcaatggtttgctat

SEQ ID NO: 125148 - DNA, 594 bp, Zea Mays
aaatgtaggctgcagtcagattgattttgagcacatgaaatcaattagttttcgatatatctgtttgtcacaagcacatgaaatcaattagtcttcgatatatctgtttgtcacatttgaatgatttataagatgtctgggcatgtccatcaatgtgtttctaagatacatttgaagacagacagcatttgttccgaatccaacctttgctgtgctgtgtttccagtttgctgtgaagaggaaagcagttggaatttgggggtgcaaggactgtgggaaggtgaaggctggtggtgcttacaccatgaagtaagtaattcttcgcctgtccgaaaaccacaatttgttagccacggctaaattctgttaatgtgtttgcagcactgctagtgcggtcaccgtcaggagcacgatccgccgcctgagggagcagactgaagcatgatatagctctttatattattggggtttcctgtagttgctcttgtcaggcatgttgtgggggccttatctagtggaaatgtggaatcactgtactggctgttttgccgagacaatgctccttatatttggtttatgctctaggatctcaaa

SEQ ID NO: 125149 - DNA, 337 bp, Zea Mays
caagaagctaaaataaacctcaaattcttaaacctgacccttacgccttcgctcgcgccgccgccgccgccgccgctacgccccgcacctcgcttcatttcgtgtcgccaagatgacgaagcgcactaagaaggcaggaattgttggcaaatatggaaccaggtatggtgctagcttgcgtaagcaaatcaagaagatggaggtatctcagcattccaagtacttttgcaaggactgtgggaaggtgaaggctggtggtgcttacaccatgaacactgctagtgcggtcaccgtcaggagcacgatccgccgcctgagggagcagactgaagcatga

SEQ ID NO: 125150 - DNA, 2955 bp, Zea Mays
tgtataactcgctaactgtattgtcttgactgacttttgtgcctgcaggccaacgttgatgctttccaggcatgtaaccacttccatgatatgtggtctcatggcagggttattgttcacacatttgcaagcaagcccaagcaccttaagcatttgctcttcatgccctgtgccgcagagtgttggatctaggacatcaaccagctttccctgagagctcatctccagcacccatgggacaagttcttttgatgttgtcaggaccggaacaggtcgcaagcctgtgagcagctcaagaaggacaactccgaagctgtatatatcacctctcagagtggccacccatccgtgcgcatactcaggggggatgtaacctagagtgccaaccaactctgttgtaacatgggttttgttgggaaggatcaaccttgacagtccaaagtctgcaacgtaagcttttaattctttgtctagcaggatgttgctgcatttgatgtcacggtgcacaatctgaggtttgcagtcattatggatgtaagaaaggccacggcttgctccttgcgcaatccttagcctcgtcggccagtcaagaaatgtgctggcatcatcatccctgttgtgaagccaatcatctaggctgccattctccatgtaggagtatatgaggaatctcgagttcccctggatgcagtacccccacagtggcacaagatggtcgtgctgtgccatggacagtgcttcaacctctgcagtgaactccctttccatcaagcacatttcatcattgagcttcttgatagcaagcttgcagccatcaggtagttcagccttatagactagaccataaccaccacacccaatgatgttttccttgttgaagttatttgtggcttttacaatgtcagagaacgtgagcttgttttcatttccctttccttgtggcaccatgatcactccatgctccaagctggagttgaatgtgcttgtttcaagatatccgttgtcctcccttctaccttgggccgttaaacggtttatcctgatggagacaaggagacgccacagcaacaaaagaatggcaatcattgcaaagaacacaccaaatgcaattgcgagaatggccttcttatttcttcctcctgtggataccagaggcacatcggctgaatcgcatcgacgaccgatcataaagccgcacagcttcggattccctagaaagctggagttctgaaatgtaccaaattggccaccggttggaataggcccttccaggtcattgttagaaacgttgaatgtggaaaggaagtgcagattctccaatgcaactgggattttacccgtgagatcattgctggataaatcaagcaccagcaggtttgtgagattgcagatagatgtggggatcggtccggttaagctgttggagctgatatcaagtgaaaggaggcctttcaactgaccaatctctgggggaatctgacctgtgaatctgttgctgcttagatttagaactttaggaaaagcaatcggtatgcggtactgacgtgatggaccatcatagactggcagatcgaaaacgcttgcgtccaaatgagctgcagtcctctctgaagttagcattggtatactcactacttctttcggaatttcccctgtaaggctgttgtttgatatgtctaagtagaaaaggtactccagtgtgtggatccaggttggtatgggtccactgagtcgattgccatctaagaacaacatctccagatttactaacttcgatatccagagaggtatttctcctgacaggaggcagtttccgatgtccagaacctgaagattctcaaaaccgtagatcacggcatcatccggtatggtttcttcaaagaaattgattccaagaagaagcgtggtcaggttcttggagctcctcagtatctgaagcgcgtttgttatatttgaaaggctgttgtttgtaagcgacaggaacgagagggacttcaggttgcctagcccttctgataactgtccatggaacttattcgaagctagccgcagcgcagtcaggtttctacaggagtatatgctctccggaatcgtgccactgaagttattcagcatgagatctatggttcttagactgggcatgttgctgaaatcaacccgggagagttcgccactgaaaccgttgctcctaaggtctagagttatgagatccgtgcagttgctcagggctggtggcagctccccatacatgctgttatagtccagatgaagttcttgcaatctcttgagctgacctatggtatcaggtatcttgccgccgaaactgttgtctcctaggtcaaggacgaccagattggagagcttggctacatgtgcgccatcgactgttccatgcaaaaagttgctggagaaggagaggcgttccagcgatgtagcgttgaaaagctcacgggggagagtcccgctgaggttgttgtggccagccctgagtactctgagcatggagcagttcccaagccctgggggcacgccgccactgaacttgttgtagctgagttcgagcacggcgaaggacggcgctgtggcacagaactggtccgggatctgcccggtcaagctgttgttgctggcgttcagcgcgaccagactccgcatcctctcccacgccgtggacgtgagctgccccgtgaacgagttgctcgagatgttgagtacctcagtcggtgcctcgccagagcccggtgaggccggcgtcgtaagagagctccgcgaggaactggagcagggacgccctctccggctccccgcaggcgctggcgcaggactcccaggagatggagatgagcagcagcgcaagggcgagggcgcgaggccggtggaaggaggtacgtgcagtgtgttccggttccggctccggctccggcttctcttgcatgaaacgtggagtggctgcat

SEQ ID NO: 125151 - DNA, 114 bp, Zea Mays
atgacagaagattcaatcatatacttgagtaatacttattgcactatccaaactccagagtcacataatttctcacatacacacaagtaacacacagatattgtgacacaccac

SEQ ID NO: 125152 - DNA, 2271 bp, Zea Mays
atgtcgtacacgttccccacgcagcccatcgtggcgccggcgaagaagaaggacgcccgcaaggacgccgccgacgccgcagagaggcactgcagccctctgccgtcgagggagcacgggagggcggccgtcgccgtcgacggcgacaggggcagccagtacgcgctcaagtgggccgccgacaacatcctctcccgcgcccgccccttcttcctcgtccacgtccgccgcaagcccaccttcctccagggccccggcggtaagcagttcgccatatcacacgtgcaggacgacatcccggccgatcttcacgcccagatggaccttcaggcgaaagatctgatgatccccttccagtgtttctgcagcaggagagggggaaattatcctggacggaacagacgtgtcgaaggcgatcgtcgatttcgtcgccaccaacaaggtcgacaagttagtgctgggctcagcatccaggaacgcctttacaaggacgaggatgaagccgaactgagcctctttaggattgaacgtaagcagcagcagcagcaggatggcgatactgatacgcttccgtggaactaccacgcggagggattatcggtgatgaccatttactagctatagtactacacagtgttaaagaaaatgtttgtgttcgaatccgaactgaatcgatctgaagcggtccaaaacgatggccagaacagaaacatgttcggattcgacgtgaaaaacgttcgtgactggaatgctttgaacgtcaggagcagagggagatgggcaggaccccagaaagctctcacaggaacagaccggaggcggcggcggcggcagaagcagaagcagaagcagaagcgtgttctcagtcagcaatcggcccgaagcataagccttcgagcctggacactctacctcatcagcgtggagaggagttcgcagactacgactcgcaggacatcatccatccgatcttgaggcgctggccgccgatttgctcgcctagggacgacagcaggggcgggtcgtcgtcggctactccggaagaggctcgcaagctcgacctgaagctcagggccctgccgaggccgatcgagaccaagaggatgctggagtgcctgcctaccaggctcgagtgcaggatattcaccgcggacgatatcgcgaacgcgaccaaccatttcgccgatgagctcaagatcggggaaggagggtatgggccggtctacaaggccacgcttgacgacactctcgtggccgtcaagatcctctactctaatgtgacgcagggactgaagcagtttcgacaggaggttgagctgctgaacaacatccgtcacccgaacatggtgcgcctggtgggggcgtgcccggtgtacggctgcctggtgtacgagtacatgccgaacgggagcctggaggaccggctcttctgccgcggcggcacggcgccgctgccgtggcggctgcggttcagggtggccgtggagatcgcgagcgggctgctgtacctgcacaagatgaggcccgaggcgttcgtgcaccgcgacctcaagccgggcaacatcctgctggacgccgccttcgcggccaagatcggcgacgtcgggctggcgcgcatcatcccgcgcgccgtggacgtggacggcgccgccacgcagtaccgggagacggcggccgccggcaccttctgctacatcgacccggagtaccagaagacggggctgctgtgcaccaagtccgacgtgtacgcgctcggcgtcatcctcctccagatggtcaccgcccgggagcccatggggctggcgtacgccgtctcggacgcgctggaggagggcacgttccccgacctcctggacggcaacgtggccggctggccggtgcccgaggcgcaggcgttcgccgagctcgcgctcaagtgctgcgagatgcggcgcagggaccggccggacctggaaaccgtcgtcatgcccgagctggtccgcctgcaccgcgtcgtctcgccgtccgagtatccctcgtcttcttcctcgctccctcattccatggatcaagctcatcaccgttcagcgagcaacaaggatttgcggttggataatgacctggttgacattctgagcgagggaagactgaagggaggagcatcatttgccatgtaacatgcatgagacgagggccacaatgtctacatataactgcttcccactggaatatgttgctgttctatacatcttctgtaaacatttataccaccagcttagcctggaagctttt

SEQ ID NO: 125153 - DNA, 857 bp, Zea Mays
ttgacgccatcgacgccatgccctcgcgctccacctccgccccgagagcagcgcgcaccgcccggagatgtcgtacacgttccccacgcagcccatcgtggcgccggcgaagaagaaggacgcccgcaaggacgccgccgacgccgcagagaggcactgcagccctctgccgtcgagggagcacgggagggcggccgtcgccgtcgacggcgacaggggcagccagtacgcgctcaagtgggccgccgacaacatcctctcccgcgcccgccccttcttcctcgtccacgtccgccgcaagcccaccttcctccagggccccggcggtaagcagttcgccatatcacacgtgcaggacgacatcccggccgatcttcacgcccagatggaccttcaggcgaaagatctgatgatccccttccagtgtttctgcagcaggagagggttgcaatgcagggaaattatcctggacggaacagacgtgtcgaaggcgatcgtcgatttcgtcgccaccaacaaggtcgacaagttagtgctgggctcagcatccaggaacgcctttacaaggacgatatggaagctggacgtgccgacatccgtgacgaagtccgcgccgagcttctgttcggtctacgtgatagcgaaagggaagatctcgtccttcaggcccgccacctacgcgaacgagacaagcggcagcaggggagatccggaacctgatcacccgcctgggaacagcctgccagttggtgaaccggctcacaacaagccagaaaacgggcacggcggcatttcgaggcctatcccagtacgtgcttcgacgcccacccatggtggcagctccgacgaaccgccga

SEQ ID NO: 125154 - DNA, 315 bp, Zea Mays
atggcgtccgggattggagatcccggaatcgaggcaaggcatggtcgagagcatgattacttcggatgcgattctgcggcaaccaaccgcggacgggaggatggaacgatgaacgttgatggtgaatctgcggcaaccaaccacagacggggcgctgattacgtcagttgggattatgcggcatccgcggaagggattggagcggcaaccgcggacgggattctggggcatggcatggtgggcgctgatggcgtcagatgggattctgcggcatccgcggaagggattatgaggcagccacgaaagggcttctag

SEQ ID NO: 125155 - DNA, 1321 bp, Zea Mays
ctccagcgttgccaccaggtagtgggaaggaagctaaatatttacaccgaagaacctaacatgctggaacctgctgtgaatcaacagtaaaaaaaagttccctacaatctttatatatttatatatatatgtacatgaagctcccaagagaaaaaaaagaataaaaatgagcagaggtagaacggatctgattttttgttgcatcctacaccagcacagctttccttattttcctccccggttaatgttcctaggaatgcgaacgtcggtgtccaagtacctgtaacgagcatccattgtccctgacacggcagccctggccatggcccctgcaactacatatccatcgtcaacttcatcaagagtgaacctttcttgactagagctagacctgttgctgctgctccttgttccacttccaccactgcttctcctttcccctgttctcgtccttctccggactcctcctgggggggaagacctacagaacgctttgcagaagatacaggacgtccaccagcttgctctaaccccgtggtaaacctcgtagtcgtcgtctccagcttcgtcaccgtccccgtactcgatgacatagtctccaagaaccacaccgtttggaacctgcgcgtgtattgtgctcaggacatctaccacgtcggaagaccgctgcaggttctcccaatcggcccggcgagcagggtcgatcgcggaagggcgcgagtccggatgcttttgctgggtgtgcctctggagctcgtggaagctgccgacgtacgagcagcggctctcttcgcagcatcttctcttctggttaaggtgcgagcgagcctcgccgatgacgaaccaccccatcacatcgcctctacacagcgggcaagccgggcggttgttgtttgcattcgacgaagagatggtaatggtatggatgctgttgagaggagccacggtacgggaggaggctctggcgttggctggcactggcagtggcagtccatgagcgcctctgaacctctcgagacagttggagcgagtctggtcggtgtcgcatatgaaaggcctacagcccttctcatacgaggcgcacctgagcaacactgcattgtggggggaatcgagacagattgggcacgcgacatcctccacccagctttgatcgaactttatgtcctggtcgatggagctgggcctccttaccaccttcttcgttaccagattccctgaacccatgctggaattcctaggctggtgttcgtgtttggctttggcacaaccaaagctgtcttctcatggcaaacctgcatcgatcaagcggcaagaaaat

SEQ ID NO: 125156 - DNA, 1011 bp, Zea Mays
aaaacctcgctggttgtgcatcactggcagcaagatgccaggagctggtaatcctgctggagttggcccacttcctcgcctcgaccatgttgctgtgagccttcctggtgggagagttttgatatttggtgggtctgtggcaggtcttcattctgcttcaaaactttacctcctggatccaactgaagagaagctgacctggaggcttctgaatgctccagggcatcctccacggttcgcctggggccatagtacttgtgttgttggagggacaaaggcaatagttattggaggaggaactggagaagagtggacactaacagaaatacatgagctttctctagcaagctcattagtctgaagatgggaaggtcccagcaagctttgcgtcttccttgtagcaatgcctctggagaccaggcagctacctcttcatgtgactgaggctgattatttgtttttttttcaacagtggggtgcaacgtgcaagcaaaagggttggtgaagtggacaaccagacctgattacctgtgccatgcctgggagtaggcaggctggtctagaagtaacctctgccgttgttgtttatatgttcttctaccatgatgaaatagctggcacccgtccattagctaatcacagttcttatcatgttgccaaggggattcgcattgtgtagctggagcccccgatgcaatgcaacaggtactctgccttgtggttgcgccatcgtccgtgacaaatgactctgtggtcttctgatttttgacccatcagctgccgctttctggcgaagctgtaacactatcgtatttagcaatgcttttgcctcacttcgtgcttactcaactgctgctttccggtgaagctgtaacagtgtaacacaaacacctgttgttttagttttgcttttgtatcactttatgttatgcttacctcaggtgatagtgatacttgtaacatttttctttttaatctgatcatcaaaggatgaatatcggcaattccgtc

SEQ ID NO: 125157 - DNA, 1842 bp, Zea Mays
ggtaggtcacatgcggtcggatggtgagagcctgagagggggtggcagcaccatggcgcgcgcttcaccgtccgtcccgacgcgtcggtcgagtactcgagtcgtcagcggtcggtcagcactcggcacccgattcttccaaagccgccacttatgtcctcgcgagcttggttaataacgccgcgtgagctgggtgtgggtggggagtttgtcagctgggtggcgcgagcgtcaggcgatggcggaggcggaggagaaggcgagggtcgtggtggttggcggcggcgtcgccggctccctcctcgccaagactatgcagggccacgccgacgtcgtcctcctcgacccgaaagactacctggagatcccctgggctgagctgcgctccatggtcgaaccgtcctttgctgagagatcgttgatctaccacaaagattacctcagcgatgcgaccatcgtgacatcttctgcggtcaatatcactgaacacgcggtccttactgctgacggccactctcttccatatgattatctcatcatagcgactggccatgctttggcttctcctgccagcagagctgagaggataaaagaattccagagagataatgggaagatagagtcgtcagaatctgtgctgataattgggggtggtccaactggtgttgaactggctggagagattgtggtagactacccggggaagagggtgacccttatccatagaggaccgcgtttactcgaattcattggagataaggcttcaaagaagtgccttgattggctgacttcaaagaaagtagacgtgctccttcagcaatcagttgagttgggctcattatcagacacagagaaggtgtacaagacatcaggcggagaaacagtaacagctgattgccactttgtatgcattggaaagccactgagttcgtcgtggctacatgataccatcctaaaggaatccttggatagcaaggggagagtaatggtggaaaaggatttaagagtgaaaggttttaataacatttttgcgattggtgacatcacagatattcctgaaatcaaacaagggtacctcgcccagaagcacgcgctgctagtggcgaagaacctgaagctactgaccaagggtctccctaacagcaaactggcgacttacagcaccggctatccgctggcgctcgtctctcttggaaggaaggaagggctggctcagtttccattgctgacgctcagcgggtgcttgccaggcatgatcaaatccggggatctattcgtcagcaagacgaggaagcagatgggcctgaatggttgactccagtccgaggaagcttgaaaaaatagctcgggtcctgggttatatacagacgatggattcctttacacacagcttgtgttttgctcgtatggccatatgtgttcgttctgtatctgtacgtgtgatggtgtcgtcgtgtggatgcttggaatggtgactagcagagtgtatgctacgtacatgtatacatggacctttttggtccaacaaaatgttgcttctgtagtatgtatgggcgcattttgtttgctggcaagtaaacaatgaaatcatctttgcttgctggcaacacgatgtcagcagtggcaatttgatgcctatgggccggcctatggatggagaagatatatgtgcatctggacatctggtcctatggggctatgggcgcctggagcagccgtgcaagtctgggactgcacgagtgtccagtgcccatccattgcaatctgttcccgtgcttgggcttgcactgttctccctgtacggagtagtattcacggttaatgtctgcaaaaaaaaaaaaa

SEQ ID NO: 125158 - DNA, 636 bp, Zea Mays
atgacagtctcgaaggcgccgacgagcgccttgaccttgctccgacgcttctccagcagcttcgtgcgcgcctcctcgatcacgtcgttgctccgcgccacctctcggcgacgcggctgctccgactccgctcgcgcctccaacgccgtcctcacacggctgccctggaacctccgcattgcctcctccttctcgtcctcctccgcctcctgcttcttgatcgcctccttcacaaccgtcacgaacttgtccgccaccacgtcttccactgctgctacggcaacgatggcctccggcgccggcgccggcgacagagccgcttctttcttgggcgattccacctcctcctcgtccttcgaggttaaggcggcggcgatgacgataggctccggcgccggcgacagagccgcttctttcttgggcgactccacctcctcctcctcctccttcgaggttgcggctgtggcgatgacgatagcctccggcaccggcgacagagccgctcctttcttgggcgactccacctcctcctcctccttcgaggttgcggcggcggcggcagtctccttctccgcagcaacgaccggcaacgcgtcctcgtgtatgatcttctcggggacgatctcggggtggtga

SEQ ID NO: 125159 - DNA, 1686 bp, Zea Mays
ccccgatcattctcatccactcctctgctttcctcaaactcaaaggaaagcacgcgagcagcttcccttgcacgcctccctctcctctcgtccatccgttccccccttcccctgcttcccggctctccctccccccatccctgcacgccccttttcatgcgcgaggaggggccgtggggaccaccaccagcacctccatccgcgcgcatctcgcggtggtgctcctcctcctcctccccctgctcccggggcgggcgctctcctgttcctcctcctcctgctgctggtgccagggccgggagggcggcgcggaggtggcgctcatggggctcgccggggacgggtcggcggacaccgccaacctcagtaatagtgaaaatggtcggttcagttatggagttgcaagttctcccgggaaaagagcatcgatggaggacttctatgaggcaaggatagacgacgttgacggagagaaagttggaatgtttggtgtgtatgatggtcacggaggagtcagagcagctgagtacgttaagcagcatcttttcagcaatttaatcaaacacccaaagttcatcactgataccaaggccgctattgctgaaacttacaaccgcacagattcagaatttctgaaagctgatagcactcaaactcgagatgctggctcaactgcctcaacagctattattgtaggtgatcgtttgcttgttgcaaatgttggagattctagagctgttatttctaaaggaggacaggcaattgcggtttcaagggatcacaaacctgatcagacagatgagaggcaaagaattgaggatgcagggggctttgttatgtgggctgggacatggagagtgggtggcgttctcgctgtctctcgagcatttggtgataaactcttgaagccgtatgttgttgctgaccctgaaatcaaggaggaggtggtcgacagctcccttgaattcctcatccttgctagcgacggactctgggatgttgtcactaatgaggaagctgttgccatggtcaagcctatccaggacccccaggaagcagcaaacaagcttctcgaagaagcttcccgaaggggaagctccgataacatcacagttatcatcgtccgcttcatagacggaactaccggtgagaaatcaggcgacgacaaagagaccaccaacgaccaacactcctagctgtctcgtgtagggatccatcgtgctgtgtgttcttctggctgttgtacctgatgctcagagtagacgctggctgctgctccgcaaggaaactgactcccccgaccgccgttcatgctcctggctggctggctcgctggccgcctcgacgggaacgctgccgtagaatgacgactggggctggtgttgttgttacagtatggtccttttttctttcttctttcccctttcatccattaagctctgtgatgtagctgcccgtgctgttgattcatgaaatcatgctagagattttttcctggcagtaagtgcgtgcctgtaaaactgtcgaacaatttggacgaaaattgtacactgcagtatgtaaccatcaaaatctccccccctacattcgccttgtggtgttctgctgtcatgcctcctgaaaattgctaccaagccgtggatggaggtgtgcaaggaatcggaaagctcgagattctacagagca

SEQ ID NO: 125160 - DNA, 1751 bp, Zea Mays
ccccgatcattctcatccactcctctgctttcctcaaactcaaaggaaagcacgcgagcagcttcccttgcacgcctccctctcctctcgtccatccgttccccccttcccctgcttcccggctctccctccccccatccctgcacgccccttttcatgcgcgaggaggggccgtggggaccaccaccagcacctccatccgcgcgcatctcgcggtggtgctcctcctcctcctccccctgctcccggggcgggcgctctcctgttcctcctcctcctgctgctggtgccagggccgggagggcggcgcggaggtggcgctcatggggctcgccggggacgggtcggcggacaccgccaacctcagtaatagtgaaaatggtcggttcagttatggagttgcaagttctcccgggaaaagagcatcgatggaggacttctatgaggcaaggatagacgacgttgacggagagaaagttggaatgtttggtgtgtatgatggtcacggaggagtcagagcagctgagtacgttaagcagcatcttttcagcaatttaatcaaacacccaaagttcatcactgataccaaggccgctattgctgaaacttacaaccgcacagattcagaatttctgaaagctgatagcactcaaactcgagatgctggctcaactgcctcaacagctattattgtaggtgatcgtttgcttgttgcaaatgttggagattctagagctgttatttctaaaggaggacaggcaattgcggtttcaagggatcacaaacctgatcagacagatgagaggcaaagaattgaggatgcagggggctttgttatgtgggctgggacatggagagtgggtggcgttctcgctgtctctcgagcatttggtgataaactcttgaagccgtatgttgttgctgaccctgaaatcaaggaggaggtggtcgacagctcccttgaattcctcatccttgctagcgacggactctgggatgttgtcactaatgaggtacctacagatgttactaaatatctccttcggtgcaattggtctgtctgtctgtcactccacctgatgtaatgtattttacaggaagctgttgccatggtcaagcctatccaggacccccaggaagcagcaaacaagcttctcgaagaagcttcccgaaggggaagctccgataacatcacagttatcatcgtccgcttcatagacggaactaccggtgagaaatcaggcgacgacaaagagaccaccaacgaccaacactcctagctgtctcgtgtagggatccatcgtgctgtgtgttcttctggctgttgtacctgatgctcagagtagacgctggctgctgctccgcaaggaaactgactcccccgaccgccgttcatgctcctggctggctggctcgctggccgcctcgacgggaacgctgccgtagaatgacgactggggctggtgttgttgttacagtatggtccttttttctttcttctttcccctttcatccattaagctctgtgatgtagctgcccgtgctgttgattcatgaaatcatgctagagattttttcctggcagtaagtgcgtgcctgtaaaactgtcgaacaatttggacgaaaattgtacactgcagtatgtaaccatcaaaatctccccccctacattcgccttgtggtgttctgctgtcatgcctcctgaaaattgctaccaagccgtggatggaggtgtgcaaggaatcggaaag

SEQ ID NO: 125161 - DNA, 1117 bp, Zea Mays
tttttttccccatataatccatctcatatattaagatcgatttttggtacattgaaagttaatgctcacagatcacctaaaatacaaccaattttacatagccacacagctgattgaatatctccaaatgaatgatatggtgccagggacactaacagaagtacaaaccgagagaagatagctcagaaagatgtaacatctcagaccatgggtaacttatgttcagggacactaacaggagctaaggaaatgatcgccaccttctattctccatgctaattaaatagtaacttatgttcatataatgacaccactactctgaccatgggttcattattgccttattgggtcacctatctagtgcgggcctctttgccgactgggtcaaatgaatcatttgccacatagcggttattgcatcattttgatccaatctttgggttattccatggaggctatttcactgcagaagcactccgatgcaagctggtcattgcactggcaatcttaccactcgagtgtttgatctggaagctcccagccctcctgggccggggcatgtaaagggcactgagcatcttctccaaaccatcaacagtgtaccttacatacttgctggtgtttccatcttgctcaacaagtggcccatagttctgcaagtagctccgataggcaggaacaatagtctgcaccacaagattacatgtcctctcccgcaaatccttgtctggtataacccatgatgattgcctgcaatgcatctcatcgaagcttgaattgaatgttttgaggcgctgcttcaccaggtcccttgccgtagcctggcccttggagaacagtattaatccctcccggttcagtagtggcgaaagtgctccccagctctccctgatgaacattgacaaatagtagtccttgtattgttcatgctctcgcagccacacatcacccaagatctctcctaacttagtagccttcaaatgcctaaagaaatgccaatgagtattcatcatgaagagatacgagagcgtagcattgtcatatgccttggaccaaacatcaaaattagcttcaagggccttgacaatgtttagcaccacatcaacaagcatcctgt

SEQ ID NO: 125162 - DNA, 2591 bp, Zea Mays
tgtatttagtatttccttatgcacatgggatgcaatgacttggactgttggttgggaattgtttcccagctgttaatttattgtttcctttgctggtgagctatcaaactaaacatgcattcatccaggaaattcattattgtaaatcgatacaataatatgttgaatgatggatctccatgtatactttgaaccaaattttattctcttccaaagttttttggaagtatttggtagttacatggaagtttggttcttggtgacagaataatcatttgtgtttagtttcctgtcagtttacgtgattgaattgcacctcagttcacattactagctattctgtcatacaaccaatgcaatatgctgcccttcctacaagggaaccttcaggttggacaccattcacattggtactgtctgatcacttcctgacattcaattctctgtttgtgctgtatgtaccaggtagcagaaactgttctgctgcagtctgacaaagtggagggcttaggagcttctgcttcttttatgtctgaacaatctttgctttatttgggattgttgggagagtactctcgtgcaactaggaaaaggcacaaggttccgtcccactgcatgcgtcaagagactgtctggttttcttgttctgatttgtcatttgctggtgctcaaagccggcttggtttcctcgaaggatcagcatctactcttgattgtggactttgtcgcatctgatatcaacttcataaatctttatccaagatggcgctgcaaaacattggtgcttcaaacagggatgatgccttctacaggtacaagatgcccagaatgattaccaagatagaaggccgtggtaatggtatcaagacaaatgttgtgaacatggttgacatagcaaaagcacttgccaggccagcttcctacacaaccaagtactttggatgtgagcttggtgcacagtccaaatttgatgagaagacagggatttccttggttaacggggctcatgatactgcaaagctggctggtctccttgaggtattcatcaagaagtatgtccaatgttatgggtgtggaaatcctgagacagagattctcatctcaaagacccagatgatatcactgaaatgtgcagcctgtgggttcgtctcagatgttgatatgagggacaagctcacaaccttcattctgaaaaacccaccagaacagaagaagggcggaaaagacaagaaggccatgaggagagctgagaaggaacggctgaaggaaggtgaggctgctgatgaggagcagaagaaactgaagaaggatgcaaagaagaagggttccaaggattccactgctaagggtttgaagaagaaggctactactgctactggctctgatgaggatcactcatcctctccaactcgcagccatgatggtgacaaagcagctgcagatgatgatgacgatgatgtccagtggcagactgacacttcaattgaggctgcgaagcagcgcatgcaagagcagctgagtgcagcaactgctgaaatggtgatgctgtcgactgaggagactgagaagaagatgaaacaggcaacccacaaagatggaagcactaatggttcagcaaaagaaatccctaatgacaagcctgccgtcactaagcctagtccctatgaagaactgattggagacatcaaggctagcctaggaagtgctccgacccctacccagctcaaggctgtgctggcctcatcaacccttcctccccaggacgtgatgaatgctctcctggaggctctctttggtggtgtgggtaagggattcaccaaagaggttgtgaagaacaagaagtaccttgcagttgctgtgccagatgagggtgcccagacccttctggttcaggccattgaggcttttggtgggaagtgcaaccctgaggcgctgaaggaggttcccgttgtcctcaaagccctctacgatggagatatcctggacgaggaaaccattgtggactggtacaatgatgctgtcgcagctgggaaggactcccaggttgtcaagaatgccaagccgttcgtcgagtggctccagagtgccgagtctgatgaagagggtgacgacgagtgaagaggccacgctgctctactgctaatggccgaacttgataatattatttcaataagtttgttttgcttgcctggtgtcggtgtttaaaactgttaattgtcgtgtggcgcagcatactcttctgttgctgcatgtgtcgtcgtcagtttggttgtctgttggatgtcacagtttattatggattgctactatacaagtatttgtttcggatgtgttgtataacctttcgggatgtaacattttatgattgcactgttgcttctctaagggttgaggattatgaaatccaggtaaggctacggcgtagtcgtcttcatagcgggaacttgtagagtatgaccggtacttgtagagtacatgcagctcttactcgaaaaatgcggagtgcgagaacgcccaatcggaggagaggaggaagcggtctgttgggtgagaaaagaatagagtcaaaaaaaaaaatgataaaagatata

SEQ ID NO: 125163 - DNA, 2604 bp, Zea Mays
tatttatataaaatcgctatatatatacatttatattttgatatttttgtatcttacttatatactttaaagtattatttttagtttatagatttagccaacgagaaattcaaaataagtaactacatttaaataaatatttaaaaagctatgggagtttttttaccaaaaatatataataattaaaaagaatataaaggcttctagttgctctcacgccaggtcacacgaaaaagaaaataaaagaaaagcagacaaaaatgttttaaatcgacaaaaatcagagaatgcgaggccggcaagtcggcaaccctaggtctgtggttgatccccaacacctcctgccctcctataaaagccgcccgcctccgtttctcgcctgcaccgcatcgcctcgccgctgttccccgcaacctatcgacccaatctcgtccgacccggcgcgtcgtcccctccagatctccgtcgccctctccaggtagcagaaactgttctgctgcagtctgacaaagtggagggcttaggagcttctgcttcttttatgtctgaacaatctttgctttatttgggattgttgggagagtactctcgtgcaactaggaaaaggcacaaggttccgtcccactgcatgcgtcaagagactgtctggttttcttgttctgatttgtcatttgctggtgctcaaagccggcttggtttcctcgaaggatcagcatctactcttgattgtggactttgtcgcatctgatatcaacttcataaatctttatccaagatggcgctgcaaaacattggtgcttcaaacagggatgatgccttctacaggtacaagatgcccagaatgattaccaagatagaaggccgtggtaatggtatcaagacaaatgttgtgaacatggttgacatagcaaaagcacttgccaggccagcttcctacacaaccaagtactttggatgtgagcttggtgcacagtccaaatttgatgagaagacagggatttccttggttaacggggctcatgatactgcaaagctggctggtctccttgaggtattcatcaagaagtatgtccaatgttatgggtgtggaaatcctgagacagagattctcatctcaaagacccagatgatatcactgaaatgtgcagcctgtgggttcgtctcagatgttgatatgagggacaagctcacaaccttcattctgaaaaacccaccagaacagaagaagggcggaaaagacaagaaggccatgaggagagctgagaaggaacggctgaaggaaggtgaggctgctgatgaggagcagaagaaactgaagaaggatgcaaagaagaagggttccaaggattccactgctaagggtttgaagaagaaggctactactgctactggctctgatgaggatcactcatcctctccaactcgcagccatgatggtgacaaagcagctgcagatgatgatgacgatgatgtccagtggcagactgacacttcaattgaggctgcgaagcagcgcatgcaagagcagctgagtgcagcaactgctgaaatggtgatgctgtcgactgaggagactgagaagaagatgaaacaggcaacccacaaagatggaagcactaatggttcagcaaaagaaatccctaatgacaagcctgccgtcactaagcctagtccctatgaagaactgattggagacatcaaggctagcctaggaagtgctccgacccctacccagctcaaggctgtgctggcctcatcaacccttcctccccaggacgtgatgaatgctctcctggaggctctctttggtggtgtgggtaagggattcaccaaagaggttgtgaagaacaagaagtaccttgcagttgctgtgccagatgagggtgcccagacccttctggttcaggccattgaggcttttggtgggaagtgcaaccctgaggcgctgaaggaggttcccgttgtcctcaaagccctctacgatggagatatcctggacgaggaaaccattgtggactggtacaatgatgctgtcgcagctgggaaggactcccaggttgtcaagaatgccaagccgttcgtcgagtggctccagagtgccgagtctgatgaagagggtgacgacgagtgaagaggccacgctgctctactgctaatggccgaacttgataatattatttcaataagtttgttttgcttgcctggtgtcggtgtttaaaactgttaattgtcgtgtggcgcagcatactcttctgttgctgcatgtgtcgtcgtcagtttggttgtctgttggatgtcacagtttattatggattgctactatacaagtatttgtttcggatgtgttgtataacctttcgggatgtaacattttatgattgcactgttgcttctctaagggttgaggattatgaaatccaggtaaggctacggcgtagtcgtcttcatagcgggaacttgtagagtatgaccggtacttgtagagtacatgcagctcttactcgaaaaatgcggagtgcgagaacgcccaatcggaggagaggaggaagcggtctgttgggtgagaaaagaatagagtcaaaaaaaaaaatgataaaagatata

SEQ ID NO: 125164 - DNA, 181 bp, Zea Mays
ttcagatcacaatttgcattcaccagaaggtttccaggttttaggtctctgtggagtattttctgctgaatggagatatttgagtcctcggagcaactacaatgaagcaaaagaacattgcatcagattattagcgataacatatgtagcagataccaagatgaaatgtgaaagaaaaaaa

SEQ ID NO: 125165 - DNA, 363 bp, Zea Mays
atgcctgtatacacatttgcctacaaggatgaattggcagaatttgcaacatatgatggtgaagatcatgtagctcacaagtatctgcttgatctatcatactactcttccatagagagtaatatgatcttttgtggttttgttggtctaagggatcctcccagagaagaagtccacacggcaattgaagattgcagagctgctggaatacgtgttatggtgataacaggagataacaaagaaacagccgaggccatctgccatgagattggggtttttggccctcatgaagatatcagttcaaaaagcttcacagggaaggaattcatggcactttctgataaaaagatcttaagacaatag

SEQ ID NO: 125166 - DNA, 693 bp, Zea Mays
tttgcagtgacaacgacgaatcaggttgttgtcgccttgagtatgctgaggcaaaacagggacctgtttgatcttgttattagtgatgttcacatgccagacatggatggctttaagcttctagagcttgtggggcttgaaatggacctccctgtcattatgttatcggtgaatggagagacaaaaactgtaatgaaggggataactcatggtgcctgtgactatctcttaaaaacggatatttgccacagttcattctacaacataatattttctgttgatgtagaagctgtgccaaaaaggatacttgagctcatgaatgcatgacaagtgcatatatttattaaaattctttggtttttgctgaccagtcttataaatgtggaagaaaggacacatatattgttccatagctgtattttcagtttatcgtgtaacatttggtttagacttaatattgcatacatagtgaagctgaaaaggactcagcaagcatatccctgcaaaattggtcctcttgttaccgtacatatccaatgccaaaataaactaaattgtagctgaccctatatatatgcatctaaactgtttgctttgtgtgccatgcagaagtatagactctaccttaaacggctaagtgctgtggcatcacaacaggctagcattgttgctgctttgggaggcaacgacccc

SEQ ID NO: 125167 - DNA, 3107 bp, Zea Mays
gaaccctttcttcctcttcctcccccagtatactccaattcccacgtactcttcctccttgttctcctcctcctctctccctctctctcgccagaggatccaagaagtaccattgcagctcgctccattcgttcccaatcccaacacagcctctcagctgagctcagctcagctcagctcagggagttcccctgcttgtttttgctctagtgctcttggctgcctcagaaaaggactgcatgtgcagcagctgcaaagatagaatttctttatttttttcaccccaccttctcccaaggtgctgttggtgccccaggtggaggcaactggcgaagtgtgtgcgttctttgcttgatcaactaggttaagccatttcttgccccagtgttctccgattcatggttgtggaactagtccgagaatagctggagctgctcgttttcccttccaagaagacgaaggcggggggcgaggcgatcgtttgagcggtacctgttgcgcgcctgaggcggtgcaatcaatgtcgtcttcctgcataccgaccggcctgcggctggacctggacatggtgaaggcggcggcgtcgccggtgggcgcgcactcgtcgccgctgcgcccggcgcactactcgtcgccgtcgtcgacgctgtcgtcggaggcgtccaacgcctcgtcatcgtcggcgacgtcggtgtcgctcaagcgggctcgcgcgccgcggaagcggcccaaccaggcgtacaacgaggccgccgcgctgctcgcgtccatccacccctccgtgttccccgtgaacaagagccccaagacggcgccgccgcgcccgccgcagctctccgtgctggcggcggcgctcgacgcctcgcccgacctcctcccgccgctccccgtcctcgcggactccgcattcctgctccgggaccaggacacgccgtcgccgaagccgcggagcccgtccggcgccaagaactgcccgtcgccggcccccgtgagcagcgcgttccgggacttccgcgacccgccgtcgtcggcgagcctcgacgcggtcggcgccgacgagcttggcgagatcgacttcgacgacgacggcttcaacgccgactccatcctcgacgtcggtgacgccgcggccgggggcctcgacggcatcatgggcagcctcaccgtcgacgtcgagagcggcaccgccgccaggtccgatgactccatcctttccagctccggcatacacccctacctcaggaggctcatggtggtcggcctcgccggcaggttcgagctcggcctcgggtcccagcacggtgctcggcccagcctcaaccgcgcactgaagcggcgggacgacgacggcgcctggtggatgtggccggcagtgccggtaaaggacttgacgatcgcaccaccggcaccgccagcaccaccggcgccgaacgccgcagtgccgcaggccgccgccgccgccgcgccagaaaagaagaaaagcaagaagaagaaggtggtgaaggccatggcgaagggaaatgaggagcttcttcccaacgcgaagtgcaaggaggaagaagctgacgcctctgttgatgacgccgccgctaatggcgacggtgactccgacagtgcgccgacgaacgcaccaaaggccggtctggggctgaagctggacgccgacgaggttctcaaggcgtggtccgacaaagggtccatgtttgccgagggcagcgggccggagttgccgacgtcggccgccgaagtgcgggctaagcttgcagacatcgacctgtttccagagaacggagcaggcggcggtggggtcagggaagccagcgtgctgcggtacaaggagaagaggcgcacccggctcttctccaagaagatccggtaccaggtgcgcaaggtgaacgccgactgccggcctcggatgaagggaaggttcgttaggagcccgtctcttcttcggcaggccctggaggaagagacctagctagacaggcagtaatctttgctagccatttcttcttcttcttttttcccagcgcgtttttggccttttagttcctcattaactaagatgtgagtgagaattttcagtttttttttggtcggagttttgctctggagagaagaggatagggtaggatgcctttatagtggattgtcatggcatggtggtcagatagtttgtctcgggtttacagtgtgaggtaaaggaaggaaaaataaagtgatgttagaagaatacaaagcttcatacaggaagcagctcaggtgatgggttctgtttcgcatttactgctccgaaattaccgactgaatatctcattgctgtgaaacatccattgcaaagaagaagaagaagaaacggctacaaatcagcacggattatggtgtaataataagtaacagttgacaaaacctgctgtttttcatgcagcaggcctgcctctgctttggaaaggtaaattatgtgcagctgcaggcattagcaaaatacagtagaaatcagaccgaaaagagagagagagaaaaaaggcactagagatctcattgaaacttcatcagcacctgaaaaaccatgtgatttcacaaggcgcggatcaggtaataagaagtgcaaacagtaaataaaccaacacttggctggttgaagcaagttggggttcaagctatcagatattcagatggcatcttttattttctttctttttttttacttgcagtgcatcagacaaaagagcgaaatggatatggttgggcagaggcactgacctgctctgctcagctcagttatgcacacacatctgcgcaaaattccaaccgacggcatggacagcgcagatgaaatttgtcagatggcaattggatgatcctcctaaaagcatatacacgtagtagattaattctatttaaaacacatctagcagaaacaggagagataaactcgtcattactcacatctgtgattattccagcctagtcgaggtgcatataaactcatcgagtagtcgcgtgatcactgtccaaaaatctgattcaccctaacccgtgcagttttttcagcggtcctgatgtcgatgattgagaccataatggattgattatttaaaatccta

SEQ ID NO: 125168 - DNA, 2496 bp, Zea Mays
gaaccctttcttcctcttcctcccccagtatactccaattcccacgtactcttcctccttgttctcctcctcctctctccctctctctcgccagaggatccaagaagtaccattgcagctcgctccattcgttcccaatcccaacacagcctctcagctgagctcagctcagctcagctcagggagttcccctgcttgtttttgctctagtgctcttggctgcctcagaaaaggactgcatgtgcagcagctgcaaagatagaatttctttatttttttcaccccaccttctcccaaggtgctgttggtgccccaggtggaggcaactggcgaagtgtgtgcgttctttgcttgatcaactaggttaagccatttcttgccccagtgttctccgattcatggttgtggaactagtccgagaatagctggagctgctcgttttcccttccaagaagacgaaggcggggggcgaggcgatcgtttgagcggtacctgttgcgcgcctgaggcggtgcaatcaatgtcgtcttcctgcataccgaccggcctgcggctggacctggacatggtgaaggcggcggcgtcgccggtgggcgcgcactcgtcgccgctgcgcccggcgcactactcgtcgccgtcgtcgacgctgtcgtcggaggcgtccaacgcctcgtcatcgtcggcgacgtcggtgtcgctcaagcgggctcgcgcgccgcggaagcggcccaaccaggcgtacaacgaggccgccgcgctgctcgcgtccatccacccctccgtgttccccgtgaacaagagccccaagacggcgccgccgcgcccgccgcagctctccgtgctggcggcggcgctcgacgcctcgcccgacctcctcccgccgctccccgtcctcgcggactccgcattcctgctccgggaccaggacacgccgtcgccgaagccgcggagcccgtccggcgccaagaactgcccgtcgccggcccccgtgagcagcgcgttccgggacttccgcgacccgccgtcgtcggcgagcctcgacgcggtcggcgccgacgagcttggcgagatcgacttcgacgacgacggcttcaacgccgactccatcctcgacgtcggtgacgccgcggccgggggcctcgacggcatcatgggcagcctcaccgtcgacgtcgagagcggcaccgccgccaggtccgatgactccatcctttccagctccggcatacacccctacctcaggaggctcatggtggtcggcctcgccggcaggttcgagctcggcctcgggtcccagcacggtgctcggcccagcctcaaccgcgcactgaagcggcgggacgacgacggcgcctggtggatgtggccggcagtgccggtaaaggacttgacgatcgcaccaccggcaccgccagcaccaccggcgccgaacgccgcagtgccgcaggccgccgccgccgccgcgccagaaaagaagaaaagcaagaagaagaaggtggtgaaggccatggcgaagggaaatgaggagcttcttcccaacgcgaagtgcaaggaggaagaagctgacgcctctgttgatgacgccgccgctaatggcgacggtgactccgacagtgcgccgacgaacgcaccaaaggccggtctggggctgaagctggacgccgacgaggttctcaaggcgtggtccgacaaagggtccatgtttgccgagggcagcgggccggagttgccgacgtcggccgccgaagtgcgggctaagcttgcagacatcgacctgtttccagagaacggagcaggcggcggtggggtcagggaagccagcgtgctgcggtacaaggagaagaggcgcacccggctcttctccaagaagatccggtaccaggtgcgcaaggtgaacgccgactgccggcctcggatgaagggaaggttcgttaggagcccgtctcttcttcggcaggccctggaggaagagacctagctagacaggcagtaatctttgctagccatttcttcttcttcttttttcccagcgcgtttttggccttttagttcctcattaactaagatgtgagtgagaattttcagtttttttttggtcggagttttgctctggagagaagaggatagggtaggatgcctttatagtggattgtcatggcatggtggtcagatagtttgtctcgggtttacagtgtgaggtaaaggaaggaaaaataaagtgatgttagaagaatacaaagcttcatacaggaagcagctcaggtgatgggttctgtttcgcatttactgctccgaaattaccgactgaatatctcattgctgtgaaacatccattgcaaagaagaagaagaagaaacggctacaaatcagcacggattatggtgtaataataagtaacagttgacaaaacctgctgtttttcatgcagcaggcctgcctctgctttggaaaggtaaattatgtgcagctgcaggcattagcaaaatacagtagaaa

SEQ ID NO: 125169 - DNA, 3283 bp, Zea Mays
ataacaaagcacaacacaggcaaagaggatccgtcttcctccgtgctgcctcacttccgccgcacgcgaccggagaggcggctcactgcgtagcgccgcgagcccaaccctagccccgcccgcccgtccattccttccgtccttctggtggaccagctgccgagcccctccggcaggcatgtctccccccgagaaccccagccccgcggcgccggccgagccgtcgcagccgccgccaccggcggccgcggccaaggggaaggggaagaaggacgagaagaaggatgacgatctgtcggaggaggatctggcgctcaaggagcagctggagctctacgtcgtgcgggcgcaggacgcggatcccggcgtgcagaagctcgcgctcgagagcatgaggcaggagattcgctctgccacgagctcgatgacttcggttccaaagccactgaaattcctccgcccacactttggaactctcaagtcctatttcgaaacaatgcaagagtctgagctcaagaagtacatggctgacattctgtcagtgttagctttgacaatgtctgttgaaggggaaagagagagcctgaaataccgtttgttgggctctgaaggtgatattggttcatggggtcatgaatatgtgagaaatttggccggcgagattgcacaagaattccaaaagcgtcaggatgatgacttgcccattgatgtcctaatggagctagtgcagcaaattgtttcatttcacatgaagcataatgctgagcctgaagctgtggatcttcttatggaggtcgaagaccttgatttactagttgagcatgtagatgctacaaactacaaaagagcttgcttgtacctgactagttcatccaaatttctccctgcccctgatgatatgttggcacttgacatagcatataccatctacatgaagtttggagaccttgcaagcgctttgagaatttctctgcagcttgagaaatccacccagtatgtgaagcaagtctacacagcaactgatgaccttctgttgaagaaacaattctcatatctcattgcacgccatggtttggctatggagattgatgatgagatcgccgctgatgacaatgacaaggaggttttgcaagaaatagtaaataatactaagttgagtgagggatatcttactcttgctcgcgatattgaggtcatggagcctaaatccccagaggatatatacaaggtccatttgattgatggtcgtggtgccagctccagtcttgattctgcaagacagaatttagctgcaacatttgtaaatgcatttgtgaatgctgggtttggccaggacaagttgatgaccgctccatctgattcatccagcagcgggtcttccggaaattggttattcaagaacaaggaacatggaaaagctagtgcagcagctagtctgggaatgattctcttgtgggatactgattccgggctcgctcagcttgacaagtacttgcatagtaatgatactcatgttgttgctggagctttgctaggtattggaattgtcacttgtggggtgaagagtgattgtgatcctgcgtttgctattcttatggagtatattggcaaggatgactcaaacattcgtattggagcaatattgggtcttggaattgcatatgctggttcccagaaagaagagcttaaaatgcatctatctgctgtgttgggagactcccaatcacctcttgaggtcttggtcttctcggccattgccatgggattggtgtttgtcggttcttgcaatgaagagattgcacagtctattatatttgctttgatggagcgtagtgaggccgagttggcagaacccattatacggttgcttcctgttgcgcttggccttttatatcttggaaaacaggatagtgtggaggctaccgcagaggtctctaaaacatttgatgagaagatagggaagtactgtgatgtaacacttatgtcactggcatatgccgggacaggaaatgtgcttaaggttcagaaacttcttggcatttgctcacagcatcttgagaaaggtgaaacacaccaagggccagctgtcctagggattgctcttattgctatggctgaagaattaggagctgaaatggctgtacgttcacttgagcgtcttctgcagtatggcgagcagaatataagacgggcagttcctcttgctcttggtatactctgcatatctaatcccaaggtaaacgttatggacacactaagcagattgagtcatgatgcagacgccgatgtgtcgatggctgcaattatctcattgggtttgattggtgctggcacaaacaatgccagaatagctggcatgcttcgcaatctttcaagttattactacaaagaagctgctcatctgttttgtgttagaattgcccagggccttgtccacctcggaaagggcttgttgaccctttctccataccattccgatagatttctcctctccccgatggcacttgggggccttgtaaccgttctccacgcgtgccttgatatgaagtccaccatcctagggaaataccactacatcctctacattattgtcctggcaatgcagcccaggatgcttttgactgtcgacgaggatctgaagcccctgtcagtacctgtccgcgtcgggcaagcggtcgacgtggttggtcaggcaggaaggccgaagacaatcaccggcttccagacacactccacgccggtcttgctcgcagcaggggagagagctgaactagcaactgaaaaatacattccactgaccccggtactagagggctttgtgattctgaagaagaacccagagtaccacgaggagtgaagacccagatagcatattggtgtttccgaggcccgtccagataggcagcctcgaatttgcgcggccttggatatctatcttctttcttgctcagcggcagcgccatcctggccctctccttcctgggtccgtgtccatgtttgattcttatcttaccggagctgtggctaactgaaagagctgtctttggttggcttaacttgtagtacgaccgtatttattaattactagaagacgtttatagagcgtactctgtacggtgaggtgatgacatggtggcatagcgtagtgtaattttctttttggcgttcgtctcggccaatcgatagcatacatagtccttgttttgacattgtgaatcatcattatccgttccctgtattttggggtttcgttctgtattttgtcagtagtggatgtggacat

SEQ ID NO: 125170 - DNA, 3343 bp, Zea Mays
cccttcttaataacaaagcacaacacaggcaaagaggatccgtcttcctccgtgctgcctcacttccgccgcacgcgaccggagaggcggctcactgcgtagcgccgcgagcccaaccctagccccgcccgcccgtccattccttccgtccttctggtggaccagctgccgagcccctccggcaggcatgtctccccccgagaaccccagccccgcggcgccggccgagccgtcgcagccgccgccaccggcggccgcggccaaggggaaggggaagaaggacgagaagaaggatgacgatctgtcggaggaggatctggcgctcaaggagcagctggagctctacgtcgtgcgggcgcaggacgcggatcccggcgtgcagaagctcgcgctcgagagcatgaggcaggagattcgctctgccacgagctcgatgacttcggttccaaagccactgaaattcctccgcccacactttggaactctcaagtcctatttcgaaacaatgcaagagtctgagctcaagaagtacatggctgacattctgtcagtgttagctttgacaatgtctgttgaaggggaaagagagagcctgaaataccgtttgttgggctctgaaggtgatattggttcatggggtcatgaatatgtgagaaatttggccggcgagattgcacaagaattccaaaagcgtcaggatgatgacttgcccattgatgtcctaatggagctagtgcagcaaattgtttcatttcacatgaagcataatgctgagcctgaagctgtggatcttcttatggaggtcgaagaccttgatttactagttgagcatgtagatgctacaaactacaaaagagcttgcttgtacctgactagttcatccaaatttctccctgcccctgatgatatgttggcacttgacatagcatataccatctacatgaagtttggagaccttgcaagcgctttgagaatttctctgcagcttgagaaatccacccagtatgtgaagcaagtctacacagcaactgatgaccttctgttgaagaaacaattctcatatctcattgcacgccatggtttggctatggagattgatgatgagatcgccgctgatgacaatgacaaggaggttttgcaagaaatagtaaataatactaagttgagtgagggatatcttactcttgctcgcgatattgaggtcatggagcctaaatccccagaggatatatacaaggtccatttgattgatggtcgtggtgccagctccagtcttgattctgcaagacagaatttagctgcaacatttgtaaatgcatttgtgaatgctgggtttggccaggacaagttgatgaccgctccatctgattcatccagcagcgggtcttccggaaattggttattcaagaacaaggaacatggaaaagctagtgcagcagctagtctgggaatgattctcttgtgggatactgattccgggctcgctcagcttgacaagtacttgcatagtaatgatactcatgttgttgctggagctttgctaggtattggaattgtcacttgtggggtgaagagtgattgtgatcctgcgtttgctattcttatggagtatattggcaaggatgactcaaacattcgtattggagcaatattgggtcttggaattgcatatgctggttcccagaaagaagagcttaaaatgcatctatctgctgtgttgggagactcccaatcacctcttgaggtcttggtcttctcggccattgccatgggattggtgtttgtcggttcttgcaatgaagagattgcacagtctattatatttgctttgatggagcgtagtgaggccgagttggcagaacccattatacggttgcttcctgttgcgcttggccttttatatcttggaaaacaggatagtgtggaggctaccgcagaggtctctaaaacatttgatgagaagatagggaagtactgtgatgtaacacttatgtcactggcatatgccgggacaggaaatgtgcttaaggttcagaaacttcttggcatttgctcacagcatcttgagaaaggtgaaacacaccaagggccagctgtcctagggattgctcttattgctatggctgaagaattaggagctgaaatggctgtacgttcacttgagcgtcttctgcagtatggcgagcagaatataagacgggcagttcctcttgctcttggtatactctgcatatctaatcccaaggtaaacgttatggacacactaagcagattgagtcatgatgcagacgccgatgtgtcgatggttcgtatttatcaatcctttcacctagcctttcctttgttatcatgtatcatatatatgtggctattaaatttctccaggctgcaattatctcattgggtttgattggtgctggcacaaacaatgccagaatagctggcatgcttcgcaatctttcaagttattactacaaagaagctgctcatctgttttgtgttagaattgcccagggccttgtccacctcggaaagggcttgttgaccctttctccataccattccgatagatttctcctctccccgatggcacttgggggccttgtaaccgttctccacgcgtgccttgatatgaagtccaccatcctagggaaataccactacatcctctacattattgtcctggcaatgcagcccaggatgcttttgactgtcgacgaggatctgaagcccctgtcagtacctgtccgcgtcgggcaagcggtcgacgtggttggtcaggcaggaaggccgaagacaatcaccggcttccagacacactccacgccggtcttgctcgcagcaggggagagagctgaactagcaactgaaaaatacattccactgaccccggtactagagggctttgtgattctgaagaagaacccagagtaccacgaggagtgaagacccagatagcatattggtgtttccgaggcccgtccagataggcagcctcgaatttgcgcggccttggatatctatcttctttcttgctcagcggcagcgccatcctggccctctccttcctgggtccgtgtccatgtttgattcttatcttaccggagctgtggctaactgaaagagctgtctttggttggcttaacttgtagtacgaccgtatttattaattactagaagacgtttatagagcgtactctgtacggtgaggtgatgacatggtggcatagcgtagtgtaattttctttttggcgttcgtctcggccaatcgatagcatacatagtccttgttttgacattgtgaatcatcattatccgttccctgtattttggggtttcgttc

SEQ ID NO: 125171 - DNA, 4204 bp, Zea Mays
atggactcgatcgacgcggatctagcgcgcacgcaggaggagcggcgcaagatggaggaggcgctggcggccggcgcgcccatggccgtgtcctccgtcaccttcgacaccgacctctacggtggcgggggcgccgaccccaaccgcttcgcgggctacgacacctccatcccggcctccgaggatgacgccgcggaggacgacacggagttggccaaccccgcaccgcgccgcctcgcggcctacacgggccacgccatcgccgccgccgacctcccgcggtcagccgacgacgacgacgggctgcccaagaggtcccagcgcatcatcgaccgcgaggacgactaccgccgccgccgcctcaaccagatcatctcgccggagcgccatgacccgttcgctgccggggaggccaccccggatccctctgtgcggacctacgccgacgtcatgcgcgacgcggcgctgcagaagaagaaggaggacctgctcagggagattgccaagaagaagaaggaagaggaggagaaggagaaggagaggaaggctgccgcgcctgagcagccggctgctgcgacgaagcggcgtaacaggtgggatcagtcgcaggatggcgatgctgctgccggtggcaagaaggcaaagacatcctcggactgggatgcccccgatgcgactcctgggattgggcgttgggatgccacccctggacgtgttggagacgccacaccctccgtgagaaggaacagatgggatgagacaccgactccaggtaggatggctgatgctgatgcgacgcctgcagctggcggtgccacccctggggcaactccttctggggcttgggatgcgactccaaagcttcctggtggtgtcacgccaacacctggtaagaagcagaggtcaaggtgggatgagacgccagcgagtatggggagtgcaacccctggtggtcttggtgctgcaacacctgttggttatactcctggtccaacgccatttggtgcagagaaccttgccacaccaactcctagccagattgcccgtggaccgattactccggagcagtaccagctcatgcggtgggagcgggacattgaggagaggaacaggcctctcactgatgaggagctcgatgccatgttcccgcaggaaggatacaagattcttgagcccccggcttcctaccagcccatcaggaccccagcaaggaagctccttgcgacaccaacacctctggggacaccactttatgctattccagaggagaatcgtgggcagcattttgatgtgcctaaggagctgcctggtggattgcctctcatgaagccagaggattaccaatactttggaactttgctgaatgaagaagaggaggaggagctatcgccagaggagcagaaggagaggaaaatcatgaaactgttactcaaagtgaagaatggtacacctccacagcgtaaaacagcacttcggcaattgacagacaaagcccgggagttcggtgctggaccactgttcaacaaaatcctgcccttactcatgcagccaacactggaggaccaggagaggcatcttctggtgaaggtcattgatagggtactgtataagctggatgagctggtccgaccttttgtgcacaagattcttgtggttattgaaccactgttgattgatgaggactactatgctcgtgttgaaggcagggagatcatctcaaatcttagtaaagcagctgggcttgctactatgattgctgccatgcgaccggatattgataacattgatgagtatgtgagaaacaccactgctagggcattcagtgtagtggcttctgctttgggcatccctgcccttttaccattcctgaaggctgtctgtcagagtaagaagtcttggcaagctaggcacactggtatcaaaatcgtgcagcagattgctattctcatgggttgtgctgttttgccacatctcaagtcattagtcgagatcattgagcatggtctgagcgatgaaaaccagaaagtccggacaattactgccctttctcttgctgcacttgctgaggctgctgcaccatatggtatagaaagttttgataccgtattgaagcctttgtggaagggtatcagatctcaccgagggaaagtccttgctgccttcctcaaggccattggtttcatcatccctcttatggatgctctgtatgctagttactacacaaaggaggtgatgcaggtcctcattagggagttccaatctccagatgaagaaatgaagaagattgttctcaaggttgtgaaacagtgtgtcagtacagagggtgtggaggctgattatatccgaaatgacatccttccagatttcttcaagcacttctgggtgaggagaatggctctagatcggaggaactataagcagcttgtggaaactacagtggagatagcaaacaaggttggagttgctgatattgtggggaggattgttgaggatctgaaagatgagagcgagccttacagaagaatggtgatggaaacaattgagaaggtagtggccaacttgggtgcttcagatatcgatgctcgtcttgaggagctgcttattgatggtatcttgtatgctttccaagagcagactagtgatgatgcaaatgttatgcttaatggttttggagctgtggttaatgcacttggacaaagagttaagccttaccttcctcagatttgtggtaccatcaagtggcgattgaacaataagagtgcaaaagttaggcagcaagctgctgatctgatctccaggatagccattgtcatgaagcagtgccaggaggagcaactcatgggtcacttgggtgttgtgctgtatgagtacttaggagaagagtatcctgaggtgttgggttcaattcttggagccttgaaggctatcgtcaatgtcatcggtatgactaaaatgactcctccaatcaaggatcttcttcctcgtctaacccccatcttgaagaacaggcatgagaaggtccaagagaactgcattgatcttgttggtaggattgctgatcgtggagcagaatttgtgccagcaagggaatggatgaggatttgttttgagctgctcgagatgttgaaggctcataagaaaggtattaggagagccactgtgaatacatttggttatattgcaaaggctatagggccacaggatgtgctggccaccctgttgaataatttgaaggtgcaggagcggcagaaccgtgtctgcacaactgtagcaattgccatagttgctgaaacttgctcacctttcacagttttacctgcccttatgaatgagtaccgggtcccagagctcaatgtccaaaatggtgttctgaagtcactctctttcctctttgagtatattggtgagatgggtaaagattacatatatgctgtcactcccttacttgaagatgctttaatggatagagatctggttcaccggcagactgctgcatctgctgttaagcacatggctctaggtgttgctggcttgggttgtgaggatgctcttgttcatctgcttaactatgtttggcccaacatatttgagacatctccccacgttataaatgctgtcatggaggcaattgagggtatgagggttgcgctaggtgcagctgtgattttgaattattgcctgcaaggtctcttccatccagcaaggaaagtacgtgaagtttattggaagatatacaactctctgtacattggtgcacaggattcacttgttgcttcttatcctgccctggaagacgatggggataacatatttagtcgcccagagttggcaatgttcgtctgattaacgatagtccgtgttgaagctgctgaagagttccactggattgaggaccgatttcgaggctgcagaggaccctttaattaatccatcatgatcctatgttttgaaggagaaatgacgatcctagcgtgttgtcttaatattagacgttggcaccttctgtgttcttgaactttttgtgatagccgtggatgttgttgttatatataggtgtggacagtggaacattgcaaacccctctgtgaccttgattcctcgctgtattcctgagatggctgttattagcgtgccttgatcaaatagcttgtgtatctcggtttgcaaaggctactggtgataatccatctgttactcctatgtt

SEQ ID NO: 125172 - DNA, 4484 bp, Zea Mays
cgcgccaccgccatggactcgatcgacgcggatctagcgcgcacgcaggaggagcggcgcaagatggaggaggcgctggcggccggcgcgcccatggccgtgtcctccgtcaccttcgacaccgacctctacggtggcgggggcgccgaccccaaccgcttcgcgggctacgacacctccatcccggcctccgaggatgacgccgcggaggacgacacggagttggccaaccccgcaccgcgccgcctcgcggcctacacgggccacgccatcgccgccgccgacctcccgcggtcagccgacgacgacgacgggctgcccaagaggtcccagcgcatcatcgaccgcgaggacgactaccgccgccgccgcctcaaccagatcatctcgccggagcgccatgacccgttcgctgccggggaggccaccccggatccctctgtgcggacctacgccgacgtcatgcgcgacgcggcgctgcagaagaagaaggaggacctgctcagggagattgccaagaagaagaaggaagaggaggagaaggagaaggagaggaaggctgccgcgcctgagcagccggctgctgcgacgaagcggcgtaacaggtgggatcagtcgcaggatggcgatgctgctgccggtggcaagaaggcaaagacatcctcggactgggatgcccccgatgcgactcctgggattgggcgttgggatgccacccctggacgtgttggagacgccacaccctccgtgagaaggaacagatgggatgagacaccgactccaggtaggatggctgatgctgatgcgacgcctgcagctggcggtgccacccctggggcaactccttctggggcttgggatgcgactccaaagcttcctggtggtgtcacgccaacacctggtaagaagcagaggtcaaggtgggatgagacgccagcgagtatggggagtgcaacccctggtggtcttggtgctgcaacacctgttggttatactcctggtccaacgccatttggtgcagagaaccttgccacaccaactcctagccagattgcccgtggaccgattactccggagcagtaccagctcatgcggtgggagcgggacattgaggagaggaacaggcctctcactgatgaggagctcgatgccatgttcccgcaggaaggatacaagattcttgagcccccggcttcctaccagcccatcaggaccccagcaaggaagctccttgcgacaccaacacctctggggacaccactttatgctattccagaggagaatcgtgggcagcattttgatgtgcctaaggagctgcctggtggattgcctctcatgaagccagaggattaccaatactttggaactttgctgaatgaagaagaggaggaggagctatcgccagaggagcagaaggagaggaaaatcatgaaactgttactcaaagtgaagaatggtacacctccacagcgtaaaacagcacttcggcaattgacagacaaagcccgggagttcggtgctggaccactgttcaacaaaatcctgcccttactcatgcagccaacactggaggaccaggagaggcatcttctggtgaaggtcattgatagggtactgtataagctggatgagctggtccgaccttttgtgcacaagattcttgtggttattgaaccactgttgattgatgaggactactatgctcgtgttgaaggcagggagatcatctcaaatcttagtaaagcagctgggcttgctactatgattgctgccatgcgaccggatattgataacattgatgagtatgtgagaaacaccactgctagggcattcagtgtagtggcttctgctttgggcatccctgcccttttaccattcctgaaggctgtctgtcagagtaagaagtcttggcaagctaggcacactggtatcaaaatcgtgcagcagattgctattctcatgggttgtgctgttttgccacatctcaagtcattagtcgagatcattgagcatggtctgagcgatgaaaaccagaaagtccggacaattactgccctttctcttgctgcacttgctgaggctgctgcaccatatggtatagaaagttttgataccgtattgaagcctttgtggaagggtatcagatctcaccgagggaaagtccttgctgccttcctcaaggccattggtttcatcatccctcttatggatgctctgtatgctagttactacacaaaggaggtgatgcaggtcctcattagggagttccaatctccagatgaagaaatgaagaagattgttctcaaggttgtgaaacagtgtgtcagtacagagggtgtggaggctgattatatccgaaatgacatccttccagatttcttcaagcacttctgggtgaggagaatggctctagatcggaggaactataagcagcttgtggaaactacagtggagatagcaaacaaggttggagttgctgatattgtggggaggattgttgaggatctgaaagatgagagcgagccttacagaagaatggtgatggaaacaattgagaaggtagtggccaacttgggtgcttcagatatcgatgctcgtcttgaggagctgcttattgatggtatcttgtatgctttccaagagcagactagtgatgatgcaaatgttatgcttaatggttttggagctgtggttaatgcacttggacaaagagttaagccttaccttcctcagatttgtggtaccatcaagtggcgattgaacaataagagtgcaaaagttaggcagcaagctgctgatctgatctccaggatagccattgtcatgaagcagtgccaggaggagcaactcatgggtcacttgggtgttgtgctgtatgagtacttaggagaagagtatcctgaggtgttgggttcaattcttggagccttgaaggctatcgtcaatgtcatcggtatgactaaaatgactcctccaatcaaggatcttcttcctcgtctaacccccatcttgaagaacaggcatgagaaggtccaagagaactgcattgatcttgttggtaggattgctgatcgtggagcagaatttgtgccagcaagggaatggatgaggatttgttttgagctgctcgagatgttgaaggctcataagaaaggtattaggagagccactgtgaatacatttggttatattgcaaaggctatagggccacaggatgtgctggccaccctgttgaataatttgaaggtgcaggagcggcagaaccgtgtctgcacaactgtagcaattgccatagttgctgaaacttgctcacctttcacagttttacctgcccttatgaatgagtaccgggtcccagagctcaatgtccaaaatggtgttctgaagtcactctctttcctctttgagtatattggtgagatgggtaaagattacatatatgctgtcactcccttacttgaagatgctttaatggatagagatctggttcaccggcagactgctgcatctgctgttaagcacatggctctaggtgttgctggcttgggttgtgaggatgctcttgttcatctgcttaactatgtttggcccaacatatttgagacatctccccacgttataaatgctgtcatggaggcaattgagggtatgagggttgcgctaggtgcagctgtgattttgaattattgcctgcaaggtctcttccatccagcaaggaaagtacgtgaagtttattggaagatatacaactctctgtacattggtgcacaggattcacttgttgcttcttatcctgccctggaagacgatggggataacatatttagtcgcccagagttggcaatgttcgtctgattaacgctggatgtccatgtatcttcatccatattgttgtgaagcttgaactgggtggtatttgagttagagcttgtatatttaagttacttggtgacccctcttgtgatgtgcatgtaattaaatttgcatctgtttctgtatttgcaggattgttccttccgaagggggtgcacaatgtttaggaatttttattatggtttactgtaatgcaactctaaatcactgtcgtaatctgatctactaaccatttgggaaatgttctgttttcaggatagtccgtgttgaagctgctgaagagttccactggattgaggaccgatttcgaggctgcagaggaccctttaattaatccatcatgatcctatgttttgaaggagaaatgacgatcctagcgtgttgtcttaatattagacgttggcaccttctgtgttcttgaactttttgtgatagccgtggatgttgttgttatatataggtgtggacagtggaacattgcaaacccctctgtgaccttgattcctcgctgtattcctgagatggctgttattagcgtgccttgatcaaatagcttgtgtatctcggtttgcaaaggctactggtgataatccatctgttactcctatgtt

SEQ ID NO: 125173 - DNA, 1278 bp, Zea Mays
tgtatatcatgaggatatcttgcaaatgtcctcgtatttgacagccctaagaaccttcccatcatagagacctttctcaacctgcacttttgcacagaatttctcagtgtccactgagagcaacctggcatttgatccccgataagcaccattcaatatccgcaccagcccaccgatctgagggatcacggtctcgagctcatcttggtcaaccctgagaacatgcttgctctccaacatctctatctccccaacatatttatccataactttccttaccacccctttctgcttgtagtaccccttctctgccaatgacttgctcatcaccttgaccacgatcccagggcacagccagtagtccttcctattgctcctctccttggccatctcctcctccttcatcagctcgtccaatgctgacctccttgcatctgctgccttcacatcctttcccttcttcttggccagctcatccttctcctctccggtacccaagtcgccctcctcgtcgaaacgaaatttcacctccggcttatcttcaaaaggattaaccttaggccctcgcacagccgtctgaagcgcaatcgcaatcttccctgttgccttgtttgcctctttcgagacatcctccagctcctccccatcatcatccgaacctgaatactcttcttcaccaccagactcgggctcgccctcggcagcatcaccatcgttaggtttggctaaggacttgtgcgcacgctcaatctggcgggcgatcatgcgctcctggcgctcgtcctcagccatgtctgacttgatcctcttgcgcttgaggcggtccttgacggcctgctccgagtcacggtcgatgtaggtcatgaaccaccccttgggcgtgtcctcaaccttgcagtacccttcgcgccccaggagcttgacgaactcggtgagcgtggcccaccgcgtagagttcatgtggacgtggtgccggtcggcgatgtactcgttgtagacaacggtggcggcgacgcgggagtggcggtgcgcgcggcggatgagggagaggaaggactcgaggaattcctcggagaagccctcgacgacgcggtcgggcgccatgccgaacacctgcatctgccgctggtgcgactccgacatgcagtggcacttgaacccgttctcgtcgcggcactgcttctgacacatctggcagtaccaccgcagcttctgcagccccttcgccttgatccggttcgcgatcgccttcggcgtcaggaactcgtgcttccccat

SEQ ID NO: 125174 - DNA, 1234 bp, Zea Mays
cgttttaaagcattttcgttttatttttttttaaaaggacagaatgacagacgggagttgccacctcatcgttgcgaagagttgagcgacgaggatgcatcagttatgtgcacacatgctgaaaattcagaagcagtgttcacttcactgaggaaatagtgcgcgagaacaatgttcgacttctgaacgattacaagagaagaagttaaaggtgaagtacaaagaacaagatgggaaatgaattctcaagtggaaaaaaaagaagaagacatttgttactaaaatctccttggagcaaatccttaattttagaatctcacacggaaagaatgtgaatgccgcctttcatcctctggtacgaattttcgcaaatcctgccaatctgtggactcttcctcctctcttctccacggaacaccaagaacaaagaatgtgggggataaaatatataaaaaaggagatgttgggaaagaaagaaaactcatcatctgcacaagatcatcatcccatgctgcgaagaacagtagcgatccgcagccgccgcatccttcctgcccaccagcctcaggatgccctcgaacgccttcacgtcgcaggggatcctgagagccccctcgtgctggaacccgaactcctcctccgcctccttcaggagctcctcgaacgcccagtggcccaggtactccgtggggatcacgaacctctccatctccttgccgacgcacaccgtgaagaaccccttcgggacaccgtggctgccgccgccgccgccgctcttgccggctttcggtgagagcgcaatctgcttccacttcttgagaagctgtcgcagcctcacgatgtctctgatcctgttgctgcttggcctgccttgctcccccattgccagtcgacgcagctgcctttctctgcctctgctttctgctcctctctgctctgccaatatataggaggctggagtgctggagtgctggaccagtgtctaagcatggattagcgtgttcatcgggttagtttggacgtactaatcagcggcttgatacgacgattttgtttaagtctgtgggcaggttttctttatgttggtgttcttgacatgtaataaactaaggcaaaagcgtatgagcacatgtgacagcagccagtagctgatcagagtgttctgattctactgcctggttaagcatgtaaaactgtggcattctaaagccaccagctgccttcagcagtgaca

SEQ ID NO: 125175 - DNA, 152 bp, Zea Mays
gttcagaaaccagagatctgctcgctgttcttccagttgcgacgggatacaatattctttttgagctggcagaacttggggaaacaaaaaaagattgcaaatatcttctattctatccgcgaggattactttgtctcgagaagcgcctgcct

SEQ ID NO: 125176 - DNA, 554 bp, Zea Mays
tttaagatgttttaaatccaacaggttacctcaattaattgaatcccaatctaaccaggttctaacatggagtctactcacactgatattactggggacgatcagcactacaccaggaaacatcatgctaagcataaccagttttttttgttttcaactaaacagacagctaccacacagctaggggaggattattagaggatttcttcatccttggtatgattcagtagtcagcacgcagggcctcccagttgtcaccttgaccacataacatgggcggatggatttggtaacgagggcggggtcacacaatgtagccactggccaaggttctcgccattgaatccgcccgaaactgcttctggcgtttcctcgacatccatagaagttacttcagtctcatcagcgtccataggtacttcaaaaatccgtgtgcgctctggctcaacggcaacccagtcagatcttatagacacttgtggtggtctccaaggaactaaagccaagctgttcctacgttcaggagattcatcctccacctcgtgatagttcgc

SEQ ID NO: 125177 - DNA, 1034 bp, Zea Mays
agtctcgtcattccggcagctcctcctccacctgccttgccttgaccttccttcggcccttccccgcacggccgcacaagcacatagccttatctgctctctctctctctccccagtccccacccgacgcgacgactccagttccaatccgtgctccgctaggtcaatcgaagagtccaaagatcccagctttcccatcccatggcgggcggcgacctcacgcctcctcctcctcctcccgaagagacgccgccggcagcggcggccgaggacctgatcgagatcgtggaggaagggtcggggcggctggacatcgcgcggtacgtggaccacgtgcgcgacctgtcggcgggcgccatcgcgacgttcgagggcacgacgcgggaccacttcgcggggcggcgcgtggtggagctccggtacgaggcgtacgcggccatggcgcggcgccgcctggcggccatactgcgggaggcccggtcgcggcacgcgctgcggcggctggccgtggcgcaccgcctgggcgccgtccccgccggcgaggccagcgtgttcgtggccgcctccgccacgcaccgcgccgacgccatggaggcctgccgctacgtcatcgacgagctcaaggcgtccgtgcccatctggaagaaggaggtgtacgacgacggcgaggtctggaaggagaaccgcgagttcctggaccgccactccgccgacggcgatgcgacggcgggcgggtgctgcgggagcaaggtcagggtccaggaggcttgacgctgatggatggcggcgcccggatccctctgtcgctccatcgcggtcgcgactcgcgacccattggagcagggggtttcatgaaattctatgtactacttactcgatctccgttgattttgttctccatcttctttctttctttctgagagagactgcagcttgtacttgcacttgcacaccatgaagatgaaaggcaaatagatgctctgataaaagtcataactcataatggaatagtagttcagttttaacaagagaga

SEQ ID NO: 125178 - DNA, 2413 bp, Zea Mays
cctctgttaaaagttcaacggttctgttcttgcaacctcgcgtacttaccctgcgaacctaatcatgatgcataactgagtgccccagcccccagatatgcttgttcttacccgaaccctttctgctctttaacctgcttctctcttcctttttgttgttgttgttgttgttgtttcagagttagccgcttcggcaggcaagtaggacgaggagcagcagctcagatttcggatcctggcactggcaactggcatgggctcgtttgggatggacatggactggaaccagaaggcctccgtgctgctgtgggactgggagaacctgccgcccgcagccgcaaacgggagcgagagccacaggacgaccgctgccgcgcctcagttcgcgggccttgaggccacagggcatgaaccggcgccttcttccgtatcctcgtcaatccattctctgcccagtgccaaggggaacaagaacaagaacaacatggagctcatcagtttcgcacctgccaaagcgcccgacaaggacactggttcggtgctcagcagcggagagccggtggtgctaggcctgaagcttggcaagagaacgtatttcgaagatggttgtggactagggcagagcggcaagagttcggcggcgttaggcactgccagtgcagcgacccctccgggtcctgcgaagaaggcgaaggcggcggcggcggctccaaccgcgcagcagcagaaatcgtactgccaggttgaaggctgcaggaccgatctgtcctctgctaaagactatcatcgcaagcacagagtctgcgagccccattccaaggcgcccaaggtggtcgtcgctggcctggagcggcgcttctgccagcagtgcagccggttccatggactggccgagttcgaccagaagaagaagagctgccgcaggcgactcaacgaccacaacgcgcgcaggcggaagccccagcccgaagcgctccctttcggctcatcgaggctgtcggcgatgttctatgacacgaggcgccaggcgagcctcctgtttggtgaaggtccctacggtcagatgagaagctgtgcgagttcttggtgggatagcccaggagcaggaggaggaggcttcaaattcgcggagacgagaggagctccttggttgaagccggcgagagctgctgctgatgggctgctgcctttgtcaggtcagcagcagcagcaggtgtggaatgactcgattccgcatgttgcccatcaggaggatttcgatgggttcacggtcacggcgttcaaaggaatcagtccaaagacccttgatcatcaaggcgcaggcgttgaagcctgtgcggccgtctccagcccggacggcgccccggaccttcagcgtgctctctctcttctgtcaaacagtccggccggtggcggcggcaccaacaccaaccacccgccgccgccgccggcggctgagctgcaccaccaccgcgctgccccgagcagctgcctcgccgccggctccgtctccgtgctgcaggaggcctcgtcgccggggctgtggcaggacggcggcggcagcgcggccctgggccaccacgcgcacgcgcggctccaggctctcgacgccgccatggcgacggcgcaggagctcctccagctccccaggccgccgccatcgtacggcggctcctcgtcccactacgacctgatgcgctgatgcttccttccttgtggattgtggtggagaactggagatggagcgggagcgccgccgtgcccccggttggcgcgtggaaatcagtcagacgtggcttctgtggcgtcgtctctgcaacgcgggagcgggattttgcttgtgttctgaacgaacagaaaataataaaaaagaagaaggccttgtcgccatgggaactcgtggaggtcgccggtagagctgcgcgcgcttgaataatccacggttttgtgacgctagcagttgaagttctattgatttgtgcaatgtaataacttggttgcttcggaagagttctattgtcatctttaatggcaccattagttcaatctaacatttattctgcttccaatatacgtagtacattattagaactaggagcgcaaccctaaaaaaaagcatagctgcattattccaaccaccgcacatagctagctactcacaaaaaagctgattgattcatgagacagctaggcggccggcaagacagccctcggcgtgccaagatagaacaccaagaacaccaagacaacaaagcgcctttcagtcaagttgacggggccaggccgggtcactaccgcttgccagctcccaggactcggcaccggtactctcccagagcccagatcgggaaggtgttcctgtactgggagtaactgatcatgcagttcttgttgaacactcctatgatctcct

SEQ ID NO: 125179 - DNA, 2319 bp, Zea Mays
gtcgataattgggggagtcttgtcttcctcatctgctcccctttcctcgccgctctgcctcgccttttgggtttctgagaggcgctgcgctggtttgccttccccactgctcgctctgccggtcgccgccgtggaagagctacaccacgacgagacacaggttctctcgacccgtcatcacccacagcgaggctgagcggagaggagacgaagagaggaacagggtacacagatctcaagaagctccatgagggcgaacctgtgccccggcgcgcgaggctgagcttcttgcacgctgcgcccaccccgagctcgccgatgcgccgccgccgcagcagccgcagccacggctgtccagccggcgtgctgacctgacgcggactgacctagacgcaggttgccctgtccgttcccttttttttctgagttagccgcttcggcaggcaagtaggacgaggagcagcagctcagatttcggatcctggcactggcaactggcatgggctcgtttgggatggacatggactggaaccagaaggcctccgtgctgctgtgggactgggagaacctgccgcccgcagccgcaaacgggagcgagagccacaggacgaccgctgccgcgcctcagttcgcgggccttgaggccacagggcatgaaccggcgccttcttccgtatcctcgtcaatccattctctgcccagtgccaaggggaacaagaacaagaacaacatggagctcatcagtttcgcacctgccaaagcgcccgacaaggacactggttcggtgctcagcagcggagagccggtggtgctaggcctgaagcttggcaagagaacgtatttcgaagatggttgtggactagggcagagcggcaagagttcggcggcgttaggcactgccagtgcagcgacccctccgggtcctgcgaagaaggcgaaggcggcggcggcggctccaaccgcgcagcagcagaaatcgtactgccaggttgaaggctgcaggaccgatctgtcctctgctaaagactatcatcgcaagcacagagtctgcgagccccattccaaggcgcccaaggtggtcgtcgctggcctggagcggcgcttctgccagcagtgcagccggttccatggactggccgagttcgaccagaagaagaagagctgccgcaggcgactcaacgaccacaacgcgcgcaggcggaagccccagcccgaagcgctccctttcggctcatcgaggctgtcggcgatgttctatgacacgaggcgccaggcgagcctcctgtttggtgaaggtccctacggtcagatgagaagctgtgcgagttcttggtgggatagcccaggagcaggaggaggaggcttcaaattcgcggagacgagaggagctccttggttgaagccggcgagagctgctgctgatgggctgctgcctttgtcaggtcagcagcagcagcaggtgtggaatgactcgattccgcatgttgcccatcaggaggatttcgatgggttcacggtcacggcgttcaaaggaatcagtccaaagacccttgatcatcaaggcgcaggcgttgaagcctgtgcggccgtctccagcccggacggcgccccggaccttcagcgtgctctctctcttctgtcaaacagtccggccggtggcggcggcaccaacaccaaccacccgccgccgccgccggcggctgagctgcaccaccaccgcgctgccccgagcagctgcctcgccgccggctccgtctccgtgctgcaggaggcctcgtcgccggggctgtggcaggacggcggcggcagcgcggccctgggccaccacgcgcacgcgcggctccaggctctcgacgccgccatggcgacggcgcaggagctcctccagctccccaggccgccgccatcgtacggcggctcctcgtcccactacgacctgatgcgctgatgcttccttccttgtggattgtggtggagaactggagatggagcgggagcgccgccgtgcccccggttggcgcgtggaaatcagtcagacgtggcttctgtggcgtcgtctctgcaacgcgggagcgggattttgcttgtgttctgaacgaacagaaaataataaaaaagaagaaggccttgtcgccatgggaactcgtggaggtcgccggtagagctgcgcgcgcttgaataatccacggttttgtgacgctagcagttgaagttctattgatttgtgcaatgtaataacttggttgcttcggaagagttctattgtcatctttaatggcaccattagttcaatctaacatttattctgcttccaatata

SEQ ID NO: 125180 - DNA, 213 bp, Zea Mays
tgttgcccactgcccagtcgtcacgctcacgtccccgagcgtctatgagaccacaccctccacgcgatcgtcgttcgccatctcgccgatccaaccctccaggattccagggagctgggaaccactgcgctagcctccagacacgcacggtcgagcaatcagaatttaggttatttggcgatcgtcgttcttatttttcaaactacgaagtgc

SEQ ID NO: 125181 - DNA, 540 bp, Zea Mays
tattcctctaagacggcttataacagcttttggaacggtacaacatcctttgagccggctaaaagaatttggaagagttgggctcctcccaaatgtaaattcttcatttggctagcctctctcaaccggtgttggacggctgacagattggcccggcgaggtatggatcatcatgacaattgcctcttttgcgatcaacatgaagaaacaatccagcatattttgctctcttgtgtgttctctagaaacatttggtggcaggtgtggtgtaaagtggggatgcaacatctggcacctgggcctgaggacatgattttccaagattggtggagcaatgctgaaggccaggttcctaaagagaagagaaaaggttttaacacgttggtaatccttgtggcttggtggctgtggaaacatcgaaacacttgtgtcttcgagggagcttccccgagcactagagatatcctgcagcacatccatgaggatgctacgctgtggggtatggccggggctagagggcttaggggcttatggccttaa

SEQ ID NO: 125182 - DNA, 2010 bp, Zea Mays
aaaattcttttttggaatgttagaggtttgaatagaaaagtcagaagggatggggttcgtgctttggtcaataatacttgtcctgacgtggtatgtttgcaagaaacaaagaagagttctatttctcgtttcatggttgcgtctctcctgggagttgtttttgatgaatttgtaacgctcccggcagttggcactagggggggaattttattggcctggaaaagttcttcgtgcaaggttactcaatatagaattgacaccttttcagtctcagctcagttccagcacactgatggcaccctctggtggctcactggagtttatggtccccaattggataacctcaagattctattcctgcaggaattgcaactgattcgtaatttgtgcaatggcccgtggatgattgggggggatttcaaccttatttacagagctgaagataaaaacaatggcaacctaaacagagctatgatgggaagatttagacgtctgttaaacgagctgaatctgaaggagctgcctttacttggaaggaaatacacttggtccaatgagagatcttcccccaccctggtccgtttggacagggtgttccatactgcagattgggaaaccttatatccaaactctgtccttcaaagctcagcttccttgatttctgatcactgtccccttttgcttggtttgcatgaactcgtacaaggaaaaagaaggtttcattttgaaagtttttggacaagaatggagggttttatggatgaagtgcagcagtcttggctgcaacctttggagggctgctgccctctacagcgttttgctgggaaactcatgaggctgtccaaacatctgcattcctggagtcagaaaaaggtgggcaacataaaaaaacagatgttgatggctaaagaaattcttcataagctggaaattgcaagagattctagatctctatccccacaggaagagtggctaagacaacgattaaaacatcattctttggctctggtttcccttgagagaaccatagcccgtttgaggagtaggctgttgtggatgaaagagggtgatgccaacactaaatactttcaccagcacgccagatataggaaaaagaagaattttattggaaaaatccaggttcaaaacagattaatcattgatcaaaaggagaagaaagaggctgtttgggatttttataattcgctgcttggaatggtccctcccagagcttcagccctaaatctggaagcctttcatagatgtccgttgaacctccaagaacttgagcagatgatcaccgaggaggaggtttggcacaccatcaggtcgcttccttctgacaaggctccggggccagatgggtacacaggtcgattttataaaaaggtttggcctatcatcaaaatggattttatggcagccttgatgaaagtttggcagggggatgcttctagattatatctgctcaactcagcctatgttactttgttgccaaagaagagtgaggccattgaggtgaaggatttcaggccaataagcctaattcacagttttgcaaaaattgttaccaagattttggctaatagacttgctcctaagctccctgacttggtctctgtgaaccaaagtgcgtttgtgaaaggtagaagtatacatgataattttgtcatggtgcagcaaacagccaaggctatttatgggcaaaaaatgtctagaatcttattgaagttggacattggaaaggcttttgactcggtctcttggaccttcctttttgaggttcttaggcatttgggttttggtcctctgtggtgtggaatagtctcaagggtcctgagttcttccactactagggtcttggttaatggtgagcctggagatattattcatcacagaagaggccttaggcagggggatcccctgtcccctatgctctttatcattgttatggatgtcctcaactcgctgatactgaaggcgcaagatatgggtttgttgcaacctctt

SEQ ID NO: 125183 - DNA, 1688 bp, Zea Mays
ccagaaccagaagcgcacggcttctgcgtgagccagcgtcgccgcccccggcgaagatgtggcggtgaaccgctcgcaacagccacggcctttgcatttgcatgccatgcgcacacaaacacatgacatgacatgacatgacacaccagacttgacgctctcctgtctttatatgccggcgcggcgcgcgggcgtgcgtgcgcgcgcagatggcggaggaggagcagatggcggagctggtgatggcgcagtgcggggtgccgagcggcggtgaggggggcgcgtggccgccgggattcgcgtgggacggcggcgcctcggacgcgtcgcgtgggatgtacggcgatgcggtgccgccgtcgctcagcctgttcgacgccgccggcagcgtcgcggcggacccgttccaggcggtgcagcaggcgccgggcgccggtggtggtggggtggacgacgtcgccgggtggcagtatgctgctgcggctgggagcgagctggaggcggtgcagctgcagcaggagcagcagccgcgcgatgcggactcggggtccgaggtcagcgacatgcagggggacccagaggacgacggcgacggcgacgcgcaggggcgtggcggcggcaagggcggcgggaagcggcagcagtgcaagaacctcgaggcggagcggaagcggcggaagaagctcaacgagcggctctacaagctcaggtcgctcgtcccgaacatctccaagatggaccgcgcggcgatcctcggggacgccatcgactacatcgtgggcctgcagaaccaggtgaaggcgctgcaggacgagctggaggacccggcggacggcgccggcgcccccgacgtcctcctggaccacccgccgccggcgagcctggtggggctggagaacgacgagtcgccgcccacgagccaccagcacccgctcgccgggaccaagagggcccgtgcggcggcggaggaggaggaggaggagaaggggaatgacatggagccgcaggtggaggtgcggcaggtggaggccaacgagttcttcctgcagatgctgtgcgagcgccggcccgggcgcttcgtccagatcatggactccatcgccgacctgggactggaggtcaccaacgtcaacgtcacctcccacgagagcctcgtcctcaacgtcttccgcgccgccaggcgggacaatgaggtggcagtgcaggcggacagactgagggactcgctgctggaggtgatgcgggagccgtacggcgtatggtcgtcgtcggcgccgcccgtggggatgagcggcagcggcatcgccgacgtgaagcatgacagcgtggacatgaagctcgatggcatcatcgacgggcaggcggcaccgagcgtcgcagtgggggtttcagaggatcactacggcggctacaaccatctcctccaatacctcgcttgatcattatttaattgcgttcgttcatgttgaaagttcgatcaaactatcaaaggatggatcaactaataaaaacgggatccatatataagtaactgtgaattgcgatcattaattgtatgcatacaagcatatggtcgtggattaaagtttgttaattgggttttctcactgcttttctggatctttcttgtgttggttcaaacgagggcggaataataaagctatttcctctatgtttttatacaaggt

SEQ ID NO: 125184 - DNA, 1931 bp, Zea Mays
ctagctagctcaagttcttttcttgcagccttttcttcaaatcccacacacccatgacatcggccggcgatccgatctctatcctgattcctgacacacaagcacggccacggaaccctcgcgcatgcatgctgcctgctgacgcttaccttcgtttcgttttcatggctgctgctgcttattgctgcgagtgcgatgtgcaggcggcagcgggcacagtcctccagtcctcgggtgaggcgatcgtcgccggcgccatgggagggggagtccaccaccaccacccgtgcgtggctgctgatggagatggggccggggccgggcccgggccggccagcgtggaggccgcgttgaggcctcttgtcggcgtcgacgcctgggactactgcgtctactggaggctgtctcctgatcagaggttcttggagatggctgggttctgctgcagcagtcagttcgaggcacagcttccagcgctgggcgacctgcctccatcaatccagctcgactcctcgtctgcagggatgcacgccgaggcaatggtgtccaaccagccgatctggcagagcagccgcgtgccagagctccaaacaggttactccagtggcatggtgcaggagcccgggtccagcggcggcccgaggacgcggctgctggtgcccgtcgccggcggcctcgtcgagctcttcgcggcgagatacatggcggaggaggagcagatggcggagctggtgatggcgcagtgcggggtgccgagcggcggtgaggggggcgcgtggccgccgggattcgcgtgggacggcggcgcctcggacgcgtcgcgtgggatgtacggcgatgcggtgccgccgtcgctcagcctgttcgacgccgccggcagcgtcgcggcggacccgttccaggcggtgcagcaggcgccgggcgccggtggtggtggggtggacgacgtcgccgggtggcagtatgctgctgcggctgggagcgagctggaggcggtgcagctgcagcaggagcagcagccgcgcgatgcggactcggggtccgaggtcagcgacatgcagggggacccagaggacgacggcgacggcgacgcgcaggggcgtggcggcggcaagggcggcgggaagcggcagcagtgcaagaacctcgaggcggagcggaagcggcggaagaagctcaacgagcggctctacaagctcaggtcgctcgtcccgaacatctccaagatggaccgcgcggcgatcctcggggacgccatcgactacatcgtgggcctgcagaaccaggtgaaggcgctgcaggacgagctggaggacccggcggacggcgccggcgcccccgacgtcctcctggaccacccgccgccggcgagcctggtggggctggagaacgacgagtcgccgcccacgagccaccagcacccgctcgccgggaccaagagggcccgtgcggcggcggaggaggaggaggaggagaaggggaatgacatggagccgcaggtggaggtgcggcaggtggaggccaacgagttcttcctgcagatgctgtgcgagcgccggcccgggcgcttcgtccagatcatggactccatcgccgacctgggactggaggtcaccaacgtcaacgtcacctcccacgagagcctcgtcctcaacgtcttccgcgccgccaggcgggacaatgaggtggcagtgcaggcggacagactgagggactcgctgctggaggtgatgcgggagccgtacggcgtatggtcgtcgtcggcgccgcccgtggggatgagcggcagcggcatcgccgacgtgaagcatgacagcgtggacatgaagctcgatggcatcatcgacgggcaggcggcaccgagcgtcgcagtgggggtttcagaggatcactacggcggctacaaccatctcctccaatacctcgcttga

SEQ ID NO: 125185 - DNA, 2019 bp, Zea Mays
ggcaacgcaacggtcccggactggtcctgcaatacaaaaggattcttcagttagcagtagctttcagctgatcgattcacttctcctccccgtctgttgagtcattacccgcaggcgtttcgtcaccgctttcagaattcagacagaggtcggtcgccaggaacccataaaaaaaggcggcagcgggcacagtcctccagtcctcgggtgaggcgatcgtcgccggcgccatgggagggggagtccaccaccaccacccgtgcgtggctgctgatggagatggggccggggccgggcccgggccggccagcgtggaggccgcgttgaggcctcttgtcggcgtcgacgcctgggactactgcgtctactggaggctgtctcctgatcagaggtcggcgccgacgcctgggacttgttcctttttgtgtgtgttcttttatggagctcggaaatcagaaccaggcgaatgcgtgtgatggcgtgtgtgtgccacaaactgcttgcaggttcttggagatggctgggttctgctgcagcagtcagttcgaggcacagcttccagcgctgggcgacctgcctccatcaatccagctcgactcctcgtctgcagggatgcacgccgaggcaatggtgtccaaccagccgatctggcagagcagccgcgtgccagagctccaaacaggttactccagtggcatggtgcaggagcccgggtccagcggcggcccgaggacgcggctgctggtgcccgtcgccggcggcctcgtcgagctcttcgcggcgagatacatggcggaggaggagcagatggcggagctggtgatggcgcagtgcggggtgccgagcggcggtgaggggggcgcgtggccgccgggattcgcgtgggacggcggcgcctcggacgcgtcgcgtgggatgtacggcgatgcggtgccgccgtcgctcagcctgttcgacgccgccggcagcgtcgcggcggacccgttccaggcggtgcagcaggcgccgggcgccggtggtggtggggtggacgacgtcgccgggtggcagtatgctgctgcggctgggagcgagctggaggcggtgcagctgcagcaggagcagcagccgcgcgatgcggactcggggtccgaggtcagcgacatgcagggggacccagaggacgacggcgacggcgacgcgcaggggcgtggcggcggcaagggcggcgggaagcggcagcagtgcaagaacctcgaggcggagcggaagcggcggaagaagctcaacgagcggctctacaagctcaggtcgctcgtcccgaacatctccaagatggaccgcgcggcgatcctcggggacgccatcgactacatcgtgggcctgcagaaccaggtgaaggcgctgcaggacgagctggaggacccggcggacggcgccggcgcccccgacgtcctcctggaccacccgccgccggcgagcctggtggggctggagaacgacgagtcgccgcccacgagccaccagcacccgctcgccgggaccaagagggcccgtgcggcggcggaggaggaggaggaggagaaggggaatgacatggagccgcaggtggaggtgcggcaggtggaggccaacgagttcttcctgcagatgctgtgcgagcgccggcccgggcgcttcgtccagatcatggactccatcgccgacctgggactggaggtcaccaacgtcaacgtcacctcccacgagagcctcgtcctcaacgtcttccgcgccgccaggcgggacaatgaggtggcagtgcaggcggacagactgagggactcgctgctggaggtgatgcgggagccgtacggcgtatggtcgtcgtcggcgccgcccgtggggatgagcggcagcggcatcgccgacgtgaagcatgacagcgtggacatgaagctcgatggcatcatcgacgggcaggcggcaccgagcgtcgcagtgggggtttcagaggatcactacggcggctacaaccatctcctccaatacctcgcttga

SEQ ID NO: 125186 - DNA, 1412 bp, Zea Mays
aagaaggaaatgatgcgcgcgcacaccgtggccacccctctctctctctctctccttccttccctccccacccaccaccgcgccgggccaccaccacccactctaccctcccctccccaccaccactagcacccaccgtcccggcgcggagaccgcttccctccctccgcctccgcaaccctctcccgcctcgcccgcgcctccctccatttgtccgcggctcccctccctcccgatcttaaccacccgccacccggcttcctctcccccttcttcctccctcaaaccagacgctcgcccccctttcctccaccgcctatcttcttcagacgaccagcaggaggtacgagcaagaccacctaggaggcctctctctccccccagccacccccgtagcgagagggagggcggaagaggatgagcgcgtccaggttcataaagtgcgtcacggtcggggacggcgccgtcggcaagacctgcatgctcatctcctacacctccaacaccttccccaccgactatgttccgacagtgtttgataacttcagtgccaacgttgtggttgatggtaatactgtcaacctcggcctctgggacactgcaggtcaagaggattacaacagactgagaccactgagctatcgtggagctgatgtttttcttctggctttctcactgatcagtaaggccagctatgagaatgtttcgaagaagtggatacctgaactgaagcattatgcacctggtgtgccaattattctcgtagggacaaagcttgatcttcgagacgacaagcagttctttgtggaccatcctggtgctgtccctatcactactgctcagggagaggagctaagaaagcaaataggcgctccatactacatcgaatgcagctcgaagacccaactaaacgtgaagggcgtcttcgatgcggcgataaaggttgtgctgcagccgcctaaggcgaagaagaagaaaaaggtgcagaggggggcgtgctccattttgtgatctaatcatcggtagatgaagaaacaagggcgaaggtgccatggctttatcatcgtcgcgtcttgcttcagtggaacagcatgaatggtccccaccccctctaggtttactggcggctcggctgcagcgagttctcatctctttgtcgaggcattgagcgatatgtttgtttcattttcctccttcctgccttgtgattatctggtgtgtgtgtgtgtgtgactgacgaagtcgcggcgattaggtaactcgcttagaaggtatttcccgtgtttgagcaaaagaaagtatccctgttatctctgttccataagttagacatgatgtaatcgtactaagtttatttttacttatttcacttgaatggaaaagtatgcttcccatttatatgctcgttgtca

SEQ ID NO: 125187 - DNA, 1893 bp, Zea Mays
ctcgatttgtgccctcttcttttgcaggcaacttttgtgcagccgcccccgctttcccccccgcgaaaacccagcagccgccgccgctgccgccgccgccgccgccacatccagtcctgccccggggccctgaaccctagccatggcgtcctccatactctccgactgctcctcggcccgcctcctccctctccgccgctcgctcctcccgccgcgggcgccccgcctccgctcctgccccgctctagctacccccaggcgcctactcgtcgccgccaggccccagctgcttccgcgcccgcgccacatggactcggtccccgcagccaccgcctcttccgccgactcagcaaccgtctcagccgatgcgcctgccaaactgattgacgggaagctcgtggcgaagcaagtgagagaagaaatagctgtccaagtcaccaggatgaaggatgtgatcggcattgtgcccggcctggctgtcatccttgttgggtcgaggaaggattctcagacttacgtgcggaacaagaagaaggcgtgcgaagcggtcggtataaagtcgtacgaggtcaacttgcctgaggacagctctgaggaggaggttatcaagcacatagcgagtttcaacagtgacccgtccgtgcatggcatcttggttcagttgcccttaccaaggcatatgaatgatgagaacattctgaatgcggtcagtattgaaaaggatgttgatggctttcatccgctgaacatcggacggcttgcaatgcaaggccgagatccgttctttgtaccttgcaccccgaaaggatgcatggagttgctacaccgacacggagttgaaattaaagggaagagagctgttgtgatcggacgaagcaatattgttggaacgcctgctgcattgttgttgcaaaaagcaaatgcaactgtcagcattgttcattcacaaaccaagaaccctgagcaaataacgagacaggcagatatagtcatcgcagctgttggagtcgccaacttggtcagaggggattggataaagcctggagctactattattgatgttggcatcaatccagttgatgacccagagagcccccgcgggtacaggctcgtcggggacgtctgctacgaggaagcctccaaggtcgccggagccatcacgccggtcccaggcggcgtcgggccgatgacgatcgcgatgcttctgtcgaacacgctcgagtcggctagacggatccacggattcaagtagccgccgcacccaccgtccgtccagcagagagaagcgaaggcgttggccctgccagccaagccagactagtgcaggggtcgtagggaaaaaataaataaataattaaataaattttgacgcagatgagatgggaaatcccagcttgacactttgttagggtattgtgcttgataaaaatatggcaccaggtgaatctgaggtgccagtaaatcttggatgaattctgccgcacgcatccgaccggatcagcagaaacttgtctccatgccatgatcagggtacctgtgttgtgagtgactgtggctgtgactggtgggtgccgttgtcgacgtgggataatgcctgatctgtccagttggatccccgatttcattagctgtctgtctgtctgtctgcccccgtttttttttttgtgtgtgtggtacactgcactgcacacgcatgctggtgtatttggtggccacctaaacgcagtagcagttggttgagcgagtatgtgtttggtttgaggttaaagtgtgatgagacgggtgtgacactgtctcttcgatttttttggattacgtcgctattaaaaactacttcggtatttaacttgttcctatgtgaatctcatctaaacactatagaaattatagtcg

SEQ ID NO: 125188 - DNA, 1110 bp, Zea Mays
atggcgtcctccatactctccgactgctcctcggcccgcctcctccctctccgccgctcgctcctcccgccgcgggcgccccgcctccgctcctgccccgctctagctacccccaggcgcctactcgtcgccgccaggccccagctgcttccgcgcccgcgccacatggactcggtccccgcagccaccgcctcttccgccgactcagcaaccgtctcagccgatgcgcctgccaaactgattgacgggaagctcgtggcgaagcaagtgagagaagaaatagctgtccaagtcaccaggatgaaggatgtgatcggcattgtgcccggcctggctgtcatccttgttgggtcgaggaaggattctcagacttacgtgcggaacaagaagaaggcgtgcgaagcggtcggtataaagtcgtacgaggtcaacttgcctgaggacagctctgaggaggaggttatcaagcacatagcgagtttcaacagtgacccgtccgtgcatggcatcttggttcagttgcccttaccaaggcatatgaatgatgagaacattctgaatgcggtcagtattgaaaaggatgttgatggctttcatccgctgaacatcggacggcttgcaatgcaaggccgagatccgttctttgtaccttgcaccccgaaaggatgcatggagttgctacaccgacacggagttgaaattaaagggaagagagctgttgtgatcggacgaagcaatattgttggaacgcctgctgcattgttgttgcaaaaagcaaatgcaactgtcagcattgttcattcacaaaccaagaaccctgagcaaataacgagacaggcagatatagtcatcgcagctgttggagtcgccaacttggtcagaggggattggataaagcctggagctactattattgatgttggcatcaatccagttgatgacccagagagcccccgcgggtacaggctcgtcggggacgtctgctacgaggaagcctccaaggtcgccggagccatcacgccggtcccaggcggcgtcgggccgatgacgatcgcgatgcttctgtcgaacacgctcgagtcggctagacggatccacggattcaagtag

SEQ ID NO: 125189 - DNA, 231 bp, Zea Mays
ggcaaagggctcttcatgccgctccgcgtactgttgaccgggaagcttcatggacctgacataggtggcgctattgccctaatacacaaagccggcgtctgtggtgcggtgactccgcagtccaactttgttactctagatgagcggttcagggtcctgaaggagattgactgggactcgttggcgaaggagcaagaaactcctgctgaatctgccgttcccgccacttaa

SEQ ID NO: 125190 - DNA, 1715 bp, Zea Mays
ccgcccacgtctccagagccatctcggccgtccgatcctcccgcgccttcctcgtatgcgccgccctcctctatataaagtacgcgttggcacgaagcgagcagataagatcgagcagcgagagacgggcaggggagagggaaaaaaaaatctaaccctagcatccgcagcgctagggttcgggggttgcgatggcggcggcggcgagacagcgggggacggtgaagtggttcaacgacaccaagggcttcgggttcatctcccccgaggacggcagcgaagatctcttcgtgcaccagtcgtcgatcaagtcggagggcttccgctcgctcgcggagggcgaggaggtggagttttccgtctcggagggtgacgacggccgcactaaggccgtcgacgtgaccggccccgacggatccttcgtcaggggcggcggaggcggaggaggaggcggcggcggctacggctcccgcggcggtggcggatctggcggcggcggtcgcagctacggtggtagctggggcggcggccggagatccggcggcgggggcggtcccggcgcgtgctacaagtgcggcgagcccggccacatggcaagggactgccctagcgccgacggcggaggcggctacggcggaggcggctacggcggcggcggctacggaggaggaggcggcggcggcggtggctgcttcaagtgtggcgagcctggccacatggccagggactgctccagcggcggcggcggctacggcggtggcggcggcggcggtggaggcggctgctacaactgcggccaggccggccacatggccagggactgccccagcggtggcggcggtggcggagggaggttcggcggcggcggcgggggtggcggcgaccgctcctgctacaactgcggcgaggccggccacatcgcccgcgactgccccacgtgaggtgtgtccgcgtccgtccgtccagccagatcagatcggatcgctccaccacctgctggtctgatggcgccgcccccttctagatctcgcttaaaaaacacccccctctcgctgtgtgtcggagtaccgctttagttttgccgatccgggcacgagtgcccgctgcctctttcctctcatgcgtaagaggatcccgtccgccgttttcagatttcgttcggttcgtagaagaactctcaagttaagttaagttatcatggtgtgtgcttggtcgttgttcgtcgtcgtcgttaaggttttaagagatgatttggtcctgtgttgccgaggggaagtcgaatctgcttttttctttttttgtggtttgttccaccagactgaggaaggagatgagatgattattctcccagattataatcctgcctgcttgtgcttgatttggttaccacatatgccttcaccactaccgctcgatttgatttgattatgcgcaacgcacgggcggttcttgtgatattgcggtgggtggttggttagatcacacggcccgttgtttggtacggaatggaattgctggcacctaccagtagtacacaactacacgtctgcctgttgttttgttgtggatggatgtggtgatgatgataatgatgatggcatgatgctttccagcgagtgatttgtttctgtgcaacacagagaaaggaggaaagcttttctgctgctgcggggcgtgggaatgtgggtgacactggtgtcagtcccccctgctgc

SEQ ID NO: 125191 - DNA, 656 bp, Zea Mays
agataagatcgagcagcgagagacgggcaggggagagggaaaaaaaaatctaaccctagcatccgcagcgctagggttcgggggttgcgatggcggcggcggcgagacagcgggggacggtgaagtggttcaacgacaccaagggcttcgggttcatctcccccgaggacggcagcgaagatctcttcgtgcaccagtcgtcgatcaagtcggagggcttccgctcgctcgcggagggcgaggaggtggagttttccgtctcggagggtgacgacggccgcactaaggccgtcgacgtgaccggccccgacggatccttcgtcaggggcggcggaggcggaggaggaggcggcggcggctacggcggcggcggctacggaggaggaggcggcggcggcggtggctgcttcaagtgtggcgagcctggccacatggccagggactgctccagcggcggcggcggctacggcggtggcggcggcggcggtggaggcggctgctacaactgcggccaggccggccacatggccagggactgccccagcggtggcggcggtggcggagggaggttcggcggcggcggcgggggtggcggcgaccgctcctgctacaactgcggcgaggccggccacatcgcccgcgactgccccacgtga

SEQ ID NO: 125192 - DNA, 2364 bp, Zea Mays
gcgcggcagcccgcccaggaacacgcctgcgcctgcgcctccgcttcctcgaggccgcgtttcgccggctgcctgccggcggtccaccataacatgggcggcgggcggaagcggcggcggcgcgacggctcggagacgccgtcgatgcacccgcggaaccgctacgcagccgccgcgccggacttcgccgcgctggcggagctctacccgtcctttcgccccttcgtctccgtctccggcagcgggcgcgcgtccgttgatttcaccgacttctcctccaccagggagctcacgcgcgtgctcctcctccacgaccatggcgtcaactggtggattccagatggacagctctgcccgactgttccaaacaggtccaactacattcactggatcgaggatcttctctcctcagatctgatcccaccaatatccagctcgagtgagagagtgaagggcttcgacattggaacaggtgccaattgcatctatcctctccttggagcatctttactgggatggacctttgttggatctgatgtcactaatgttgctcttgaatgggctaagaagaatgtggagagcaatccacacctggcagagttaattgagatcagaaatgcaaatgcagcaccatctgaatctgaaactgttgtcagggaagctgccagcgagaagattttagagcctgcggaggatgtagctatgccaaagccacatatccttgtgggtgttgtaaaggagagtgagagctttgacttctgtatgtgcaatcctccattctttgagagcacagaggaagctggccttaacccaaaaacatcgtgtggtgggacagctgaagagatggtttgccctggtggcgagctggcatttattacacaaatcattgaagatagtgtttcccttaagaactctttcaggtggtttacatcgatgattggcagaaaggcaaacttaaagttattgatctcaaaggttcgtgaggctggggcatcagtcgtgaaaactactgaatttgtacaaggtcatacagctagatggggccttgcttggtcattcattgctccgaaaccaagaaaaatagtcctcggctccagtgctccagcaaaaaaacaccattcctttatgcttcaggggcttcgtcgtgaacatggtgcgttccaaattctgaaatcaactgaggctttctttctagcttctaatctatcatgcaaaacggattcgtcggtcttttcagtcgatgtcacattgtcagatgagcagattgaggctgcaatattgcatggggatgattatgccggttctctagaagatagctctgcaaagttacaatgcgttgtcaagggaatatcatttcgtattacagtgtttgaacaaattcctgggaccctcctaatcaaaggttcattattgaataaagcattatcaggtaccttctcatcattgttttctcggttggaggatgcgttaagggcgaaatgtctcagtaaggcgcgatagatctttaattatgagctttgatgcctctgcacggataagtcttctggatgccaaggaatgtgcaaaacgaaatcatgggacggcaacagcgtattagcttatagccaggagtcacaaacagagacgctaagcagtgatggaaactctacacttgcactgcagaaaccattgttgctcgcatgttttcttgatgtgcagtgacggcaagtttgtgggaataccagcatcatgtctggtgtgctggctgcttatctggatttggagaacgacttgacatgacaacaatgggggtcttgctttcaaggccccctgcagtggcacgcaccgtaaaccattccagtgacactgagtagatgacaaatgcagcatcagcggtctgtgcagaccggggtatctggtacactgaattgcctccagagttttttctttctttcttttttccattctttctttctttctttgctatggcacgggaactcagatgaaggctttgaacttcagtgaaccgcacagtgcatgaaactgctgctgcttcaaattaatgtgtttttggaacatgtttgtagcacaatgcctctggccggtagcagtggattatgtaactgtctctaacactgtcagctcaaggcaagttcatcatgaccagtcgattcggatcatcggtttagatgaaccgtgattcatgaagcttggtcatttagaggcgaaacgaaggggtcatcttaggcatctcagtgtcatgtttccacaagaagtttgatatttgttgcacgtcgcttttgttatccattttttctaggtgatgtatactacaggacacctatgtggtgatgcggaagcactggcaagtatccatcagcgtcc

SEQ ID NO: 125193 - DNA, 2144 bp, Zea Mays
cgccgccgcccgattccgcagccaccgaacacagaccccccggcgcggcgcccgcccatggaggatgcggcggagaccgagcagctggaggtggccgccattctgtgcgacataagcaggctcgtgcggtcgcggcaccggcggcgccagcgcgcgcgcgccgcggccccgcacctggagatcctctcgtggggccggcgccggccgcggtcgatgccggaggtcaagccctccccggtcccggctcccgccgccgccgagaggggcggggccgctagccccgacaccccgctcgcgtacccggagagcggcggggacgacgcgccgccggaggacaagggcgaggtcgccgtagctcccccgctggaccagtgggcggaggaggaacagcagctcggcgaggcggcggcgagcttgtcccagccccgggagaacgcgcgtccactccaggtcaacccttcctcctccccactccctttttcttcctcgggagtttagatcttcttctgttcgtgtctgtctcccgtcgattgcttgcttgtgtgcgactagcgacctcgagccattgattagagaaattcaagcggctgcggcgtccccggcacagcagagctcggtcggatgcggagctggaggagcacgagcgaacgagagccttggtgaagcagttgcactcgcaccgtcgcacgaggtgctgctggatggatcctttctctggcggtcgctttccgtcaatctggtagccgtggttgccagttgccacggagactgggtaccggggcggggcacggtttcttgctgctcaattcttgggcgctcggttttgctcgcttgcgtgtttgtgcggacggcaaccacaaccactccagctctgctcgcccatctcatccccacccccaacaaggatcgaaagctgcgacctttttttccccaaaaacaaaaccatctccgagaactcagccatccaacacgaaaaaaagaggaatttttagtttcgattccaatctcccgatcgccattgaccgtctatagtactcatgccaggtagagtataaaaccgttcccttctgtgattggtttgacgcctttcccgatttagtaggaggcctgacgccgtgtcgtcacgaacggctctcgatgcccatgcgtgcatacgtacgcacgcgcgcgctgagagaaagagagagagcagctgaaagggggagttgagtaatgagttccaatcatccaatctcgaactgacgccgcagcaccctggctacgtacgtgtcgctttcgcaggtcgggaggaaggagcaggaggacctgccggcgctggtggtgctggacctgaacgagccggcgcgggcggcggccgacgacgagggggaacagcagccggcgcgcgcgcgggcgcgcgcgcgggcccgggctcgagcgcaggcgcgggcgcaggcagcggccgacgacgagggcgaggagcagcaggaggcccgggcgcgggcggccgcggccgccgccgccgcggagtggtaccggcaggcgcagctgcgggccgcgctgcagaaggcggccgtgtcggcgggcgcgcgccgccgccgcctcgagatcctgcgggccaaggcggcgtgcccgctggtgtcgagcaggagcagggtgcggcgcgccgccgggtgctgagggcgacgacgcgcgtccaagttttgaggcgtggcggccagcctagtcgaaccggactagctgtagcctgtagggtggcggcggcagcggcagcagcgtgctactgtagcagctaagtatttgttgcagtgctagtgattgtttttttcctttcttggataaagaatgttagaatgagattgggtgggagaacgagggggaagaggaacttcgaggtgttgttcatattcagcatgtgtagaagcttgatttgagttgagagtgaggcaatgagcgagttgacgtcgtctggatcgtcttggaacactgtcagattttgatcagcagcatatcagaagtaaccagatatcgatttaattgtatctaccatcgtattgccgttgcaaatttacaattacaggtagtagtgacgtagtactatctttttttaggggaaaaaattggacagtaccagaagcagatgtgatgtgatgtgacatgccaat

SEQ ID NO: 125194 - DNA, 1137 bp, Zea Mays
atggaggatgcggcggagaccgagcagctggaggtggccgccattctgtgcgacataagcaggctcgtgcggtcgcggcaccggcggcgccagcgcgcgcgcgccgcggccccgcacctggagatcctctcgtggggccggcgccggccgcggtcgatgccggaggtcaagccctccccggtcccggctcccgccgccgccgagaggggcggggccgctagccccgacaccccgctcgcgtacccggagagcggcggggacgacgcgccgccggaggacaagggcgaggtcgccgtagctcccccgctggaccagtgggcggaggaggaacagcagctcggcgaggcggcggcgagcttgtcccagccccgggagaacgcgcgtccactccaggtcgggaggaaggagcaggaggacctgccggcgctggtggtgctggacctgaacgagccggcgcgggcggcggccgacgacgagggggaacagcagccggcgcgcgcgcgggcgcgcgcgcgggcccgggctcgagcgcaggcgcgggcgcaggcagcggccgacgacgagggcgaggagcagcaggaggcccgggcgcgggcggccgcggccgccgccgccgcggagtggtaccggcaggcgcagctgcgggccgcgctgcagaaggcggccgtgtcggcgggcgcgcgccgccgccgcctcgagatcctgcgggccaaggcggcgtgcccgctggtgtcgagcaggagcagggtgcggcgcgccgccgggtgctgagggcgacgacgcgcgtccaagttttgaggcgtggcggccagcctagtcgaaccggactagctgtagcctgtagggtggcggcggcagcggcagcagcgtgctactgtagcagctaagtatttgttgcagtgctagtgattgtttttttcctttcttggataaagaatgttagaatgagattgggtgggagaacgagggggaagaggaacttcgaggtgttgttcatattcagcatgtgtagaagcttgatttgagttgagagtgaggcaatgagcgagttgacgtcgtctggatcgtcttggaacactgtcagattttgatcagcagcatatcagaagtaaccagatatcgatttaattgtatcta

SEQ ID NO: 125195 - DNA, 1323 bp, Zea Mays
atggaggatgcggcggagaccgagcagctggaggtggccgccattctgtgcgacataagcaggctcgtgcggtcgcggcaccggcggcgccagcgcgcgcgcgccgcggccccgcacctggagatcctctcgtggggccggcgccggccgcggtcgatgccggaggtcaagccctccccggtcccggctcccgccgccgccgagaggggcggggccgctagccccgacaccccgctcgcgtacccggagagcggcggggacgacgcgccgccggaggacaagggcgaggtcgccgtagctcccccgctggaccagtgggcggaggaggaacagcagctcggcgaggcggcggcgagcttgtcccagccccgggagaacgcgcgtccactccaggtcaacccttcctcctccccactccctttttcttcctcgggagtttagatcttcttctgttcgtgtctgtctcccgtcgattgcttgcttgtgtgcgactagcgacctcgagccattgattagagaaattcaagcggctgcggcgtccccggcacagcagagctcggtcggatgcggagctggaggagcacgagcgaacgagagccttggtgaagcagttgcactcgcaccgtcgcacgaggtgctgctggatggatcctttctctggcggtcgctttccgtcaatctggtagccgtggttgccagttgccacggagactgggtaccggggcggggcacggtttcttgctgctcaattcttgggcgctcggttttgctcgcttgcgtgtttgtgcggacggcaaccacaaccactccagctctgctcgcccatctcatccccacccccaacaaggatcgaaagctgcgacctttttttccccaaaaacaaaaccatctccgagaactcagccatccaacacgaaaaaaagaggaatttttagtttcgattccaatctcccgatcgccattgaccgtctatagtactcatgccaggtagagtataaaaccgttcccttctgtgattggtttgacgcctttcccgatttagtaggaggcctgacgccgtgtcgtcacgaacggctctcgatgcccatgcgtgcatacgtacgcacgcgcgcgctgagagaaagagagagagcagctgaaagggggagttgagtaatgagttccaatcatccaatctcgaactgacgccgcagcaccctggctacgtacgtgtcgctttcgcaggtcgggaggaaggagcaggaggacctgccggcgctggtggtgctggacctgaacgagccggcgcgggcggcggccgacgacgagggggaacagcagccg

SEQ ID NO: 125196 - DNA, 2459 bp, Zea Mays
cagcccgcggcagcagcagcagctcctcctgctcctgctcgtcgctgtagtcgcctcgcatttaccactcactcactcgctcgctctgcccttcaccccctcgccttcttcctccttccatctcgatctcgtactctccttcgctcgcatcgcatcgcatcgcaccgacggacgcagagcaaggtcgcccgccgccccaccacccgcgcgcggctcttggcgccgcatgccgctctcgccctccggcgccgccggcggcttgctccgccgctgcccgcgcgctgccgtcctccccgccgccgccgccgccgcgacaacggctcgactcgaggcgatgcagatcggaggatatagcgggaaggagatgagaggtgaggagcacagggcagcgctgagacagaagagactcaagaaggccaagtgcttcaagtggagaccaagcaagggcgacatggatagcaaagtggaggcggggggagcggggtctggtcaggtctgcgatgacgcagtgctctgctcgctgtctacggccagcttcagtggcctggttagctggcagagagtgaggacccttgggaaggtggctgaggggtgtgatgctgccgatcctccggttccaagaaaattaagatcagccataaacaagcgagctggtcgatttgcttctgcgccatcacgccatgtcaaaaagaggcgtcatctttcggctatcagtgctcaaatttcttctgtaggccaggaaacaagatccaatgggagctcgttatttacagaacaagaggaagcaattgctgatgttctgctgtccctatcccaagtaccctctcacagcgaggtcacagccgacaaggctgtagcagatagttcaaacacgaatgacgcttcaacttctttttcaaaaggacctactaaggaggatgaccaaacagccgagctgccaagcgctgctaacgagctggctagccaatgcgcctgcataaataaagcggtggagcaaagcaacatcgttccaaatgcagatccagtggctgctgctgcaaatcaatccagcaacagtatcccacttctgtcagcgaatgagcaaatgcaggacctttctatggaaactgctgtgaatttgccaagcccatctaaagacacctccattaacagcgctcaaaagcaccatgaactgcagtttgatgatagcaaatgtcaccctgcacagaagccagaggctcctctttggctggtaaattctgatcaatctgagggtgtgctgctacatgagagggagaaggccaagaacaacagtgcacaagaaattgtgcctctggtccagactctgttgccttgtaccccagctgggtacttagtaaaaccctcttcaagcaaactggcagctcccgccaatacaatttctgaatccgctaacttcaccacgcctggaaatcagaacaagcaccctgtgctcagaaacgtcggcgcgccgaaggcatggaagaggagcatcacccacgtgtacgtgagccacgtgatccagatgcacgtgaacaaggagaaggccgccgcgtcgtcgtcgttacaaagccaagcgaggcctgaggagaggctcctcgcccgctgccccaggcctccgaacggctcgtccaccacctcgcacaaggccgccgccgctcgggacgagaggttgtacacggtgcacttcgacgtgcgcgtcccggctcaccagccgcccgctggcatctgcgatgcgggcgccggccggcagaagattgtcagcggtagttcctggcaaaaccttccggccacatcggcggccgccgcggcagcggcgcagcatgtccggtacctacaccctcagatggctcggccaccggcgacgccgcgtgacgcgacgccgtactcgttcccgcacttcccttacagcagggggagtctgccacccgccgcggcgcttcagcagatgccacagtatgtgtgcggcccggcgtatggtctgcgccctgcgagctcgtcggcgatgatgatgaagcagctacaacaacccatgccgacgcagcagcagcaccagcagatgtggcagtaccatgtctcgcagtaccagccgaggccggacgctacgctttctccggcggcagcgtggcacggcatttcgtcgtcgctgcgaccgatgggcatgcttgctcccccggagatgccgtcgccgccacggccgccgcagatggagctcttctgcgcgccgtaccaaggtggcaggcagccgcagcagctgaggttgatgtagcctggcctcccttctgctgctgatcagctgattgatactactattcagacgcactaatttatagtggataatatacaacatcttagcagtaaaaaagtgggatgttgcaaaaaagaaaaagaaagtgagatgcataaggttgtgttttatttatacactcaggaaatagggttatgcatggtaccagagggga

SEQ ID NO: 125197 - DNA, 2031 bp, Zea Mays
gctccttgtccttttcacagatgctgctcgtggctccctcatggaacatggatccgtgctgcctggtgaaacgtgaacacatgcatgggagcctttggagacctcttctcgccaacttttcagatttttggcacaaaaaaaaaccttttaaaattgtttcgaagatctttgccaccgccaacgaccatatagttttttccccctgcgtgatccacttccactgtctgaattgctttccagtttttttactagtgtaaaagctttacgatcctgagcttttcagattacggtgattcctaaaaggccagatggcaccaaccgtccctatcgtttcttgttcagaaaaggcagtttgcaaaaactgtgccttgcctagctgttctagccactagattaccgcgccgccatgcatgttttgtaacgctgatcgccgctgcataccgctcgtcgtctccaggatatagcgggaaggagatgagaggtgaggagcacagggcagcgctgagacagaagagactcaagaaggccaagtgcttcaagtggagaccaagcaagggcgacatggatagcaaagtggaggcggggggagcggggtctggtcaggtctgcgatgacgcagtgctctgctcgctgtctacggccagcttcagtggcctggttagctggcagagagtgaggacccttgggaaggtggctgaggggtgtgatgctgccgatcctccggttccaagaaaattaagatcagccataaacaagcgagctggtcgatttgcttctgcgccatcacgccatgtcaaaaagaggcgtcatctttcggctatcagtgctcaaatttcttctgtaggccaggaaacaagatccaatgggagctcgttatttacagaacaagaggaagcaattgctgatgttctgctgtccctatcccaagtaccctctcacagcgaggtcacagccgacaaggctgtagcagatagttcaaacacgaatgacgcttcaacttctttttcaaaaggacctactaaggaggatgaccaaacagccgagctgccaagcgctgctaacgagctggctagccaatgcgcctgcataaataaagcggtggagcaaagcaacatcgttccaaatgcagatccagtggctgctgctgcaaatcaatccagcaacagtatcccacttctgtcagcgaatgagcaaatgcaggacctttctatggaaactgctgtgaatttgccaagcccatctaaagacacctccattaacagcgctcaaaagcaccatgaactgcagtttgatgatagcaaatgtcaccctgcacagaagccagaggctcctctttggctggtaaattctgatcaatctgagggtgtgctgctacatgagagggagaaggccaagaacaacagtgcacaagaaattgtgcctctggtccagactctgttgccttgtaccccagctgggtacttagtaaaaccctcttcaagcaaactggcagctcccgccaatacaatttctgaatccgctaacttcaccacgcctggaaatcagaacaagcaccctgtgctcagaaacgtcggcgcgccgaaggcatggaagaggagcatcacccacgtgtacgtgagccacgtgatccagatgcacgtgaacaaggagaaggccgccgcgtcgtcgtcgttacaaagccaagcgaggcctgaggagaggctcctcgcccgctgccccaggcctccgaacggctcgtccaccacctcgcacaaggccgccgccgctcgggacgagaggttgtacacggtgcacttcgacgtgcgcgtcccggctcaccagccgcccgctggcatctgcgatgcgggcgccggccggcagaagattgtgagcgccacagacactagagcttgacagctaccgtggcggcgctgctgctgcttgaacgctggctggctgccggtaactgagctccactgaagtcttgcctaaccgaagccgttgctgtttcaggtcagcggtagttcctggcaaaaccttccggccacatcg

SEQ ID NO: 125198 - DNA, 1918 bp, Zea Mays
gtcttttatagctgttgttcactttgccctaaggttggttagcatgtgcgtgtctatccgtccatgactgcctcatcctcctcctctcgccgcattccttctcctcgagtccgtgtagagtgagcgaagacgacaaagagagaaacgagagggttgtgacttgtgagatctttttgagctagtagctaggactagcaaggggtggacaggcctttctggatggcggatatggagaggagggaggagaaggagaagaagccggtggttgggcgtcagcaagcaaggagacacgcgatagggagtggctccaccccctcctcgcctcctcctccaacggctgccgctggatatagcgggaaggagatgagaggtgaggagcacagggcagcgctgagacagaagagactcaagaaggccaagtgcttcaagtggagaccaagcaagggcgacatggatagcaaagtggaggcggggggagcggggtctggtcaggtctgcgatgacgcagtgctctgctcgctgtctacggccagcttcagtggcctggttagctggcagagagtgaggacccttgggaaggtggctgaggggtgtgatgctgccgatcctccggttccaagaaaattaagatcagccataaacaagcgagctggtcgatttgcttctgcgccatcacgccatgtcaaaaagaggcgtcatctttcggctatcagtgctcaaatttcttctgtaggccaggaaacaagatccaatgggagctcgttatttacagaacaagaggaagcaattgctgatgttctgctgtccctatcccaagtaccctctcacagcgaggtcacagccgacaaggctgtagcagatagttcaaacacgaatgacgcttcaacttctttttcaaaaggacctactaaggaggatgaccaaacagccgagctgccaagcgctgctaacgagctggctagccaatgcgcctgcataaataaagcggtggagcaaagcaacatcgttccaaatgcagatccagtggctgctgctgcaaatcaatccagcaacagtatcccacttctgtcagcgaatgagcaaatgcaggacctttctatggaaactgctgtgaatttgccaagcccatctaaagacacctccattaacagcgctcaaaagcaccatgaactgcagtttgatgatagcaaatgtcaccctgcacagaagccagaggctcctctttggctggtaaattctgatcaatctgagggtgtgctgctacatgagagggagaaggccaagaacaacagtgcacaagaaattgtgcctctggtccagactctgttgccttgtaccccagctgggtacttagtaaaaccctcttcaagcaaactggcagctcccgccaatacaatttctgaatccgctaacttcaccacgcctggaaatcagaacaagcaccctgtgctcagaaacgtcggcgcgccgaaggcatggaagaggagcatcacccacgtgtacgtgagccacgtgatccagatgcacgtgaacaaggagaaggccgccgcgtcgtcgtcgttacaaagccaagcgaggcctgaggagaggctcctcgcccgctgccccaggcctccgaacggctcgtccaccacctcgcacaaggccgccgccgctcgggacgagaggttgtacacggtgcacttcgacgtgcgcgtcccggctcaccagccgcccgctggcatctgcgatgcgggcgccggccggcagaagattgtgagcgccacagacactagagcttgacagctaccgtggcggcgctgctgctgcttgaacgctggctggctgccggtaactgagctccactgaagtcttgcctaaccgaagccgttgctgtttcaggtcagcggtagttcctggcaaaaccttccggccacat

SEQ ID NO: 125199 - DNA, 6215 bp, Zea Mays
atgcttgcgttcgagcagcaggtgttggcggatctggtggaagatccgaacggaggtctggtggtgctctcctcgggtctccctctcgcttccctagccgctaccctcctcctccatctccaccagacccccggcaacgcggctggaggaggatgtctcctcgtcctctccgccaccgataccctcaaggcccggatccggcgccgcctccaagacaagctgcaggttcacgacgtgccccctgacctcgccgcgcagcagcgcgccaccctttacgcctctggcgctgctctcttcctctctccccgcgccctcgccgccgacctcctcacctcccgcctcctcccctcccgcgtccaagccctactcctcctctccgcccaccgctccaccgatacctcctccgatgccttcatctgccgcctcctccgtcaacgcaatcttctccccgtttacgccttctccgattgcccccatgccatggtcgccggtttctccaaggccgagcgtaccatgaagagcctctacgtccgccgtctccacctctggccccgcttccacgttctcgccgcagccgacctggaacgcgccccgcctgacgtcgtagacgtgcgcgttcccatgacgccgcccatgaggggtatccaggctgctgtcctcgctaccatggacgcttgtctcaaggaacttaggcgcaccaacaaggtggatgttgaggacctcaccgtcgacaagggcctcttcaagtccttcgatgagatcgtccggaggcagctcgaccccatctggcacactcttgggaagaagacaaagcagcttgtggctgacctcaggacgctacgcaagctgcttgattacctcgtcaggtatgacgccgttacatacttgaagtaccttgacacattgagagtatcagaaggtgtcagatcagtttggatacttgctgactcaagccataggatatttgagcttgcaaaaaggcgcgtttaccaggcagtgagaacagatggtgttaatgttagcatagataataagggcacaccaacaaagaagaggaaagtggcacataattctaccaagaaaggaaaagtaactggtagctgctcttggccccttcatttgcaggaattgttgcaagagatagcagaacaacggatgaagagcagtgccgggaatgtgcatgatgaggacaaaaatgatgaaagtggcatagttttggtatcatgtaaagatgaacgcacatgcttgcagctgcaggaatgcatattaaaaggcccctgtcaggttatgcgagaagagtgggagaagtatctgattggaaaagctgagctgcatggattgaataaggacaagagaaaatctgagcaaccaaaaggtgttggtgtcctggatggtgaagttcaaatgggatctagtgagagtgtgtgtccagttagcattagcaaactcgaaactaatgccttacttgccgctgcctctgaattaagaaatatatcaaatgaagcagatgtcaagagtagctcaaatagcagctgcagcaaggctgggggagcaaaggggaaaccaaagaaaaccacttcaaagagacaaggcagcaatcgaaaaaataaaagtaaggagggaaatgacaatagccaaggtactggtctggattctgaaggtcaatcaggaaaagcagatgtacaggctgagattgttgcttctaagatgtccgcatatgatgcttccatgtcagcctctacttctaatgttaaatttaaccattcatctgctttcggaaacttggcaaacgccaagccactacctcctgtgcagtttcatgctctagacagtgaccaccaggttcttgatgtatggaagccatctgtcattattgtttatcatccagatattacctttgtaagagaaattgaagtatacaaggcagaaaactcatcaaggaagttaaaagtttacttccttttttatgaagattccactgaggtgcaaaaatatgagtccagcattcgacgggaaaatgaagcatttgaatctttgatcagacagaagtccctgatgatgatacctgttgatcaggatggccgttgcattggaccaactgttgcaaatgaaccagagcctcctttatgtcagaactcaattacaagaaaggcaggtggtaaaaaggcgcccgagaaggagatgcaggttattgtagacatgagagagttcatgagcagccttccgaatgtattacatcaaaaaggtatccgaatcgtaccggtcacccttgaagttggtgactatgtgctctctcctttgatctgtgttgaacggaaaagtattgcggacttgttccaaagctttgcttctggtcgtctgtacaatcaggttgagacaatggcacgttactacaagatcccggttctcctcatcgagttctcacaagataagagcttttcctttcagtctgcaaatgagattggtgatgatgtctctccgaccaacattatctcgaagctttctctgctagtgctgcattttcctcggcttcgcataatctggtcacgcagcttgcatgctacagcagaaatatttatgtcactgaaaacaaaccaggatgaacctgatgagaaaaaagcaacaagagttggcgtgccatccgaggatggtatcgtggaggatgatgtgaggtctgaaaattacaacacatcagccattgagttcttaagaaggcttcctggggtgacggattctaactaccgagcaatcatggatggatgcaatagcttggccgagctggccctgcttccagtggaaagcaaacatgcagaaaatgagcagcagattatgggctgggcaggctctaacccagcccaggaactccccctctcccccacgttcttctttgttgttgttgggcaagtagtgcggctgtttgagtctacgctacagaatgactatctaaatcacacctcctgtggagcctttcatgctcagatggaatcttgggaaagaattttgtactggatggcagttttgtgggagcgtgggttcagtcatgagaatcctcaagtgagatgcctggttatgcaatcctttttggatattgcatgggaacgctacaaggattgcactcagataattccaaggggttttgtgcttggtcctctgatacgtggtttgaatgatgtggttcatcataaggattttgttatgaatagacagcttgttaacttgaagtctagtgcagtttgtgaacaggttataaaagttgcaacatcactgataaatgccactgaaattccacttaacccgcttctgcatttcattgccacaattcctcgagagttctctgattatattggaccattgagagtagtagttcaaaaatggtttgttcagaaggaagaatgttctcctggtgacactttgttgagtaagctgattgatttctctgccaccttcgtaagtcaaaaacggaatgaaggttcgaatgtttttgatgacgaggatgtggatgcatgggaagctgaagcaaggtgggctagaacccttcttgtaacctcggaggaggaacatttgaaacgaatcttcaggtttttggaggcatatggctacaagctctctgagcaatgtcccagtggagatttcatacccataaaaaattttatcattgttttaagcttcattgaggaacttgaggaaaaaaaaatcccacgtggtcagtcaaaggttagtattaaacgagaggtccagattggtcttgtgcttgagttcatatgctggctgttgagaagctgcatgcttgcaacaccacaccacataaatttggagggcctgcggacgccccgatgcatatcactcacatgcattcttgctcctgctaggaggatcggaaccagcatgtctgaacgatgcatcttctccttctccactctggcttcgccggcggcagatggaaacaacagccggcgaggaggccgccaccgtggcgattccatcgtcacccgctcttcggcggcggccaacacgctgccgctgctccgcaatgacgacttcgacctccgggagggcctgacggacgtacgaaatgttctccgtcaacgtcagaagagtggctgcagcagcagggacatgatggtcaccgtcgacaacctcaagcgcctctgcatcgaccactacttccaggaagagatcgagcgcgccatgggtgcctgctgcatgggtctcatccacagcgacgatctcttcgacgcgacgcttgccttcaggctcctcagagaggccggccatggcgtttcagcaggtcatcgatccaacacactaattattaaacacaaatccatccatgcatgatgatgtctacggtcgatcgacgacgactgaacatgcatggctgcacggcactgcacataccagcagatgatgttttacggaggttcactgacgacgacgacagcggcggcgagttcaggctcgatctcagcaaggacatcagagggctgctgagcctgcacgacatgtctcacctggacatgggaggggaggagttgctctgcaaggcaagagtgttctcgcgccaccacctcgcttctgccgtcaggtacctggagccaagccttggcgagtacgtgagacagtcgcttgaccacccctaccacctgagcctcacgcagtacaaggctcggcaccacctcgcctacctccagagcctgcccgtcagagacaccgcgctcgagagactagtggctgcagagttccagctcaacagatcgctgcatcagaaagaaatgcaggccattaaaagatggtggatggagctaggattggttcaagaaatacctgtggtgagggaccaggtgctgaaatggtacatgtggtccatgacagcgctccaaggacgttccttctccagacaccgggttcagatcaccaagatcatcgcgctcgtctatgtcgtcgacgacatatttgaccttgttgccacactagatgagctctccctctttgcagaggcagtcaaaatgtggaacagcacggctgcagagtcactccctagctacatgagatcatgctacaaggctctttacaccgtcacaaatgagatagcggatacggccgaaaaggagcatggattgaaccatgttaatcatcttagaaaagcagtatgatgtgcgctactagctaaaaacttttatcttgaatacacttcttcaatttgatttgcatgaaaccacacgtacggtgaacaattcctagaatttatttccaccatattttctctgcagtgggcagcgttgtttgatggatttatggtcgaggcaagatggctagcaactgataaggttcctactgcagaggattacctgacgaatggtgttgtcacatcaggagtgccgctcacatttgtacacatattcatcatgctagggtgtgacgatgatcaaagtacccaagctctcgttgaccacatgccctctgtcatctcttgcccagccaagatcctccggctttgggatgacatgggcagtgcagaggttagttgagcatacagtactacttgtcaattttttccacctttaatttgcacatcaaaatttccaagtctgcctgtaataatatttagcagcaaacctagctttagctagcacttctgttcatgcatgcatggacttgcaggatgaagctcaggaaggattcgatggttcctatagggatttctacctcatggagaaccctagatgcagccgtagcgatgcggaagcacatatgcgtagcttgatcgcaagggagtgggaggagctcaatagggagtgcttatgcaagaggaccttctcctctagcttcacacacgtctgcttgaacgccgcgcgaatgatcagtgtcatgtactcatacaacaaggaacaaaggcttcttgtccttgaggactatgcaaggatgttgatactttgaagctttgctccatggacatacatgtgagacaacgtgcagggatggatcttgccatcactactgccgaggacaaggttagaggtaggtgtggcatccatcttgaatctatggtggaaaagacacatctgcctttgatctgcaacggtccaaggtcgccaccacaatgatccatatctaccaatgtaataataatgtacgatagcactatattttttgaaaaaaatgtaatattgaaatatgcaacacaagtaagagctgtgtataagtccccacaaata

SEQ ID NO: 125200 - DNA, 5556 bp, Zea Mays
atgcttgcgttcgagcagcaggtgttggcggatctggtggaagatccgaacggaggtctggtggtgctctcctcgggtctccctctcgcttccctagccgctaccctcctcctccatctccaccagacccccggcaacgcggctggaggaggatgtctcctcgtcctctccgccaccgataccctcaaggcccggatccggcgccgcctccaagacaagctgcaggttcacgacgtgccccctgacctcgccgcgcagcagcgcgccaccctttacgcctctggcgctgctctcttcctctctccccgcgccctcgccgccgacctcctcacctcccgcctcctcccctcccgcgtccaagccctactcctcctctccgcccaccgctccaccgatacctcctccgatgccttcatctgccgcctcctccgtcaacgcaatcttctccccgtttacgccttctccgattgcccccatgccatggtcgccggtttctccaaggccgagcgtaccatgaagagcctctacgtccgccgtctccacctctggccccgcttccacgttctcgccgcagccgacctggaacgcgccccgcctgacgtcgtagacgtgcgcgttcccatgacgccgcccatgaggggtatccaggctgctgtcctcgctaccatggacgcttgtctcaaggaacttaggcgcaccaacaaggtggatgttgaggacctcaccgtcgacaagggcctcttcaagtccttcgatgagatcgtccggaggcagctcgaccccatctggcacactcttgggaagaagacaaagcagcttgtggctgacctcaggacgctacgcaagctgcttgattacctcgtcaggtatgacgccgttacatacttgaagtaccttgacacattgagagtatcagaaggtgtcagatcagtttggatacttgctgactcaagccataggatatttgagcttgcaaaaaggcgcgtttaccaggcagtgagaacagatggtgttaatgttagcatagataataagggcacaccaacaaagaagaggaaagtggcacataattctaccaagaaaggaaaagtaactggtagctgctcttggccccttcatttgcaggaattgttgcaagagatagcagaacaacggatgaagagcagtgccgggaatgtgcatgatgaggacaaaaatgatgaaagtggcatagttttggtatcatgtaaagatgaacgcacatgcttgcagctgcaggaatgcatattaaaaggcccctgtcaggttatgcgagaagagtgggagaagtatctgattggaaaagctgagctgcatggattgaataaggacaagagaaaatctgagcaaccaaaaggtgttggtgtcctggatggtgaagttcaaatgggatctagtgagagtgtgtgtccagttagcattagcaaactcgaaactaatgccttacttgccgctgcctctgaattaagaaatatatcaaatgaagcagatgtcaagagtagctcaaatagcagctgcagcaaggctgggggagcaaaggggaaaccaaagaaaaccacttcaaagagacaaggcagcaatcgaaaaaataaaagtaaggagggaaatgacaatagccaaggtactggtctggattctgaaggtcaatcaggaaaagcagatgtacaggctgagattgttgcttctaagatgtccgcatatgatgcttccatgtcagcctctacttctaatgttaaatttaaccattcatctgctttcggaaacttggcaaacgccaagccactacctcctgtgcagtttcatgctctagacagtgaccaccaggttcttgatgtatggaagccatctgtcattattgtttatcatccagatattacctttgtaagagaaattgaagtatacaaggcagaaaactcatcaaggaagttaaaagtttacttccttttttatgaagattccactgaggtgcaaaaatatgagtccagcattcgacgggaaaatgaagcatttgaatctttgatcagacagaagtccctgatgatgatacctgttgatcaggatggccgttgcattggaccaactgttgcaaatgaaccagagcctcctttatgtcagaactcaattacaagaaaggcaggtggtaaaaaggcgcccgagaaggagatgcaggttattgtagacatgagagagttcatgagcagccttccgaatgtattacatcaaaaaggtatccgaatcgtaccggtcacccttgaagttggtgactatgtgctctctcctttgatctgtgttgaacggaaaagtattgcggacttgttccaaagctttgcttctggtcgtctgtacaatcaggttgagacaatggcacgttactacaagatcccggttctcctcatcgagttctcacaagataagagcttttcctttcagtctgcaaatgagattggtgatgatgtctctccgaccaacattatctcgaagctttctctgctagtgctgcattttcctcggcttcgcataatctggtcacgcagcttgcatgctacagcagaaatatttatgtcactgaaaacaaaccaggatgaacctgatgagaaaaaagcaacaagagttggcgtgccatccgaggatggtatcgtggaggatgatgtgaggtctgaaaattacaacacatcagccattgagttcttaagaaggcttcctggggtgacggattctaactaccgagcaatcatggatggatgcaatagcttggccgagctggccctgcttccagtggaaagcaaacatgcagaaaatgagcagcagattatgggctgggcaggctctaacccagcccaggaactccccctctcccccacgttcttctttgttgttgttgggcaagtagtgcggctgtttgagtctacgctacagaatgactatctaaatcacacctcctgtggagcctttcatgctcagatggaatcttgggaaagaattttgtactggatggcagttttgtgggagcgtgggttcagtcatgagaatcctcaagtgagatgcctggttatgcaatcctttttggatattgcatgggaacgctacaaggattgcactcagataattccaaggggttttgtgcttggtcctctgatacgtggtttgaatgatgtggttcatcataaggattttgttatgaatagacagcttgttaacttgaagtctagtgcagtttgtgaacaggttataaaagttgcaacatcactgataaatgccactgaaattccacttaacccgcttctgcatttcattgccacaattcctcgagagttctctgattatattggaccattgagagtagtagttcaaaaatggtttgttcagaaggaagaatgttctcctggtgacactttgttgagtaagctgattgatttctctgccaccttcgtaagtcaaaaacggaatgaaggttcgaatgtttttgatgacgaggatgtggatgcatgggaagctgaagcaaggtgggctagaacccttcttgtaacctcggaggaggaacatttgaaacgaatcttcaggtttttggaggcatatggctacaagctctctgagcaatgtcccagtggagatttcatacccataaaaaattttatcattgttttaagcttcattgaggaacttgaggaaaaaaaaatcccacgtggtcagtcaaaggttagtattaaacgagaggtccagattggtcttgtgcttgagttcatatgctggctgttgagaagctgcatgcttgcaacaccacaccacataaatttggagggcctgcggacgccccgatgcatatcactcacatgcattcttgctcctgctaggaggatcggaaccagcatgtctgaacgatgcatcttctccttctccactctggcttcgccggcggcagatggaaacaacagccggcgaggaggccgccaccgtggcgattccatcgtcacccgctcttcggcggcggccaacacgctgccgctgctccgcaatgacgacttcgacctccgggagggcctgacggacgtacgaaatgttctccgtcaacgtcagaagagtggctgcagcagcagggacatgatggtcaccgtcgacaacctcaagcgcctctgcatcgaccactacttccaggaagagatcgagcgcgccatgggtgcctgctgcatgggtctcatccacagcgacgatctcttcgacgcgacgcttgccttcaggctcctcagagaggccggccatggcgtttcagcagatgatgttttacggaggttcactgacgacgacgacagcggcggcgagttcaggctcgatctcagcaaggacatcagagggctgctgagcctgcacgacatgtctcacctggacatgggaggggaggagttgctctgcaaggcaagagtgttctcgcgccaccacctcgcttctgccgtcaggtacctggagccaagccttggcgagtacgtgagacagtcgcttgaccacccctaccacctgagcctcacgcagtacaaggctcggcaccacctcgcctacctccagagcctgcccgtcagagacaccgcgctcgagagactagtggctgcagagttccagctcaacagatcgctgcatcagaaagaaatgcaggccattaaaagatggtggatggagctaggattggttcaagaaatacctgtggtgagggaccaggtgctgaaatggtacatgtggtccatgacagcgctccaaggacgttccttctccagacaccgggttcagatcaccaagatcatcgcgctcgtctatgtcgtcgacgacatatttgaccttgttgccacactagatgagctctccctctttgcagaggcagtcaaaatgtggaacagcacggctgcagagtcactccctagctacatgagatcatgctacaaggctctttacaccgtcacaaatgagatagcggatacggccgaaaaggagcatggattgaaccatgttaatcatcttagaaaagcatgggcagcgttgtttgatggatttatggtcgaggcaagatggctagcaactgataaggttcctactgcagaggattacctgacgaatggtgttgtcacatcaggagtgccgctcacatttgtacacatattcatcatgctagggtgtgacgatgatcaaagtacccaagctctcgttgaccacatgccctctgtcatctcttgcccagccaagatcctccggctttgggatgacatgggcagtgcagaggatgaagctcaggaaggattcgatggttcctatagggatttctacctcatggagaaccctagatgcagccgtagcgatgcggaagcacatatgcgtagcttgatcgcaagggagtgggaggagctcaatagggagtgcttatgcaagaggaccttctcctctagcttcacacacgtctgcttgaacgccgcgcgaatgatcagtgtcatgtactcatacaacaaggaacaaaggcttcttgtccttgaggactatgcaaggatgttgatactttga

SEQ ID NO: 125201 - DNA, 3073 bp, Zea Mays
atatacttacaccgggaagaaggcgaaggccgtcgcgctctcggcggcggcggcggcggcggcagcggcgatgcttgcgttcgagcagcaggtgttggcggatctggtggaagatccgaacggaggtctggtggtgctctcctcgggtctccctctcgcttccctagccgctaccctcctcctccatctccaccagacccccggcaacgcggctggaggaggatgtctcctcgtcctctccgccaccgataccctcaaggcccggatccggcgccgcctccaagacaagctgcaggttcacgacgtgccccctgacctcgccgcgcagcagcgcgccaccctttacgcctctggcgctgctctcttcctctctccccgcgccctcgccgccgacctcctcacctcccgcctcctcccctcccgcgtccaagccctactcctcctctccgcccaccgctccaccgatacctcctccgatgccttcatctgccgcctcctccgtcaacgcaatcttctccccgtttacgccttctccgattgcccccatgccatggtcgccggtttctccaaggccgagcgtaccatgaagagcctctacgtccgccgtctccacctctggccccgcttccacgttctcgccgcagccgacctggaacgcgccccgcctgacgtcgtagacgtgcgcgttcccatgacgccgcccatgaggggtatccaggctgctgtcctcgctaccatggacgcttgtctcaaggaacttaggcgcaccaacaaggtggatgttgaggacctcaccgtcgacaagggcctcttcaagtccttcgatgagatcgtccggaggcagctcgaccccatctggcacactcttgggaagaagacaaagcagcttgtggctgacctcaggacgctacgcaagctgcttgattacctcgtcaggtatgacgccgttacatacttgaagtaccttgacacattgagagtatcagaaggtgtcagatcagtttggatacttgctgactcaagccataggatatttgagcttgcaaaaaggcgcgtttaccaggcagtgagaacagatggtgttaatgttagcatagataataagggcacaccaacaaagaagaggaaagtggcacataattctaccaagaaaggaaaagtaactgaaaatgaagattccactgtaggtcccaacactcagaaggctaatactgatgtgggcattgtattggaagaggttttggaggaggcaccgaaatggaaagtgttatgggaattgttgcaagagatagcagaacaacggatgaagagcagtgccgggaatgtgcatgatgaggacaaaaatgatgaaagtggcatagttttggtatcatgtaaagatgaacgcacatgcttgcagctgcaggaatgcatattaaaaggcccctgtcaggttatgcgagaagagtgggagaagtatctgattggaaaagctgagctgcatggattgaataaggacaagagaaaatctgagcaaccaaaaggtgttggtgtcctggatggtgaagttcaaatgggatctagtgagagtgtgtgtccagttagcattagcaaactcgaaactaatgccttacttgccgctgcctctgaattaagaaatatatcaaatgaagcagatgtcaagagtagctcaaatagcagctgcagcaaggctgggggagcaaaggggaaaccaaagaaaaccacttcaaagagacaaggcagcaatcgaaaaaataaaagtaaggagggaaatgacaatagccaaggtactggtctggattctgaaggtcaatcaggaaaagcagatgtacaggctgagattgttgcttctaagatgtccgcatatgatgcttccatgtcagcctctacttctaatgttaaatttaaccattcatctgctttcggaaacttggcaaacgccaagccactacctcctgtgcagtttcatgctctagacagtgaccaccaggttcttgatgtatggaagccatctgtcattattgtttatcatccagatattacctttgtaagagaaattgaagtatacaaggcagaaaactcatcaaggaagttaaaagtttacttccttttttatgaagattccactgaggtgcaaaaatatgagtccagcattcgacgggaaaatgaagcatttgaatctttgatcagacagaagtccctgatgatgatacctgttgatcaggatggccgttgcattggaccaactgttgcaaatgaaccagagcctcctttatgtcagaactcaattacaagaaaggcaggtggtaaaaaggcgcccgagaaggagatgcaggttattgtagacatgagagagttcatgagcagccttccgaatgtattacatcaaaaaggtatccgaatcgtaccggtcacccttgaagttggtgactatgtgctctctcctttgatctgtgttgaacggaaaagtattgcggacttgttccaaagctttgcttctggtcgtctgtacaatcaggttgagacaatggcacgttactacaagatcccggttctcctcatcgagttctcacaagataagagcttttcctttcagtctgcaaatgagattggtgatgatgtctctccgaccaacattatctcgaagctttctctgctagtgctgcattttcctcggcttcgcataatctggtcacgcagcttgcatgctacagcagaaatatttatgtcactgaaaacaaaccaggatgaacctgatgagaaaaaagcaacaagagttggcgtgccatccgaggatggtatcgtggaggatgatgtgaggtctgaaaattacaacacatcagccattgagttcttaagaaggcttcctggggtgacggattctaactaccgagcaatcatggatggatgcaatagcttggccgagctggccctgcttccagtggaaaggttggcggagctaatgggtggtcagaaagctgcgcggacgctcaaggagtttctcgatgccaagtgcccaaccatgttgtagccagagtgacgctctagcaggagtcaagggtctctcctattt

SEQ ID NO: 125202 - DNA, 715 bp, Zea Mays
tggtggattgctaaaaaattactgttgcaattgtctaggttattgtagacatgagagagttcatgagcagccttccgaatgtattacatcaaaaaggttgagacaatggcacgttactacaagatcccggttctcctcatcgagttctcacaagataagagcttttcctttcagtctgcaaatgagattggtgatgatgtctctccgaccaacattatctcgaagctttctctgctagtgctgcattttcctcggcttcgcataatctggtcacgcagcttgcatgctacagcagaaatatttatgtcactgaaaacaaaccaggatgaacctgatgagaaaaaagcaacaagagttggcgtgccatccgaggatggtatcgtggaggatgatgtgaggtctgaaaattacaacacatcagccattgagttcttaagaaggcttcctggggtgacggattctaactaccgagcaatcatggatggatgcaatagcttggccgagctggccctgcttccagtggaaaggttggcggagctaatgggtggtcagaaagctgcgcggacgctcaaggagtttctcgatgccaagtgcccaaccatgttgtagccagagtgacgctgtactgtttgtattgtgtcctgtgggatacaaatacttcagttgatgtgccttatatatatatattaaaaaaaacaaatgttgtaccaatgcc

SEQ ID NO: 125203 - DNA, 1323 bp, Zea Mays
aaactgctggaatatacttacaccgggaagaaggcgaaggccgtcgcgctctcggcggcggcggcggcggcggcagcggcgatgcttgcgttcgagcagcaggtgttggcggatctggtggaagatccgaacggaggtctggtggtgctctcctcgggtctccctctcgcttccctagccgctaccctcctcctccatctccaccagacccccggcaacgcggctggaggaggatgtctcctcgtcctctccgccaccgataccctcaaggcccggatccggcgccgcctccaagacaagctgcaggttcacgacgtgccccctgacctcgccgcgcagcagcgcgccaccctttacgcctctggcgctgctctcttcctctctccccgcgccctcgccgccgacctcctcacctcccgcctcctcccctcccgcgtccaagccctactcctcctctccgcccaccgctccaccgatacctcctccgatgccttcatctgccgcctcctccgtcaacgcaatcttctccccgtttacgccttctccgattgcccccatgccatggtcgccggtttctccaaggccgagcgtaccatgaagagcctctacgtccgccgtctccacctctggccccgcttccacgttctcgccgcagccgacctggaacgcgccccgcctgacgtcgtagacgtgcgcgttcccatgacgccgcccatgaggggtatccaggctgctgtcctcgctaccatggacgcttgtctcaaggaacttaggcgcaccaacaaggtggatgttgaggacctcaccgtcgacaagggcctcttcaagtccttcgatgagatcgtccggaggcagctcgaccccatctggcacactcttgggaagaagacaaagcagcttgtggctgacctcaggacgctacgcaagctgcttgattacctcgtcaggatgaacctgatgagaaaaaagcaacaagagttggcgtgccatccgaggatggtatcgtggaggatgatgtgaggtctgaaaattacaacacatcagccattgagttcttaagaaggcttcctggggtgacggattctaactaccgagcaatcatggatggatgcaatagcttggccgagctggccctgcttccagtggaaaggttggcggagctaatgggtggtcagaaagctgcgcggacgctcaaggagtttctcgatgccaagtgcccaaccatgttgtagccagagtgacgctgtactgtttgtattgtgtcctgtgggatacaaatacttcagttgatgtgccttatatatatatattaaaaaaaacaaa

SEQ ID NO: 125204 - DNA, 1744 bp, Zea Mays
aaacgaggtcttcattgatctcaagggaggaaactgcaaaatttagggtttgtttggccctattcgcacacacccacgccgtcggatcctcctgccctccccacgtccacctctctccgccgaagaatcggcggcggcggcggcggcggcgagcgccttcccttgtcaaaatccacccggcggcagagcagagcctcgttgctgaggaggggagatggcaggcatgaccgatatgccgatgaggccggcgcggccgggcccgccgatgcagcaccggggccctccgccgatggcgcgcctccgccccgaaccaatcgaccgcgagaagacctgccctctgctgctcagggttttcacaagggttgctggtcaccaccaaaatgaagagttttctgtgagagggaaagaaccaaaggatgaagttcagatttacacatggaaggatgccactctccgtgagcttactgatcttgtgaaagaggttgctcttccagcaaggaaaaggaacgcgaggctttcttttgcatttgtatacccagacaagaatggtcgttttgttgtcagacaggtaacgctataagaatttgggcatgtttggacccttagctccatctcgccttgcttcgctgggcaaactagccttgccaggaaaggtggacgctctgtttgtttccctgggcgggctaggttactaggtgctgtatgctttcctagttaaaaacttgcttttgcttgcaagctttgtgatttaactgcttggtactcttgctcatggagaattggagatgcaatcaccaaatttccttatatgtgagattgcctccatccatctaaaggaacacaacctgcttgaaaatttgcagtacacataccataccaagtcatatatacaatacaagacgactagagaaccatcccaggcattaccatggacacaatcttccacatgtcattcacccaaaatacaccgtgccatatatagtctcatttgtccaagctgcgtattatgccttgtattcattatgccctgtataggttcaaatggcctatataccgtttcatcattgtgtaaatttccatgtgtatgcactgcactgttgcccttcgcttatggccatgtgtatttcgtcgtgcttgaacatctgaaggtgggttcgaccttcgcttatggccatggaagaggtgatgatgccaaaactcttgcagagcttgggttccagattggcgattatctgagcgtcgcgatcatgtaactgcagattggcgattacctgagcgtcgcgatcatgtaagccggtgcccgcaatgagttccggtgactgcaccggatagaactgatgtgatgtaaaaaatgcattggttgcgacgagcaagggaggagtatctgttagcgctaggaagtggaaccaaaactgtctgtaatgccggtactaccaaagttgcctagacactttgaacgatcaaagcgtatggtatggtttcttgttggtatggtgcttgtctgcggtgcctgaaatttccaatccattgagctgcacgtcaatggctccatgttaagatgggctgaacggtattccaaggggtgggcaagatacccattatctgaaccgttatccaaacctgaactacctgaacctgtacccgacctacccaaacctgaattaaccaaacactagtttggatcctaggtctcaaaacccaaaattatattgggtaccgggtaacatgtctcgtgcctgaatta

SEQ ID NO: 125205 - DNA, 1164 bp, Zea Mays
aaacgaggtcttcattgatctcaagggaggaaactgcaaaatttagggtttgtttggccctattcgcacacacccacgccgtcggatcctcctgccctccccacgtccacctctctccgccgaagaatcggcggcggcggcggcggcggcgagcgccttcccttgtcaaaatccacccggcggcagagcagagcctcgttgctgaggaggggagatggcaggcatgaccgatatgccgatgaggccggcgcggccgggcccgccgatgcagcaccggggccctccgccgatggcgcgcctccgccccgaaccaatcgaccgcgagaagacctgccctctgctgctcagggttttcacaagggttgctggtcaccaccaaaatgaagagttttctgtgagagggaaagaaccaaaggatgaagttcagatttacacatggaaggatgccactctccgtgagcttactgatcttgtgaaagaggttgctcttccagcaaggaaaaggaacgcgaggctttcttttgcatttgtatacccagacaagaatggtcgttttgttgtcagacaggtgggttcgaccttcgcttatggccatggaagaggtgatgatgccaaaactcttgcagagcttgggttccagattggcgattatctgagcgtcgcgatcatgtaactgcagattggcgattacctgagcgtcgcgatcatgtaagccggtgcccgcaatgagttccggtgactgcaccggatagaactgatgtgatgtaaaaaatgcattggttgcgacgagcaagggaggagtatctgttagcgctaggaagtggaaccaaaactgtctgtaatgccggtactaccaaagttgcctagacactttgaacgatcaaagcgtatggtatggtttcttgttggtatggtgcttgtctgcggtgcctgaaatttccaatccattgagctgcacgtcaatggctccatgttaagatgggctgaacggtattccaaggggtgggcaagatacccattatctgaaccgttatccaaacctgaactacctgaacctgtacccgacctacccaaacctgaattaaccaaacactagtttggatcctaggtctcaaaacccaaaattatattgggtaccgggtaacatgtctcgtgcctgaatta

SEQ ID NO: 125206 - DNA, 1125 bp, Zea Mays
aaacgaggtcttcattgatctcaagggaggaaactgcaaaatttagggtttgtttggccctattcgcacacacccacgccgtcggatcctcctgccctccccacgtccacctctctccgccgaagaatcggcggcggcggcggcggcggcgagcgccttcccttgtcaaaatccacccggcggcagagcagagcctcgttgctgaggaggggagatggcaggcatgaccgatatgccgatgaggccggcgcggccgggcccgccgatgcagcaccggggccctccgccgatggcgcgcctccgccccgaaccaatcgaccgcgagaagacctgccctctgctgctcagggttttcacaagggttgctggtcaccaccaaaatgaagagttttctgtgagagggaaagaaccaaaggatgaagttcagatttacacatggaaggatgccactctccgtgagcttactgatcttgtgaaagaggttgctcttccagcaaggaaaaggaacgcgaggctttcttttgcatttgtatacccagacaagaatggtcgttttgttgtcagacaggtgggttcgaccttcgcttatggccatggaagaggtgatgatgccaaaactcttgcagagcttgggttccagattggcgattacctgagcgtcgcgatcatgtaagccggtgcccgcaatgagttccggtgactgcaccggatagaactgatgtgatgtaaaaaatgcattggttgcgacgagcaagggaggagtatctgttagcgctaggaagtggaaccaaaactgtctgtaatgccggtactaccaaagttgcctagacactttgaacgatcaaagcgtatggtatggtttcttgttggtatggtgcttgtctgcggtgcctgaaatttccaatccattgagctgcacgtcaatggctccatgttaagatgggctgaacggtattccaaggggtgggcaagatacccattatctgaaccgttatccaaacctgaactacctgaacctgtacccgacctacccaaacctgaattaaccaaacactagtttggatcctaggtctcaaaacccaaaattatattgggtaccgggtaacatgtctcgtgcctgaatta

SEQ ID NO: 125207 - DNA, 865 bp, Zea Mays
gtggcatcttatcttacatgtcttgcagtagagattgataagaaaacaccatgtactgcagaaagttgatcatcagttactgttttcaggttgctggtcaccaccaaaatgaagagttttctgtgagagggaaagaaccaaaggatgaagttcagatttacacatggaaggatgccactctccgtgagcttactgatcttgtgaaagaggttgctcttccagcaaggaaaaggaacgcgaggctttcttttgcatttgtatacccagacaagaatggtcgttttgttgtcagacaggtgggttcgaccttcgcttatggccatggaagaggtgatgatgccaaaactcttgcagagcttgggttccaggtctgcacgaatgctgtatcatgctactttagattatgcttttgattggcgattacctgagcgtcgcgatcatgtaagccggtgcccgcaatgagttccggtgactgcaccggatagaactgatgtgatgtaaaaaatgcattggttgcgacgagcaagggaggagtatctgttagcgctaggaagtggaaccaaaactgtctgtaatgccggtactaccaaagttgcctagacactttgaacgatcaaagcgtatggtatggtttcttgttggtatggtgcttgtctgcggtgcctgaaatttccaatccattgagctgcacgtcaatggctccatgttaagatgggctgaacggtattccaaggggtgggcaagatacccattatctgaaccgttatccaaacctgaactacctgaacctgtacccgacctacccaaacctgaattaaccaaacactagtttggatcctaggtctcaaaacccaaaattatattg

SEQ ID NO: 125208 - DNA, 1028 bp, Zea Mays
aaacgaggtcttcattgatctcaagggaggaaactgcaaaatttagggtttgtttggccctattcgcacacacccacgccgtcggatcctcctgccctccccacgtccacctctctccgccgaagaatcggcggcggcggcggcggcggcgagcgccttcccttgtcaaaatccacccggcggcagagcagagcctcgttgctgaggaggggagatggcaggcatgaccgatatgccgatgaggccggcgcggccgggcccgccgatgcagcaccggggccctccgccgatggcgcgcctccgccccgaaccaatcgaccgcgagaagacctgccctctgctgctcagggttttcacaagggttgctggtcaccaccaaaatgaagagttttctgtgagagggaaagaaccaaaggatgaagttcagatttacacatggaaggatgccactctccgtgagcttactgatcttgtgaaagaggttgctcttccagcaaggaaaaggaacgcgaggctttcttttgcatttgtatacccagacaagaatggtcgttttgttgtcagacaggtgggttcgaccttcgcttatggccatggaagaggtgatgatgccaaaactcttgcagagcttgggttccaggtctgcacgaatgctgtatcatgctactttagattatgcttttggtcagtggacaaggttcttatctacgccacctcgttctgcagattggcgattatctgagcgtcgcgatcatgtaactgcagattggcgattacctgagcgtcgcgatcatgtaagccggtgcccgcaatgagttccggtgactgcaccggatagaactgatgtgatgtaaaaaatgcattggttgcgacgagcaagggaggagtatctgttagcgctaggaagtggaaccaaaactgtctgtaatgccggtactaccaaagttgcctagacactttgaacgatcaaagcgtatggtatggtttcttgttggtatggtgcttgtctgcggtgcctgaaatttcca

SEQ ID NO: 125209 - DNA, 830 bp, Zea Mays
aaacgaggtcttcattgatctcaagggaggaaactgcaaaatttagggtttgtttggccctattcgcacacacccacgccgtcggatcctcctgccctccccacgtccacctctctccgccgaagaatcggcggcggcggcggcggcggcgagcgccttcccttgtcaaaatccacccggcggcagagcagagcctcgttgctgaggaggggagatggcaggcatgaccgatatgccgatgaggccggcgcggccgggcccgccgatgcagcaccggggccctccgccgatggcgcgcctccgccccgaaccaatcgaccgcgagaagacctgccctctgctgctcagggttttcacaagggtaagcatgcttatgtcttcttgtttctgtcccaacgaatttatttattggttaccctgtgctgattagcactttactccagtttgttgagtgagatttaagagtctgcagtatacttgattcacttatttgcattgctactgcaactttttatttgttagtcaattttgttgtacctattgtacatggtggaatccgcagaaagcttttcatcatcaaactatgcctttttttaaaaggcaatttactaacagtttacctacacttggaatttatttagaagtctacgctttaagatgattgcgtagctaacagtataattatttgagtgtgaaacaaatgattaaatagtgaagttttagttaaacacaagccttggttaattagtttcataaaggggaagcaacttaatccggtttccggtctacttgttctggaatgattctggcaaaaggtgatctgcttaaat

SEQ ID NO: 125210 - DNA, 1543 bp, Zea Mays
ccaaaaaaaaagaaaaatgtactcggagtcaatagttgcccaaattgtttcgatcgcccatttcgacatcgtatcggattttttcaaaataatggggaaaatagcgaagggaaaaaaaaaccctccgtgtggccgtcccaaactcccaatgagatgaagagaacgcaccacacgaccgcgtgacagaggcacagagcaaaagccaaactggcagccagcacagcagagcgccactcgactcgactcatcctttcggttcccctcccccctccgcgttccacaaccctcgagaagcttccaccctcccctcctgcgacgccgccagagccgcggaaaccctacccaccccggccgctcacgcaccgggcgcccgccgccgccggtcgcgtacctgccgccgacaccgcccaaagcgattggatctagagatcgtcagtagccacgatggaggactgggattctgaagaattccagccagttgtgcctgttgtgaaagccgagccacttaaaaatcagtgggctgatgaagatgttgaagaagatgatgtaaaagaatcatgggaagaagaggaggaggaggagaaacctaagccagcgccagtggaaaaggtcgctgcaaaacctagcactaaggctcctgctaaaaagggaaaacagcaagcattgacaagtgctgaagaaccagatgagcctcctcttagtcccacttcacagaaaattcgccaacaaagacttgtggaagaagctgacttcaagtctaccaccgagctttttgcaaagaagggcagtgagcaaaagtcactagatacttttattccaaagtccgagagtgactttgcggaatacgcggagcttattgcaaacaaactacgcccctatgagaaaagctttcactacatggctctgcttaagaatgtcatgagactttccatgacatcgttgaaaggtgcggacgccaaagatatatcttcttccgtgacggcaattgctaacgagaagatcaaggctgagaaggaggctgcagcaggcaaaaagaaacaaggagcgaaaaagaagcaactccacatcgagaaaggagacgacgacttcatccccggccggggtggtggctacgatgaccccgatgagtacgacttcatgtgatctggctgggagggatagtaggtttctgttatgtatacctttggcgggcagagaatatatcactagagtttgcggcatactattgcatggaacatgcgttatctattcgagaatgatttttgactctgcaggataagaagagcacttgtgatctggatgcatgggtgttttcttatttatccttgaatctttgtgttatttttttttcaacattgcattttttgccaaatgtactatagtaccttgtactatctggttactccgtgagtcatgaaagcaattaaatccctggagggtgtctcgcttgtgtttgcagctgtatgaccgtgtgcattgtttttggagatcttgtgtgatccactgactactccgactggcatggttgtcttcctttttctga

SEQ ID NO: 125211 - DNA, 2797 bp, Zea Mays
gcggctgcaatccggctgcggctgcggcttctacagtatttttctctctatggattgcagctgcagcagtccaaacagctgcaacagtgtcggcttgtagccagccgaacacgcccagtgttcccagccctaaaacacttgacactacgacactaccgtatcagtctggcaggtcctgtgcataatccaccatctcgctcacaggctcgccgcccccgccggcaatggagggcgttcacagcctcctggcccggcccaactccgcgccgttcgccttctcaccgctgcccctccgcaggagccacaggccgccaccgcctggcccctccacctgccgcgccgccagccgctgggccgaccgcctcttcgccgacttccacctcctccccgccgccgccgacccgccagccgcggcctcctcttcctcctcgtccccgttcgtcccgatcttccccgaagccgccgaccgcgccttgcccctcccggtcgacttctacaagattcttggtgcggagccacatttcctaggcgatggcattcggagggcgttcgagtcgcggatagctaagccacctcagtatgggtacagcacagaagctcttgttgggcgacggcaaatgctgcagattgcccatgatactctcacaaaccagagctcgcgcaccgagtacgaccgtgcgctttccgaggaccgtgatgcggcactcaccatggatgttgcctgggataaggttccaggtgtgctgtgtgtgcttcaggaggctggggaggcacaactggtgttagcaactggagagcacttgcttcaggaccgtccacctaagcggttcaagcaggatgtggtgctagcaatggcattggcttatgtggacatatcaagggatgctatggcagcaagccctccagatgtaatctgctgttgtgaggtgcttgagagggcactgaagctcctgcaggaggatggtgcaagcaatcttgcacctgaactgcttgcacagattgatgaaactttggaggagattacacctcgttgtgtattggagcttcttgctcttcctactgatgaaaaacataaaaataaacgccaagaaggtctgcaaggtgcaaaaaacatattgtggagtgttggcaggggtggtattgctactgttggaggaggattttctcgtgaggccttcatgaatgaggctttcttgcagatgacatcagctgagcagatggatttcttctctaaaacaccgaatagcataccacctgaatggtttgagatctatagtgtcgcacttgcccacattgctcaagcaattgcaagtaaaaggccacaattcatcatgatggcagatgaactcttcgaacaacttcagaagttcaatataggttctcaatatccttatgaaaacgagatggacctcgcattagaaagggcactctgctcgttacttgtgggggatatttgcaattgcagaatgtggcttggaattgataatgagtcctcgtcatatagggaccccaaaaatatcgagtttgtggtgaataactctagcatgaacgaagagaatgatcttcttccagggctgtgcaagctcttggagacatggcttgtctccgaggtattcccaaggagcagagatacccgagggacgcagttcagactgggagactattacgacgacccaaaagttctaagctacttagaaaggatggaaggcggtggtgcttcccatttagctgcagctgccgctatagcaaaacttggtgctcaagctactgctgcgcttggtactgtaaaatcaagtgctcttcaagctttcagtaaggttttcccattgacagaacagctagacatgtcaggcaaggatatcccaagtgatgatcttgataaatctcttgaaaaactcgcccaaggaagtgttgctggagacgctatccatgattccagaaatgacgccttgaagattatctctgctggtacactgcttgcactatttgcagtgttaggtctcaagtgcttgcctcgtaacaagtcacttcctgctcttaggggcgagtatgggtctgtggcggttgttgactccattgatggtccagcggcagatgaagagccactggaaatccctaggatggacgcgaagttggctgaagacattgttcgcaggtggcaaagcatcaagtccaaggctttggggccagaacacactgtcacggcattgcaagaggtcctcggcggcaacatgctgaaggtgtgggcggaccgagctgcagagatcgagcgccacggctggttctgggagtacgcgctctctggcgtgacgatcgacagcatcaccgtctccgtggacggccggcgggcagcggtggaggcgacgatcgaggaggtgggccggcttaccgacgtgaccgaccctaagaacgacgacgcgtacgacaccaagtacaccgcccggtacgagatgacctactccaggccagcagggtggaggatcaccgaaggcgcagtcctcaggtcgtaggtagaacggctgtgcttgtgcagctgcagcaggagtaggcgagtagcggtaagctcgattcccattcttttcttttcttttggcagcgtgtgtaaataaacagtgtgagcactggctcgttccagtactagaaagcttggttaggttgctgagtgatgagctcctgaggtcgaaatttgtcatgtagtttttattgatagataatttggtgttactattgctgggtcagatcctctgaaacgattgatcttaatgaaggcggcagtgcatcactgcttaccacatca

SEQ ID NO: 125212 - DNA, 2569 bp, Zea Mays
gcggctgcaatccggctgcggctgcggcttctacagtatttttctctctatggattgcagctgcagcagtccaaacagctgcaacagtgtcggcttgtagccagccgaacacgcccagtgttcccagccctaaaacacttgacactacgacactaccgtatcagtctggcaggtcctgtgcataatccaccatctcgctcacaggctcgccgcccccgccggcaatggagggcgttcacagcctcctggcccggcccaactccgcgccgttcgccttctcaccgctgcccctccgcaggagccacatttcctaggcgatggcattcggagggcgttcgagtcgcggatagctaagccacctcagtatgggtacagcacagaagctcttgttgggcgacggcaaatgctgcagattgcccatgatactctcacaaaccagagctcgcgcaccgagtacgaccgtgcgctttccgaggaccgtgatgcggcactcaccatggatgttgcctgggataaggttccaggtgtgctgtgtgtgcttcaggaggctggggaggcacaactggtgttagcaactggagagcacttgcttcaggaccgtccacctaagcggttcaagcaggatgtggtgctagcaatggcattggcttatgtggacatatcaagggatgctatggcagcaagccctccagatgtaatctgctgttgtgaggtgcttgagagggcactgaagctcctgcaggaggatggtgcaagcaatcttgcacctgaactgcttgcacagattgatgaaactttggaggagattacacctcgttgtgtattggagcttcttgctcttcctactgatgaaaaacataaaaataaacgccaagaaggtctgcaaggtgcaaaaaacatattgtggagtgttggcaggggtggtattgctactgttggaggaggattttctcgtgaggccttcatgaatgaggctttcttgcagatgacatcagctgagcagatggatttcttctctaaaacaccgaatagcataccacctgaatggtttgagatctatagtgtcgcacttgcccacattgctcaagcaattgcaagtaaaaggccacaattcatcatgatggcagatgaactcttcgaacaacttcagaagttcaatataggttctcaatatccttatgaaaacgagatggacctcgcattagaaagggcactctgctcgttacttgtgggggatatttgcaattgcagaatgtggcttggaattgataatgagtcctcgtcatatagggaccccaaaaatatcgagtttgtggtgaataactctagcatgaacgaagagaatgatcttcttccagggctgtgcaagctcttggagacatggcttgtctccgaggtattcccaaggagcagagatacccgagggacgcagttcagactgggagactattacgacgacccaaaagttctaagctacttagaaaggatggaaggcggtggtgcttcccatttagctgcagctgccgctatagcaaaacttggtgctcaagctactgctgcgcttggtactgtaaaatcaagtgctcttcaagctttcagtaaggttttcccattgacagaacagctagacatgtcaggcaaggatatcccaagtgatgatcttgataaatctcttgaaaaactcgcccaaggaagtgttgctggagacgctatccatgattccagaaatgacgccttgaagattatctctgctggtacactgcttgcactatttgcagtgttaggtctcaagtgcttgcctcgtaacaagtcacttcctgctcttaggggcgagtatgggtctgtggcggttgttgactccattgatggtccagcggcagatgaagagccactggaaatccctaggatggacgcgaagttggctgaagacattgttcgcaggtggcaaagcatcaagtccaaggctttggggccagaacacactgtcacggcattgcaagaggtcctcggcggcaacatgctgaaggtgtgggcggaccgagctgcagagatcgagcgccacggctggttctgggagtacgcgctctctggcgtgacgatcgacagcatcaccgtctccgtggacggccggcgggcagcggtggaggcgacgatcgaggaggtgggccggcttaccgacgtgaccgaccctaagaacgacgacgcgtacgacaccaagtacaccgcccggtacgagatgacctactccaggccagcagggtggaggatcaccgaaggcgcagtcctcaggtcgtaggtagaacggctgtgcttgtgcagctgcagcaggagtaggcgagtagcggtaagctcgattcccattcttttcttttcttttggcagcgtgtgtaaataaacagtgtgagcactggctcgttccagtactagaaagcttggttaggttgctgagtgatgagctcctgaggtcgaaatttgtcatgtagtttttattgatagataatttggtgttactattgctgggtcagatcctctgaaacgattgatcttaatgaaggcggcagtgcatcac

SEQ ID NO: 125213 - DNA, 851 bp, Zea Mays
gccccatcccccaccacccagtcagtgtctgtcaccgcctcaccgaccacacgccaagggaagaagcagcagcgccatggccgcgccgctcacggccgtccgggcccggatcgaggagctcaccgacgagcggaaggcgctgctcaaggggtcgttccgggaccgccacttcaacgcgggctccctcctcctcggcctcggcgtgctcgagtccgtcggcggcgcgctcaacacctggttccgcaccggcaagctgttcccgggcccgcacctcttcgcgggcgccgccatcaccgtgctgtgggccgccgcggccgcgctcgtcccggcgatgcagaagggggacgagacggcccgcagcctgcacatcgcgctcaacgccgtcaacgtcctgctcttcgtctggcagatccccaccgggctcgagatcgtcggcaaggtcttcgagttcaccacctggccatgagacgacgtccttgtgcgtgcgtgtctgctctgctatgcgcatcctgcatgtcccttcacccttctcttctctttcgtcccatcccatgacccatgtattgcttggtagtgttaggttcaatctccgtctgcaggtcgttgttttcttgacctgtcgaagtcgatccatgttcacaaagctgtgatgctgagaatgccaatcacaagttcctttacactgtacatgacaagagttcgttctgcagtacacagtctttagttaagccgaatcgccaaaattatatttatgcaaccccgaatactatatcaagttgaagagcaaggatcatactcagtactatccctctgttttagcttttttagctatgcaacatttaaaaaaaaaa

SEQ ID NO: 125214 - DNA, 1434 bp, Zea Mays
ccgaaccctgatccttcttagcatttgcatggcccggccgggctgccggaggtgaccggatcaaccacgggcattcgggcaagagagccgcggccgtcctcggccgtgccgcccacttccgccgttaaaaacgtggcagcaacaacgcccaatcgcccatgtcaacccacgcaagcatccaaaacaactccactcctcccaccccaagtccgaagcttcctcctcctccaactcctcctcctccccgtcccgcagtcgcactcgcaccgcacggcagcaggtagctagctagctagctgcgggcttctgtagccaagcagggccggagcacgcacgcacgcgcgagcgcgagcgcatggcggcgtccgcgagccgggcccgcgccggcgccggcggcgctggcgaggagtacgaggacctgctgccggtgatgggcgagcggctgggcgtggcggggctgctggcggagctgcgcgcggggttcaggctgctggcggaccgggagcggggcgccatcacgcccgacagcctgcggcgcggcgcggcggcggcgctgggcgtggccgggatggcgcacgccgacgcggccgccatggtgcgcgagggcgacgccgacggcgacggcgcgctcagcgaggccgagttctgcgtcctcatggtgcgcctcagccccggcatcatggcccacgccgaggcctggctcgccgacgccatcgccgccgacgagatgcagctggttgatgatgccatgcccatggatgctgctgccgctgatgattacggtggcgccggcagccgaggccacgccgccgccgctcctgatagtgatactgctcccgcccgccggtcgtcggtttgatggatgcatggtccgcgcacgtgtattattagcctgtgcggtcgttgtaaaatcaccgctcgctcgtcatcttgttcattttattactgtgtgtcaattacggtgatgactcctcttcgatctgtacttcatgtggtaataactacgcgaactacggtgtggtttccttggttaacggaatcagttcatcgcctgctcattctttacttgtattgtagtatgtttgatttatgtaaggtatatcgtcatcttattctcttcacgagctaataaataaataaatacgaggaataaagtttttctttttttaccaaatttacagtctattttttcttctttttttcgaacggagatcactccatttctattacttttcataatagaaatacaattgttcttaaactgacctagaagggataagcaccagaaactgacctgattcaggtcacaccaacaaacagtacattgttcttaatctgaagcatactagaaacacacacataatagctaagttctcaaccactcctcactcaattcagcaaaaaaaaacactatccatcagcaaccccaaaaga

SEQ ID NO: 125215 - DNA, 1480 bp, Zea Mays
ctagacacgctgtcgggatcaaaacaaggcagaatcgggccctttccaggcccagccaaattttcgttcacctggcttcacccacccgcgtgccctcgccgacaactgagccaccgccgccgccgccctacccccaggtgcccaggtcgtttcggtccctttgccaggtcttcgccggcgacgagcaccagccaccagccagggaatataactttgacctgtaaaatgaggccagttttttgcgggaaccttgactatgatgttcgcatctctgaggtcgagcgccttttcgggaagtatggaagggtggaacgagtggatctgaagacagggtttgcattcatctacatggaagacgaacgtgacgctgaagatgctatcagtagacttgatggaattgattttggcagaaaaggaaggagaatcaaagttgagtggaccaaggaggatcgcactgctgatcgaagaggcaactcaaggaggtctccaaccaatgcaaaaccgaccaaaaccttgttcgtgatcaactttgacccgatcaacacgagaattcgagatctggagaggcactttgataaatatggcagggtcgcgaatgtaaggatcaaaaagaacttcgcctttatacagtttgaggcgcaggaggatgctactagagcattggagggtgctaatgggagccatttcatggacagggtcatctcagttgagtatgcgctccgtgacgacgatgaaaaaggtgaaagggcgacgaacggatacagcccagacaggagaggccgcgaaagatccccaggtgcaagacggtctcctagtccttacggcagaggtcgggagagaggtagcccagactatgggagaggcaaggagaggggcagcccagactacggcaggggaggccgcagccctgataatggcaggggaggccgcccagccggcggtggcggcggcggcagaggtgatcacgccaggggaggaggacgacgacgcagccctgactattatgaccgcgagcgccgagaagctagtcctggctatgacaggccccccagctgctcacctggaactgggagggacgcgagagactagaaaagcgccccatgcctgtgttgtagaattcaagcatcaaagcctcccgcgtcagatgaagttagagttggtgatgttagccagcaggaaactcgtttacttatgtgcgttagctcgtgctgactttgcaagttagcttaccatttcccatttgcgactccagaatgtaactcgtatggtctggaatggtagctttcaggactcgtttgaacctttcttggagtttttttcttcttttccggctaccttgattgccctgtgcatgcgctgatgaatctacagattgtttcgtctgtcaagtgttccgctgtaatgtaagagacgaaattatttgttccttgttgatgtagtccctgttttgtgcagcgagaaatttcagtatcttacgctc

SEQ ID NO: 125216 - DNA, 1980 bp, Zea Mays
ctagacacgctgtcgggatcaaaacaaggcagaatcgggccctttccaggcccagccaaattttcgttcacctggcttcacccacccgcgtgccctcgccgacaactgagccaccgccgccgccgccctacccccaggtgcccaggtcgtttcggtccctttgccaggtcttcgccggcgacgagcaccagccaccagccagggaatataactttgacctgtaaaatgaggccagttttttgcgggaaccttgactatgatgttcgcatctctgaggtcgagcgccttttcgggaagtatggaagggtggaacgagtggatctgaagacaggaatatcatggagcatatgtgctcttcctggttgatggactggttctacctttactgcctctgcctgagcccccacctcatgcctggtccatctccaggagttcactgtccaccacggcatctgtgcacatggaaacgaccacctcgtgaccgatgtcttacttttacgatcaacactgcatcctcgtaccctgcctgatcaccattccttcgccaatccaaccatgccaatctcatgtctggctggagagtggagataagtggaggttgcaccaccaattccttgatgtaccatgaatgtttggattgttgtattctgaaatcatttagttcaacatatacaaggtctgttcctgtttattctagcatatctgactgtagatttgcgaggcggccttagaaaaatttcctgcaaaggctgcatctcgattcatgttgttgccctttctgttcccgggaccatactatgatttctttgaacaatcagtcacttctcttttcaccttgtgttcaacatgaagggtttgcattcatctacatggaagacgaacgtgacgctgaagatgctatcagtagacttgatggaattgattttggcagaaaaggaaggagaatcaaagttgagtggaccaaggaggatcgcactgctgatcgaagaggcaactcaaggaggtctccaaccaatgcaaaaccgaccaaaaccttgttcgtgatcaactttgacccgatcaacacgagaattcgagatctggagaggcactttgataaatatggcagggtcgcgaatgtaaggatcaaaaagaacttcgcctttatacagtttgaggcgcaggaggatgctactagagcattggagggtgctaatgggagccatttcatggacagggtcatctcagttgagtatgcgctccgtgacgacgatgaaaaaggtgaaagggcgacgaacggatacagcccagacaggagaggccgcgaaagatccccaggtgcaagacggtctcctagtccttacggcagaggtcgggagagaggtagcccagactatgggagaggcaaggagaggggcagcccagactacggcaggggaggccgcagccctgataatggcaggggaggccgcccagccggcggtggcggcggcggcagaggtgatcacgccaggggaggaggacgacgacgcagccctgactattatgaccgcgagcgccgagaagctagtcctggctatgacaggccccccagctgctcacctggaactgggagggacgcgagagactagaaaagcgccccatgcctgtgttgtagaattcaagcatcaaagcctcccgcgtcagatgaagttagagttggtgatgttagccagcaggaaactcgtttacttatgtgcgttagctcgtgctgactttgcaagttagcttaccatttcccatttgcgactccagaatgtaactcgtatggtctggaatggtagctttcaggactcgtttgaacctttcttggagtttttttcttcttttccggctaccttgattgccctgtgcatgcgctgatgaatctacagattgtttcgtctgtcaagtgttccgctgtaatgtaagagacgaaattatttgttccttgttgatgtagtccctgttttgtgcagcgag

SEQ ID NO: 125217 - DNA, 955 bp, Zea Mays
ctagacacgctgtcgggatcaaaacaaggcagaatcgggccctttccaggcccagccaaattttcgttcacctggcttcacccacccgcgtgccctcgccgacaactgagccaccgccgccgccgccctacccccaggtgcccaggtcgtttcggtccctttgccaggtcttcgccggcgacgagcaccagccaccagccagggaatataactttgacctgtaaaatgaggccagttttttgcgggaaccttgactatgatgttcgcatctctgaggtcgagcgccttttcgggaagtatggaagggtggaacgagtggatctgaagacaggttagttcgttactatgttctcaaactttatgatctattttagcaaaacgacaattgctgctacatctatatgttgtttttagtcaaaggcagtgctttatttcatcaagtgaattacaaccagtcatcaactgcagctttggaccattttgtttctttgatttagatactgaagcattactgaatatattcataagacaatgccatctgaaaacataacatggcctttgtttaaattttgattttgaccatttcatatggaatattggtttgatcacaaatacatgatcttcgcataactcctctaagaatgtgatcttcacgtggaaactgctatcgccatgacttggcagagattgtcgatcttccttcagccatgcttggtgttagaagcgacaaacagaccaagttgttcatccgatgtcgaagccagaggagtttcaggaaaatcggcttatgtttatgttttattgttatgtcattggacgagtgtgtatcaggataaatttagaaaaaagaaatttttccttaaaatttggtcatgtactcaattatttctttgccgcaggaatatcatggagcatatgtgctcttcctggttgatggactggttctacctttact

SEQ ID NO: 125218 - DNA, 1733 bp, Zea Mays
aagggcgagcaaaactggaagcctacgaaaatggtggagctcacctccttatccccagggccaccacgtccttctcggctgactcctcgccgccggccgccgccgccgacacctcatgttcatacctcctcgcgtcgtcgcgggaggatcctcggcgccgcgaccgccacgcctggcgccgacgactaccactccaccatccgctccctcaactcccgcggccgccacgtcccccgaaaatccctcgggcagaactacacgctcaactccaaggtgaacgaggagctggtggcggcggcgggggtggaggagggtgacgtcgtgctcgagatcggcccaggcaccggctcgctcacttccgcgctgctccaggccggcgctaccgtctttgccgtcgagaaggacaagcatatggctactctcgttaaagataggtttggatctacagaacagttgaaggtcattgaagaagacatcacaaaatttcacatccgttcccattttcttcctttcatgaaggagaaatacggtgccaccaaaaaacttgcaaaggttgcatcaaacttaccattcaatgtcagcaccgaagttgtcaaactactactcccaatgggggatgttttctctgtcgtggtgcttatgcttcaggatgaaacagcagtacgccttgcagatgcttcaatacaaagtccagagtaccgatctatcaatgtgtttgtggatttttactcggaacctgaatacaagttcagagtagacagagagaattttttccctcggcctaaggttgatggtgctgttatcagcttcaaactaaagaatgcggaggagtatccgccagttagttccccaaaaagcttcttttcaatggtgaattccgctttcatggggaagcgcaagatgcttaggaaatctcttcagcacatatgctcttcttctgagattgaggctgctcttgacaacattggccttccagttacagctagaccttctgatttgattttggatgatttcgtgagattgcacaatcatttagcgaaagtatgactaagaagtgcctttcaaaatgcctaaggaattgcttgttggcatggtgttcaacagttggagtaacttacgcctgaccgctgagagttgctatgcagctacaggtgcattcagctcagctccggggcgaagccaggaattacatgtagggaggccggccgaaagagccatcttgtaaaaaaatgatcgcgggttcaactggtttggttactcgcacttagcgtctgtctgagttaatacttgacaaaaaaaaaaaaacaagcacagctcaactggttaggtttctcgtagtggtggtggtcgtttgggttaattcatcgacttgacacggttgctcctatttttttttctatatgtattctagatagtgagggtttattgtattttgatcgtagacgctaatcagaaactctactgaatggatgccttcgttctctctgagtacaaaggccccattgaaatatgtatgagaaataaagcaaatttagaggaccggtagcatttccttctgcttatttgcctcctttttcaccacgtgagcatctaaccaatacaagactgtttagcagatctgtaaggccttgttcgtttacgtcggattgcatccgaaatcgttccagttaatcaaagtttatataaattagagaagcaatccggttatgaatcgttccgatccaccaatccgg

SEQ ID NO: 125219 - DNA, 1639 bp, Zea Mays
aagggcgagcaaaactggaagcctacgaaaatggtggagctcacctccttatccccagggccaccacgtccttctcggctgactcctcgccgccggccgccgccgccgacacctcatgttcatacctcctcgcgtcgtcgcgggaggatcctcggcgccgcgaccgccacgcctggcgccgacgactaccactccaccatccgctccctcaactcccgcggccgccacgtcccccgaaaatccctcgggcagaactacacgctcaactccaaggtgaacgaggagctggtggcggcggcgggggtggaggagggtgacgtcgtgctcgagatcggcccaggcaccggctcgctcacttccgcgctgctccaggccggcgctaccgtctttgccgtcgagaaggacaagcatatggctactctcgttaaagataggtttggatctacagaacagttgaaggtcattgaagaagacatcacaaaatttcacatccgttcccattttcttcctttcatgaaggagaaatacggtgccaccaaaaaacttgcaaaggttgcatcaaacttaccattcaatgtcagcaccgaagttgtcaaactactactcccaatgggggatgttttctctgtcgtggtgcttatgcttcaggatgaaacagcagtacgccttgcagatgcttcaatacaaagtccagagtaccgatctatcaatgtgtttgtggatttttactcggaacctgaatacaagttcagagtagacagagagaattttttccctcggcctaaggttgatggtgctgttatcagcttcaaactaaagaatgcggaggagtatccgccagttagttccccaaaaagcttcttttcaatggtgaattccgctttcatggggaagcgcaagatgcttaggaaatctcttcagcacatatgctcttcttctgagattgaggctgctcttgacaacattggccttccagttacagaattgcttgttggcatggtgttcaacagttggagtaacttacgcctgaccgctgagagttgctatgcagctacaggtgcattcagctcagctccggggcgaagccaggaattacatgtagggaggccggccgaaagagccatcttgtaaaaaaatgatcgcgggttcaactggtttggttactcgcacttagcgtctgtctgagttaatacttgacaaaaaaaaaaaaacaagcacagctcaactggttaggtttctcgtagtggtggtggtcgtttgggttaattcatcgacttgacacggttgctcctatttttttttctatatgtattctagatagtgagggtttattgtattttgatcgtagacgctaatcagaaactctactgaatggatgccttcgttctctctgagtacaaaggccccattgaaatatgtatgagaaataaagcaaatttagaggaccggtagcatttccttctgcttatttgcctcctttttcaccacgtgagcatctaaccaatacaagactgtttagcagatctgtaaggccttgttcgtttacgtcggattgcatccgaaatcgttccagttaatcaaagtttatataaattagagaagcaatccggttatgaatcgttccgatccaccaatccgg

SEQ ID NO: 125220 - DNA, 1259 bp, Zea Mays
aagggcgagcaaaactggaagcctacgaaaatggtggagctcacctccttatccccagggccaccacgtccttctcggctgactcctcgccgccggccgccgccgccgacacctcatgttcatacctcctcgcgtcgtcgcgggaggatcctcggcgccgcgaccgccacgcctggcgccgacgactaccactccaccatccgctccctcaactcccgcggccgccacgtcccccgaaaatccctcgggcagaactacacgctcaactccaaggtgaacgaggagctggtggcggcggcgggggtggaggagggtgacgtcgtgctcgagatcggcccaggcaccggctcgctcacttccgcgctgctccaggccggcgctaccgtctttgccgtcgagaaggacaagcatatggctactctcgttaaagataggtttggatctacagaacagttgaaggtcattgaagaagacatcacaaaatttcacatccgttcccattttcttcctttcatgaaggagaaatacggtgccaccaaaaaacttgcaaaggttgcatcaaacttaccattcaatgtcagcaccgaagttgtcaaactactactcccaatgggggatgttttctctgtcgtggtgcttatgcttcaggatgaaacagcagtacgccttgcagatgcttcaatacaaagtccagagtaccgatctatcaatgtgtttgtggatttttactcggaacctgaatacaagttcagagtagacagagagaattttttccctcggcctaaggttgatggtgctgttatcagcttcaaactaaagaatgcggaggagtatccgccagttagttccccaaaaagcttcttttcaatggtgagtagtgggtcatggggtcatggtgtgcagaaacttgtcccaaatctgaattgctttctgtggttgagggagaaaggacgtgaatggaagcaattgtttatctttggatatcgttacaaggccgctcattcttggtggtcttggagtccctaatctgtatttccaaagctgggcactgtaagctaaatggttgtggctggagaaaacagacactaacagaccttggcatgggttaaaactgcatgtactaaagcaagtaaggaagttctttcaatcttcggttgttactgtggttggaaatgagaacaagactttattctagtcggacagatggttagacggcggctgcatcaaggaatttgctcctgctgttgttgctaaagtcg

SEQ ID NO: 125221 - DNA, 679 bp, Zea Mays
aagggcgagcaaaactggaagcctacgaaaatggtggagctcacctccttatccccagggccaccacgtccttctcggctgactcctcgccgccggccgccgccgccgacacctcatgttcatacctcctcgcgtcgtcgcgggaggatcctcggcgccgcgaccgccacgcctggcgccgacgactaccactccaccatccgctccctcaactcccgcggccgccacgtcccccgaaaatccctcgggcaggtcatcccgctgaccccagaatccgcgccacccacaggcgggctcaccattcaccacgtaccgacgcgtctctcgtctccccgcagaactacacgctcaactccaaggtgaacgaggagctggtggcggcggcgggggtggaggagggtgacgtcgtgctcgagatcggcccaggcaccggctcgctcacttccgcgctgctccaggccggcgctaccgtctttgccgtcgagaaggtctgtaacgttgctttgctcggtgttccgtagctggactgctgaaagtgagagcgagccgctagggggaaaaattcgaaagatcttcctgagacgaaattgaaattgtgtgtaaaatggttactatcatctgtgtcactgtgtgtgattgtctcaaatctcaattgttgatgcctcaaaatgtagctctc

SEQ ID NO: 125222 - DNA, 1826 bp, Zea Mays
tattggtgcaagcatgcaatcaagcgatttggtgcatccaatcaaaatccaacgttgactgttattttacatttaacccctttttagattggatgctctggatggtttgattgcacgcttgcgtcaaatgagtgattgcataggacatgctccccttaacatgatatcttagatgacaaaatttatatttcaggatgagttctcaaagttgagaagatggtggaaaggtgtcaatatattaaataaagcatacataatcttgccgatccatgggatggcgcactggagcttggtaatcatttgcattcctgcaaaagagagtatttcaggaccaatcatacttcatctggactccctagcgatgcatcccagtactaagatcttgaacacagttgagagataccttgaaaaagaatggtgccaattatcatcatgggaggattttaaaaataatatacataagcaaagcgttgaggttccacgacagaataatgagtatgactgtggcatcttcatgctttattatattgaacggtttataaaagaggctccagaaagattcacaattgataaacttgatatgtttaatcggagttggttcaaacctgaagaagcatctggtctaaggcggagaataagagagcttctgctggaagaatttgaaagtgccaagctggatgatgctttaccaggagcggatgcatctgagcgtgatgacagcataaatgatggagaattgaaaccagatgcatcttctgacagttcagaaatggtcgtagaggtggtaggagggttgggaggcactgacaagagcaatgaaggcatcaaggttgtagcatcagaagaggcaagtggagagtcaggagatgctggtaagagtaccgaaggtactgttgcagcatcagaagaaaagagtattgaaggcatcaatgttgcagaaccagaagatgcttgtgagagtataggaggcatctatgttgcagaatcagatgaagcaagtggggagtttggagagattggtaagaccaacaaaggcaccaaagttgcagtgtcagaaggagcaagtgtgtctggatacactgataagaatatggaagacatctctgactctgaggttgcagtattagacaaagctcccactagcagctacagacgtggagagaagaccacagcctgtgttctatcagaagcagcttcactttccgatagcgtcaaagatgaacaaggtatggtgaaaccagattctggcagctcaaaagctgagagagaaggagatttgattgtaattgcatcgccggaaagatcggaagggaatgatgagatcattggtagcatgccaattacagatgtagtttgtgacagctgcgacagcgacaccgagaccaaggtgaggatcgtaaaaattcacagaagaaaatttgtcccatcgtgtggttgcagcaattgacacaaggggccatgcaccgtgcaaaccttctggttgcgttctcacgaagatgcgaaattgtgacagattttggtaatgatattttgaggttcctgtggccgtataccaagcacatagatgaccaggccaggcggtgatctcagtaaaccgaataggtagcgggtcgatgcatggcctgcttccccctgatctcgggcactaggctcctggaaagcagttttgggtaggcagttcattggcttgggcccgggacttgtaaagtgtacaggcgattggacgttattacgtatgttatggtgtttacattagaagatctgtgactgtgaacacctgccacaatttgagataatatgcgcgtaaggtcttgcgttttcctttt

SEQ ID NO: 125223 - DNA, 455 bp, Zea Mays
gcctccccccccccaaaaggcagcagcaaaacccccattaaatccctctcctccccgatcgcaggccgatcgacggcggcgatggggcagagaatcgatatcaattggactgaggtgtttggcaagtcatcctcccccgaccgcgaggccgacgtctgcttcgcctccccctcgtcggcgtcggcagcaccgcggacgcgggcgcgggcgttgggcgccgcgaaggtgttaccgggcgacgagcggcggcgggggtccccagacagacaccaacggaagaggctcgggaagctgcgcatcgacgatgactggtccgtcggcgggcagcgccacaccgccgtgcatggggatgacggggcgcgccgaccacggacccgcggggccgccaaggctgcagatggtcgggtacaggatgctcattccgtttctaaggatgtgtatgatttcagtaagat

SEQ ID NO: 125224 - DNA, 1523 bp, Zea Mays
taaactaattatttatctcgcaggctgctcagcctcctgcctcctgccgacccactacaaatggttaataatacgccacgtcaggcgggaatattcaagcattaaaaagtcgggccagcaagaaagaaaaaaaaaccacaacaagagagagagagagagacagagagagagagactgccaacgaggcgaagcagccggccaatctagcatcagcgcgcggggtctgagagcagagcggcagggcgccatggcggcatcggtggcgctgagcagcgggcaccggatgccggcggtggggctgggcgtgtggcggatggagaaggcggacatccgcggcctcatccacacagcgctccgcgtcggctaccgccacctggactgcgccgctgactaccagaacgaagctgaagttggtgacgcgctcgcagaggcattccagaccggactcgtcaagcgggaggacctgttcatcacaaccaagctgtggaactcagaccatgggcatgtgcttgaagcctgcaaggacagcctgaagaagctgcagctagactatctcgacctctacctcatccatttcccagtagccactcggcacaccggagtcggcacgacttctagcgctctgggtgacgatggcgtgctggacatcgacaccactatctccctggaaacgacatggcacgcgatggaagagcttgtttccatggggctggtgcgcagcattggaatcagcaactacgacatcttcctcaccagagactgcctggcctacgccaagataaagccggcggtgaaccagatcgagacgcacccctacttccagcgcgactcacttgtcaagttctgccagaagcacgggatctgcgtgaccgcgcacaccccgctgggtggctccaccgccaacgccgagtggttcgggacggtctcgtgcctggacgaccctgtcatcaagagcttggctgataagtacggcaagacgccggcgcagctcgtcctccgctggggtctgcagcgggacacggtggtgatccccaagacctccaaggtggagaggctgcaggagaactttgacgtcttcggtttcgacatctccggcgaggacatggagaggatgaaggccatcgaccggaagtaccggactaaccagcctgccaagttctggggcatcgacctctatgcttagcttttagttcggttgcgttgcgtcgcgtactcgcgtgctgcgtctctcggcccccccagacaagacagcatcaataatgaggataccctcagacggcatcagtcaaagtcatgaggatctcagacagcatcttccatcacatgtgacggtgtgaggttgatggtagggtttggtatccccacgtgtccctctctctttcagctcagctaatcatcaccatgtagactacgcagtgtttgcctccgattatttactgtttttcttccttacaaatccgtacatatctttactggtaggttgaacaatttgctgacattttttttttgcaaccgcgcctctg

SEQ ID NO: 125225 - DNA, 147 bp, Zea Mays
cttttttattttattttcatctggatgagcctgcactcatggttgtccaagatttgtaaggccaaggagaggctggttagggatcgaaggaaactgcacaccggttggtgcacagcggtgctgggagccggagaaagtgtactgcgg

SEQ ID NO: 125226 - DNA, 1807 bp, Zea Mays
accaaacgaacaaaaaaaaatccaaaaaaaacgagtctttaatcctcgccatcgaccgcaaagcccccctctgccccctccttttcccctccctcccacacgcaccgccgcgtccgcccccttcgctgcccctgcccggtcggttccgatggggtacgtgctgtcggcggtggcgagggtgctggagcagcccacggcgtggggggcggccccggagatggcgctcctcgcggggccgctctgggcggcggtcctcctcggcctcctgctcggctgggcctggcgcccgcgctgggcagctggcctcgtcgccgcccccgcccccgccgccgctgcgcagccgcccttcgccacgctcggtttctggaaggcccagctccccgcccgtctccgcgccccgctcggctccgccgccgccgtgcggcacggggaggaggaggaggaggacgaggtctccgtgcgaggtggcaggtcgtcggaggcggggagcgaggagctggcggtggggaagcgtgacctggccaacctctggaggctggtggagggcagggacggcggcccggcctggatcaagatgatggacaggtcgcttcccaccatgacctaccaggcgtggcggagggacgcgcagaccggaccaccacagtatcagagtagcagcatctttgaggacgccactccggaggaagtgagggacttcttcggggacgacgagttccgtgtgtccaacaagtgggacgacatgcttgtttaccataagacgctggaggagtgccagaccaccgggacgatgaaagtgcattgggtccggaagttccccttcttctgcagtgacagagagtacataattgctcgccggatatggaaactggggggcgcctattattgtgtcacaaagggtataccatgctcgtccattccacggcgcaacaaacctcgaagagttgatctgtattattcaagctggtgcatccgtgcagtggaatccaggagagggaacggagggtcgacagcttgtgaggtgctcttgttccaccacgaggacatgggcatcccgtacgagatcgcaaagctcggtatccggcaagggatgtggggatgcgtgaagagaatcgagcctgggctccgggcctatcagcaagccagggctgcaggggagccggtgtcacggagtgccctgatggcccagatcaacaccaaagtcggcgacagctttgtccggtcgctggagtccgacagcgacgggtccgaaaccgtggaagcggaagagaagcctgcgaggaaccgtgtggcgaggttccttgtgcttggaggggcagttgctctggcctgtactcttgaccaagggctcctgacgaaggctctcatcttcggcgtcgcgcggaaattcgtcgggcagaggaaggcactgtagcatctctggcatttatttctcagcgtcgtccgcttggcccgtggtccgcactaaccggacctgtcctttcactgtcgtagagtggaggatagaggtggttcagtgtctgcctaattggggcaaatgccattgaccattgtggctgaaagagaacagagctgatgaaaaacattttggtgtacagatatgctgccggctgttggatagcgaggaatggggaatagagcaaacaatgtacttctcgtttggagaacggaactcctacgatatatataaatgtgtttcatctaatcttgtatctcagacaagaacagatcagatgactgtgcagatgagaacaagcatttttctatgtagcttactgcggctacggcttctacaatattttgtttc

SEQ ID NO: 125227 - DNA, 1702 bp, Zea Mays
aagtttttctctgcaactaggtcactcttgcattttagaatatccattcttatgcctttacatagtaatgcatacttctctgctgccttatttttactccttttcctaatccatcagccttcactcagtcgatataaatatttttgctatttctctgcatcaacttccagttagatgatatgaatgagtcactattttcattgaaaaaaaggagaagaactagtcacttttttccttctatcagtcaatatgggtgacggtttcccttcaggattcttgtttgagcctatatatatggttgtatgcctagcgtacctagtgccgtaggctttccgcactgtgcggggtccggggaaaggtatctttaagcgccaaaccttgcccgcataatatgcagaggctagggctcgaacccgggaccttacggttatagacggtaggctctaccactgcaccaggcccgcccttcatttaggtcctaatggctgtatgcctaagagagagaaaaatcatttaggtccaaattgcattgggagcttagttagtaatattttgagattgttttggagcattcattccatatacagtggtttgtaggatgcttctctaatcctagatgttttgtacatcgatgcgaagtaaaagaaattgttgatgatcctgttagcaatcagtagtttgaggctagttccacttgcactgtatcagatcactaaatcggcatgtaaccatagagattattaggttactcataccacgctctgatgcccaaccattaatgtattggtataatgcgacgcagggtataccatgctcgtccattccacggcgcaacaaacctcgaagagttgatctgtattattcaagctggtgcatccgtgcagtggaatccaggagagggaacggagggtcgacagcttgtgaggtgctcttgttccaccacgaggacatgggcatcccgtacgagatcgcaaagctcggtatccggcaagggatgtggggatgcgtgaagagaatcgagcctgggctccgggcctatcagcaagccagggctgcaggggagccggtgtcacggagtgccctgatggcccagatcaacaccaaagtcggcgacagctttgtccggtcgctggagtccgacagcgacgggtccgaaaccgtggaagcggaagagaagcctgcgaggaaccgtgtggcgaggttccttgtgcttggaggggcagttgctctggcctgtactcttgaccaagggctcctgacgaaggctctcatcttcggcgtcgcgcggaaattcgtcgggcagaggaaggcactgtagcatctctggcatttatttctcagcgtcgtccgcttggcccgtggtccgcactaaccggacctgtcctttcactgtcgtagagtggaggatagaggtggttcagtgtctgcctaattggggcaaatgccattgaccattgtggctgaaagagaacagagctgatgaaaaacattttggtgtacagatatgctgccggctgttggatagcgaggaatggggaatagagcaaacaatgtacttctcgtttggagaacggaactcctacgatatatataaatgtgtttcatctaatcttgtatctcagacaagaacagatcagatgactgtgcagatgagaacaagcatttttctatgtagcttactgcggctacggcttctacaata

SEQ ID NO: 125228 - DNA, 1727 bp, Zea Mays
tcctcgccatcgaccgcaaagcccccctctgccccctccttttcccctccctcccacacgcaccgccgcgtccgcccccttcgctgcccctgcccggtcggttccgatggggtacgtgctgtcggcggtggcgagggtgctggagcagcccacggcgtggggggcggccccggagatggcgctcctcgcggggccgctctgggcggcggtcctcctcggcctcctgctcggctgggcctggcgcccgcgctgggcagctggcctcgtcgccgcccccgcccccgccgccgctgcgcagccgcccttcgccacgctcggtttctggaaggcccagctccccgcccgtctccgcgccccgctcggctccgccgccgccgtgcggcacggggaggaggaggaggaggacgaggtctccgtgcgagggtcgtcggaggcggggagcgaggagctggcggtggggaagcgtgacctggccaacctctggaggctggtggagggcagggacggcggcccggcctggatcaagatgatggacaggtcgcttcccaccatgacctaccaggcgtggcggagggacgcgcagaccggaccaccacagtatcagagtagcagcatctttgaggacgccactccggaggaagtgagggacttcttcggggacgacgagttccgtgtgtccaacaagtgggacgacatgcttgtttaccataagacgctggaggagtgccagaccaccgggacgatgaaagtgcattgggtccggaagttccccttcttctgcagtgacagagagtacataattgctcgccggatatggaaactggggggcgcctattattgtgtcacaaagggtataccatgctcgtccattccacggcgcaacaaacctcgaagagttgatctgtattattcaagctggtgcatccgtgcagtggaatccaggagagggaacggagggtcgacagcttgtgaggtgctcttgttccaccacgaggacatgggcatcccgtacgagatcgcaaagctcggtatccggcaagggatgtggggatgcgtgaagagaatcgagcctgggctccgggcctatcagcaagccagggctgcaggggagccggtgtcacggagtgccctgatggcccagatcaacaccaaagtcggcgacagctttgtccggtcgctggagtccgacagcgacgggtccgaaaccgtggaagcggaagagaagcctgcgaggaaccgtgtggcgaggttccttgtgcttggaggggcagttgctctggcctgtactcttgaccaagggctcctgacgaaggctctcatcttcggcgtcgcgcggaaattcgtcgggcagaggaaggcactgtagcatctctggcatttatttctcagcgtcgtccgcttggcccgtggtccgcactaaccggacctgtcctttcactgtcgtagagtggaggatagaggtggttcagtgtctgcctaattggggcaaatgccattgaccattgtggctgaaagagaacagagctgatgaaaaacattttggtgtacagatatgctgccggctgttggatagcgaggaatggggaatagagcaaacaatgtacttctcgtttggagaacggaactcctacgatatatataaatgtgtttcatctaatcttgtatctcagacaagaacagatcagatgactgtgcagatgagaacaagcatttttctatgtagctta

SEQ ID NO: 125229 - DNA, 934 bp, Zea Mays
accaaacgaacaaaaaaaaatccaaaaaaaacgagtctttaatcctcgccatcgaccgcaaagcccccctctgccccctccttttcccctccctcccacacgcaccgccgcgtccgcccccttcgctgcccctgcccggtcggttccgatggggtacgtgctgtcggcggtggcgagggtgctggagcagcccacggcgtggggggcggccccggagatggcgctcctcgcggggccgctctgggcggcggtcctcctcggcctcctgctcggctgggcctggcgcccgcgctgggcagctggcctcgtcgccgcccccgcccccgccgccgctgcgcagccgcccttcgccacgctcggtttctggaaggcccagctccccgcccgtctccgcgccccgctcggctccgccgccgccgtgcggcacggggaggaggaggaggaggacgaggtctccgtgcgagggtcgtcggaggcggggagcgaggagctggcggtggggaagcgtgacctggccaacctctggaggctggtggagggcagggacggcggcccggcctggatcaagatgatggacaggtcgcttcccaccatgacctaccaggcgtggcggagggacgcgcagaccggaccaccacagtatcagagtagcagcatctttgaggacgccactccggaggaagtgagggacttcttcggggacgacgagttccgtgtgtccaacaagtgggacgacatgcttgtttaccataagacgctggaggagtgccagaccaccgggacgatgaaagtgcattgggtccggaagttccccttcttctgcagtgacagagagtacataattgctcgccggatatggaaactggggggcgcctattattgtgtcacaaaggtaaaatggagtaatagacttgaaaaactactgcttcttgtc

SEQ ID NO: 125230 - DNA, 111 bp, Zea Mays
gccaaaaaaccaatatacaactcaatttaatacatgttcatggaaatgtccattgatcgttgatttacaaacacaaaagaataggaatttgatatacaagatataaggaaa

SEQ ID NO: 125231 - DNA, 1499 bp, Zea Mays
tccttggacatcttcaagaaggagttcggcgccagggtctgggaccgcgagaagctcgtcgtcatcccggaccactacatcttcaccagcgacgaccgcgccaaccgcaacgtcgacatcctcagggacttctgtgcggagcagaacgtcaagtacttctatgacatcaaggacctcaggcagcgatttcggagctacaaaggcgtctgccactgccgaccaggcgaggttctcttgggcactgattctcatacatgcaatgctggagcctttggtcagtttgcaactggaatcggaaacactgatgcttataagctgtgctacatttgttcctttcttaggatctaccatgtaatcgggacttattattcttgttaattgctacttacagattattggtgagatttcagtatctggtgcaacctacaaatcaatggagtttgttggatcaactgtagaaagtctaaccatggaagagcgtatgacactatgcaacatggttattgaagctggtggaaagaacggtgttgtgcctgctgatgaaactacatttaaataccttgagggtaagacatcagtcgattatgaacctgtctacagtgatgctcaagccagattttttagcgactaccggtttgatgtatcaaaactggagccagtagttgccaagccacattcgcctgacaaccgtgctccagcaagagaatgcaaagatgtgaagatcgaccgagtctatattggttcttgcactggtggtaagaccgaggatttccttgctgctgcaaaggtgttcttagcctcgggaaagaaggttaaagttcccacatttcttgtccctgccacgcaaaaggtgtggttggacgtatatagcctccctgtaccaggatctggtggcaaaacttgctcccaggtatttgaggaggctggttgtgacacaccagcaagtcctaattgtggtgcttgtttgggtggccctcgtgatacatatgcacggatgaatgaacctactgtctgtgtgtccaccacgaacaggaactttccgggcaggatggggcacaaggaagggaaaatctacctggcgtctccctacaccgcggctgcctcagccctgacggggtacgttacggaccctagggacttcctcatgtaaccgtcttgaaacaacaacagatttcatgatgtaacagagcggttgtactgctgtttttcgtgatgaacttttgtctaggcatgtccttcgttgagaaataaactgcactagaataagcagcgacctctcgggcgccatagcagatgtgacctcatatttatttgtgcaactttttttgtttttggctctgaagtcatgcaaggaaaccacatcatatccaccatagctgtacaaagcttgaacttttgtcaacataaaaaataaaagagtgatttatgtatgcgtcagaatcaaacaataatttgatgtcaaaagctcaagatagacatggttctgtaataagaacaca

SEQ ID NO: 125232 - DNA, 429 bp, Zea Mays
tgacagccgccaagtgccattgcattgcatcacaaatccacaagaaaaatacagttcggacttcacagatggttcagacttcacacttcaggcttcaaagtccgaaattctccacagcagtcagcaatccacttctccacagaaatccagctccagtcgtccgtagtccgcctaccggtgaggtgagtgaggatgtgagagacagaggacagaggtgggaggagtaagggcaggcttctcaccagcgatagcgagcggtgagcgtcgtgtcccatgatgcatgtggaacacttgaggtcgccccggtgtccgggatccgggcaggcgggctccgccgcaccgaggagagtggcggctaggttaatggtgaccggaggcggaggagagcacgatggagaaaaggaagcggcgctggaaatctggaatact

SEQ ID NO: 125233 - DNA, 926 bp, Zea Mays
ctcccaagccgccgccactccttctccctccccctttctctctcttctctctctaccgccccaggccccccgatctcctcctcccactccgatcgcccgaccgatcgccgagcttccctgttccctccccgcccccgcgacgccatggagccgccgcacgccgagcaggccgtcgccgtcgcacgctgagcaggccgtcgccgctgtagcagcaggaggagagggtggcactgcaagcccgggcaccggcctcgaaggtgctgtctgcttaacgttttttgtttcgttcagatctatggccggacgaggcggactgtggctactacctccgcacgacgctgcgacgggcgctcctcagatcggcagagacctctttcgaacgcaagccgggagattcggaatcccgcgcgcgagttgggcctggccagcagataatcgaattgctttgccgtggaaacaggagaaggaagaatgcaaaacacgtagtgagttcagttgtgacacaagcaccaaactttgatgggtatcagtggagaaagctgcaattgagtatattcattctttatcaagggcacagcctgctcgttctctcaatggtgctggcctttgtcctgctagtagatcacttagcacccaggccgccactacgtcaagcacaccacagttgaaagcacaccccacgtcaagcagccaggccgccactacgttaagcaaaacagaagacgagaagaactgatgtagccatgttcatgcttccactgttgaaatgcatattcagcatagcttacttagttcctatctgctgtttcaacgttgatttaaaagaagagctggtagttgtgagctatctgtaaatgatctagttgtgaatgatattataattgtgatgcttttgtgaatatataattgtggtgcttttgtgttta

SEQ ID NO: 125234 - DNA, 929 bp, Zea Mays
ctcccaagccgccgccactccttctccctccccctttctctctcttctctctctaccgccccaggccccccgatctcctcctcccactccgatcgcccgaccgatcgccgagcttccctgttccctccccgcccccgcgacgccatggagccgccgcacgccgagcaggccgtcgccgtcgcacgctgagcaggccgtcgccgctgtagcagcaggaggagagggtggcactgcaagcccgggcaccggcctcgaaggtgctgtctgcttaacgttttttgtttcgttcagatctatggccggacgaggcggactgtggctactacctccgcacgacgctgcgacgggcgctcctcagatcggcagagacctctttcgaacgcaagtagccgggagattcggaatcccgcgcgcgagttgggcctggccagcagataatcgaattgctttgccgtggaaacaggagaaggaagaatgcaaaacacgtagtgagttcagttgtgacacaagcaccaaactttgatgggtatcagtggagaaagctgcaattgagtatattcattctttatcaagggcacagcctgctcgttctctcaatggtgctggcctttgtcctgctagtagatcacttagcacccaggccgccactacgtcaagcacaccacagttgaaagcacaccccacgtcaagcagccaggccgccactacgttaagcaaaacagaagacgagaagaactgatgtagccatgttcatgcttccactgttgaaatgcatattcagcatagcttacttagttcctatctgctgtttcaacgttgatttaaaagaagagctggtagttgtgagctatctgtaaatgatctagttgtgaatgatattataattgtgatgcttttgtgaatatataattgtggtgcttttgtgttta

SEQ ID NO: 125235 - DNA, 774 bp, Zea Mays
ctcccaagccgccgccactccttctccctccccctttctctctcttctctctctaccgccccaggccccccgatctcctcctcccactccgatcgcccgaccgatcgccgagcttccctgttccctccccgcccccgcgacgccatggagccgccgcacgccgagcaggccgtcgccgtcgcacgctgagcaggccgtcgccgctgtagcagcaggaggagagggtggcactgcaagcccgggcaccggcctcgaaggtgctgtctgcttaacgttttttgtttcgttcagatctatggccggacgaggcggactgtggctactacctccgcacgacgctgcgacgggcgctcctcagatcggcagagacctctttcgaacgcaaggctgcaattgagtatattcattctttatcaagggcacagcctgctcgttctctcaatggtgctggcctttgtcctgctagtagatcacttagcacccaggccgccactacgtcaagcacaccacagttgaaagcacaccccacgtcaagcagccaggccgccactacgttaagcaaaacagaagacgagaagaactgatgtagccatgttcatgcttccactgttgaaatgcatattcagcatagcttacttagttcctatctgctgtttcaacgttgatttaaaagaagagctggtagttgtgagctatctgtaaatgatctagttgtgaatgatattataattgtgatgcttttgtgaatatataattgtggtgcttttgtgttta

SEQ ID NO: 125236 - DNA, 852 bp, Zea Mays
ctcccaagccgccgccactccttctccctccccctttctctctcttctctctctaccgccccaggccccccgatctcctcctcccactccgatcgcccgaccgatcgccgagcttccctgttccctccccgcccccgcgacgccatggagccgccgcacgccgagcaggccgtcgccgtcgcacgctgagcaggccgtcgccgctgtagcagcaggaggagagggtggcactgcaagcccgggcaccggcctcgaaggtgctgtctgcttaacgttttttgtttcgttcagatctatggccggacgaggcggactgtggctactacctccgcacgacgctgcgacgggcgctcctcagatcggcagagacctctttcgaactagccgggagattcggaatcccgcgcgcgagttgggcctggccagcagataatcgaattgctttgccgtggaaacaggagaaggctgcaattgagtatattcattctttatcaagggcacagcctgctcgttctctcaatggtgctggcctttgtcctgctagtagatcacttagcacccaggccgccactacgtcaagcacaccacagttgaaagcacaccccacgtcaagcagccaggccgccactacgttaagcaaaacagaagacgagaagaactgatgtagccatgttcatgcttccactgttgaaatgcatattcagcatagcttacttagttcctatctgctgtttcaacgttgatttaaaagaagagctggtagttgtgagctatctgtaaatgatctagttgtgaatgatattataattgtgatgcttttgtgaatatataattgtggtgcttttgtgttta

SEQ ID NO: 125237 - DNA, 939 bp, Zea Mays
ctagttgtttggtcccccagcggagtcatcttgccaggtcgcctgccactgcctgtcatagaacgtggtctcgtcgacgagcttcttcagcgactcgacgtcctcgtttttcctgaccagcagcacgccggcgacggcggcgaacagcagcgtcttgcagaagaagttgcccatctggtcgacgaggcccgcgcccgtcaagctgtccacgaaataggccatgaagaagccgaccatggcggcgcgacctgcattattagacgaggagaagagccgccggttctgaatgcaagcaagatcactgggcaaagaaacgccatatgcacccgcatcatatttcaactgttttttcataccatttagcttctcggcttcgggaaggtggaagcgtttcatccaagcccaccatggaataatggaagtggcgaagacgacagcctcgtctgtgttagtcgcctccggatagtcttcgagccatctccttctcctggcctctggaatcagaaaaataaagatgactggcatcagcggtccgtcccactcgttgcagcaaaacaacaaatgtctgaccgagtttacacaaagcatgtcctgagccccctcaccggcgtcgatgacggcgtcccagtcgacgccgctgcccttgtcgaacttggcgaggtcccaggtgccgttgacccacctggcgtcccggaaggccgggaccggcgctggcgcgggcggcggcggcggggcctcggacttgacggcggccccgttggaggccgcggcaagggccggctccgcctcgtcccgctgctccacgggcggcgcctccccggaggcggtggcgcaggcgaggcggcgcgggaaggggaggagtccgacgggctttccgcccgcccgcaggggcctgaggctggcgggacgcggggagaaggtggaggtcgccatggccat

SEQ ID NO: 125238 - DNA, 1405 bp, Zea Mays
taccggacgggtatgcccgttgccatccccacacgccgctcacacgccgcctccctcgttctcgcgccgacgctcgccgcaccgcctccctctccctcgttgtcgcgccgcctccctgtccctcgttctcgagccgccacaccgcctccccagccggccaggtaacacacggcggctcttccctgctgggcttcggagctgccagtctgccacgccgccgccccagcagagaggcgagcacccccgccggcgcctcggagctttgaattggctgggcgcgcgaccggcctctgccgccgggccgcgagcagcagcaacccccctcgccggccatgacctccgctcactccaagctctactccgatgacgtcagcctcgtcgtggtcgtcgtcgacacgaaccccttcttctgggccgccgcggcgctccccttcgccgacttcttcgcgcacctgatccacttcgtgaactccctcctgctgctgaaccacctcaaccgtgtggtcgtcatcgcggcgggagtcagctcgtgtgcctacatcctggattccagcgatgccagcccctccggtggtgtggccgtctcggacaccttcgacaaggcaagccgcaaggcggaggagttcattgcacaagatgcgcgcgccactgcaggcaacggttccgttgcttctgccaatgccgcgtcgctgctctctggggcgctgtccatctctttgtgctatatacagaggattttccggtctgggtctcggcatccacaacctcggattttgtgcctgcagggatctccagacggacctgaacaatatgtggcagtgatgaattcaatattttctgctcaacgttccatggtaccaattgactcttgtattgtgggaacccaggattctgctttcttgcagcaggcttcgtacataacaggaggagtttatttgaagccacaagaactaaatggcctgtttcaataccttgccgctgtatttgcaactgatttacactctagagcttttctgcgccttccaaaaactcttggagtggacttccgtgcttcgtgtttctgccataagaagactattgacatgggatatgtctgttcaatttgtttgtcaatattctgcaagaatcagaagaagtgttcaacctgcgggtcagaattcagtcgtgccatgcctgatttgaactccgtgccggatcaaagcaagtagtgtccagtgcgaagttaacccatcaacagacaacgcttttctctatgcgtctcacaggttcctttcggactagcaccttcacgtgtgcagtgtgtacgagacgtttctttggtcgatatgtgaatcaatttccatgtctgaatattatcggtttttttttaaaaaaaactgaaactgcagaattattttccatacaa

SEQ ID NO: 125239 - DNA, 1414 bp, Zea Mays
taccggacgggtatgcccgttgccatccccacacgccgctcacacgccgcctccctcgttctcgcgccgacgctcgccgcaccgcctccctctccctcgttgtcgcgccgcctccctgtccctcgttctcgagccgccacaccgcctccccagccggccaggtaacacacggcggctcttccctgctgggcttcggagctgccagtctgccacgccgccgccccagcagagaggcgagcacccccgccggcgcctcggagctttgaattggctgggcgcgcgaccggcctctgccgccgggccgcgagcagcagcaacccccctcgccggccatgacctccgctcactccaagctctactccgatgacgtcagcctcgtcgtggtcgtcgtcgacacgaaccccttcttctgggccgccgcggcgctccccttcgccgacttcttcgcgcacctgatccacttcgtgaactccctcctgctgctgaaccacctcaaccgtgtggtcgtcatcgcggcgggagtcagctcgtgtgcctacatcctggattccagcgatgccagcccctccggtggtgtggccgtctcggacaccttcgacaaggcaagccgcaaggcggaggagttcattgcacaagatgcgcgcgccactgcaggcaacggttccgttgcttctgccaatgccgcgtcgctgctctctggggcgctgtccatctctttgtgctgttatttagatatacagaggattttccggtctgggtctcggcatccacaacctcggattttgtgcctgcagggatctccagacggacctgaacaatatgtggcagtgatgaattcaatattttctgctcaacgttccatggtaccaattgactcttgtattgtgggaacccaggattctgctttcttgcagcaggcttcgtacataacaggaggagtttatttgaagccacaagaactaaatggcctgtttcaataccttgccgctgtatttgcaactgatttacactctagagcttttctgcgccttccaaaaactcttggagtggacttccgtgcttcgtgtttctgccataagaagactattgacatgggatatgtctgttcaatttgtttgtcaatattctgcaagaatcagaagaagtgttcaacctgcgggtcagaattcagtcgtgccatgcctgatttgaactccgtgccggatcaaagcaagtagtgtccagtgcgaagttaacccatcaacagacaacgcttttctctatgcgtctcacaggttcctttcggactagcaccttcacgtgtgcagtgtgtacgagacgtttctttggtcgatatgtgaatcaatttccatgtctgaatattatcggtttttttttaaaaaaaactgaaactgcagaattattttccatacaa

SEQ ID NO: 125240 - DNA, 2176 bp, Zea Mays
ggccgatgcaatgcacgcatgcaacctcgtcgatcggccgtgagcccgtgagccgttgctgtctgcatctcacctggtgttgttcaggtaccattcatcattccgtccagatctgccgccgccattattggcgagtcggtcggaggacggaggagggggagaaattaaagccagcatggggcgaggaggtcgcggcggagctcaatgctctccctgaaggctcaagctgagggcgcccatccctgttcccggccggccccttccagatggatccccggcgcgaggagctgctgcatgagctagggggcatgtgggacgagatcggggaagcggaggaggaccggcgggggatgctgcaggcgctggaggaggagtgcctcaacgtgtaccgcgccaagctggagaaggtccgccagcaccgggcgcagctcaagcgggagatcgccgactccgtcgccgaggtcgccgccatctgcgccaccatcggcgagccgccctccaccgtgcacacggcctgctcctcgctccagggcacagggagcctgaaggaggagctgggcctgatcgcgccggagctggcggagatgaggcggcggagggacgagaggcggcgccagttcgcggacgtcgcccagcgggtcaacaagatccagcaggagatggacctgcagctaggcggcggcggaggccagggccagcctcatgctcatgtcgccgtcgacggctccgacctgacgacgaccaagctcgacgagctcagagcctatctgcggcgcctgcagcaggaaaaggaaagtcgcaccaagaaggtggcggagctcatggctacgctgcactcgtcgtccttggttctcggcatggatcccagagagacgaacagcgtcgtccatggcggcgtgcagacgcaggccagcggtatcagcgacagcgccatctcggggctggctgggggcatcgagaggctgagagagatcaaacggagtcgaatggagaagctgcaagacctgctgggcagcatgctggagctgtggaacctgatggacacgccggcggaggagcagcggcggttccagggagtggcctgcaacatcgccgcgtccgaggacgagatcacggagcccggcgcgctgtccatggccttcatacgcaacgtggaggcggaggtgatgaggctggagaacctcaaggagtgccggatgagagaactcgtcgtgaagaagcacgaggagctcaaggagatccgccgccgcgcgcgtctgcccgaggacgacactaccgtcatggtgttcgacgccatggacagcgatgctgagcgtgctatgatcctggagcggctggaattgcagatctccaaggccaaggacctggagttcagccggaaggacgtgctggagaagatggacaggtggcaggcggcgctggaggaggagtcctggctcgaggagtacagcagaaacgagaacagatacaacaccggcaaagggacgcacctcgtgctcaagcgcgcggagaaagcccgctcccttgtctgcaaaatgccggcaatggcggaagctctggtggcgaaggttgttgcttgggagaaggagagaggcgccaggttcgagtacgacggtgaggtgctgctggacctgctggaggactacggcaacgcgaggaaggagaaggagcaggaacggaagcggcagcgggaccagcggcggctggtgcagggcgcggcggcggcggaccgggacgtgtcgtcgccggtggcccgcccgccgcccaaggccatcaagaacgtcacgaggtctctgtccatagggcgcaacgccgccgccgccgccgccgccggtggcggtggcagccccaggaaggcggcgccggcgtcgtccaggcccggcacgcccagcttcctcaagtcgcccttgtcggcgcgccggggcgggggcgacgagggggcgcagatgctgtcgccggactccttcgagtgacctcttctgcttgcagttgcagtcagcattcagcacgctggaatggacagggatatcgtcgatctgcaacgcccaaattctggatggatcctccgttgaactgaaaccttttgctgtaaaaaagttctccgagggttggagtgcatgcagagcgaatgctttcgaatggcaaaaaaattggaaatcgtacggatttcattttt

SEQ ID NO: 125241 - DNA, 1767 bp, Zea Mays
ggtttagtcccttttagcacatatgtgaaggactaaagactaaatcattttagtccatattttagtcctagtgtttgacaaaaaagagactaaataagactaaaaactagagactaatctttagtccctctaaccaaacaccccttgagaaacagggtcgaaaatctctgctcatttcacatcgaacgctccgcctacaatcctgtactgcacgcgctccccatccgcacaacttcccgcctcccatggcggcgccggcgccgggggccacccgcctccaccccccgttcctcctgcttccttccccgccgcgaccccatcctccactccggctccgcttcctcctgccgtccccgccgcctctccgcctccgccgccgcttcccgctgctcgctgccgccgccgtctccgccggcggcggcggtggaggggaggaagccgccggcaggaaggccgataaggccaggcagctgcagaagcgggtcctcgtgggcgtcgccatcggggtgggcgcaggcggcatcgtggtcgccggcggctgggtgttcgcagccgccgtcgcagctgctgtccttgccggctcccgggagtacttcgagctcgtccgcagcactgccagcggaggcgggaccccgccgccgcgatacgtgtcccgcgcgtgctccgccatctgcgctctcatgcccatccttacgctgtactatggacgcatggatgttactgtggcattttctgcattcgttattgccatagcattgcttttacaaagaggaaatcctcgttttgctcagctaactagttcagtttttgggttgttttactgtggctatctaccttctttctgggttaagctccggtcaggattagctgcccctgccttaaatacaagtatagcataccgttggccaattcttctcggtggacaagctcactggacagttggacttgtagcaaccttgatggctattagtagcatcattgctgctgatacatctgctttcctttgtggaagggcatttggtcgtacccctttgactaacataagccctaagaaaaccttggagggtgctttagctggcctagctggctgtgtgctgaccactgtgctgctgtcaactgccttacgctggccaagatcactgttgagtgccacagcttatggaatcctgatctttctgggttcattgtttggggatcttgtcgagtctctgatcaagcgtgacgctggtgtcaaggactctggatcactcattcctggtcacggtgggattctcgaccgagttgacagctacgtgttcacaggggcactctgttactcttttgtcagagtagctctaccctcgtatggggtctgaataaagcacctggatgtttgctggtttgtctctcctgccatcagcaatgcggtaaccgtattttaacataatgttgagtattgcttagaatgccctagacagacaatgtgatcctcctatccaagcaaattgggcgtccgagtttctgactgttgaagatagaaccgaagatcaacgtcgacagtgttacggacttggggcttgagatggcctttccagctcaaccagtctgttgcagacttgtagctttgggtgtacatagtttatcttttttttcatagggtagaaaggaaagcgtaattatccgtcgcaaaagctgttaactgtgtattgaggcagcttatgtcaatatgtactatacctgttggtatcgattgttttaatgatccaatgcatttgattggtaactaag

SEQ ID NO: 125242 - DNA, 787 bp, Zea Mays
aatccaacaagcaaacctgcagtcatctcctccatcaccaccaaactcaacaacagccagctcgcgaaaataatgaagagccgcagcatggcatcatcggccgcgctcttggtgctagccctcgcgctagtggcggccaccgccccacaggtagcggaggcaaagaagaagagagcggcggagagcggcgaggcggcggaggcgaagaagatccaggacgacttctgctcgacgctgtgcgagggcaagaaggggacggacctggtcgtgtgcaaggagtcctgcgcgctctcccagcagtccaacctggtgctgtacggcaggatccagtgcaagggcaagtgcaccgagcagaagggcatcacggcgccggccatgaaggtctgccaggaggagtgcgacaaggcgtacgtggtgaaggcggccgaggtcaccaaggcctgcagcgtcacctgcgccaaggagaagaacccgcgcctcagcgagaactgcaagaggtcctgcacccctcctccttcttgaagccccttgaaatgaatgaaccatgcaggcgctgagcgagtctatacgtacgtcgtcaccggctggccacgcatgcgaatgcgataagccgataaccatctcatatggacggaactatatattgtattccttttaatctggtattttctaagctaattgtttttgttcaaatataccgtcgatggaactccaaatgtaatgtctgcgttttttcatcgattgaatggataataaaaaaaggcatgctggcagttactacaaataa

SEQ ID NO: 125243 - DNA, 995 bp, Zea Mays
atatcagcgctatttcaactctttttacagactatcagcgctatttcaactctttttacagactcgatgcacagcgaaacacgatttttaataattcaagaaatgtaatcaaatgaaaaaatattaaaaagaatatatatagctaattcaaagtttaataaatttacgttagaggcggaaatttcgtagttaggaccccgcctcaaattcatatctagacaggaatggaactacatgaacatgggtgattgtggacgttggcggatctagaatttcactataggatatgtcatctaaaatttttatatatatattcgttcaaaccatttaacaattttgtaatatttttacatcaaattacacaataaattttaattttgaaggctaagttaaaaacataattaataagttttaaatttagaaagtaagttaaagatattcataaatcataatataaatagatgaaaagtcatattcatggtttatatgactttttaagagacataatcaatatcttaataccaaattatgaaataaattataattgcatgattgaattctcaaccctcacaacatgtgattgaataaatttctgagtcacttcatacactaccggaatccgggtctttgtcgagtgtcaggctctttgtcgagtgctatttatcgagcactcgacaaagaagactttaccgagagccgcactcggcaaagtcctgcgctcggtaaagagcttgtttaccgagtgcggacactcggcacagagaaacactcggcaaagactgctttgtcgagcggcaaacactcggcaaagtcctgcgctcggtaaagagcttgtttaccaagtgcggacactcggcacagagaaacactcggcaaagactgctttgtcgagcggcaaacactcggcaaagatggcgctcggcaaagggccgttagcggccactagtacagagaagttctatagtggcggttgtaaacctatttatagtggcgtt

SEQ ID NO: 125244 - DNA, 853 bp, Zea Mays
caacagcaaccatgtcaatccaacaagcaaacctgcagtcatctcctccaccaccaccaccaagctcaacaacagccagctcgcgaaaataatgaagagccgcagcatggcatcatcggccgcgctcttggtgctagccctcgcgctagtggcggccaccgccccacaggtagcggaggcaaagaagaagagagcggcggagagcggcgaggcggcggaggcgaagaagatccaggacgacttctgctcgacgctgtgcgagggcaagaaggggacggacctggtcgtgtgcaaggagtcctgcgctctctcccagcagtccaacctggtgctgtacggcaggatccagtgcaagggcaagtgcaccgagcagaagggcatcacggcgccggccatgaaggtctgccaggaggagtgcgacaaggcgtacgtggtgaaggcggccgaggtcaccaaggcctgcagcgtcacctgcgccaaggagaagaacccgcgcctcagcgagaactgcaagaggtcctgcacccctcctccttcttgaagcgaagccccttgaaatgaatgaaccatgcatgcatgcatgtatgcatgcgccggggtgacgtggcgttcagctcaggcgctgagcgagtctatacgtacgtcgtcaccggctggccacgcatgcgataaccatctgatatggacggaactatatattgtattcctattaatctggcattttctaagctaattgttttttttccaaatataccgtcgatggaactccaaatgtaatgtcacgcaaatgtgtgtttttcatcgattgaatggataataataaaaaggcatgctggcagttactactaaataa

SEQ ID NO: 125245 - DNA, 703 bp, Zea Mays
cctatctctaacatggggatttgccccttttcttaggagatggctaatgacagcctcttttttccctatgacagccttgtgaagagaggtgaagccatcctgtatcagcaacacttatgtagttaactataccttcgcagatggggttactctgatacaaaagaagaatgaaaatcataagcacgtaacttactctatcaactaagttgatgtcaacaccgctgttcagaagcttgtccatgaggggtatctgcagtgccaacgcgtagctatgaagtgggtgccacttggcttaactgatgatattctagtgacgtcaggggtctcatgctggtccaaagtagccttttcttcaggcgttaggagaagctcgatctctaggcaaacaaaaaattagtcctgttcttgctgcgccgacgcctcgagcctgtaggacggcgaggaagatgggaaacgcaaggccctcctttgctccgggccgtcgtcctcgtagtcgctcccggagccgtcgtctggctcctcccagaagacgtcgccgtcagaagcggcggcgcgcggcggagggatcaggcccgcgcacagcagccccgggagcgagcggcagagaggcggtggagggcggggagcggcggcgcggtggggaggagcaaatggcacggcggatggagtgctgggtggtgacgcggtggccgcccacacgagc

SEQ ID NO: 125246 - DNA, 1596 bp, Zea Mays
ttcgttgattatatttttaggtgggtgcgttggcaaaagatgtttgcaagcgatgagttggggtgagccatgggtttgaccccattatcagggctatgtagcacagaagatagtgctgctagaaaatcttgttggcaatccctgcaaagttgagtggccacacattctttgatggtatccatgggtttaccaaccagaaatttaccaatggtatatgcatcttttactgaaatggtttgttaacatacagcaattcgataaggttcttgagccatgtcttttgcctgagctgtatctgaaaagaaaagacttgccactagaaaaatgtctattgttttaatacaaaatcttatatagtgaccaaagtggtgtctaactgtgaagacatgtatgatctgttgattatcaatatttgtttggtattttctactcaaaaaaagctgttcaggatgttcctttaacatttaatgtgatattaatagctgtgtccgcttccgctattacatatatttgtatttctatcctttaattgcttagccccctcttaacttcgtttcatgatccaccattgtttgttaggctgatgacgaggacaaacgatgcaagtggtggtgggaagcttccccggaagcgcttctatcgcgccagggcacacagcaacccgctcagcgactcgcacttcccagtcccaatatcgcctgaagaggtcgatctctcacagcactacccgcggtacttccctgctgacaagggcagcgacggtgaggaggctgcagcgccacaacagatccgcttcgccgatgtggggtgcggatttggcgggttgcttgtagggctctcgcctctcttcccagatacgctcatgattggcatggagctcagggacaaggtaacggagtatgtgaaggagaggattttagctctaagaggggcaaacccaggacagtatgataacatatccgttgtccgcacgaactcgatgaaatacattccaaattacttcagaaaggctcagctcaccaagatgttcttcctgttccccgatccccacttcaaggagaagaaccacaggaggagggttatcagcatgcagctgttagacgaatatgcttacgtgatggaagtgggaggaatcatatataccatcactgatgtcgaggagctcggagagtggatgcggtcgtgtctagagaaacacccgttattcgaaaccgttcctgaggaagagattaaggctgaccctgttttcaaactactgtctactgccaccgaagaaagccagaaggtggcaagaaatggaggacagactttctatgccatcttcaggcggatctccttacaagaagaataagtcgcttagagattataagctagatcgtgttacgtgtgtttgtcagttttatacattttttttttaaaaaaatttagcagtaggtgtacttggtactaaatattgcaatgttgctttgcaaggttctgcagacccagttattttgttcagctttaaaagagtttaccaagacgattgtgttgagtttaccaaaataatattccattgtatagagccatgttcctaatggcatagatgccaggatc

SEQ ID NO: 125247 - DNA, 1240 bp, Zea Mays
ctcgggcagcttctcccgtgcccctcgcgtgcgctctacgactgggcggccgccggcaccctacaccagttgcccaggtctctgtcttcgggaccttccccggcgacgagcatccaccaggtcattgctgagaaggccgagaagagcgacaccctggaaattcacagcaaagtcagttcgtgcccgtttcaagaataattcgattgcatttctaattgtttgggctgatgacgaggacaaacgatgcaagtggtggtgggaagcttccccggaagcgcttctatcgcgccagggcacacagcaacccgctcagcgactcgcacttcccagtcccaatatcgcctgaagaggtcgatctctcacagcactacccgcggtacttccctgctgacaagggcagcgacggtgaggaggctgcagcgccacaacagatccgcttcgccgatgtggggtgcggatttggcgggttgcttgtagggctctcgcctctcttcccagatacgctcatgattggcatggagctcagggacaaggtaacggagtatgtgaaggagaggattttagctctaagaggggcaaacccaggacagtatgataacatatccgttgtccgcacgaactcgatgaaatacattccaaattacttcagaaaggctcagctcaccaagatgttcttcctgttccccgatccccacttcaaggagaagaaccacaggaggagggttatcagcatgcagctgttagacgaatatgcttacgtgatggaagtgggaggaatcatatataccatcactgatgtcgaggagctcggagagtggatgcggtcgtgtctagagaaacacccgttattcgaaaccgttcctgaggaagagattaaggctgaccctgttttcaaactactgtctactgccaccgaagaaagccagaaggtggcaagaaatggaggacagactttctatgccatcttcaggcggatctccttacaagaagaataagtcgcttagagattataagctagatcgtgttacgtgtgtttgtcagttttatacattttttttttaaaaaaatttagcagtaggtgtacttggtactaaatattgcaatgttgctttgcaaggttctgcagacccagttattttgttcagctttaaaagagtttaccaagacgattgtgttgagtttaccaaaataatattccattgtatagagccatgttcctaatggcatagatgccaggatc

SEQ ID NO: 125248 - DNA, 1188 bp, Zea Mays
ctcgggcagcttctcccgtgcccctcgcgtgcgctctacgactgggcggccgccggcaccctacaccagttgcccaggtctctgtcttcgggaccttccccggcgacgagcatccaccaggtcattgctgagaaggccgagaagagcgacaccctggaaattcacagcaaagctgatgacgaggacaaacgatgcaagtggtggtgggaagcttccccggaagcgcttctatcgcgccagggcacacagcaacccgctcagcgactcgcacttcccagtcccaatatcgcctgaagaggtcgatctctcacagcactacccgcggtacttccctgctgacaagggcagcgacggtgaggaggctgcagcgccacaacagatccgcttcgccgatgtggggtgcggatttggcgggttgcttgtagggctctcgcctctcttcccagatacgctcatgattggcatggagctcagggacaaggtaacggagtatgtgaaggagaggattttagctctaagaggggcaaacccaggacagtatgataacatatccgttgtccgcacgaactcgatgaaatacattccaaattacttcagaaaggctcagctcaccaagatgttcttcctgttccccgatccccacttcaaggagaagaaccacaggaggagggttatcagcatgcagctgttagacgaatatgcttacgtgatggaagtgggaggaatcatatataccatcactgatgtcgaggagctcggagagtggatgcggtcgtgtctagagaaacacccgttattcgaaaccgttcctgaggaagagattaaggctgaccctgttttcaaactactgtctactgccaccgaagaaagccagaaggtggcaagaaatggaggacagactttctatgccatcttcaggcggatctccttacaagaagaataagtcgcttagagattataagctagatcgtgttacgtgtgtttgtcagttttatacattttttttttaaaaaaatttagcagtaggtgtacttggtactaaatattgcaatgttgctttgcaaggttctgcagacccagttattttgttcagctttaaaagagtttaccaagacgattgtgttgagtttaccaaaataatattccattgtatagagccatgttcctaatggcatagatgccaggatc

SEQ ID NO: 125249 - DNA, 2779 bp, Zea Mays
gagaccagtggcgcggcgtctcccatcccccgcccccaaatttgttgcggcgggagagccggagaggaggcagctccacagaaacagagagcgcataaccggcggcgttggcggcgatgaggatcgaggaggtgcagtcgacctcgaagaagcagcgcatcgccacccacacccacatcaagggactcggcctcgacgccaatgggatggcgattgcgttggcggcggggttcgtgggccaggcggcggcgcgcgaggcggccgggctggcggtcgacatgattcgccagaagaagatggccggccgcgcggtgctccttgcgggtccgcccgccacgggcaagacggcgctagcgctcggcatagcccaggagctcggcagcaaggtccctttctgtcctatggtaggatcagaagtgtactcctcggaggtcaagaaaactgaggtgctgatggaaaatttccgtagagctataggtttgcgtataaaggaaaacaaagaggtttatgaaggagaggttactgaactttccccagaagaggctgagagtacaactggtggatatgcaaaaagcattagccatgtaatcatcagcttaaagactgttaaagggactaagcaactgaagttagattcttcaatttatgatgctctgatcaaggaaaaggtggcagtgggtgatgttatatacatcgaagcaaatagtggagcagtgaaaagagttggtagatgtgattcttttgctacagaatacgatcttgaagctgaagagtatgttcctatccccaaaggtgaagtccataagaaaaaagaaattgtgcaggatgtcacacttcatgaccttgatgcagcaaatgctcagccacaaggtggccaagatattttgtcccttatgggccagatgatgaaaccacgaaagactgaaatcaccgaaaaactacgccaagaaattaataaggtggtaaatagatatatcgatgaaggaattgcagagcttgtacctggtgttttgttcattgatgaggtccacatgttggatatcgaatgtttttcttatcttaaccgtgcattggagagcccattatcaccaatcgtgatacttgctacaaataggggaatatgtaatgtaagaggaactgatatgacaagtccacatggtataccggtggatcttctagataggctggtgattattcggacagagacatatggccctactgagatgatacagatattggctatccgagcacaagtggaggagattgatatggatgaagaaagtcttgcttatttaggcgagatcggacagcagacatctttgagacatgctattcaattgatatcacctgccagcgtggtctcaaagactaatggaagagagaaaatctgcaaggctgatctcgaggaagtcagtgggctctatttggatgccaaatcctcggctcggctgctccaggagcaacaagaaagatacatcacctagatttggatctcctgtcgtggaagtctcgaagagaatgtagttgccagctcgaaagtcatctagtgcattgatctgcttcacaggttcatagtctactggtcttggagcgagcacatttcggggggaacggcttgaattttgcagtgcctgcttgtgttagtctccagagaagacttggttccggcatattgctcgttcacgcactgttcgctgattagattggtcaccggtgcaggaattgccgtgtgtgtttttatcttgctcatcggtgtccggagtctgcctccacgggttgtattggcccgaaccctatctttgtaaccatggataatggataggattcttacagaatgcaacttgcatggctttattatttctaaatgtccataaagcataacgaaatgtttctacaacatataagacctcctgcccaaattaaaattcgttttagattagataattagtaggtacatacaatacttgatatatatgttttatgtgtcttgatttattatcatccgtttgaatatatagatataaaaagagctaaaacgactactcctttagttcaaaaatgaactagcggacgttcattttttctttagggtcaaaaatggaaaaaaaaaacttagtaatgatagaaaattaactaataaccaacctattgcttcgtattgtcgagatcctaactaagaaatagtcactattgcttcgtattgtcgagatcttaactaagaaatagtcactatgtgaataaatacatctatcagaaatgagtagatctatcatatagttgtagcatccacattagacaaaatgaactaaagaagaatttagaatttaagtatctttcagtatctaagtataaatactaagaaaaaaaaacagaaagaaggattgatttgtggcaatagatgtctttcacatacaactagaaaaaagtaatttcctttttgaatggcagttccaaaaaaacgtacttagatgtcaaaaaagcgtattcgtaaaaatctttgaaaaagacttatttttccatagtacaatcttattctttagcaaaatcaagatcattttctaggggcaacgagcatccaaaaccaaaaggtttttttctgcgcaacaagcaaacaaataataagattttaaaataatctgaattgaactatccaaaagaaatttcaattatttaatatgaatgaataattcggattaattaataaatgtacttttatgtgtcgaattcctcggtacaatattcttagaacgaatccctccattatcattatattgaacaa

SEQ ID NO: 125250 - DNA, 2816 bp, Zea Mays
cacatacaacttcccacaggagaccagtggcgcggcgtctcccatcccccgcccccaaatttgttgcggcgggagagccggagaggaggcagctccacagaaacagagagcgcataaccggcggcgttggcggcgatgaggatcgaggaggtgcagtcgacctcgaagaagcagcgcatcgccacccacacccacatcaagggactcggcctcgacgccaatgggatggcgattgcgttggcggcggggttcgtgggccaggcggcggcgcgcgaggcggccgggctggcggtcgacatgattcgccagaagaagatggccggccgcgcggtgctccttgcgggtccgcccgccacgggcaagacggcgctagcgctcggcatagcccaggagctcggcagcaaggtccctttctgtcctatggtaggatcagaagtgtactcctcggaggtcaagaaaactgaggtgctgatggaaaatttccgtagagctataggtttgcgtataaaggaaaacaaagaggtttatgaaggagaggttactgaactttccccagaagaggctgagagtacaactggtggatatgcaaaaagcattagccatgtaatcatcagcttaaagactgttaaagggactaagcaactgaagttagattcttcaatttatgatgctctgatcaaggaaaaggtggcagtgggtgatgttatatacatcgaagcaaatagtggagcagtgaaaagagttggtagatgtgattcttttgctacagaatacgatcttgaagctgaagagtatgttcctatccccaaaggtgaagtccataagaaaaaagaaattgtgcaggatgtcacacttcatgaccttgatgcagcaaatgctcagccacaaggtggccaagatattttgtcccttatgggccagatgatgaaaccacgaaagactgaaatcaccgaaaaactacgccaagaaattaataaggtggtaaatagatatatcgatgaaggaattgcagagcttgtacctggtgttttgttcattgatgaggtccacatgttggatatcgaatgtttttcttatcttaaccgtgcattggagagcccattatcaccaatcgtgatacttgctacaaataggggaatatgtaatgtaagaggaactgatatgacaagtccacatggtataccggtggatcttctagataggctggtgattattcggacagagacatatggccctactgagatgatacagatattggctatccgagcacaagtggaggagattgatatggatgaagaaagtcttgcttatttaggcgagatcggacagcagacatctttgagatcttattctctttgcagacatgctattcaattgatatcacctgccagcgtggtctcaaagactaatggaagagagaaaatctgcaaggctgatctcgaggaagtcagtgggctctatttggatgccaaatcctcggctcggctgctccaggagcaacaagaaagatacatcacctagatttggatctcctgtcgtggaagtctcgaagagaatgtagttgccagctcgaaagtcatctagtgcattgatctgcttcacaggttcatagtctactggtcttggagcgagcacatttcggggggaacggcttgaattttgcagtgcctgcttgtgttagtctccagagaagacttggttccggcatattgctcgttcacgcactgttcgctgattagattggtcaccggtgcaggaattgccgtgtgtgtttttatcttgctcatcggtgtccggagtctgcctccacgggttgtattggcccgaaccctatctttgtaaccatggataatggataggattcttacagaatgcaacttgcatggctttattatttctaaatgtccataaagcataacgaaatgtttctacaacatataagacctcctgcccaaattaaaattcgttttagattagataattagtaggtacatacaatacttgatatatatgttttatgtgtcttgatttattatcatccgtttgaatatatagatataaaaagagctaaaacgactactcctttagttcaaaaatgaactagcggacgttcattttttctttagggtcaaaaatggaaaaaaaaaacttagtaatgatagaaaattaactaataaccaacctattgcttcgtattgtcgagatcctaactaagaaatagtcactattgcttcgtattgtcgagatcttaactaagaaatagtcactatgtgaataaatacatctatcagaaatgagtagatctatcatatagttgtagcatccacattagacaaaatgaactaaagaagaatttagaatttaagtatctttcagtatctaagtataaatactaagaaaaaaaaacagaaagaaggattgatttgtggcaatagatgtctttcacatacaactagaaaaaagtaatttcctttttgaatggcagttccaaaaaaacgtacttagatgtcaaaaaagcgtattcgtaaaaatctttgaaaaagacttatttttccatagtacaatcttattctttagcaaaatcaagatcattttctaggggcaacgagcatccaaaaccaaaaggtttttttctgcgcaacaagcaaacaaataataagattttaaaataatctgaattgaactatccaaaagaaatttcaattatttaatatgaatgaataattcggattaattaataaatgtacttttatgtgtcgaattcctcggtacaatattcttagaacgaatccctccattatcattatattgaacaa

SEQ ID NO: 125251 - DNA, 2763 bp, Zea Mays
gtcgaggcggcagcacatacaacttcccacaggagaccagtggcgcggcgtctcccatcccccgcccccaaatttgttgcggcgggagagccggagaggaggcagctccacagaaacagagagcgcataaccggcggcgttggcggcgatgaggatcgaggaggtgcagtcgacctcgaagaagcagcgcatcgccacccacacccacatcaagggactcggcctcgacgccaatgggatggcgattgcgttggcggcggggttcgtgggccagaagaagatggccggccgcgcggtgctccttgcgggtccgcccgccacgggcaagacggcgctagcgctcggcatagcccaggagctcggcagcaaggtccctttctgtcctatggtaggatcagaagtgtactcctcggaggtcaagaaaactgaggtgctgatggaaaatttccgtagagctataggtttgcgtataaaggaaaacaaagaggtttatgaaggagaggttactgaactttccccagaagaggctgagagtacaactggtggatatgcaaaaagcattagccatgtaatcatcagcttaaagactgttaaagggactaagcaactgaagttagattcttcaatttatgatgctctgatcaaggaaaaggtggcagtgggtgatgttatatacatcgaagcaaatagtggagcagtgaaaagagttggtagatgtgattcttttgctacagaatacgatcttgaagctgaagagtatgttcctatccccaaaggtgaagtccataagaaaaaagaaattgtgcaggatgtcacacttcatgaccttgatgcagcaaatgctcagccacaaggtggccaagatattttgtcccttatgggccagatgatgaaaccacgaaagactgaaatcaccgaaaaactacgccaagaaattaataaggtggtaaatagatatatcgatgaaggaattgcagagcttgtacctggtgttttgttcattgatgaggtccacatgttggatatcgaatgtttttcttatcttaaccgtgcattggagagcccattatcaccaatcgtgatacttgctacaaataggggaatatgtaatgtaagaggaactgatatgacaagtccacatggtataccggtggatcttctagataggctggtgattattcggacagagacatatggccctactgagatgatacagatattggctatccgagcacaagtggaggagattgatatggatgaagaaagtcttgcttatttaggcgagatcggacagcagacatctttgagacatgctattcaattgatatcacctgccagcgtggtctcaaagactaatggaagagagaaaatctgcaaggctgatctcgaggaagtcagtgggctctatttggatgccaaatcctcggctcggctgctccaggagcaacaagaaagatacatcacctagatttggatctcctgtcgtggaagtctcgaagagaatgtagttgccagctcgaaagtcatctagtgcattgatctgcttcacaggttcatagtctactggtcttggagcgagcacatttcggggggaacggcttgaattttgcagtgcctgcttgtgttagtctccagagaagacttggttccggcatattgctcgttcacgcactgttcgctgattagattggtcaccggtgcaggaattgccgtgtgtgtttttatcttgctcatcggtgtccggagtctgcctccacgggttgtattggcccgaaccctatctttgtaaccatggataatggataggattcttacagaatgcaacttgcatggctttattatttctaaatgtccataaagcataacgaaatgtttctacaacatataagacctcctgcccaaattaaaattcgttttagattagataattagtaggtacatacaatacttgatatatatgttttatgtgtcttgatttattatcatccgtttgaatatatagatataaaaagagctaaaacgactactcctttagttcaaaaatgaactagcggacgttcattttttctttagggtcaaaaatggaaaaaaaaaacttagtaatgatagaaaattaactaataaccaacctattgcttcgtattgtcgagatcctaactaagaaatagtcactattgcttcgtattgtcgagatcttaactaagaaatagtcactatgtgaataaatacatctatcagaaatgagtagatctatcatatagttgtagcatccacattagacaaaatgaactaaagaagaatttagaatttaagtatctttcagtatctaagtataaatactaagaaaaaaaaacagaaagaaggattgatttgtggcaatagatgtctttcacatacaactagaaaaaagtaatttcctttttgaatggcagttccaaaaaaacgtacttagatgtcaaaaaagcgtattcgtaaaaatctttgaaaaagacttatttttccatagtacaatcttattctttagcaaaatcaagatcattttctaggggcaacgagcatccaaaaccaaaaggtttttttctgcgcaacaagcaaacaaataataagattttaaaataatctgaattgaactatccaaaagaaatttcaattatttaatatgaatgaataattcggattaattaataaatgtacttttatgtgtcgaattcctcggtacaatattcttagaacgaatccctccattatcattatattgaacaa

SEQ ID NO: 125252 - DNA, 1004 bp, Zea Mays
ttttttttagtttcttaggcagtatcaaatttggataaccatataagaattttcagctggtttttaattttatatgatgacaggtggtaaatagatatatcgatgaaggaattgcagagcttgtacctggtgttttgttcattgatgaggtccacatgttggatatcgaatgtttttcttatcttaaccgtgcattggagagcccattatcaccaatcgtgatacttgctacaaataggggaatatgtaatgtaagaggaactgatatgacaagtccacatggtataccggtggatcttctagataggctggtgattattcggacagagacatatggccctactgagatgatacagatattggctatccgagcacaagtggaggagattgatatggatgaagaaagtcttgcttatttaggcgagatcggacagcagacatctttgagatcttattctctttgcagacatgctattcaattgatatcacctgccagcgtggtctcaaagactaatggaagagagaaaatctgcaaggctgatctcgaggaagtcagtgggctctatttggatgccaaatcctcggctcggctgctccaggagcaacaagaaagatacatcacctagatttggatctcctgtcgtggaagtctcgaagagaatgtagttgccagctcgaaagtcatctagtgcattgatctgcttcacaggttcatagtctactggtcttggagcgagcacatttcggggggaacggcttgaattttgcagtgcctgcttgtgttagtctccagagaagacttggttccggcatattgctcgttcacgcactgttcgctgattagattggtcaccggtgcaggaattgccgtgtgtgtttttatcttgctcatcggtgtccggagtctgcctccacgggttgtattggcccgaaccctatctttgtaaccatggataatggataggattcttacagaatgcaacttgcatggctttattatttct

SEQ ID NO: 125253 - DNA, 1333 bp, Zea Mays
ttggcggcgatgaggatcgaggaggtgcagtcgacctcgaagaagcagcgcatcgccacccacacccacatcaagggactcggcctcgacgccaatgggatggcgattgcgttggcggcggggttcgtgggccagaagaagatggccggccgcgcggtgctccttgcgggtccgcccgccacgggcaagacggcgctagcgctcggcatagcccaggagctcggcagcaaggtccctttctgtcctatggtaggatcagaagtgtactcctcggaggtcaagaaaactgaggtgctgatggaaaatttccgtagagctataggtttgcgtataaaggaaaacaaagaggtttatgaaggagaggttactgaactttccccagaagaggctgagagtacaactggtggatatgcaaaaagcattagccatgtaatcatcagcttaaagactgttaaagggactaagcaactgaagttagattcttcaatttatgatgctctgatcaaggaaaaggtggcagtgggtgatgttatatacatcgaagcaaatagtggagcagtgaaaagagttggtagatgtgattcttttgctacagaatacgatcttgaagctgaagagtatgttcctatccccaaaggtgaagtccataagaaaaaagaaattgtgcaggatgtcacacttcatgaccttgatgcagcaaatgctcagccacaaggtggccaagatattttgtcccttatgggccagatgatgaaaccacgaaagactgaaatcaccgaaaaactacgccaagaaattaataaggtggtaaatagatatatcgatgaaggaattgcagagcttgtacctggtgttttgttcattgatgaggtccacatgttggatatcgaatgtttttcttatcttaaccgtgcattggagagcccattatcaccaatcgtgatacttgctacaaataggggaatatgtaatgtaagaggaactgatatgacaagtccacatggtataccggtggatcttctagataggctggtgattattcggacagagacatatggccctactgagatgatacagatattggctatccgagcacaagtggaggagattgatatggatgaagaaagtcttgcttatttaggcgagatcggacagcagacatctttgagacatgctattcaattgatatcacctgccagcgtggtctcaaagactaatggaagagagaaaatctgcaaggctgatctcgaggaagtcagtgggctctatttggatgccaaatcctcggctcggctgctccaggagcaacaagaaagatacatcacctagattt

SEQ ID NO: 125254 - DNA, 2682 bp, Zea Mays
atggacggcggcctcgacgacgagtgggaagctagcttcctcgacgaggtgatacgcgcgacggatgaggctgaggctgtcgtctcccgcaaccctaaccccactcccacccccgcgcccgctcccatccccacgtattatcccttggccgccgcccccgtctcctacctcccagcctcttcggtctcctacatccctgccgcttcgcacctccgctccgcgatcagcttctcccctccacgggacctctcccagaggccgccgctcccgccgccgaccgctgccaccagcaccagggatgcgctggcgacgggggccgacgtcggtcgcgacttctctcctccgccccagctctcccagcgcccggcggctgatgagggcagcctcgtggccttcgcggcgtcgagctcagccagcgaccgccgcttcattagcacgggctgtggagaagcgggcgcgaagagggaagcgagggagatcgagaggctcaaaagagagctggaccgtgtctccaaggaaaggaatgaattgaaaaatgaatgcaccgcgctgaaaaaggacagaacaaagaaagatcttcaaatcaaagctaaagaagcggagattcaaaatctgaaaaaagctaatgtcagctccatgaaagatgtttgcagtgcagggatgaacattgatcagtcctttcacgcccctgcaaatgaggctttgcatactggggtttcttctaggcgaacagacaagatgagtggcaaagataaggatgcccattcattgcgagacgatctctatctaaagcaagggcatcaaactgatttacttgaggctttagaactgaggcgtcgcaccatgattgataacggaatgagtacatctggagtagtgtctctggaggaggacacccattttgaaccaagaaacgctacatgcaaggaaattaaggcgataggagtccagacagataacacatctgacaatgaacatcttgactgcaagaaattattggttgagcgtatatctggtaacctacgtgcaatgtggggcatgtcacctaacagtttatcaagcaggaatttgatatcaaagatcaatgtttcttgttcagaagaaattttgtcacttctccagcatacgagattgtcagacaactgtgaaccctcttctcaagcaatctcctccatgaatgaagctatttcccaactgtatgacacgttcattaagatgaatagtgggaagatgtcaatacaaactttccttgaagcattgctaaatctatgtgcttttgatgatgctgctatagtcagtagaactttgagggtattcctcaaagttttacagcacttactgcaacatggagccaagtctagtgaaagtgtaccctcaggaacaatgtttctgttgaaccatatgttaacgtactcatggagaacaaccacaaagactgttcgaccttgttgagaccagtggatgcagaagattcattgagactgcataatatgtttcttccttttactttctggagttcacttttcactggcatgcttcaaattggggtcaagtactcacaagagacaattcgtactgatgcattatccataatgattctcattgtaaggacaacagatcccatagaggaacgccagaaattcggatttacttcagtaatgacgagattgcatctgctattgcagaaagagaacggattgcttgttaagaagcattctgtgcgtctacttttcttgcttctgaattgcccagtgatgttgaagttgctgtgtagtggaggcaaagacggctccaaacagatgggatcggaagcttgtgaaagtaatagatcacaagaagtcataagctcagttcttgtggatttatctgattgtttgacatgtggggaaacttgttctctggggattgagctttgcaggctcgtcatcattctgctagcttatatagcttccagtggcaaattgggatatgaggtgcttttagttccagtgagtgcccgtggtgccagttttttggagatgataatggaagtccttgcatcgcagatgcaatatgaaacacgagagttactaaaagaaagatgtttggtgatgagagaagctcttatcctgctaaaccggctggcatcacacgcaaactattcgaaaccaaccttggaagtgctgacgagaagcaagttatgcgcgacctggacgatcgatgttgcgaaccggctgccccatacgtggatggcaaatgatctcgcggagctggcccagaaattcaggtcgcgagtgtatgctttcatagaggagaaacccttgacaagcgacggtaccaatctgggcgcttctaataagagatgagatacccaggactggcgcagcctgaggtagcttgggtagtaatatggaaagcatattgctagcggctcgacaagtttagtttcttttttttcccttactgacactagggttttgtttaggagttagactggcttggctggggcgagtcgctagcttttgctggcggtgtacagaggcgaatgcttcctcgccatttttgagggggagggagaatgtagttgtactacggcaagtccttgggaacgtacatcataattgttgtttggacatcatctcatggctttggcattgaccatcgcagcttttttgaattgaaagttttagtttttttcttacc

SEQ ID NO: 125255 - DNA, 157 bp, Zea Mays
ccgtgcacgtgctcgtgcagctccacctcgcctggtgcggcaagctcattcggtatgcccgcgccgtcgcctcgcactacgtctgctccgtcaagggcatctgctttgacctcttcatcattaggggtggaaacagagctttcaatgcatgctggag

SEQ ID NO: 125256 - DNA, 1742 bp, Zea Mays
taacttaaaaaaagaaacatgtccccttccctccgcagcgcgcgcgctctctcccaccctctttcccgtgggccgtggccacgaccgcgcgaccgccgccgccctacgccaggtgccctggtcggtcccttcgagccaggtcgtcgtcgtcccttcgcagccgacgagcgcccgtcagcctggaggaccactcgatgtaatcgaagacaccgggggttcacagctgtttttttgtgtgtgaatttacgttcctgaaaggttcgcttgcgttacacgctcgggaatggattactacaacatcctcaaggtgaatcgcaatgcgaccttggaggacctcaagaagtcgtaccggcggctcgcgaggacgtggcaccctgacaagaatctgactggaggggcggaggctgaggccaagttcaagcagataaccgaggcctacgaggtactaagtgatccagagaagcgtgcaatttatgatcagtatggtgaggagggcttaaaggggatgcctccacctggttcccagagccggtcctccacaactgctggcccaagtggtccgagtaatttccattacaatcctagtgacccagatgatttctttgctgagttcatggcaagcaacaagacttactcctttgaccatgaccggaggcgattccagccaaggtcacattggacttcagccaggaacagtagaagtgaagctccttctggttcacagaaagagaatggtgccagtacaagcaatatagaaaagccaccacctgtggagaaaacattactttgtactcttgaagagttgtataatggaacaaaaaggaaaatgaagatcactaggaatgttgcaaagccagatggaagaatagaagttgaaacagaggtcttggcagttgaagtgttacctggctggaaaaagggaaccaagattacattccccaacaaaggcgataagctacatggccagttagcacaagacctgacctttgtcctcgattcgaagccccatgatgtgtacaatcttgaagggaacaaccttcttgtaaagcaggtgatccctctggtagatgccctcgctggggcagagataaacctcacaacccttgatggtcggaatctgcctgtgagggtggaggaagtggtgcgccctggatacgaagttgtgctggagaacgaagggtggccgatcaggaaggaacctgggaagaagggaaagctggtaatcaagtttgatgtgaccttcccgatgaggttatcgccgtcacagcgggcagccatcaggcgaatcatgggcagctaactgggggaagagaaagagaaggggcattgcattcttttacatggagaaggaacagtctctacattggcactagaattcagatggatagttggaacttggaagtaacttgagtcaatcagataggcatttccatggttaaatatcccgttactaatcctacctatttgctttggttaattgaatgtgacctagttttttttttcgttttctttgttatatcgtgtgaatccgtagaaaaggtgggtgatttcgaggataatgtaagctgatttttccatccgaattttttctggggcatgtgatggttttttcattggaaaactgtagcatacccgggaaatggaaggaaaggaaaaaaagatagaaaagacaagaaaggagcctttaagcaaatattcatgtgcctctttcttgtatcatgtatcagttgggcagggttcat

SEQ ID NO: 125257 - DNA, 1339 bp, Zea Mays
actcctcccaccccagtccccacgcacatatccatccacacatattttccatggccatggcaaccagttatggctccatggctaaccctccaattacctccagaactccctttctcagtaaacaagcctctaattggatacctgctacaatcagcaatggcaacggcactggtggcatgttcactgtcgcaagcagaaagtcgaggaatgggttccaattttgtgctgtcactggagacccaggctctcgcaatgtgtctgatgtaaacttcccaagtgattacacagaacttctgacgcaggctaaagaagctgctgaatcagctttcaaggatggaaaacagctactggaaatcgagttccctacagctggactacaaaccgtaccaggtgatggcgaagggggaaatgagatgactggaagcatgcttctcattagagaattttgtgatcgcttcgtacctgcagagaaagcaactcgaaccagagtattcttccctgaggcgaatgaggtttcttttgcaagacagtcagcctttgaaggatgttcgctgaagctagattatcttacgaaaccatccttgttcgaagattttggtttcacaacgaaagtgaaaatggcagatcgtgtgaaaccacaagacgagacattcctcgtggcttatccttacttcaatgtcaatgaaatgctcgtggtcgaagaactttacaaggaagcagtagttggcaccagccggaaattgataatattcaatggagaactagaccgaatcagaagtggatattatccggcgttcttctacccaaaacttgcagagctttccaaaacattcctcccgaagctggatacggtttactatatccacaatttcaagggagctaaagggggaacgcttttcaggtgttaccctgagccttggaaggtcctgaggaaggcgtcgtctgggaactacgtctgcctgcatcaacaagaggagatgccttcgttgaaggaagtggccctcgacatccttccttctgtatagctaggatcttcacttctttggttcatagctgtgctgactggtgctaagttccattacaaggcaatctatcatttcgttgcaatttctcgccctgaaatattcttttgggtagactagaccgtctgagtctcagaagtcagaccaccccgtggggaaagcctcggcaaagtctgacacgtgctcatgctccggctgtccctgccacaaaggcgttcttgtaccagtggaagaccttgtctgaatgtgcaagtggataaacgttgatctgacaggggtggacggtaatggaatagaaacactgcatttacattgcc

SEQ ID NO: 125258 - DNA, 1046 bp, Zea Mays
acaatcatggaactgtcctaacagacaagatggtcccaatcacagcaactggagaccacacagcctctaattggatacctgctacaatcagcaatggcaacggcactggtggcatgttcactgtcgcaagcagaaagtcgaggaatgggttccaattttgtgctgtcactggagacccaggctctcgcaatgtgtctgatgtaaacttcccaagtgattacacagaacttctgacgcaggctaaagaagctgctgaatcagctttcaaggatggaaaacagctactggaaatcgagttccctacagctggactacaaaccgtaccaggtgatggcgaagggggaaatgagatgactggaagcatgcttctcattagagaattttgtgatcgcttcgtacctgcagagaaagcaactcgaaccagagtattcttccctgaggcgaatgaggtttcttttgcaagacagtcagcctttgaaggatgttcgctgaagctagattatcttacgaaaccatccttgttcgaagattttggtttcacaacgaaagtgaaaatggcagatcgtgtgaaaccacaagacgagacattcctcgtggcttatccttacttcaatgtcaatgaaatgctcgtggtcgaagaactttacaaggaagcagtagttggcaccagccggaaattgataatattcaatggagaactagaccgaatcagaagtggatattatccggcgttcttctacccaaaacttgcagagctttccaaaacattcctcccgaagctggatacggtttactatatccacaatttcaagggagctaaagggggaacgcttttcaggtgttaccctgagccttggaaggtcctgaggaaggcgtcgtctgggaactacgtctgcctgcatcaacaagaggagatgccttcgttgaaggaagtggccctcgacatccttccttctgtatagctaggatcttcacttctttggttcatagctgtgctgactggtgctaagttccattacaaggcaatctatcatttcgttgcaatt

SEQ ID NO: 125259 - DNA, 637 bp, Zea Mays
ttgagagagctgactgaactggaattcccgtggttctcagtctttatgcgtcggtctgccacaactgagtccagtgatgatggtgacagactgtcatctgtttgtagggctgatgcctgagaatctaatggtgtcccgatggcataactgctcagagtgttgatcaaagctggggtttccacagaagcaacctggaatgctccgtgctgcaactggggaggaggaggcaggagtggttggttggaggagcggaaggtggtgccatcgggttgcacggtccagccggcggcgcgggcgagggcggcgaggacgtcgttcatgtcggcgcgcgcggggagcgggaagttgccgtgctgccggagcccggccagcatgcggccagtgatggcgcgccggtgccgctcccgcagcttcgtccgctccttctcccgctcccgctcccgctcctgcacacctcgcctccgcggcgaagcccccgccgcgggagcgggagcggaggcgaacccgcgcggccgccgctgcggcggaggtgacgggtacgactccccgtcgcggtgcagcgggtgcttcatggccctgggtcgcttccacccgccggcgccggcgccgatctgagcccgcgagctacaggcgccgc

SEQ ID NO: 125260 - DNA, 2604 bp, Zea Mays
atggcgggatgcctcgccaagaacggcggactcctgctcttctcccaggcgcgcggccagcccccggccatttcgcgaggaggtcgacaccaagacgaagacggcgaagacggtggctgctcctggtgcgcgagttgcttcaaatttggtaggtccggcgacgcatgcctggcagctcgtggaatccaggaaatcgaagcgacggcgcctgaagttggaacgacagtggaaacagctccctcggcacctgaccacttcgtctcccattgtgctgagaagacgaggtgcttccgttgccgtgagctggggcatcggtcctttgactgcccactgattaaagagtcggtctggcataggatttctcctactgcggactcagggagcagtggaattccttctcggcctgtggctcttcaacctgaggctcgagtttcggtctggaataggatctctgtggtgaaagctaagccgaagaaactggtgtggagacggaaggcccatcaacaccacctgcaggtggcaggtgctgttcctgctactccttgcaaagctgcccttatggcgggaaatgtctggggccccgggtctcgaccgttgggtggtggttcaagggattctctgcgcgctgatgagggcaatgccgttctgggtgagggctccggtgttggggctggccggcctcgtcggcgtcgaccgcgcaaacgtcggcgtccgactagaaggcctggaagtccaacgtcgggcaactccctggaaggcgatatgcggcaagatcgagacattattgatccacaggcccccaccagtgctatctcaccctgcattatgggttggagcaacaagctttcagcttctaaagatgagctcaggactgcggtggtgttaaccattatcagcgaccttgtgattcctccggtggagattgctgcgcttctggctccaagattgaatatcaatgaaaattcactggtcatccgcaggatctctgcaagtaatctgctgctgattcttcctgatctggccatggcagacctcctagtcagtcgttggcctctcatcagaactgcctctttttctgttatctgtaagcgttgggcaaggtttcttggcgcctcgggagtcaccttgccattcttggttgatctggagattggaggcatccctgttcatgcctgggaaactagtacagtggaacatattcttagcccctatgcttggattcatcaggtgcatcaggagaccttggcactgcaagatttgtcctgctttcgatgctctgcttggtgtactgatccgtctactattcctgcttcacgtgacttgtggattgttgagtctgttcaggttgttgagggcaatgttggagaaactatggctctgagctacccaattactattagtttttctgttgccttccgaccgaatgattccaactcgcagtctggtcttcctatggattctgtgaatgatggtgatcaaagtaatggctcctatggacatgccaatcagggactgtctcaggggcttggtgcatctgggggtgggagatctagcccattcctgagggatgggcgtaattcatccttgggacgcgcagccagagaccgttcaagggcttgccagccaccaaccaccaaccaggggacagcttgccagatatcgtgcattgacgacacttctgaattacataaaattgctgacccacttctggattgtcttcttgctgattgggagactcgtcattcgtccatgtttcatcaaccgtccaggattttcattgatcccagctgtttggatttaacggtggatctaggaggttttgggccacaatcttcaaactggttagggatttctacagccagtcgggattggaatgggctgcaattatgcccacctataaattatttgaagccatttctaagagtaaatctaagtgggttttctttgccatctgggatggtctatggtggtgcaacaacagtcaaaatcttctatcaacggcgtcgaaaaaccactgctggaaataatattgctacaattaatgatgatgataatgcggaggctcatgctttgagattgggcttggatgttgatgtgacagcgaggccattattattagagcacattggaacagcgaggagggctgatgcagactcaactgttccacttaggcctgaggtggtagcctctgatgacagttccaggcagaatttaggggattcatgtgagtcctcattggatccattatcttctatggaatctagaagaagatcattcatggctaagataacaatggcaccttcacaactccttgctgctcctgtcctccccaagcggtcaaggggtgccacaaagcatggtactgcgctacgacggagccgacgggttgcaggggcaggggtggaatttaacatgcaggatctggagaacagagccacaaaacatgtaatgcggactctgaaagtcatcacagagaatgcaagcatcaaccagcaagctgttgaggactatgagaatctttttcagcatcccttaactcaaagtcatgttgaagcgttagcggctctctttggatgggagactccggggaatctcttcccgtag

SEQ ID NO: 125261 - DNA, 3342 bp, Zea Mays
agcggcccatgcgctctccctgcgcgcctgggcccacttccatcccccaccccaatatgcatatgcccgccctccctgcgcggccgggcccatttgcatccccacctcaatatgctctgtgcaccgggcccacttcgacccctcccaacctaaatcgctcggccgcgagtccccgctccccaactataaaaaacgccccccctccagtctccaccagaccaccacggcaccagcagcaccacccagttaaccaccacgcctctctctctctctctcttaccgggaagcaagcaaccgcctccgccgcgccgtctcgggctcgcttggtgcagatcgggacccgccgcccggccgacgggacggatcccgccttgcatcaagtgaatcggagccggcgcagcgatacagcgaccgacccccgccgccgtccgccacctgcgctgctcttgagtaccccccatgccgtggcctgcttgttgcgtgtttttttgtttttctgatacgggtcgtgcgcgtgttgctgtggttctgtcttgtgtgacgccgtgggaattattaggcgtcgtggggggtgagggggtctctgctctagattaaacaacccggatctggatctgacgcgtggtttccgtagtttgatccgacgtagtctgggtgactacgttctggtggtttaccatgatccatccctatatccgctagactctgctagtctgctttagggggtgtttggtttctagggactaatttttagtcactacattttattccactttagttacaaaattaccaaatgtagaaactaaaactctattttagtttctatatttgtcaatttatatactaaaatgaaacaaaatgaagggactaaatattagtccctagaaaccaaacatgaccttaatttccaactgcaattttcttctgttctggtggtggtgtcagggaggcaggcggcttggatttgcctgcggggttgtagggcggtcatgttgatgcagcccctgtccttggtcacgggggaaaccatgccaggctggactgaactgcagagagattaattgatttgactgcctttgttgctagggatgtataccactacgagctctgtaaggtagtagaaattatggggcagcaacagcaagcatgctcacatgatgcttgtgaattatggtcagcatggtttctgtgacagatgctaatcatgaaaactggggtcgacctgattgattctcagacgccatcaattataggtttgtgttaagtaaactagttttttttaacaaggggcataaccccgcaccttattaccaagatacgtaagcctaatcctggatcaattaggctactgatttgggcttcgccttttttttgaattcttgtggacctactccatgtctgtatatggatgggaaatgtacaggttgtttgctgtgaacaactttgccttgtctgaaatggtgtctgtactgtaatactttcctgatgaacgaatataaccatgtgaggtgtggtgatgttagcggaatcctttctgggtcatcaactcttataacctagactagaatctggtgaagatgttgcatgcgtgtttactacttgagtataccatggcagctagaattggcaagggctagtttggagactccattttttttcaaatggattcctgtttttaaaatgttgcatgcttgagatttaagctaagacggaccatgattgagattccagctgtcggatccgtatcatttacagaataatataaacctagcggtcagttcagtgattaggtgtccagcaggaccaggaatatatgctcggggatcaagattcgttttccatgaggaagagcgggggaagggacaaactagctgattggcgctagtttgaagctgctccaggaaaagcggattccctccctccctcccatactccatagctgagctgttctctctctctctctctctctctcctagttgttggaatattccgataaagccacgacgccccgcccaggagaacatgttctgaaaagctgtcgaggaatataattaccctggttggggggtcctggatcggctttgaatggatgagccagaggcagagcagagcataggtgggggtggaatgggtaacataacattgcccggttcggtgccagatgaaatttcacagttttactgcgtttatttacttatttacttgatggaatggtctcgactctgatcatggttacttactgctgcgcttcatgctgttatggttccacgctttgccctggtgaacttttcaattcattcaacataaatggaggatttgttttgttaacaaacgctagctctttcgagctagctaacgagatggctcattggctcgtcgataaaccgagctcgtgatacaattgaaacgggtaggattttgctaggtgtagtaccggtgcgatgaaactgttgctgggatgacaaaaattgacaaggacgcggtactcgattgggaatctgtactgtacgcagctgtgatcaaacaaacaatggtgggggcctgacagagccgagctggtgtcctttggccagcctccattcatccgctgccgcgctggtgctcctgcgcatcaggcaggcaggctgcaggcatggttccctgccgactgcctctcgtgatgaagctgtctactccgtgcctaccaaattcttatgactttcgtcggaagtcaaagcattcaaatttttagagaaaaaaaaagatttatgatatcaaacagatataacataaagatgataccatacttgtttaataccattatattatacaaattcagtagttaagtttaagatgccctccccactgggctggcaagcgcaagccattactgttgctttccacggccatcccatggggcacacagactggaactggactgggcaggaaagaagaggaggactgtgaccagcattcatcccgcatcacatgggctgctctcgtaaacgtctctcgtttaaataccaactggattaaccagcttctttttaggtcacctgagtgggcattgccactctattatcctgcagagctccactatatcctccatgtctgttacagcatgcaggtatgctaacttaccacaaagttataagctatatggtaaggctgcaactgcaaacgcacctgctcagtccagccgacgagtaacagggcagacggctgacgacgagatggaaccaactgaataggacctagcagtatcagaatgttcgctcgccggacgccttcaaaagcggctcaaatccgaaacccacctacttggtttcttccgtattgtcgagccagcgcatcagttgctaa

SEQ ID NO: 125262 - DNA, 1278 bp, Zea Mays
cggcagaggctgccggcgacggtggggggtgacttcctctccccctacccttccgatctctttccctctgcgaattgttctattagcgaccttcctcgggggtgctagccggatccgcgatcgtcgaaatcccaagctcctccacaggcccgagggtcggtcgtcctcatggcggggatcctggcgtgggcggctgacgtggtcggcggggccggcggcagcgacgacgaggcggacgacgacgcgcgcgccgcggcgtcggccgccatgaccccggcccagcggctccgcgccgccgacctggacgcgcgggcggcctcgctgcgccgcgccatccaggacctccgcctccgggtgcccccgccgcacgtcgcgcagcgcctgccccacctccacgccgactcactcgcgtcgtccgccgcgctcgcgctccagctcaacgcgcactcctccaccaaggagcagacccaacaaagagaagtaactctccaagaagaaaatgcagcctatgagaaagctatatcagagtgtaaacagaaaattcaggaaaagcagatggaggccactcagcttctgagtaatctggaggaaatggaagtaacagagcataatttaaagacacagcttgaaaatgctctgaaggagctagaggctgctcaacataaagcatcaacagcaacctctggaacagctgaaaatgctctactggaagctaagtcagtgactgaccttaaatctaaagatttggaggagaagaaaagggagcttgaactattggataacaaggtgcaaacattagagaaagagtggtctgtggttgaagaagaatctttaaagaaacccactcctgcacaaagggagaaggtcctggagaggcaactgcatagcctcatcgagcagttgacagctaagcaagctcaagctgaaattctggccactgatgtgcattccaaagaaaaggagctggaacggctgaaccatctgcatagaaacctctacggcggtgccaacgaaactggcgcaccccggagccgcctcagcagaggcctcttgagcggccctgaagattactattacgaccctaaagcgggccggaaaccgtaccaggctggcgctagaacagaaggccagaaccggctgatgatccttaggtccgcaattgtactgtatgttctgctgctccatgtcatcgttttcataaagatatcagtctgaaagcagttgagctagcgcttcataagttcatatagggaaacagatacttgcttttggtccaaa

SEQ ID NO: 125263 - DNA, 1400 bp, Zea Mays
cgccggcagaggctgccggcgacggtggggggtgacttcctctccccctacccttccgatctctttccctctgcgaattgttctattaggtttggtacattctgttcccttgctcaaatctctgtctctggccccgcggggattaaaacgtgaaccaccagccaccatttcatacgatctcatcacacttcttagttaccatctccagcgaccttcctcgggggtgctagccggatccgcgatcgtcgaaatcccaagctcctccacaggcccgagggtcggtcgtcctcatggcggggatcctggcgtgggcggctgacgtggtcggcggggccggcggcagcgacgacgaggcggacgacgacgcgcgcgccgcggcgtcggccgccatgaccccggcccagcggctccgcgccgccgacctggacgcgcgggcggcctcgctgcgccgcgccatccaggacctccgcctccgggtgcccccgccgcacgtcgcgcagcgcctgccccacctccacgccgactcactcgcgtcgtccgccgcgctcgcgctccagctcaacgcgcactcctccaccaaggagcagacccaacaaagagaagtaactctccaagaagaaaatgcagcctatgagaaagctatatcagagtgtaaacagaaaattcaggaaaagcagatggaggccactcagcttctgagtaatctggaggaaatggaagtaacagagcataatttaaagacacagcttgaaaatgctctgaaggagctagaggctgctcaacataaagcatcaacagcaacctctggaacagctgaaaatgctctactggaagctaagtcagtgactgaccttaaatctaaagatttggaggagaagaaaagggagcttgaactattggataacaaggtgcaaacattagagaaagagtggtctgtggttgaagaagaatctttaaagaaacccactcctgcacaaagggagaaggtcctggagaggcaactgcatagcctcatcgagcagttgacagctaagcaagctcaagctgaaattctggccactgatgtgcattccaaagaaaaggagctggaacggctgaaccatctgcatagaaacctctacggcggtgccaacgaaactggcgcaccccggagccgcctcagcagaggcctcttgagcggccctgaagattactattacgaccctaaagcgggccggaaaccgtaccaggctggcgctagaacagaaggccagaaccggctgatgatccttaggtccgcaattgtactgtatgttctgctgctccatgtcatcgttttcataaagatatcagtctgaaagcagttgagctagcgcttcataagttcatatagggaaacagatacttgcttttggtccaaa

SEQ ID NO: 125264 - DNA, 711 bp, Zea Mays
atcagtccccactctgactctctccagtctggggctctgggcccaaatacaaaagggtttgtgggaaagccgctcgaatccgtaaccctaaccccacacccactcataaaccctccgcctcctcgcctccctcccttccatccaatcctcggaacgagcgcgcgggcgaggaggacccccgacggaggatggcggcggcggctagggttttccgcgggtccctcttcctgatgtccccggcggcgggcgccaaggcgtcggcagccaagaaggcgggcgcggcggcggcggcggcggcggtggccaagaagaccgaggcggccactacgaagccgagactgccgaccgggatcacgaagccgatgccggtctccgatgagttccgcaggttcgccggcggcgcgcccgaggtcgcacgctccgaggccatcaagctcatctgggcccacatcaaggcccacggcctccaggtagcgcactcgtcgctctcacaagtcacaagtcaccctcgctagccacccctcccgccggtcggctatagagcctctcgcttttgactgcgctgcattgtttggtccggctgccctcacttgccgttccgtgatgtgccacgaactaaggtgctgtttggtttatatgtttgtaatgtaataggtaacaaataacgttaaatcatgtttgtttaagttcaaccgcaatcggataccacac

SEQ ID NO: 125265 - DNA, 768 bp, Zea Mays
ggtattactggtttgctaaagcatctgaatgggctgccctgtcacggcagcatgacatgtgtttttgttcattggcttgtttttctgcatgaaatgtgttcatgtaaccgtgccttttgggaattggccaagtttttccttatattaggaaaaaaacagcgaaagtgctagttggcaatcttgtaacgcttaattccgtattctgaatggggcctgcttatcctctgttgactgacgagaatatatactttcaggaagaagagtattcaaaagatcgggtaattgttgcagtgcggcaagggaacatcctcgcaactgctttccacccagaattgacatcagactccagatggcatcgtttcttcttggacatggataaagaatccccagcaaaggcgttttctgcgctctccctgtcgtcatcgtcaagagacactgaaggcctgccaaagaataagccgtttgatctgcccatttttgagtaacgctaaagacaagacaaaccaaaagattgaaggaacgaagaaactgaccgtatttattatcgatcatcatttagccggttacaaaaacagccagctgagaatctgtcatactcagccgaaaaaagtgttgtctggtagctaacttgtacggataaaaaataatcacgctgtgtgctgtacgcaattctcatcagataaagcgaaacattgttttcctgggaattatagttttgctgaaggtgaccagttgaacacttgaacatggtaatactttccccctcta

SEQ ID NO: 125266 - DNA, 1284 bp, Zea Mays
cctgacgtggcagcggcaagtgcacccaaacgtttcgatatcccagagtggtgtggccgccgccggcggcttctttctccccttccattccgctccccgtgacgtcaccgaccaggcaagcactccgctccaccagagccgcctcgcctgtctgtccgacccacacacctaccggagcgcgcgtcccgaggtcggcggagcagggtcgggaggagggtatggcggtggtgggcgtcctcgcgctgcagggatcctacaacgagcacatggccgcgctgaggaggatcggggtgaagggggtggaggtgcgcaagccagagcagctcctcggcatcgactcgctcatcatccccggtggcgagagcaccaccatggccaagctcgccaactaccacaatctggtggttccctgcacttcgagagttcgtcggaggtggaaagcctgtctggggaacctgtgctgggctcatctttcttgcaaacaaagcagtagggcaaaaaacaggggggcaggaacttgttggaggattagattgtacagtccaccgaaacttttttgggagtcagactgtttctcttgcagcttcaaagctttgagacagagctttccgtgccaaagctttcggagaaggaaggagggaatgatacatgccgcggtgtatttatacgggcacctgctatattggaagtaggtccagatgttgaaatattggcggattgccctgttcctgttgacagacccagcattacaatatcatttggggagggtactgaggaagaagagtattcaaaagatcgggtaattgttgcagtgcggcaagggaacatcctcgcaactgctttccacccagaattgacatcagactccagatggcatcgtttcttcttggacatggataaagaatccccagcaaaggcgttttctgcgctctccctgtcgtcatcgtcaagagacactgaaggcctgccaaagaataagccgtttgatctgcccatttttgagtaacgctaaagacaagacaaaccaaaagattgaaggaacgaagaaactgaccgtatttattatcgatcatcatttagccggttacaaaaacagccagctgagaatctgtcatactcagccgaaaaaagtgttgtctggtagctaacttgtacggataaaaaataatcacgctgtgtgctgtacgcaattctcatcagataaagcgaaacattgttttcctgggaattatagttttgctgaaggtgaccagttgaacacttgaacatggtaatactttcccc

SEQ ID NO: 125267 - DNA, 1367 bp, Zea Mays
cggcgatctccccgccgacgtgggcgaacggctccacggcgatcggatggccacgagcggccgtcgcctaccctcccacagtcccactcccacactagtccttttcccctgacgtggcagcggcaagtgcacccaaacgtttcgatatcccagagtggtgtggccgccgccggcggcttctttctccccttccattccgctccccgtgacgtcaccgaccaggcaagcactccgctccaccagagccgcctcgcctgtctgtccgacccacacacctaccggagcgcgcgtcccgaggtcggcggagcagggtcgggaggagggtatggcggtggtgggcgtcctcgcgctgcagggatcctacaacgagcacatggccgcgctgaggaggatcggggtgaagggggtggaggtgcgcaagccagagcagctcctcggcatcgactcgctcatcatccccggtggcgagagcaccaccatggccaagctcgccaactaccacaatctgttccctgcacttcgagagttcgtcggaggtggaaagcctgtctggggaacctgtgctgggctcatctttcttgcaaacaaagcagtagggcaaaaaacaggggggcaggaacttgttggaggattagattgtacagtccaccgaaacttttttgggagtcagcttcaaagctttgagacagagctttccgtgccaaagctttcggagaaggaaggagggaatgatacatgccgcggtgtatttatacgggcacctgctatattggaagtaggtccagatgttgaaatattggcggattgccctgttcctgttgacagacccagcattacaatatcatttggggagggtactgaggaagaagagtattcaaaagatcgggtaattgttgcagtgcggcaagggaacatcctcgcaactgctttccacccagaattgacatcagactccagatggcatcgtttcttcttggacatggataaagaatccccagcaaaggcgttttctgcgctctccctgtcgtcatcgtcaagagacactgaaggcctgccaaagaataagccgtttgatctgcccatttttgagtaacgctaaagacaagacaaaccaaaagattgaaggaacgaagaaactgaccgtatttattatcgatcatcatttagccggttacaaaaacagccagctgagaatctgtcatactcagccgaaaaaagtgttgtctggtagctaacttgtacggataaaaaataatcacgctgtgtgctgtacgcaattctcatcagataaagcgaaacattgttttcctgggaattatagttttgctgaaggtgaccagttgaacacttgaacatggtaatacttt

SEQ ID NO: 125268 - DNA, 1427 bp, Zea Mays
cggcgatctccccgccgacgtgggcgaacggctccacggcgatcggatggccacgagcggccgtcgcctaccctcccacagtcccactcccacactagtccttttcccctgacgtggcagcggcaagtgcacccaaacgtttcgatatcccagagtggtgtggccgccgccggcggcttctttctccccttccattccgctccccgtgacgtcaccgaccaggcaagcactccgctccaccagagccgcctcgcctgtctgtccgacccacacacctaccggagcgcgcgtcccgaggtcggcggagcagggtcgggaggagggtatggcggtggtgggcgtcctcgcgctgcagggatcctacaacgagcacatggccgcgctgaggaggatcggggtgaagggggtggaggtgcgcaagccagagcagctcctcggcatcgactcgctcatcatccccggtggcgagagcaccaccatggccaagctcgccaactaccacaatctgttccctgcacttcgagagttcgtcggaggtggaaagcctgtctggggaacctgtgctgggctcatctttcttgcaaacaaagcagtagggcaaaaaacaggggggcaggaacttgttggaggattagattgtacagtccaccgaaacttttttgggagtcagcttcaaagctttgagacagagctttccgtgccaaagctttcggagaaggaaggagggaatgatacatgccgcggtgtatttatacgggcacctgctatattggaagtaggtccagatgttgaaatattggcggattgccctgttcctgttgacagacccagcattacaatatcatttggggagggtactgagttccttttagttctttaatgagcagtgagccagtgaatatggccatttcttggaaagcaggaagaagagtattcaaaagatcgggtaattgttgcagtgcggcaagggaacatcctcgcaactgctttccacccagaattgacatcagactccagatggcatcgtttcttcttggacatggataaagaatccccagcaaaggcgttttctgcgctctccctgtcgtcatcgtcaagagacactgaaggcctgccaaagaataagccgtttgatctgcccatttttgagtaacgctaaagacaagacaaaccaaaagattgaaggaacgaagaaactgaccgtatttattatcgatcatcatttagccggttacaaaaacagccagctgagaatctgtcatactcagccgaaaaaagtgttgtctggtagctaacttgtacggataaaaaataatcacgctgtgtgctgtacgcaattctcatcagataaagcgaaacattgttttcctgggaattatagttttgctgaaggtgaccagttgaacacttgaacatggtaatacttt

SEQ ID NO: 125269 - DNA, 1239 bp, Zea Mays
cggcgatctccccgccgacgtgggcgaacggctccacggcgatcggatggccacgagcggccgtcgcctaccctcccacagtcccactcccacactagtccttttcccctgacgtggcagcggcaagtgcacccaaacgtttcgatatcccagagtggtgtggccgccgccggcggcttctttctccccttccattccgctccccgtgacgtcaccgaccaggcaagcactccgctccaccagagccgcctcgcctgtctgtccgacccacacacctaccggagcgcgcgtcccgaggtcggcggagcagggtcgggaggagggtatggcggtggtgggcgtcctcgcgctgcagggatcctacaacgagcacatggccgttccctgcacttcgagagttcgtcggaggtggaaagcctgtctggggaacctgtgctgggctcatctttcttgcaaacaaagcagtagggcaaaaaacaggggggcaggaacttgttggaggattagattgtacagtccaccgaaacttttttgggagtcagcttcaaagctttgagacagagctttccgtgccaaagctttcggagaaggaaggagggaatgatacatgccgcggtgtatttatacgggcacctgctatattggaagtaggtccagatgttgaaatattggcggattgccctgttcctgttgacagacccagcattacaatatcatttggggagggtactgaggaagaagagtattcaaaagatcgggtaattgttgcagtgcggcaagggaacatcctcgcaactgctttccacccagaattgacatcagactccagatggcatcgtttcttcttggacatggataaagaatccccagcaaaggcgttttctgcgctctccctgtcgtcatcgtcaagagacactgaaggcctgccaaagaataagccgtttgatctgcccatttttgagtaacgctaaagacaagacaaaccaaaagattgaaggaacgaagaaactgaccgtatttattatcgatcatcatttagccggttacaaaaacagccagctgagaatctgtcatactcagccgaaaaaagtgttgtctggtagctaacttgtacggataaaaaataatcacgctgtgtgctgtacgcaattctcatcagataaagcgaaacattgttttcctgggaattatagttttgctgaaggtgaccagttgaacacttgaacatggtaatacttt

SEQ ID NO: 125270 - DNA, 2728 bp, Zea Mays
caataacagatattttggatgagcccttgctcaagtacaatacaaatacaaatggaggccaaagcgactagccccacacgctgcttcattctgtgcactgctgcccgccgtggctcctagcttattctctggaaaagaacgaaggagcaggatcgtgccgagctaagctatggaaggggctgcgagtggtcgctgcaggatgggcatggccatcgcagcagccgtctgcctgatgccgttgctgcagctgtggggttgcgtcgccgtagaggcgaatgcgggaccctatcattttgttaagaggcatttagatgaggtcgaccgcatgaggtacaaggacccaacgcagccgctgaacacgcggatcgacgacctgctggggcggatgacgctggcggagaagatcgggcagatgtcgcagatcgagcgcgagaacgccaccgccgacgtcgtcagcaagtacctcgtaggcagcgtgctcagcggcggcggcagcgtgccggcgaagaacgcgccgccggaggcgtgggtggagatggtgaacgggatgcagcgcgccgcgatgtcgacgcggctcgggatcccggtcatctacggcatcgacgccgtccacggccacggcaacgtgtacaaagccaccatcttcccgcacaacgtcggcctcggctgcaccagggagccagagctggcgcggaggatcggagctgccgtggcgctggaggtcagggccaccggcatcccctacgtcttcgctccctgcgtcgcggtgtgcagggacccgcggtggggccggtgctacgagagcttcagcgaggacccggaggtggtgcgcgacatgaccgccatcatctccgggttccagggcgagatcccggacgcgaccgacgccggccggccctacgtcgcccctggccaccgcaacgtggcggcctgctccaagcactacgtcggcgacggcggcaccactaagggcgtcaacgagggcaacacggtcgcgtccttccacgacctcatggccgtccacatgccgccctactacaacgccgtcatacggggcgtgtcaaccgtcatggtctccttctccagctggaacggcgtcaagatgcacgccaaccacttcctcgtcaccgaccacctcaagaacaggctccgcttcagggcacgtagtcgtctggattcgattgttcgagtgcttcaggcaatcagtaatgaatggatgttgtttcagggtttcatcatctcggactggcaagggctggacaggatcacgaccccggaccacgccgactacctcctgtccatcaagctgggcatcctggccgggatcgacatggtgatgatcccgtacacgtacacggagttcatcgacgacctcacgctgctggtgcggaacggcaccatccccatgagccgcatcgacgacgccgtgcgccgcatcctgcgcgtcaagttcaccatgggcctcttcgaccacccctacgccgacgccagcctggcgggcgagctcggcaagcaggagcaccgcgacctggcgcgcgaggccgtgcgcaagtccctcgtcctcctcaagaacggcaagccgggcgccggcccgatgctgccgctgcccaagaacggcgccgtcctggtcgccggcagccacgccgacgacctcggcagccagtgcggcgggtggaccatcacctggcagggcctcacggggaacaacctcaccgccgggaccaccatcctcgacggcgtccggcgcgccgtcgcccccggcacggacgtcgtctactccgagaaccccgacgcggcattcctccagcagaaccgcgcccgctttggctacgccatcgtcgtcgtcggcgagcccccctacgccgagacgttcggcgacaacctcaacctgaccatccccgcgcccgggccggacgtcatccggaacgtgtgcggcgccatcaagtgcgtcgttgtgctcgtctccgggcggccgctggtggtggagccgttcgtcgatgtcatcgacgcgctggtggcggcgtggctgccgggcacggaggggcagggcgtcagcgacgtgctgttcggcgactacggcttcaccgggaagctgtccaggacgtggttccggtcggtggaccagctgcccatgaacgtcggcgatgcgcactgcgaggatgcactgttcccgtttggctttggaatcgagacacagccggccacatattagaaggttattgcatggcccaaaattgagctaaattcttggactttgttagcgtcggtagtgggaagcttctagaagagagcaggaaggagtgaggattcgggaagaagacttggaaacgaggaaagcagggaggaaggcgaggctgagaactagtgtctttgtctgttcattaattgttcgataccttcttacaatactagagagagcttataaactaccacccagtccggccaaatacacgacccattcggacccaaatactcatgtgttgtctcgcctctaccgctccgtcgttgtggcaacgtcagtatcgttggtcagctttttcatcttcagtgctccatcttcagtgctggtgagcttctgacgtctttcttgtattgttgctgacagacttccccgtgaaatatccaaagagagaactatcattcgtatccgagttttattactagatccttcagtgtagtttgtcgtagacaataattaataatgtaatatggtctctcttcggtgaca

SEQ ID NO: 125271 - DNA, 1899 bp, Zea Mays
caataacagatattttggatgagcccttgctcaagtacaatacaaatacaaatggaggccaaagcgactagccccacacgctgcttcattctgtgcactgctgcccgccgtggctcctagcttattctctggaaaagaacgaaggagcaggatcgtgccgagctaagctatggaaggggctgcgagtggtcgctgcaggatgggcatggccatcgcagcagccgtctgcctgatgccgttgctgcagctgtggggttgcgtcgccgtagaggcgaatgcgggaccctatcattttgttaagaggcatttagatgaggtcgaccgcatgaggtacaaggacccaacgcagccgctgaacacgcggatcgacgacctgctggggcggatgacgctggcggagaagatcgggcagatgtcgcagatcgagcgcgagaacgccaccgccgacgtcgtcagcaagtacctcgtaggcagcgtgctcagcggcggcggcagcgtgccggcgaagaacgcgccgccggaggcgtgggtggagatggtgaacgggatgcagcgcgccgcgatgtcgacgcggctcgggatcccggtcatctacggcatcgacgccgtccacggccacggcaacgtgtacaaagccaccatcttcccgcacaacgtcggcctcggctgcaccagggagccagagctggcgcggaggatcggagctgccgtggcgctggaggtcagggccaccggcatcccctacgtcttcgctccctgcgtcgcggtgtgcagggacccgcggtggggccggtgctacgagagcttcagcgaggacccggaggtggtgcgcgacatgaccgccatcatctccgggttccagggcgagatcccggacgcgaccgacgccggccggccctacgtcgcccctggccaccgcaacgtggcggcctgctccaagcactacgtcggcgacggcggcaccactaagggcgtcaacgagggcaacacggtcgcgtccttccacgacctcatggccgtccacatgccgccctactacaacgccgtcatacggggcgtgtcaaccgtcatggtctccttctccagctggaacggcgtcaagatgcacgccaaccacttcctcgtcaccgaccacctcaagaacaggctccgcttcaggggtttcatcatctcggactggcaagggctggacaggatcacgaccccggaccacgccgactacctcctgtccatcaagctgggcatcctggccgggatcgacatggtgatgatcccgtacacgtacacggagttcatcgacgacctcacgctgctggtgcggaacggcaccatccccatgagccgcatcgacgacgccgtgcgccgcatcctgcgcgtcaagttcaccatgggcctcttcgaccacccctacgccgacgccagcctggcgggcgagctcggcaagcaggagcaccgcgacctggcgcgcgaggccgtgcgcaagtccctcgtcctcctcaagaacggcaagccgggcgccggcccgatgctgccgctgcccaagaacggcgccgtcctggtcgccggcagccacgccgacgacctcggcagccagtgcggcgggtggaccatcacctggcagggcctcacggggaacaacctcaccgccgggaccaccatcctcgacggcgtccggcgcgccgtcgcccccggcacggacgtcgtctactccgagaaccccgacgcggcattcctccagcagaaccgcgcccgctttggctacgccatcgtcgtcgtcggcgagcccccctacgccgagacgttcggcgacaacctcaacctgaccatccccgcgcccgggccggacgtcatccggaacgtgtgcggcgccatcaagtgcgtcgttgtgctcgtctccgg

SEQ ID NO: 125272 - DNA, 1157 bp, Zea Mays
acaaatcggagctcctgcgatgcccccatctctcctctcctcccctcccctcccctcccctccccatctcgctcttgcggagatcgaagagaagctgaggcctagcgccgcacccgccgccgcatcagccatcagccatggcgctggccgctcgcctcgtctcgcgctcccgtcagctacattcggttcaagcagcttttgcgaatggaggtgccactcaagttcgctcctttgccaaggatgcagctccagctgaccgtcctcctgttagtggggatgatctcctgaagggcatattctttgaggtaaagaagaagtttgagacagctcttggcgtccttaaaaaggaaaagattactattgatccagatgacccagcggcagtttctcgatatgctcaagtcatgaagactgtaagggaaaaggcggatcttctttctgattctcaaaggattaaatataccattgagaccttcaccaagggcatccctgatgcacggacttacttgaatactcttcaacagctcagaataaagagtggtcttatagatcatattggaatcgaacctttgatgatggaagctcttgagaagattgagaaggatattaagaaaccacttttaaggagtgacaagaagaacatggccacccttatggcagagtttgacaagattaacgcaaagcttggcattcggaaggaggatcttcctaagatcgagaaagaacttgaattggagattgccaaaagtgagctgactgaacttaagaaggaatgtgttgaggcaatggagactcaactcaagagggaggagttccaagatgaggagatgcctgatgtcaggaaactggacatccgaaacttcctgtaggcctgatcgacgataacctttgaggcattgcaaatcacccagcccacctgtgattttttttttctttggttttggtttcaagttgatcggtgctgtaagctacacctatgaatgctgctccttcctttttttgtaataaaaaaactgcaccgaggtacacaaacacagtcgaccgttgagttgaatttcttcttgcctttctgttgttacggactctggtggctacagcaacaatcagatgtccttgttatagcagatgaaccagatgaagccgttgtccggtgctcc

SEQ ID NO: 125273 - DNA, 987 bp, Zea Mays
ggaggagcaggcacaaatcggagctcctgcgatgcccccatctctcctctcctcccctcccctcccctcccctccccatctcgctcttgcggagatcgaagagaagctgaggcctagcgccgcacccgccgccgcatcagccatcagccatggcgctggccgctcgcctcgtctcgcgctcccgtcagctacattcggttcaagcagcttttgcgaatggaggtgccactcaagttcgctcctttgccaaggatgcagctccagctgaccgtcctcctgttagtggggatgatctcctgaagggcatattctttgaggtaaagaagaagtttgagacagctcttggcgtccttaaaaaggaaaagattactattgatccagatgacccagcggcagtttctcgatatgctcaagtcatgaagactgtaagggaaaaggcggatcttctttctgattctcaaaggattaaatataccattgagaccttcaccaagggcatccctgatgcacggacttacttgaatactcttcaacagctcagaataaagagtggtcttatagatcatattggaatcgaacctttgatgatggaagctcttgagaagattgagaaggatattaagaaaccacttttaaggagtgacaagaagaacatggccacccttatggcagagtttgacaagattaacgcaaagtatgcccatatatacatctttcatctcgataatgtattctcggtagcaaatttattagcttgcagccctcctgaggatctggacagctctggttggctggttgaatacttggtgacaaaacttttttccccctgaatggctctccgctgacagttattaactgatacatcacgtggcttttaatctcctgcaaagaatgcatgggtatggccaactgttgtatgcagctaggcaatatagatcaattgtttaaatttgctgatgtagggtttcttttgattgtcagatgttt

SEQ ID NO: 125274 - DNA, 2694 bp, Zea Mays
atggctcccgcctccctctcccccgaggcgacgccgtcctccacccttccaccttcccgcctctccagcttcttgccggcgaccaccccggagccggcagccactgtctcgccgacttccaaccccccgtcttcccgtctctccagctccctgccggcgaccatcccggaaccggcagccaccgtcttaagccccttgatatcacccgtcccattggcgtcggccagcacccttcccacggcagcggcggctggcggtcgctccaagcctcaacgctggcgtgaagttagcccgtcggactccacgttctctacctcatcgccgccgtccttccgggatgtggtgattgctgcgcctgctcctacccgctccggctcccggaaggctacatcttcatcgcattcgccctctcgggagaaaatccaagcgacgttcaccactcgacgtgaagtttgcctcactcgcccttcctctgttgatgccggcgagtggcaactggtggaatcaagaaggtccaggaggaggcgcttatttttgaagcaggagcctcggtcccgccgtgtgccggttgaccttgtaggccgctgcttcaactgcctctcgcctcatcactttgccaaggactgtcggaagagatcaagatgcttctgctgtggtggcctgggacatctctcctataagtgctctgctcccaggcgtgcagaaccaagaagaccagtttggcggagacttgggcctacggttgcaccggtgtccaagaagtcggtctgggatcggctgggctcgacgatggcgcatcgtgatcggttagaccttctgtcttcgtcttctgcgggtgcggcgcctgagagaatcccagtctggaggagaatcacccctgtcagtgatgcttcgcagcgtgcggatcctgctgtgctgactgggtcttctgtgggtggcccgactattggtggagaggctcgtccggctaagaggcgtcgtcgccgacaacggaaacgatcattggcacccattattcatgtggatgcccagttggcgccggtatcttccccgactcacgagtctgcttcacctgtgctggaggactcttccccaccttctttcccttgtatcattggttggaatccgagtatgtcgcgggcggaggaagatctcgctacggcggttgtcatcactgtttttggtaatatggaagttgtgtctgccaatgatattgcggcacccctggcgtcacgtctggaggttgatgaaggatccctggttattaggcagctatctacttctttcctgctggtgctgccttcagatggattggtgcaacaattgtgtggaagatggtcagttgtgcgtgctaattccttctcactttcttgcaaaagatggtcacgcctgatgaattcctctggaagcacccttgctcagttgttagaagttgaactggttggcatccctgtacatgcctgggaagtacccaccgtggagagtttgctcagcccttttgcatggatagagagtgtgcatgaagatacattgcaactaagagatctcagcagcttccgttgttctgtttggtgtctggaccctgtcagcatacctcctgctagagatctttgggttgttgaacatctgcaactgggtattggggatggttctggtgtcagatcactggtctatccggttaacattcggtggaaggctgctgctggcactgaaatttcatctccccgcccccctccatcctcagtgatcactcctgcagaacctcgtcgacatttgcgctcccgttctccgccggcatacagtggtcagcgtagtggaacttcctttggtcatgctcaaggcacagatcattacgttcagggttcgtcctcctgccatggctctcgtgaagctagctgtagggatcctcaggttgtgcagaatttgactcttgagccactccttggctcggttatagctccgacgtcctccattcttggacctcctgatgccggtttgcagacgcttgagtctggccaccccacacccttcgctcctggctttaccgatgatgctggtggtggattatgcgttgtgcagaatgtgatcttggagccacctcctggttcggtcacagttccgatgctggaaggttctctaatttcagagcagctgcctacgatggagcttgttggtgcaccaatggctgttacatctccttgcttggtggatgcttctccctcccatgttccttcttcggatgtggttgagctcactgcggctgtggtagacactcaggtgactccagttgcggtggctcctgcgtccaaatgtggggggactctcgctgttgagcaggaggtgcttcattcacaccaaagacaggccttcctggcgtctgtttcccggcggccttccagagttctgcctgctcctcccgtacagctcttaaaatctggttacaagctgcccaccaaaccaattccaagacgcagtcgcagagttgctggagtgggtgttgaattcacctctgctgatcttgacagttgtgctactaggaaaatcatgagagcagtaggcataattaccaataataatggtatggatcagagggcgcttgatgaatatgcaaatctgttcaagacacccttgtcaagttctcatataaaggctctggcagcgctgtttggctggcagcctcctgaagacatgtag

SEQ ID NO: 125275 - DNA, 1539 bp, Zea Mays
atggccgcgcccgccgccgcctctgctccccggcggcaatggcggtacacgtgggaagccctaacgcacctccccctcctccgcctatacctcttcccccgccccgcattctcctcctccttcccctccgacctccgcgccgacctccgactccagggctccctcctccacctctccttctcgctccccggggatggggccaccatcgcgctcagggtccccgtcccgagggtgctcatagacccttccgcccccttcgagtgccgcgccgccgccgcgggggaccacctcgagctcctcctggcgctcgtcctgcccgtcgaccaccccgtcgtcgccgccgcgtttcccccgcccgccggtgcggagcttccggctcctctagctctgcgcgatgatttgaagggcttatctactggagacgttcacttgtattgcagaaattgttcgtcaaggttgacaaaacagccactaagtggtttgcactttgcaccactagaaatggtagcttgttctccccttggtagagattttgttgatatgaaaaaagctatttttgatgttagtgacgaaaacgatcataccgctgggaagataaagttgaagaattcagaagagcaagcaaagatcatagctacacatgcacaaccgcctactattttggaagaggggcctagtgttagtagtagtgaaacaattggagtcagtcagactaatcagcctgtcacttctcagatagaaactgatactgatgtgtactttgagaaggagcttgatttgttgctgggagatttgggccattgttgttgtgtcaatggatccaatgggaaagttgaagatagcccttcacaaatctccttgaggaacaggcagaatatgttggagattaaaagagattacaaactaacaaaaactatttctcttggtagtagctttgttattaaagcttcaaaccttttgaatgattttgagtgggttgaacttttttgtggtcgatgttcatcacctcttggctcatacccttctcagagttcgcttgttccggctgatggccgtgtacgactcttcaaatgctacacatctacagaaattcctgtaacagggtctcatgatgtgtttagggggcatacattggaaagagtttttgtgaatctgctgctcgaagtcgcagaagatgaaatatcttttcggacagtagtcagagatttgaaaaccaaaaggccaatgctgcaattagttcttcttagctcaaaagcatggttatcttctggttggtgctatgaaaatgataccaatggttcacatggaacaacagatctgcagcctagtgttaaactcttgtattctgattataggaatgcttcagaagcagacttaaggacagtagaagagtgggcatccaaataccgggctgaagagctgtacatgatgaggcggcaaatagacgaactcactgaatgcctgggctcggcaatggacaactttccagtttcttgttcttcccttgaaggcttgctgctctcttctcttaggcgctga

SEQ ID NO: 125276 - DNA, 1641 bp, Zea Mays
atggtttttgatgctgctttgagaacatgtgggcagaaggaagtgctctattgcttaatgtgcactgaactctctacctatggtaaatggattgaagccaagaacattctagaaatggcacttgaaatgagggtctctatccagagtttcccatataagcagataatttcagggctctgtgaagttggggaggtggatcttgcacatagccttctcaagttgttaatagctaaacgacatttgtttgatccagcagtgttcatgccagtgatagatgcattaggtgataggggaaagaaacaggatgttgatatgctgtcagcaaaaatgatggaaatggctgaccgtaatgatggtcttggaactgattctggtaagattacccctggaagctgtaagcatgagcatgacaggaatggtgaaagcgattggcgtaatcttttgcacagagatgacagtgcccgcacgattatgaaaattacaaagagagtgcggacagggtggggtcaaagaggcaatgtatatgagcataaacagcaacagggtgatggcttttatgtactcgagaacactggctaagcgttatgtgatcttatcaaactgtccaagtaggcaagtactgcagcgctataattttgtgctaccatctgagacacagcttttgttctatcatggattcttcatcactgtcgggagctcagtttatatctggtttggtcatgggcatcactgggctctcttcagacatacctgtggtggtgactgcgaacaacattgcaacgaggctgtcgctcccctcagcggcatcgtcaacctcaggtggcggtcgtgtaaggtgctccgcgacgcaacggtgacaagggaagttcagctatgcatggccgtgcggagagaatggaggctgcaccggtgacgaggttcatgtccgtgcttcggcggtgtgcgacaagcggcaacccgaggcattggttaaccgcgcaggcatgagactttcccttcttcggtctaaactgcgtcagcttttgcgggttcttcacctttagggatcagtacaaggactatattgttaaacacctccgaaaatataaatcacccccgttgaggagctcaagaatcgcccttgaaatttcgtctctcagcaagttccagcgtcgacgatagaagccaacggcaaagcaattgactgggccatggagctttatttggcttcagcatgaaaaggacttccttaatttatgtccctgtgaaaggtgaacataggacttccttaatcgttttcagaatcagttacattcctggggacatcacacaacacctcctctggattagtatcttgtgtcgagaaaacacgtttgtagaattcagctgctcactttgatcaatgcaaactgaaccatcctggcgttaaagggcggtaaatttaggccctgttcggttgtaccggaataagccatgattcattccagctcatcaaaatctatataaattagagaagtaatccggctaggaattaatccggggctccaatccaaaacaaccgaacagggccttatttgctcgttccctttgtcgtgctttggcctggaagaaccatgtatccaatcaccagccagcaatagcgtgcaaacactgatgcattgt

SEQ ID NO: 125277 - DNA, 1977 bp, Zea Mays
atgtcctcctacccctccgccgccaacctgctcgcgctcctccgccgcaacgccgcctccccggccgtcgcgctccgactcttcctccacctctcctccgcggcctcccttcccccgccgcgctgcacgtccttcctcgcccgcctcgtcgccgcgcaccccgccgccggcgcgctcctcccgcgcctccaccgccacatcctctccttccctgacccctgtccccacctcctagcgctcctctcctgctccgacatcctcccgctgcgcctcgccatccccgccttccgctccctccgcgcgctcgcgtccgcgccgccgccgcccacccccgtctacaaccgcctcattctcaccgcgctccgagagtcccgcctcgaccttgtcgaggcgctctataaggacctgctcctcgccggcgcccagccggacgttttcactcgcaaccttctgctccgggcgctctgcgacgcgggccgcatggagcttgcccagagggtgttcgaagcaatgcccgtcaggaacgagtttagttttgggatcctggcgcgagggtactgccgtgcggggaggagcgttgatgctcttaaggtactcgacggaatgccgagcatgaacctggtggtttgcaacacggtggtcgcaggattttgcaaggagggcctggtggaagaggctgagaggctggtggaaaggatgcgtgtgcaggggctggcaccaaacgttgtcacgttcaattcaaggatctctgcactctgcaaggctgggcgggtgctggacgcttacaggatattcaaggacatgcaggaggattggcagcatgggctgccgaggcccgatcaggtgacttttgacgtaatgttgagtgggttctgtgatgctgggtttgttgatgaggcacgggttctggtggatattatgagatgtggtggtttcctgaggagggttgagagttacaaccgctggttgtcagggttagtgaggaatgggagggtcggcgaggcacatgagcttctgagagagatggcacatgaacggatccatcctaatagctacacatacaatattatcgtctctgggttgtgcaaggagggcaaggcatttgacgcaaggagagtagagaatttcattaggagtggtgtgatgtctccagatgttgtgacttacactagtttgctccatgcctattgctcaaagggcaacattgctgctgccaacaggattctggatgagatggcgcagaaagggtgtgcaccaaattcatttacctacaatgttctgctgcagagtctttggagagctggtaggaccacagaggcagaacggctgttagagaggatgagtgagaaaggatacagtttggatacggctggctgcaatatcattattgatgggttatgcaggaatagtaaattagatgtggctatgggcattgttgatgggatgtgggaagaaggaagcacagctcttggccgactggggaattcattccttagtgtagttagtgattcttccatcagccaaagatgtcttcctgatcggatcacatattctattttgataagtgcattgtgcaaagaaggcaggtttgatgaagccaagaagaaattacttgagatgatagtgaaagatatttcccctgattcagttatatatgacaccttcatccacgggtattgtaagcatggaaagacatctttggctattaaggttctgagggacatggaaaagaaaggttgcaacccaagcacaaggacatacaacttgttgattcggggatttgaagaaaaacataaatcagatgagatcatgaaactgatgagtgaaatggaggagaaaggggtttctcctaatgtgctgacctacaatagcttgataaagtccttttgtcaacaaggaatgttaacaaggccatgcctctttggatgaaatgctacaaaatgaattggtcctaatataacttcttttggacttgtg

SEQ ID NO: 125278 - DNA, 2252 bp, Zea Mays
ccgatccatctcgatttgaaaaccgcgcaggagcttcgcgtctcttcctccctcactaccgctccgctccgctccaaaaccctagacggcgcccgcagcccggagccccggatccgcgtcccgctcccccggcgtctctgcccgctgtcgccggctccccgatggacctcgcggggccgcgcggggccacggatcccgccggatcgagggccgcgccgccgcacgaggaattggacgggagaggaggaggggcgtgcagcggcgcggcagcagtggaggggagcgcgtggcggctggcggtcgctggactgggagatccaagggccggagttctggaatctttgggtcaacctgaagcacatttgcacacatgtaccatggatgttcctcagttgactgctgaaggtgccacacaacttggagatagagtgtctttattacaccagacagggacacttcagtcagaaactccttgtctgaccttaggccgtgattctaatgcagtatcaatggagaagctgcatgctagcgattgcttgccctgtggtaaagagaatgtcgggacaggactacaacctaaatctgatccagaacgtgctgataataggatgagtgttgcacgtcttgggttggaccttaacacagtagatagtcctgatgtagcagagcctaaccctttcttcccttacaagaaattggggcagtcaaaagtcagcgatccatcggaatgtggcagcactactggtgctatagaagaaagcgagtcacacagaaagtggagagaaatgaagcagaatggctttctttcttcatttcatgggaatgcggtggtgcctaggccacgtggtcgaccccccaaaaggaaaagggatgatgaattcaaaaagagcagttccacacagcatgtacaggctaacaagtctgtgaaggttgctgctcctagtggtctattatctgggctaaaccctggaatcattaaccatgtgagaaatagcaagcaagtttactccataataaaggctatggtacactctgagaggcttgagaatgagaaccactctagtcaaacaggtgaaagagggagagaagttaatgagagaattcaggatcagaaatatggtggtggtttcatgaagtgccatttgttgataaatgataataatgcggtgtttcaccaaacactgcctaacacatcgcagttccttgcacaggatggtgatagtcttaaactgcaactcccatccgcagtcactatgtcttcagataggaccttcagtacgtcagctgatgatcctgcatctaatcatgattacatgactgtactgtcagtaaaagcggctagtgttgcttctcaatggttggaattactgcatcaggacataaggggacgtcttgctgctttaaagcgcagcaggaagagagtcagaaatgctcttcacacggaactgccatacctaaccgcgacagaattttcatctaatcaagagaacgaatcatccattgcaaatacttctgagattggatgtactgacaaagcggtttcagaagctcatgtggcacgatggaggtctctgtttgttcagatggacaaaacacttcaggaggaagggaaacagctggagaacaagttgaagcaagtgcaagaaatgcaattgaattgtgataaaggcctcaaacacatgacctgtgaagctcctctgctaggacctatggctgaactatggaagctgaagaacccaaatatttccgagagcgagtgggcggtgcaagccgctgccgcatcgatctactcgacctgcaacatggtcatgagaacggagaacgtgccttgcttttgataccacacttgtactttagttttttgctttgggcgtgttcggctggctacaagccgacactgttgcagctgtttggattgctgcagctgcaatccatagagagaaaaatactgtagaagccgcagccgcagccggattgcagccgcagcaagccgcagcgaacaagcttacctcaaaccaggtcttctttcttacctttaccctatgtgaatcgtgatcccttgtccattacagtagtggcgactggcgagtgatgtaacaagaacaaacttgtgatgtatgttatcccgagcctacaatttcacaggcacatgaaacagcacattctttttcatggagttgaggatattcatatcctaccgttttggttcggtgagatggtcgaaatagagattgccaccttgttaaattttt

SEQ ID NO: 125279 - DNA, 2648 bp, Zea Mays
ccgatccatctcgatttgaaaaccgcgcaggagcttcgcgtctcttcctccctcactaccgctccgctccgctccaaaaccctagacggcgcccgcagcccggagccccggatccgcgtcccgctcccccggcgtctctgcccgctgtcgccggctccccgatggacctcgcggggccgcgcggggccacggatcccgccggatcgagggccgcgccgccgcacgaggaattggacgggagaggaggaggggcgtgcagcggcgcggcagcagtggaggggagcgcgtggcggctggcggtcgctggactgggagatccaagggccggagttctggaatctttgggtcaacctgaagcacatttgcacacatgtaccatggatgttcctcagttgactgctgaaggtgccacacaacttggagatagagtgtctttattacaccagacagggacacttcagtcagaaactccttgtctgaccttaggccgtgattctaatgcagtatcaatggagaagctgcatgctagcgattgcttgccctgtggtaaagagaatgtcgggacaggactacaacctaaatctgatccagaacgtgctgataataggatgagtgttgcacgtcttgggttggaccttaacacagtagatagtcctgatgtagcagagcctaaccctttcttcccttacaagaaattggggcagtcaaaagtcagcgatccatcggaatgtggcagcactactggtgctatagaagaaagcgagtcacacagaaagtggagagaaatgaagcagaatggctttctttcttcatttcatgggaatgcggtggtgcctaggccacgtggtcgaccccccaaaaggaaaagggatgatgaattcaaaaagagcagttccacacagcatgtacaggctaacaagtctgtgaaggttgctgctcctagtggtctattatctgggctaaaccctggaatcattaaccatgtgagaaatagcaagcaagtttactccataataaaggctatggtacactctgagaggcttgagaatgagaaccactctagtcaaacaggtgaaagagggagagaagttaatgagagaattcaggatcagaaatatggtggtggtttcatgaagtgccatttgttgataaatgataataatgcggtgtttcaccaaacactgcctaacacatcgcagttccttgcacaggatggtgatagtcttaaactgcaactcccatccgcagtcactatgtcttcagataggaccttcagtacgtcagctgatgatcctgcatctaatcatgattacatgactgtactgtcagtaaaagcggctagtgttgcttctcaatggttggaattactgcatcaggacataaggggacgtcttgctgctttaaagcgcagcaggaagagagtcagaaatgctcttcacacggaactgccatacctaaccgcgacagaattttcatctaatcaagagaacgaatcatccattgcaaatacttctgagattggatgtactgacaaagcggtttcagaagctcatgtggcacgatggaggtctctgtttgttcagatggacaaaacacttcaggaggaagggaaacagctggtgagtttactgatcgggttagtttgtgttataggaaaggagcacactatctgtcattgttcgtgttggtatattgctctattcatattcggcctgattggttgtccgcttggccgcatccaggctcgtcacgcgcgttgaccgcatgcatgcatatgattggtgacctgcaccggccgagcgtagtctgcatgcgcgagtacaacctagttattttccaccacttccacctgcacacgcagagatgctaggagagagcttcgctggtcacccaggccgacgcgagcctgattcccacgaacacatcaaccaatcacgcagattgtttgtataagatgcattgtgtttatgctcatagagtaggtatatacagtacctgacttcttaatgcttgttgcaggagaacaagttgaagcaagtgcaagaaatgcaattgaattgtgataaaggcctcaaacacatgacctgtgaagctcctctgctaggacctatggctgaactatggttagttcacttagttgtttactttctcttttttgacccattccacttaatgattgagcaagtgtctaactgaagtatgccaatctgtctcttcaggaagctgaagaacccaaatatttccgagagcgagtgggcggtgcaagccgctgccgcatcgatctactcgacctgcaacatggtcatgagaacggagaacgtgccttgcttttgataccacacttgtactttagttttttgctttgggcgtgttcggctggctacaagccgacactgttgcagctgtttggattgctgcagctgcaatccatagagagaaaaatactgtagaagccgcagccgcagccggattgcagccgcagcaagccgcagcgaacaagcttacctcaaaccaggtcttctttcttacctttaccctatgtgaatcgtgatcccttgtccattacagtagtggcgactggcgagtgatgtaacaagaacaaacttgtgatgtatgttatcccgagcctacaatttcacaggcacatg

SEQ ID NO: 125280 - DNA, 109 bp, Zea Mays
cgtgagagcccgtggagggatgacgcaacgggcggtagagaaacgtcagggtaatttttccatccaatccaatagagccatggaattcccgagccgttgtggatgtacc

SEQ ID NO: 125281 - DNA, 267 bp, Zea Mays
atgtgggtggattggaacgggatctgggtgatgcacccgtggttggatgaggggcgacattcacggggaaatggaaagggaagcgaggcacggagggcgacgatggccgaagattttagacatggatttgcagagtttccaagctgggtgggggcatggatggaggcgcggcgtgtggatggaaggggagatgcgagcaccaatggaagggcagttgggggcgcaacgcatggatggggtgtcaatggaaagggctatgacatatag

SEQ ID NO: 125282 - DNA, 572 bp, Zea Mays
ttttttttaaagaagtggtcttagtcttttggaactcggaatgcagtgtacgggtttcatatgagtctccccctatcccagccctctagatgtccatgggtgcagcagcgtcatccgagcccctctccccctcctcctgcatggaggagctagcagcagcagcctccagaggcggtgcctgctcggcgacctccatctccatggagtcgataagttcctggaccctcgccgcgccgatcacctcgaacggctcgacggtgccgtcgtccttcctgccgacgatggccacggtgcagttggatccggacagcttctcgccctgcagcgtctccttcacggcggagagggcgtccctgacgagctgctccggggtgtagtcgtcgtacccctggaacctgcgttccaggaacgtcttggcggcttgggagcgggagccgatggcgaacgcctggtactcgaagtagttcccgctggggcagttgtagtacaggtgggctcctgactcgtccagtccggcaacgaggaggcccacgccgtagggcctcttccatgaccgctgcgtgcagacctgc

SEQ ID NO: 125283 - DNA, 1117 bp, Zea Mays
gcgcattcccgcccttttaaacgccgccgcccaaccgtctcatcccacaccacaccaccaccaccccgattccccgacgcaagcaaccagcagaaccagtcactctaccccatgtccgcgatggcggccgcgcctcccccagccccgcacctcgactccgtcctaagcttcagcgccttggcctcgcacgccgcggccgagcccgcctcctccgactccgactccgactccgacttggagttcgcgttcgcgccgccgccgctgctgtcgccgcgcgccggcgcccacgcgctcgcgccggccgacgacctcttcgcgcacggccgcatcgtcccggcctacccgctcgcgggccacggccacgacgaggcgctggcctcctcgccggcacccacctcctcctccgccgccgcgccgccgccgccgccgtcgccggacacgtactgcgcgtgggcgccgcgggacgccccggcggcgttccccaagtccgcctccacggggacggaggcccgccgctcctggcgcctgcgcgacctcgtggtggcaggcggcggccgctcccgcagcgacggcaaggaaaagttcgccttcctgcaacccagctccagcgccagccccgccgcgccgtcgaagccgtccggcggcgacggcgacggcagcaagcacgccagcgccaaggctgcggcgcctccgcagaagcatgcgggcacgaagaataagaagaataagaagaaggccggcgccgccgagatggacatggccaccgcgcacaggctcttctacggcaagcccggcgccgccgcgctcgccggggacaggacgaggcagccgcagcagcagtcgtacctcccctaccgccccggcatcgtcggcttcttcgccaccgcgcacgcgctcggccgctcgcaccacccctactagcttattaccttcattaattagtttaggtaacttcccgccggcggcgcggcgatcgcctccggagataaagattctttcgttcataaatacctagcacctatgcttaattccatgtccatcaaatatgttcatatgtcaactgctcttttcgccatgcattccgatcttgtgaaatgcgaatacaaacaaaaaaaaa

SEQ ID NO: 125284 - DNA, 1554 bp, Zea Mays
gtttctaaaatctttcccaaattcaaacaccccttaatcttatactttgactgccattagtataagattgaagcctcctaatttgaaggggtgtttatcacaaacaaacttgtacatgagtatttgaaaaccttcaaacgctaatcctagcgagttataagttagtacaaaagggaggcaaatgagttctggacccgagcaggaaagaaaccccactcccaactcgtttccctccacccacatggcgctccaggcgcaggcctccccgtcgccgtccacctcgccgacgcgcgagaggacgggcagcggcgagtggcctgacgacgtggacaagctccccgccggcgcatctgcctctccgccctactcctccgacgccgtcgagctcgtcgtcgtcgcctccacgcaccacgccgccgccgccgccaggtacgtgccgccgcgcgccgcgtcgcacaccgccgacccgaaccccggacgcggaggcgacggggggtggtactcgtggaacggcggccgcaccaccgccccgcctcgtcgcgctcgccccgatccgacgcccacgccgcggcgccagcagcccgcggaggccccgccgcccccgcccgcgcccgcccgggctctgcctccggttccgcctcccgccccggctccggctcccccttccgccccggccccggccccggccccggccccggctccggctccggtccccccttccgccccggccccggttccggctcgaagggccccgctacctcatgcgcaggccaggtcggccgaccaggtcgtgcccaccattctgtcgcgcaagcgccgggccgcggcgatgcagcgcaccgcgctgctggccaggggtgcggccgcggggctctgcctcgccgcgctcatcgtgctcgccgcagacacccgcaagggctgggcccgcgactcctacagcaactacacccagttccggtactcggaagccgtgaacgtgatcggtttcctgtactcggtgttccagttcgtcgcgctcgtcgagctcatgaggaggaacaagcatttgatcccccatcgcaagcgtggtctcttcgacttcaccatggaccaggtgctagcataccttctgatatcgtcgtcgtcgtccgcaaccgctcgagtgagcgacctgatcgacaactgggggagcgaccctttcccgacgatggcgaacggctccatcgccatatccttcatggcgttcgcggtgttcggcatctgctccctcatctccgcgtacaacctgttccgccgagacatgtagccgccagccgctctcgtcaacctcttgttgcccttccattgtatttgtggacacgagttttcggcgcggacttcacattgtgctgtacgtgtgtgtatatgtgtgtgtgtgatgggaactctgaactgctagcaaataatatatctctacacggtgaagggcagctcacttgtatggtgaaccgaatgtgggaaaaagaagttctagtggctctgaatcgaagtagttttgctgcatggcatcaagaccaaaggtaatcgattggtggc

SEQ ID NO: 125285 - DNA, 1855 bp, Zea Mays
gcttctccgtgtattgctcttgctgtatgattacttggtcggtgcagctcaaatctcctattacataacactggacatggacttcttcacggaatatggggaggcgagtcagtatcaaatccaagaggtcattggtaagggaagttatggagtagttgctgctgcaattgatagtcacactggggagcgggttgcgatcaagaagataaatgatatttttggtaatgtctcggatgctgctcgcattttgcgggaaatcaagcttcttcgtctgcttcgtcacccaaacatagtccagattaagcacattatgttgccccctacccgaagggagttcaaagatatctatgttgtttttgagctcatggagtctgacctgcatcaagtgatcaaagcaaatgataacctgactccagagcatcaccgctttttcctgtatcaacttattcgtgctctcaagtacatgcattcagcccatgtatttcatcgtgatttaaagcccaggaacatactggccaattcagacagcaaactaaagatctgcgactttggacttgcacgtgcatcatttaacgactctctttcagctatctattggacagattatgtcgcaacaaggtggtaccgggctcctgaattatgtggctcctttttctccagttacacccctgcaattgatatttggagtatagggtgcatttttgctgaagttctcaccggaacgccattgtttcctgggaggaatgttgtgcaccaattagacttaataacagatctccttggaacaccatcgtttagatccttatcccagattcacagtgataaggccagggaatatttgcttggcatgccgaggaagcgccctattccattttctcataagttccgtaatgccgatcctctggctctccggttgctagagcgtttacttgcatttgacccgaaagatcgacctactgctgaagaggctttagctgatccatacttcagtggcctttctaaattggaacttgagccttcagcacaaccaatttcgaaggttgactttgaattcgagggaaggaaactaacaaaggctggtgtgagagaaatgatatatcgggagattttggagtaccatccccagatgcttcaggagtacatcgaaggtggagatcagattcacttcctatacccaagtggggtcgatcgcttccagcgacagtttgctcatctcgaggagaactacaggagaggagtagctagcaccccgccgcgaaggcagcccacatctctgccgagggagcgagtctgctcatcagaagatggccacagtcaggactctgacagcgaagagcagagagcagcatcctacgttgcccgaacaaccataagccctccaagatcacaagaggagggcggcaagctccagcctgcctaccagagcgccgccgccgccgcagactcctgcgccaagagctatctgaagggtgccgctagtatcagtggtgcttccaggcgtggcatcaagggggataatggccgaaaggagaaggaatctccgaggctgtgaaagaggtggcgcaggctcgtcacctgttaggcaaaagaggtagcaatggcgccaatgcgactgcaacgtgggatgtcttagtcatcatgcatccaacaacgcaggggggcagtacaagtatgcaggtcatcctagctaggtcgcccaaattaaagcagcctgcttggaggaattagatttgtgtactgttgttaagttttttttttttttttttttgaattcaactgctagattctggcagatctgtcaaccgcactctccttggtttcccaaaatttactggtttgaacaagtttattactg

SEQ ID NO: 125286 - DNA, 2237 bp, Zea Mays
gttagctgacgagcggggggtggggcatcaccaactggagcgcgtcttcaaccaactttgtccggatgcgctgaatttttgttgctgtgatctctctttctcaccgcgatcctgcacctttccctcctgtccaagatttccctcccctctaataattcacctgaagtggagttcctgatgcttattctggcgtccgcctagcggcgccgcgctgctactagctcgctcgttaggtggcttctggtgtgggtgttctgaaacaatacgacttctgcccacgcgccgcccccccacactccacccgtgctgtccatttgcttgaatatattctttttcgttgtcatgtgtgccgtgggaattgctccattcgattggtaagtgctcgtctctgaccatgcagcctctcatccggattggattggttccggctgttgcttgctccaggaagaacactggacatggacttcttcacggaatatggggaggcgagtcagtatcaaatccaagaggtcattggtaagggaagttatggagtagttgctgctgcaattgatagtcacactggggagcgggttgcgatcaagaagataaatgatatttttggtaatgtctcggatgctgctcgcattttgcgggaaatcaagcttcttcgtctgcttcgtcacccaaacatagtccagattaagcacattatgttgccccctacccgaagggagttcaaagatatctatgttgtttttgagctcatggagtctgacctgcatcaagtgatcaaagcaaatgataacctgactccagagcatcaccgctttttcctgtatcaacttattcgtgctctcaagtacatgcattcagcccatgtatttcatcgtgatttaaagcccaggaacatactggccaattcagacagcaaactaaagatctgcgactttggacttgcacgtgcatcatttaacgactctctttcagctatctattggacagattatgtcgcaacaaggtggtaccgggctcctgaattatgtggctcctttttctccagttacacccctgcaattgatatttggagtatagggtgcatttttgctgaagttctcaccggaacgccattgtttcctgggaggaatgttgtgcaccaattagacttaataacagatctccttggaacaccatcgtttagatccttatcccagattcacagtgataaggccagggaatatttgcttggcatgccgaggaagcgccctattccattttctcataagttccgtaatgccgatcctctggctctccggttgctagagcgtttacttgcatttgacccgaaagatcgacctactgctgaagaggctttagctgatccatacttcagtggcctttctaaattggaacttgagccttcagcacaaccaatttcgaaggttgactttgaattcgagggaaggaaactaacaaaggctggtgtgagagaaatgatatatcgggagattttggagtaccatccccagatgcttcaggagtacatcgaaggtggagatcagattcacttcctatacccaagtggggtcgatcgcttccagcgacagtttgctcatctcgaggagaactacaggagaggagtagctagcaccccgccgcgaaggcagcccacatctctgccgagggagcgagtctgctcatcagaagatggccacagtcaggactctgacagcgaagagcagagagcagcatcctacgttgcccgaacaaccataagccctccaagatcacaagaggagggcggcaagctccagcctgcctaccagagcgccgccgccgccgcagactcctgcgccaagagctatctgaagggtgccgctagtatcagtggtgcttccaggcgtggcatcaagggggataatggccgaaaggagaaggaatctccgaggctgtgaaagaggtggcgcaggctcgtcacctgttaggcaaaagaggtagcaatggcgccaatgcgactgcaacgtgggatgtcttagtcatcatgcatccaacaacgcaggggggcagtacaagtatgcaggtcatcctagctaggtcgcccaaattaaagcagcctgcttggaggaattagatttgtgtactgttgttaagttttttttttttttttttttgaattcaactgctagattctggcagatctgtcaaccgcactctccttggtttcccaaaatttactggtttgaacaagtttattactg

SEQ ID NO: 125287 - DNA, 2285 bp, Zea Mays
gttagctgacgagcggggggtggggcatcaccaactggagcgcgtcttcaaccaactttgtccggatgcgctgaatttttgttgctgtgatctctctttctcaccgcgatcctgcacctttccctcctgtccaagatttccctcccctctaataattcacctgaagtggagttcctgatgcttattctggcgtccgcctagcggcgccgcgctgctactagctcgctcgttaggtggcttctggtgtgggtgttctgaaacaatacgacttctgcccacgcgccgcccccccacactccacccgtgctgtccatttgcttgaatatattctttttcgttgtcatgtgtgccgtgggaattgctccattcgattggtaagtgctcgtctctgaccatgcagcctctcatccggattggattggttccggctgttgcttgctccaggaaggccctcttcatttgagacacatctgttaccgagcgagttctagattcgaacactggacatggacttcttcacggaatatggggaggcgagtcagtatcaaatccaagaggtcattggtaagggaagttatggagtagttgctgctgcaattgatagtcacactggggagcgggttgcgatcaagaagataaatgatatttttggtaatgtctcggatgctgctcgcattttgcgggaaatcaagcttcttcgtctgcttcgtcacccaaacatagtccagattaagcacattatgttgccccctacccgaagggagttcaaagatatctatgttgtttttgagctcatggagtctgacctgcatcaagtgatcaaagcaaatgataacctgactccagagcatcaccgctttttcctgtatcaacttattcgtgctctcaagtacatgcattcagcccatgtatttcatcgtgatttaaagcccaggaacatactggccaattcagacagcaaactaaagatctgcgactttggacttgcacgtgcatcatttaacgactctctttcagctatctattggacagattatgtcgcaacaaggtggtaccgggctcctgaattatgtggctcctttttctccagttacacccctgcaattgatatttggagtatagggtgcatttttgctgaagttctcaccggaacgccattgtttcctgggaggaatgttgtgcaccaattagacttaataacagatctccttggaacaccatcgtttagatccttatcccagattcacagtgataaggccagggaatatttgcttggcatgccgaggaagcgccctattccattttctcataagttccgtaatgccgatcctctggctctccggttgctagagcgtttacttgcatttgacccgaaagatcgacctactgctgaagaggctttagctgatccatacttcagtggcctttctaaattggaacttgagccttcagcacaaccaatttcgaaggttgactttgaattcgagggaaggaaactaacaaaggctggtgtgagagaaatgatatatcgggagattttggagtaccatccccagatgcttcaggagtacatcgaaggtggagatcagattcacttcctatacccaagtggggtcgatcgcttccagcgacagtttgctcatctcgaggagaactacaggagaggagtagctagcaccccgccgcgaaggcagcccacatctctgccgagggagcgagtctgctcatcagaagatggccacagtcaggactctgacagcgaagagcagagagcagcatcctacgttgcccgaacaaccataagccctccaagatcacaagaggagggcggcaagctccagcctgcctaccagagcgccgccgccgccgcagactcctgcgccaagagctatctgaagggtgccgctagtatcagtggtgcttccaggcgtggcatcaagggggataatggccgaaaggagaaggaatctccgaggctgtgaaagaggtggcgcaggctcgtcacctgttaggcaaaagaggtagcaatggcgccaatgcgactgcaacgtgggatgtcttagtcatcatgcatccaacaacgcaggggggcagtacaagtatgcaggtcatcctagctaggtcgcccaaattaaagcagcctgcttggaggaattagatttgtgtactgttgttaagttttttttttttttttttttgaattcaactgctagattctggcagatctgtcaaccgcactctccttggtttcccaaaatttactggtttgaacaagtttattactg

SEQ ID NO: 125288 - DNA, 2050 bp, Zea Mays
gccgctgtgcttcgcgtgggccgtgcaactcgccggagacggaagcgacgtcggcgagaaccgcgctgccgttgccgtcgaggcgatatggtcctaccctcgtcgacggagacacggagtccgcagccgcctccgcctccggggcgctcgtcgtggtcggcgccgcgtgatccgacgggggtctagaatccgggcctcgtcttcatcacccgccacccgccggcgtccgcaagatgcgcgagatggcaccgccgctacaagaacactggacatggacttcttcacggaatatggggaggcgagtcagtatcaaatccaagaggtcattggtaagggaagttatggagtagttgctgctgcaattgatagtcacactggggagcgggttgcgatcaagaagataaatgatatttttggtaatgtctcggatgctgctcgcattttgcgggaaatcaagcttcttcgtctgcttcgtcacccaaacatagtccagattaagcacattatgttgccccctacccgaagggagttcaaagatatctatgttgtttttgagctcatggagtctgacctgcatcaagtgatcaaagcaaatgataacctgactccagagcatcaccgctttttcctgtatcaacttattcgtgctctcaagtacatgcattcagcccatgtatttcatcgtgatttaaagcccaggaacatactggccaattcagacagcaaactaaagatctgcgactttggacttgcacgtgcatcatttaacgactctctttcagctatctattggacagattatgtcgcaacaaggtggtaccgggctcctgaattatgtggctcctttttctccagttacacccctgcaattgatatttggagtatagggtgcatttttgctgaagttctcaccggaacgccattgtttcctgggaggaatgttgtgcaccaattagacttaataacagatctccttggaacaccatcgtttagatccttatcccagattcacagtgataaggccagggaatatttgcttggcatgccgaggaagcgccctattccattttctcataagttccgtaatgccgatcctctggctctccggttgctagagcgtttacttgcatttgacccgaaagatcgacctactgctgaagaggctttagctgatccatacttcagtggcctttctaaattggaacttgagccttcagcacaaccaatttcgaaggttgactttgaattcgagggaaggaaactaacaaaggctggtgtgagagaaatgatatatcgggagattttggagtaccatccccagatgcttcaggagtacatcgaaggtggagatcagattcacttcctatacccaagtggggtcgatcgcttccagcgacagtttgctcatctcgaggagaactacaggagaggagtagctagcaccccgccgcgaaggcagcccacatctctgccgagggagcgagtctgctcatcagaagatggccacagtcaggactctgacagcgaagagcagagagcagcatcctacgttgcccgaacaaccataagccctccaagatcacaagaggagggcggcaagctccagcctgcctaccagagcgccgccgccgccgcagactcctgcgccaagagctatctgaagggtgccgctagtatcagtggtgcttccaggcgtggcatcaagggggataatggccgaaaggagaaggaatctccgaggctgtgaaagaggtggcgcaggctcgtcacctgttaggcaaaagaggtagcaatggcgccaatgcgactgcaacgtgggatgtcttagtcatcatgcatccaacaacgcaggggggcagtacaagtatgcaggtcatcctagctaggtcgcccaaattaaagcagcctgcttggaggaattagatttgtgtactgttgttaagttttttttttttttttttttgaattcaactgctagattctggcagatctgtcaaccgcactctccttggtttcccaaaatttactggtttgaacaagtttattactg

SEQ ID NO: 125289 - DNA, 2100 bp, Zea Mays
acccatcccccgtgcggtcgcatcgcatcccccaccccacccaccatctcgcctcctctcccgcacgaatctgccaaagccacgggccgacagacaggggtcgtggcgggagagagagagagagatcgccctctcgctccgcgctcactcgctcgtccgccggcgatgctgaggaccaagaccccgcggccgcgcggcggcaaggcgcgccgcgcccgcgcccggggccgcctcggcggtcaagcccgccaaggccgacgggaggtcgccgtcgggagagctctcgctgcagctggagcacgtctccctcacctccttgctctccgaccgccgccccgcatccgggctcacgcgcttcgaggtgctcctagaggaagaggagtcgggctgctaccgcgccgacccgaccccgcagccgccgcgacttcctgagccacaatctatgcccccgccgccgccgccgccgccgatctcgcaggcatcgccggtggacgcagacgagaccatggaggagaaggattgctgcatcctcagccaggatttcttctgcaccccggactacatcacgccggagatgccgcaggtggccaacgagttcgacgacgacgacaaggagaacatcccctgcccaaaatctccggagaagtcagcgaaccctcgtagcaagcggtacagaaccgattgttctcccaaagctcgggaggttacggacttctctttcgaccatcagattacgccggttctgtttgacagcctgactcgagatgattcggaagaagagcagccgaagcagcctgcgctggaaaagaggggtggttatgtctcccagtcagcagtggctctgcgttgccgggtgatgcctccgccatgcgtcaagaatccatacctcaataccgatccatgcatagatgctgctgtttacggtgggaggcagtgcaactcagcagtattttctccttcaattggtggtaatggtctttcacgctatcgaactgatttccatgaaatagagaaaattggttatggcaacttcagtgttgtgttcaaagttctgaataggatagacgggtgcttgtatgctgttaaacggagcatcaagcaattgcataatgatatggaaaggaggcaagcagtgaaagaagtccaagctatggcagccttaggttctcacgagaacatagttcgatatttcacctcttggtttgagaatgagcaactttatattcagatggaactctgcgaccgctgtctatctatgaatcggaaccagccagtgaagcgtggggaagccctggaactgttgtatcagatctgcaaaggcttggatttcatgcacgaacgtggcatagcacaccttgatgtgaagcctgataacatatatgtcagaaatggtatttataagctcggggattttggctgtgctacacttgttaaccggagtctagcaattgaagatggagattcacgctatatgcctccggaaatgctgaatgataagtatgagcatcttgacaaggttgatatcttttctcttggggcagccgtctatgagctaataagaggcaccccgcttcctgagtctggatctcactttacaagcattagagagggtaagatcgcattgcttccagggtgcccgatgcagtttcaaagtttaatcaagtctatgatggaccctgatccggtgaggcggccttcagcaaaggagatcctgagacacccttcgtttgacaagctccacaaggcctcatcgaagtagaagtgctgccgcgcccccgtcagatcagagcagccggcaaagggaattccgcagctgcgtcacattcaccatcagctgctcccaatttttgtgtatctatctatctatatgcgtgtgccatgtgccctgttctgatactgtagaagatggttggaaacgaagcagggatctgattttaactccaggaactggagcacgagcagcgtctgtaaaggactaaaaggctgttgctgctgttgtgttaaggttgtgcctctttttggtttctgatgcacgcttgaaaccatcaaccctgtgcctttttttggggtgcttgttatcagttgcatctggacagcgaa

SEQ ID NO: 125290 - DNA, 1230 bp, Zea Mays
acccatcccccgtgcggtcgcatcgcatcccccaccccacccaccatctcgcctcctctcccgcacgaatctgccaaagccacgggccgacagacaggggtcgtggcgggagagagagagagagatcgccctctcgctccgcgctcactcgctcgtccgccggcgatgctgaggaccaagaccccgcggccgcgcggcggcaaggcgcgccgcgcccgcgcccggggccgcctcggcggtcaagcccgccaaggccgacgggaggtcgccgtcgggagagctctcgctgcagctggagcacgtctccctcacctccttgctctccgaccgccgccccgcatccgggctcacgcgcttcgaggtgctcctagaggaagaggagtcgggctgctaccgcgccgacccgaccccgcagccgccgcgacttcctgagccacaatctatgcccccgccgccgccgccgccgccgatctcgcaggcatcgccggtggacgcagacgagaccatggaggagaaggattgctgcatcctcagccaggatttcttctgcaccccggactacatcacgccggagatgccgcaggtggccaacgagttcgacgacgacgacaaggagaacatcccctgcccaaaatctccggagaagtcagcgaaccctcgtagcaagcggtacagaaccgattgttctcccaaagctcgggaggttacggacttctctttcgaccatcagattacgccggttctgtttgacagcctgactcgagatgattcggaagaagagcagccgaagcagcctgcgctggaaaagaggggtggttatgtctcccagtcagcagtggctctgcgttgccgggtgatgcctccgccatgcgtcaagaatccatacctcaataccgatccatgcatagatgctgctgtttacggtgggaggcagtgcaactcagcagtattttctccttcaattggtggtaatggtctttcacgctatcgaactgatttccatgaaatagagaaaattggttatggcaacttcagtgttgtgttcaaagttctgaataggatagacgggtgcttgtatgctgttaaacggagcatcaagcaattgcataatgatatggaaaggaggcaagcagtgaaagaagtccaagctatggcagccttaggtcacacaataaacttttggcacttcattttcagctgcatttgctaagatggttataacatctgtac

SEQ ID NO: 125291 - DNA, 1978 bp, Zea Mays
gcacgaatctcgcagccaaatttccaattattttcttgtccagccattgccacaactcgcaaggaagccctttttctcatggcggcggcggcggcggcggcgggtggagagggagatgtaggaggaggcaacagcgcgggcgccctactgcgcatcttcgtgggcgggctggcggagagcgtgggcgcggccgacctggaggccctgttcgcctccgctgggcgcgtcgccggcgtcgagttcgtgcgcacaaacgggcgcagcttcgcctatgtcgacttccactgccccaacgacaaggccctcgccaggctcttttccacctataatgggtgcaaatggaaaggagggaagctcaggctggagaaggccaaagagcactacctcactcgccttaaacgagaatgggagcaggatgcggctgcagcggcgtcaaaggaggctgcgctgaaagataatgcagagaaccagaagccgaaactggataaggctgctttggagggcttgaagattaacatctacttcccaaagctgaggaaggtgaaagctttgccactgaaaggcacaggaaaacataaatacagtttccgacatattgaagttccttcttatccaattcatttctgtgactgtgaggagcactgtggacctcctgaggaagctaataatgaatatgcttctgttctcaatgctgctgcatatgagaaggaacgtaacattatgaattctgtgatgaacaagctttttgagaaggaaaatgaacattttgattcaggtgcaatggagaaatgtgatgaccgtactgataccattgaaccctccaatactgtgaatggcatgcaaattgaagagacggaagatgctccagaggacttggatgacttgcaaatggaagaaacggaagagtcttcagatgaagatttagatgatgaccttgtgattaacattgctccccgcaagtccaataagccagcagttcgagagaacataaagcaggaagtgaataaggactcacagttacaaaagcgtccaaggattgaagagacttccctgccaaagaagaggcagaaatctgaagcctcatctgaacctataaaaaggaatggagaacaacatgtttcagttactctagacactagaaccgcaggcaagactttgcctgcaaaatcagaagccagccaaaatgaacagaagtctctggatttgaaaggaaaaagaacatatgagttctcttcggcactcccaaaagacaaaagctctgcagatcctcaaggcattacggctctagcaagttcttctatcaaaactggaagtgcacaaaacactggttctattgaaccgaaaagaggttattcatggattcagaaatcagcctggagagatctggtagggggcacggggagcgcatctttcagcatatcgcaggtgttgcctaacaacaatccagcaccagcagtgttttcaaatgttgctgggagcgagaggtcttcgaaatcctcggaagctacagcacaactcttgagttccgtgggaacgctgtctaccagcactgcagatgagtcgacagaccatgccattggtggcgagcctaaggagagcaataagccgcagaaggtgcgggtggtcccgaagatcaccattagtgaagtttgccctttcatgagaaacacggagtcgcaaaagcaatgggcaaaggcgaagaaagctgtaactgggttcgccaagaagagaaacgagagcagcacaggaaagggaaagccatccaataagcaataaaactattttgaagatgaccgtagctgttgtattacgatgactatcacataccagtggcgttttttttccttgtataagagcaatccaaatttcatgtttctgtctgcgtgttgtgaacactttcttgcaacacgatcgacctctaaactcaagtattattaattatgatatgatctatatagttctgataatgtcataaatt

SEQ ID NO: 125292 - DNA, 5714 bp, Zea Mays
atgaatgtgggacatgctgcccacctgtccgggcagacagcgcacatgaatcaagttcctggctccggtgttggcattggtgttggcggctcagacgggctaccgcagcaccagccaatgcaggagatggcggcgctctcaggaatggaccagcagtttgtcatgcttcggaccgctatgcgcgacaagatatctgactatataggaagaaaacagtcaccgggtgattggcggaaacggttgcctgaactggcaaaacggcttgaggagatcttgtacagaaaattcccaaacaagcatgagtactacaatatgatgaagggaccagttgagccacaattgcaatttgctatcaagaccttgagtgctcagaaccaacacaatcaacaaaacccacaaatgacaaggcaaatatcatcgtcctctagctatggtgctatgattcctacccctggtatgacgcaaggcaccagtgcaggttctaggactccttatgtcacggagaccaatgctctttcatcgtctggtgcatgcatggttcctcagaatgctaacatgggtacctcaatgcaaggtccaatgtctaacgggtaccagcatttaaataccaacatttcacaaaattctaccacaaataatgtcgaatctacaatgggttcagttggcgttcagcgacaactatctcatatgatcccaactccaggattcagtaatcaacagaatgtaccttcaaatcctgactattcaaatggaactggatacttcaacggtgagtcagctgtggcgccacatatgcagcaccagaaacaatttcctagcaaccacaatagcaatcaaattcaacatattgggggacacaataattctgggatacattcaagcttgctggacaactcatctgcctatggtttatcagatggccacatgaatggtggcataggagtgcatgggtcaaatatgcagctaacaaacaggactactgccccagaagcatatatgaacatatcctcttatggcaattcgcccaaacctatgcagcagcaattcaatcagcaccctcagcagagaataccgacatcagttgatatggctggttccggcagcttttatgctattggctctacccctttaaccacagcaaatagtcagagcatgaatgttgcaaatttacaatctagatcaagcatgaatcagatgttggtttccaatcagctaaacattcagtccgtccagcaacagtcccagataaaaaatgggcctttggatcaaacagagaaggtgaattttcagtcaacacagctgactcatgatcaactactacaccagcacccaatgtcgcagcatcaggtgcaacctaattcccagtttattcaaaatcagtatcatataaatcagcagcagccaaattcacagcatcagcaggctatgttaaggaacaattcccttaaacagtctcaaatggcttccaaccattcaatgcaactgccagaacaggggactctgccacacactgaactagtttcttcacaagctagtgatcctgctgaccttccaaacttccagggtcaataccagcaaagaaatgctcttgacaatgttaaaggagggcagatgcttggtcatctatctagctctcaaaattttcttccttctgcctcacatggttctcagcaattgttgccctctaatccgcagcttgataacggttcaaatgctgtaagttatgtgctgaaaggatcacagacagagcaaatgctgctttctcaatggcagccacaaacaatggaaaaggctcctgtcgctactaattcatcactcgaaaaacaagtacaagaagattgttgtcaaagaataatgtcacaagatggagtacagcaaccattttcatcagattggtgtctttctaatggcactctcgcttctgttgatcctgcagtgccaaaacccacagctggagggtttgggcaggtcaagagaaatattcattacctccgtcagataaagtggttgctgttgctgtttcatgcaaaaacatgcacataccctgttggaagttgtaagttcaatggttgtgttcaggtgcaggagcttttgaaccattttcagaattgtcaaaggaaagattgttcgtacaggagttgcactaagtcaaaagcaatgtctcaccattataaaacttgtgtcgatgagcaatgtcctgtgtgcagcgttgtaaggaagtttttgcgccaatcaactgaacaggcatctaagcaaaaaactcttgagtctagaaaacttgctcaacaaaatgtgcctcagagaatcatgaacgggatagaaggtgatagaatggatgttgatccaatgtcagctgaagcgttcgaggatcaaccatctgttccaaaacgtttaaagatgcatcttccatcactcagtggcccagaaaatgatatctctgtagtctccaatcatcatgtaaacccaggctttctattgcaggaagcacagcctgagcagcttgagcacaataataggacaacatatctgaaacgagaggtagatgcaaaggctgacattcgggctcctcaaaagcccataaaaataagttatgacattgatgaaaatgtgactacatcaaggcataatgtgattcctggtgttcccagtgagatggactctcatatcaagcaagaaaacttgtcagttaacaaagagacaagtgaaactgcccttgaggttaaaaatgaaacaaatgatctaactgatgcgactgtgactaaatcaggaaaaccaaaaataaaaggtgtttctatgattgaattgttctatccagatgaagtagatgtacatattgacagtctaaagctgtgggttggtcagagtaaggctaaagctgaaaagaatcaagctattggtcattctgagaatgagaactcttgccagctctgtagagtagagaaacttacttttgaacctccaccaatgtattgttctccttgtggagctcggataaagcgaaacgcaccatactacgctgtaggtactggtgatacacgccactatttatgtatcccttgctacaacgagtctcgtggtgagactattgaggttgaaggtcaaacatttccgaaggcaaagttagagaaaaaaagaaatgaggaggaaacggaagaatggtgggttcaatgtgacaaatgtcaatgctggcaacatcaaatttgtgctctatttaatggaagaaggaacggtggaggacaagctgaatatacttgcccccattgctacgttgaggaggtcaaatgtgggctgcgcaaacctttaccacagagtgctgttcttggggcaaaagatttgccaagaactgttcttagtgatcatatagaagatcggttatttaaacgacttaagcaggagaaacaggaccgtgcagctgctgctggcaaaagtattgatgagattcctggagcggaaggacttgtggtcagagttgtttcatcagtggataaaaagctggaggttaaaccacgttttttggaaatttttcaagaagacaactaccctacagagttcccttacaagtccaaggctgttctcttgttccagagaatagaaggtgtggaagtatgtctatttggcatgtatgttcaagaatttggtgcagaatgctcttccccgaaccagcgccgtgtttatttgtcatacttggattctgttaagtactttagacctgagattaaaacagtatccggagaggccttgcgtacatatgtataccatgaaattctgataggatatcttgaatactgtaagctgcgggggttcacaagttgttacatatgggcttgcccacctttgaagggtgaagattacatcttatattgccatcctgagattcaaaagactccgaaatctgacaaactgcgtgagtggtacttatcgatgcttcggaaagcttctaaggaggaaattgttgttgagctgacaaatctatatgaccatttcttcatcactatggggggatgcaaggctaaggtgactgcttctcgcttgccatactttgatggagattattggccaggagctgcagaagatatgatcaatcaactccgacaagaagaagatgaccgtaaacttcagaaaaagagtaagacaaagaagattattacaaaaagagctcttaaagctgctggccacaccgatctcagcgggaatgcttccaaggatgctatgttgatgcaaaagcttggtgaaaccatatatcctatgaaggaagatttcattatggtccatttgcagtattcatgtagtcactgctgtacccttatggtgtctggaagacgttgggtttgtcatcaatgcagaagtttttacatctgtgacaagtgttatgacgcagaacagcaacttgaagacagggagaggcacccgtgtaatagtagagacacgcatatgctccatccggttgatattgttggggtgcccaaagataccaaagatagagatgacatcttagaaagcgagttctttgacaccaggcaggcattccttagcctttgccaaggaaatcattatcagtacgacacgcttcgccgcgcaaagcattcgtcaattatggtgctataccacctgcacaatccaactgcgccagcatttgtcactacgtgcaatgcctgctgccatgatatcgaaactggtcaaagctggcggtgtgagatctgtccagattttgacgtgtgcaacgcttgtttccaaaaaggagcggttactcatcctcacaagttaacgaaccatccatcagctgctgaccgtgacgctcagaacgcagaagctcggcaaatgcgtgttcagcagctaagaaagatgctcgatctcctggtacatgcgtcgatgtgccgctccggcagttgccagtatccccactgccgaaaagtaaagggactattccgtcacgggatgcagtgcaaaacccgtgcttcgggaggatgcgtcctctgcaagaagatgtggtacatgctccaactccacgcccgggcttgcaaagattcagagtgcaaagtgccacggtgcagggatctgaaggagcatctcagaaggttgcagcagcagtctgattcccggaggagggctgctgtgaatgagatgatgaggcagagagcggcggaagtggccgcaaactgagtagctgcctctgtacaggggtatatatctttgtggaaagaggataggaagtacgcagggcaacaagaaagattggggcggttgaatttgaagggggggattggttggtgaagacgaagcgcttcaacgtggatttcttatcctctgccccgtcgtcctccaaagagctcaagaaggcacaccattactgatgttaggcagtgctaaccagccacaccctgctcacgttgtctcctcaacccttgggggtgtggtgaattctttgatttgacctggtggtgctagctgggctgaagtgagctgatctcctcgtcgccgggtgtctctggacagtgccagccgtgtagttctgctgagacatttggttagccgctgatcttccccctcaccactctcctctcgtctcggtccaggatagataggagggtataggttaataaaagaaaaaaaagggtaaatagggacgggcgtttatttgtttatttctgcccccttctcccatccattttgtaggactcaaccttgataaaagtgtaaagcaaagtaatctctcc

SEQ ID NO: 125293 - DNA, 2505 bp, Zea Mays
cgcccgaccgttttcactcttagcccacactacgttcttaataggagtatagatttcaacactttcacttcacataacggctgtgtcctgtagctgctctcttttatggttgatggttacgacctgaacagatcgatcgtccttcctgtcgtttcgtttcctcgccggcagggcactgggtacgccgccgccgcctcaacgccaccacgctgccgccgcgccagttcgtcatcgcgagacacaagacacgtgcctcgcttccccccgggccggttggccgtcgctgttctgttcctatttcttggcaactccgcccgtttcacctccggaggaccgacagcgacggcgccagtagatagatgcactactgacgccactggccacctcgagctcgagtgccaagggacgccacgagaccaaccgtgaggacaggacagcggtcgcctttgcccgcggatccgcggatttcgtcttcttgggtgccatggatccagtcgccggcacggcggagcatcggggcccgttggaagtgcgcgcccgcgcgcccggcaagatcatcctcgcgggcgagcacgccgtcgtccacggctccgccgccgtcgccgctgccatcgatctctacaccaactcctccctcctcctccgccccacaggcccaggagagggtggcggcgctggctccggcgcggtggagctggacctcagggactcgggcctcaccttctcgtggccgtgctcgcgcctccgcggggcgctgggggaggagatcagcgccaaccccggggctccggcgccgtgctcccctgaccagctggccgccattgccaggctcttgcaggaccaggagatccctgaggccaagatctggctctccgccggcctctccgccttcctttttctctacgcctccattttgggatgcaggcctggcaaggcagtggtgtcctcggacctgcccatgggcgcagggctcggctcatcagcggcattttgtgtttccatgtcgggggcgctattgactgctgctggtgcagtaagtgttggagcacgcaggggtgctgagggttgggaggtgttggagaagggtgctcttgagctggtcaaccaatgggcgttccaaggggaaaagattattcatggcaagccttctggcattgacaattccgtcagcacttttgggaaaatgatcaaattcaagaagggggaactgacaaaccttgagtcctggaacccagtcaaaatgcttattactgatacaagagttggtaggaacacaaaggcattggttgctggtgtgtctgaaagggcgtctaggcatccagatgctatggcttctgtcttccatgcagtgaactctattagtgaagagctttcaagcattgttgagttagcagccgaggatgagatagccatcacctctaaggaggataagctagcagagcttatggagatgaaccaaggtttgcttcagtgtatgggagtcagccattcttctatagaaactgtgttgcggaccactctgaaatatagcttggtctcaaagctaactggagctggtggtggaggctgtgtgttgactctaataccgacgtgtatccttttttatatatcccctggctgcatcttttcctttatggttttatacaaaataaacaccatacaacttatgtgtgatttctgttaatctttaacatttcaactcaaagcttttcagaaatctgggtcttgatatttgcattaataatgaacctgacagtttgggaacttgagaactacagtggcctgtcttatgctctctctgtttgaaatcgtagttcattttggctttgtcctaagtcgattttttttttaactttgaatgaagtgcttgttacttaacactatatagtcatgtagaataattctaggttccatcccatctaatatatatgaggtttttaaataaatatatcaatgtggaaggacaggatctgtagcagtttaaattcctaaacatccatagatctcatcgtatctgagtttctgttctgtacctacttagagaagtttttcatctgactgtcattttcaataatgtcaaatgcttccttgacatgattatcagtatcggccaatactgttctggagaaagtcaccacagagctcgaatctcacggttatcgctgcttcaaagttgaggttggtgggcgaggtctccaagtattccgtggatagcactcatcctatttcaaggagatgttgtaccaaacttagatggcttacctgcattgaagctgtttagattctcttcttgagttattccaagatcatgataggatattcttctcctaagcctagcaggttcttgtatccagtactttgctccaggattaggacattcttatgctatccctagcgatcttgtatcaaataagctcatagatgcatgatcattgctggtgtgattgttgtattaagtaaacagacttttaattgctccaaatgtcgtatcgacttcatgatgcc

SEQ ID NO: 125294 - DNA, 1922 bp, Zea Mays
acttcacataacggctgtgtcctgtagctgctctcttttatggttgatggttacgacctgaacagatcgatcgtccttcctgtcgtttcgtttcctcgccggcagggcactgggtacgccgccgccgcctcaacgccaccacgctgccgccgcgccagttcgtcatcgcgagacacaagacacgtgcctcgcttccccccgggccggttggccgtcgctgttctgttcctatttcttggcaactccgcccgtttcacctccggaggaccgacagcgacggcgccagtagatagatgcactactgacgccactggccacctcgagctcgagtgccaagggacgccacgagaccaaccgtgaggacaggacagcggtcgcctttgcccgcggatccgcggatttcgtcttcttgggtgccatggatccagtcgccggcacggcggagcatcggggcccgttggaagtgcgcgcccgcgcgcccggcaagatcatcctcgcgggcgagcacgccgtcgtccacggctccgccgccgtcgccgctgccatcgatctctacaccaactcctccctcctcctccgccccacaggcccaggagagggtggcggcgctggctccggcgcggtggagctggacctcagggactcgggcctcaccttctcgtggccgtgctcgcgcctccgcggggcgctgggggaggagatcagcgccaaccccggggctccggcgccgtgctcccctgaccagctggccgccattgccaggctcttgcaggaccaggagatccctgaggccaagatctggctctccgccggcctctccgccttcctttttctctacgcctccattttgggatgcaggcctggcaaggcagtggtgtcctcggacctgcccatgggcgcagggctcggctcatcagcggcattttgtgtttccatgtcgggggcgctattgactgctgctggtgcagtaagtgttggagcacgcaggggtgctgagggttgggaggtgttggagaagggtgctcttgagctggtcaaccaatgggcgttccaaggggaaaagattattcatggcaagccttctggcattgacaattccgtcagcacttttgggaaaatgatcaaattcaagaagggggaactgacaaaccttgagtcctggaacccagtcaaaatgcttattactgatacaagagttggtaggaacacaaaggcattggttgctggtgtgtctgaaagggcgtctaggcatccagatgctatggcttctgtcttccatgcagtgaactctattagtgaagagctttcaagcattgttgagttagcagccgaggatgagatagccatcacctctaaggaggataagctagcagagcttatggagatgaaccaaggtttgcttcagtgtatgggagtcagccattcttctatagaaactgtgttgcggaccactctgaaatatagcttggtctcaaagctaactggagctggtggtggaggctgtgtgttgactctaataccgacgttatcggccaatactgttctggagaaagtcaccacagagctcgaatctcacggttatcgctgcttcaaagttgaggttggtgggcgaggtctccaagtattccgtggatagcactcatcctatttcaaggagatgttgtaccaaacttagatggcttacctgcattgaagctgtttagattctcttcttgagttattccaagatcatgataggatattcttctcctaagcctagcaggttcttgtatccagtactttgctccaggattaggacattcttatgctatccctagcgatcttgtatcaaataagctcatagatgcatgatcattgctggtgtgattgttgtattaagtaaacagacttttaattgctccaaatgtcgtatcgacttcatg

SEQ ID NO: 125295 - DNA, 1778 bp, Zea Mays
gccaccacgctgccgccgcgccagttcgtcatcgcgagacacaagacacgtgcctcgcttccccccgggccggttggccgtcgctgttctgttcctatttcttggcaactccgcccgtttcacctccggaggaccgacagcgacggcgccagtagatagatgcactactgacgccactggccacctcgagctcgagtgccaagggacgccacgagaccaaccgtgaggacaggacagcggtcgcctttgcccgcggatccgcggatttcgtcttcttgggtgccatggatccagtcgccggcacggcggagcatcggggcccgttggaagtgcgcgcccgcgcgcccggcaagatcatcctcgcgggcgagcacgccgtcgtccacggctccgccgccgtcgccgctgccatcgatctctacaccaactcctccctcctcctccgccccacaggagagggtggcggcgctggctccggcgcggtggagctggacctcagggactcgggcctcaccttctcgtggccgtgctcgcgcctccgcggggcgctgggggaggagatcagcgccaaccccggggctccggcgccgtgctcccctgaccagctggccgccattgccaggctcttgcaggaccaggagatccctgaggccaagatctggctctccgccggcctctccgccttcctttttctctacgcctccattttgggatgcaggcctggcaaggcagtggtgtcctcggacctgcccatgggcgcagggctcggctcatcagcggcattttgtgtttccatgtcgggggcgctattgactgctgctggtgcagtaagtgttggagcacgcaggggtgctgagggttgggaggtgttggagaagggtgctcttgagctggtcaaccaatgggcgttccaaggggaaaagattattcatggcaagccttctggcattgacaattccgtcagcacttttgggaaaatgatcaaattcaagaagggggaactgacaaaccttgagtcctggaacccagtcaaaatgcttattactgatacaagagttggtaggaacacaaaggcattggttgctggtgtgtctgaaagggcgtctaggcatccagatgctatggcttctgtcttccatgcagtgaactctattagtgaagagctttcaagcattgttgagttagcagccgaggatgagatagccatcacctctaaggaggataagctagcagagcttatggagatgaaccaaggtttgcttcagtgtatgggagtcagccattcttctatagaaactgtgttgcggaccactctgaaatatagcttggtctcaaagctaactggagctggtggtggaggctgtgtgttgactctaataccgacgttatcggccaatactgttctggagaaagtcaccacagagctcgaatctcacggttatcgctgcttcaaagttgaggttggtgggcgaggtctccaagtattccgtggatagcactcatcctatttcaaggagatgttgtaccaaacttagatggcttacctgcattgaagctgtttagattctcttcttgagttattccaagatcatgataggatattcttctcctaagcctagcaggttcttgtatccagtactttgctccaggattaggacattcttatgctatccctagcgatcttgtatcaaataagctcatagatgcatgatcattgctggtgtgattgttgtattaagtaaacagacttttaattgctccaaatgtcgtatcgactt

SEQ ID NO: 125296 - DNA, 1661 bp, Zea Mays
gtggcggcggctgttggctgttgccgccgctgccaccaccgccgccgcggcgccgtgctgtagctagcgatcgagcgagcaacgtagtaggcaggccgggcgcggctgtggccgtgcgtgacgacgaaggaagcaagatgaagcccggcggcggcggcggcggcggcaacggcgtgaccgcgacgacgacggcgatcccgccggacgacctccgctcgcggcgccgcctggccgcgctgctggcgccactcctgctcttcctggcggccgcgctctccttcccctccacgctccacctggccgccgtcccgctcccaacgccgccgatgacgacggtgccgcgccggaccacgcccccgcgggtcgccgtctgcctcgtgggcggcgcgcggcggttcgagctcacggggccctccatcgcgcgccacgtcctgcgcggcggcgcgttcgcggtccccgcggaccgccgcgacgccggccaggcggccgccaccacctcggtggacgtggacgtgttcctgcacgctccgctggacgccgacgcgtacaagctgcccctcctcctggcgcctgcagcgggggcgggcggcggcagcggcaccaccagcaggaatagcaacaacgtcgtcagcctcgccgccgtgcgcgtgttccggccggtgtacctcgatgagacgacgccggcggcgcgcgcgcaggtgctcaccgccgacaactcgcccaacggcatccagggcctgctgcagtacttccgtctggtggaagggtgcctggacatgatccgcgaccgcgagtcgcgaggcaacttcacctacgccgccgtgctgcgcacccgcctggacggcttctggacggcgccgttccgcctcgacgacgacgaccaactcctgtccgggtccgcctacgtcgtcccggagggctcgcgcttcggcgggctcaacgaccggctgggctacggcgggcggcgcgccacggaggcggcgctggcccggctgtcggcgctcccgcggctggccgccgccggccacgcggggctgaactcggaggcggcgttcgcggcgcagctggagctgtcgggcgtggcggcccgcgagcggcgcctcccgttctgcgtcctcagcgaccgcgcctacgcgttcccgccggcgcccgggtacggcgtgcccgtggcggcgctgggcagcgccggcccgctcagcggcgccaagtgccggccgtgccgccccgcctgcgccggcgcgtgcgcccagcgcagcgtcgcgcggctcgagcccgcgtggagctggaccggcggcgccctggagctgtgcgacgcgtcgggcccctgggagccggggtgggaggcgctgttcgacgccgccgccggccgcgacgccgccagggccaggcgggccgtggcgcggatgggcgccggagagtgcgtcgcccggatggaggcgttcagggccctcgcggaccggtgggacgcgcccagccccgccgagatgtgccggatcgggctccgatcccggtcgtcggcgtcgtcggcgccgcctgcgacggtcagtagtagtgacagcagtgcccactggcacgtaccgtcgttgccgaggcagagcaggcaaccatgagtccatatattgcacgcagacgcagcttcgcgatgcaaagattgttttact

SEQ ID NO: 125297 - DNA, 1981 bp, Zea Mays
gccagttcccactatccggtcgacatttgagtatttgacgcgttttgtttgctgtttagaatttgacaaaatccatccactcttgcctctgtcttctcaacgtaaagacaggcagggcgggcacgaagcgaagggaccagccagcgagcggctcgccggcgacgaccctctccccgccccaccccgcccacggaagcacggagaagatgtccgccgcataccctcgtctcctcctctgtctcctgaccctagccctggctctcgcaggggtcgccgcgggcaagatctcggccccccgcaccccgatctcgcgcgacatctaccactccagtgactctcttctgcgtgaaatcaaggctttggttgctcggcattccagcaaattgagtatggacactatcaaaacaagcaacaaaggctattctgcagagctgtttgtagttacatttaatcatgtgaaggagcgcatggataatggctcaaaagttcatatccttctgagctttgggcagcatggcagagaacttatcacctccgaagttgcattacgtcttctctatgttttaacggagaagcccaagatcgctggtgtggatatttcatcctttgagaaactgctggagaaccttgtgatcaaagttgtgccgatggaaaatatgaatggtcgcaaacgtgtcgaagaaggggagctttgtgataggagaaatggaagaggagttgatctcaacagaaattggagtgttgactggggaaagaaagaaaaagactacgacccatacgaggagaatcctggtattgctccttttagcgaacctgaggcccagatcatgagggaattatcaaggtcgtttaaacctcatatttgggtgaacgtgcattctggaatggaggccttatttatgccatatgatcacaagaataccacaccaaatggagcatctgcacattcgatgcggtcagtcttagagaatttgaaccgtcgccatttccaagatagctgcctagttgggtcaggtggtggatctgttggatatcttgcacatggtacaacaactgattacatgtatgacattgcaaaggtgccaatgccgttcacctttgagatatatggagatgagaaagcatcttccgatgactgcttcaaaatgttcaatcctgttgacaagaaaacattcgacagagttgttaacaagtggtgcatggcatttctcattctcttcgaggaaggcctgcgaaacctgcgagacgcgcagatagtgtcgcaaggcacgctggaaaactgggtcccaattggaggagacatcgtcgagataaatgtggagcggaagagcagcatccgtgagaggaggaagctggaaggcctcgaccttggaatgcaggagctaaggacatatttccggctattcttgctgtcaacattcctgttgatgttcatgttctgcgcgcggatatcaaagaacagaaaccgagactcaggtaacttgtttgacccttgaatgaagtaccaaagagagcatcggtgggggggggcctcctccgagctgaacttcgggtgcaaagagcgatcccctcagatcagacgaacaaagcgatctgaaacattcagagctggaatacagctctgccttcgcaccctggtattcggagctggacgtcccgtatactttggacacgaaggatggtggcaggcagtgtctgtttaggttacagcagagacgccagacgatgtggctaactgtttaacaaaattgtagctgtaaaaatcgcccatgtcagtttttttttggtgatgcataggttttactactacattttgatggaaggttgttagtgcacccaacacttggtacggtgccatcagttgatgtaacatctcactgatcgagcggtttatgtggaattgtgttggctcgaatttcttctgggttctcaaattcatttcgtaactttcaaagtttaaatatttatatgtatacatata

SEQ ID NO: 125298 - DNA, 1883 bp, Zea Mays
gccagttcccactatccggtcgacatttgagtatttgacgcgttttgtttgctgtttagaatttgacaaaatccatccactcttgcctctgtcttctcaacgtaaagacaggcagggcgggcacgaagcgaagggaccagccagcgagcggctcgccggcgacgaccctctccccgccccaccccgcccacggaagcacggagaagatgtccgccgcataccctcgtctcctcctctgtctcctgaccctagccctggctctcgcaggggtcgccgcgggcaagatctcggccccccgcaccccgatctcgcgcgacatctaccactccagagctgtttgtagttacatttaatcatgtgaaggagcgcatggataatggctcaaaagttcatatccttctgagctttgggcagcatggcagagaacttatcacctccgaagttgcattacgtcttctctatgttttaacggagaagcccaagatcgctggtgtggatatttcatcctttgagaaactgctggagaaccttgtgatcaaagttgtgccgatggaaaatatgaatggtcgcaaacgtgtcgaagaaggggagctttgtgataggagaaatggaagaggagttgatctcaacagaaattggagtgttgactggggaaagaaagaaaaagactacgacccatacgaggagaatcctggtattgctccttttagcgaacctgaggcccagatcatgagggaattatcaaggtcgtttaaacctcatatttgggtgaacgtgcattctggaatggaggccttatttatgccatatgatcacaagaataccacaccaaatggagcatctgcacattcgatgcggtcagtcttagagaatttgaaccgtcgccatttccaagatagctgcctagttgggtcaggtggtggatctgttggatatcttgcacatggtacaacaactgattacatgtatgacattgcaaaggtgccaatgccgttcacctttgagatatatggagatgagaaagcatcttccgatgactgcttcaaaatgttcaatcctgttgacaagaaaacattcgacagagttgttaacaagtggtgcatggcatttctcattctcttcgaggaaggcctgcgaaacctgcgagacgcgcagatagtgtcgcaaggcacgctggaaaactgggtcccaattggaggagacatcgtcgagataaatgtggagcggaagagcagcatccgtgagaggaggaagctggaaggcctcgaccttggaatgcaggagctaaggacatatttccggctattcttgctgtcaacattcctgttgatgttcatgttctgcgcgcggatatcaaagaacagaaaccgagactcaggtaacttgtttgacccttgaatgaagtaccaaagagagcatcggtgggggggggcctcctccgagctgaacttcgggtgcaaagagcgatcccctcagatcagacgaacaaagcgatctgaaacattcagagctggaatacagctctgccttcgcaccctggtattcggagctggacgtcccgtatactttggacacgaaggatggtggcaggcagtgtctgtttaggttacagcagagacgccagacgatgtggctaactgtttaacaaaattgtagctgtaaaaatcgcccatgtcagtttttttttggtgatgcataggttttactactacattttgatggaaggttgttagtgcacccaacacttggtacggtgccatcagttgatgtaacatctcactgatcgagcggtttatgtggaattgtgttggctcgaatttcttctgggttctcaaattcatttcgtaactttcaaagtttaaatatttatatgtatacatata

SEQ ID NO: 125299 - DNA, 3740 bp, Zea Mays
cccagtgagggcacaggcccctgctcatttctcggttataagtaatagtctagattttcactattaggtcctctgctcggtctaatttaaatgtcctcgctctgacattttagtgttggttgttgtaaatgtgctcatggctcagaatctgctcggttttgtttggttcccgtttccgattgccacccccctcggaggctcggacaagctacctctccacacgatctgctaattgcgctatgcacgcgtagtgttttgaaggcacgtaagtacgcgttagccgttaggtaccagccagcccagccagcccaccagtcaacccgactgaagattgacggaaagcactcgagtcatggtcatggtggcgacaggctgcatcagcatgatccttgcatggtccgtcctcatctccatcctggctgtcggcggcgcggcaacggcaagcgacgaggcggcgctgctagccttcagggcggggctgagcccaggcgccctcgcctcgtggaacagcagcggcggcttctgtaggtggtacggcgtggtgtgtagccgccgacgcaggccgggccgcgtccgcgtggtggcgctgagcctggcgtccagcaacctgtccggcacgctctcgccggccatcggaaacctcaccttcctgcgggtgctcaacctgtcctccaacgcgctccacgggggcatccccgaaaccgtcggccgtctccggcgcctgacggccctcgacgtgggccacaactccatctccggcgcgctccccgccaacctctcctcctgcgtcagcctggagtacctgcgcctcgagtacaaccagctcggcgggcgcgtgccgccggacataggcaacacgctggcccggctccggaccctcgtgctgcggaacaacagcttcacgggacccgtcccggcgtcgctggccaacctgtcctcgcttcggtacctcgccgtggacggcaaccacctgggcggcccgatcccgccgggcctcggcggcatcgccggcctgcagcacctgcatctggaccagaacaggctcgacggcgagctcccgcgctccctgtggaacctgtcgtcgctggtggcgttccaggtgaactacaacatgctgcacggcagcatccctcccgacattggcgacaagctcccggccatacagtacctctggctggacggcaacaggttcagcggggcgatccctccttccctcttcaacctctcaggtctcgtgagcctcggcctctcgctgaacggcttcactggcctcgtgccccccaccatcgggagcctgcgctccgtcacgagtctgtacctgggggagaaccagctcgaggcagacgacggcgggggctgggagttcgtcgcgtcgctggcgaactgcagcagcctccaagtgctcaccctcagcgacaactacttcagcgggcagctgccgcgggcagtagccaacctgtcgacgacgcttcagcagctctacctccacaacaacagcatctccgggagcatcccggagggcatcggcaacctggtcggcttggacctgctctctctggggataaaccccatatctggcgtgataccggaaagcttgggcaggctgacgaacctggtcacgcttggcctgtacagcactagcttggcaggccacatcccggcttctcttgggaaccttaccaatctggtttacctagatgcacacaactcagatctgggaggcctcatcccagccagccttgggaagctgcacaaactagtcctgctggatctgtcacacagccgtctcaacggctcggtccccagggaaatcctcgagttgtcctcgctttctttgtcactggacctgtccaacaatttcctctccggacccattccatcagaggtcggcgccctggccaacctcaacaccttgagcctgtcagggaaccagttcaccggcaacatacctgacagcataggaggctgcgaggtgctggagttcctctcgcttgacaggaacacgttagacggaggcctgcctcaatccttgggcaagctgaaagggctcaacgtactcaacctaaccatgaacagcctatccggtaggatccctgacgccctgggcagcatcggcaatctgcagcagctgggtctagcgcacaaccgcttctccggaccggtcccggagaccctgcagagtctgaagctgctgtggagcttagacgtgtcgttcaatgatctgcgaggcaggttacctgacgaaggcgtcttcagaaacctcacctacaccacggtcgaggggaacggcggcttgtgtggtgggataccaagccttctgctgcctccatgccccgctcttgccgcaagcatgggcagaaaacggtggcccaggattcttaacacagctctgccggtcatcggagcagtagtcgtggtgtttgtttcggctgctgttcttgttcttgtacgccagaccaagctgaaacaaaggcgaaagagagaagccgtatctgaagttaatgacaaacagtttcagagagtttcgtatcacacattgtcaagaggaactgacgggttttcagaggctaacttgctcggcagaggaagatacggttctgtttacagatgtactctagaagaggaagaggaaggtgcaggtgcagctgcaaccgtagccgtaaaagtgttcaaccttcagcaatcaggatcctcaaagagtttcgaggccgagtgtgagactctgagaagggtacgccatcgctgtctcctgaagatcgtcacctgctgctcgagtgctggtccgcaaggcgaagagttcaaggcgttggtttttgagttcatggccaatggcagcttagacgactggatccatccccggtcgagcaaccccactgcagaaaacaccctcagcctttcgcaaagacttggcatagctgctgacatcttcgatgcgctcgactatcttcacaaccacagccatccatcgatcgtccactgcgacctgaaaccaagcaacgttcttcttgcagatgacatgagcgccaggattggcgattttggaatatcaagaatcctacctttaggtacagtagcaaaagctatgcaaaattcagaaagctcaattggaataagaggttccataggttatatcgcgccagagtacgctgaaggctgcgcggtttctggactaggtgatgtttacagcctaggaatactgttgcttgagatgttcacggggaggagccctactgatgacatgttcaaggactccctggacctgcacaggtttgctgcagccgctcttcctgacagagccatagaggtagctgatcagacgatctggctgcatgaagaagcagatggtaatggagacgtggtacatggaagggtaacaacaagtgtcattcggcagtgtttggtgtctgtgcttaggcttggcatatcctgttcaaagcaacagcccagagagcgcgtgttgttagcagatgctgtgacagagatgcattcgatcagggatgggtatctcagatcttgctcgatggttgagcagtgagcagtgaagcactcaaatggaaggttcagcaaacagcatgcattatttgtagtaaagtaactattgcattggagatgttcataaaaaaatgcaatcggaggtgtatacccgacaggtgttgttgttattagttactagtaatattcatcagctaaagcatcgataactgcctttgtcaaagatttatgtacacggaatgttcaac

SEQ ID NO: 125300 - DNA, 177 bp, Zea Mays
atgagccgcgccagcctccggcggtccgccaggtacggcttcgcccagtcggccaggctcagctgcccgctcggccggttcgggtccagcgctcgctgccccgacagcatctccagcatcaccacgccgaaaccgtacacgtcgctcttcacgtacagatgccctgttcgccaatat

SEQ ID NO: 125301 - DNA, 1759 bp, Zea Mays
caactgctgcagcgaaggcacacagccgccaccgtttcttcatctcccagcatcttcttcctcgcagactcgcagtgccggcgctccatcttccgctccctcccttacacgtgctcggcacgcaggcgacggcggctacgttcgggctcgggctctcagcaaccgcgtcagcagctgcccctcccgcttctcgccagtcgcaccgtgccctcgcctccggtcctcagcacaccagccgtgaccctgcgtcataacagcggtacaagggtgaacaaagaacatcgagaggaagacaatatgccgaagaaggggactaaatctaagaaggagaaggtggacgatgtgcccaatgaacaagaaaataagcttccagactacctggagctccagcgcacacgtgtcgtctgcaatgctgatgcccccattcatactcaaggtttccaatactcgggtgcatttgctgctatgggaattgataatagcgtgtcagtggataaattttgcaagaatttcaaaattgaaataaatcgtctcactgaagattatatggagttcgatatgattggtattgatgcatcaatagccaatgctttccggagaatcctcatttcagaggttccaactatggcaattgagaaagtcttcatggctgacaacaactcagttatagcagatgaggttctttcacatagactaggacttattccacttgatgcagatccaagactctttgaatatatctcagaaaacgatgtcccaaatgaaaggaatactattgtttataaactgcacgtttcttgtccaaagaattctcaacgaattacagtgaaatctagtgaactagagtggttaccagaaggtagccaattaagcatgtcagcccctgcacagtctggagacaaacagaagactttcacttccttcagtcaaagccaaaaggagatcttagaaaagcctcttggtgtgaagtataaagatattactattgccaggcttgggccaggacaggctatcgagctcgaggcacatgctgttaagggaactgggaacgttcacgccaagtggtctccagttgctacagcctggtacagaatgctccctgaggttgttattcttaaagaagttgaaggccctcaggcagaggagctggtgaataagtgccgggttaatgtttttgacatcgaagacctggctaacggtggaaagagggctgttgttgcgaggccaagggcatgcacgctctgcagagaatgtgtgatgggaccaaatgagaaacaagtggagctacggcgtgtcagagaccatttcatattcaccatcgagtccaccggaagcatgcccccggaggtgctgttcacagaagccgtgaagattttggaagagaagtgcgcgagggtcatatctgagctatcctgagaggccggcggcactgtgcagcactggagttagagtaaaccagctcaggctgcagtatctgctgtttttgatggagactagtgtgcgccattaaacattttttttgtggtgttggatatttgggtcagcaaatgtaagctgtttatatcatgtaacgcagtgtaatgttagattaaactgtggcaggtgatcgaaatggcagctgtatcaaaggtagacgtcggctgttagtccgcaagcactgtatttttgcgtttaggtaggtgactcggcccaggttacatggaaaatgaattatttttttcttgagaaaaatgaaaattgcttgaaaaaacggggttgt

SEQ ID NO: 125302 - DNA, 769 bp, Zea Mays
caactgctgcagcgaaggcacacagccgccaccgtttcttcatctcccagcatcttcttcctcgcagactcgcagtgccggcgctccatcttccgctccctcccttacacgtgctcggcacgcaggcgacggcggctacgttcgggctcgggctctcagcaaccgcgtcagcagctgcccctcccgcttctcgccagtcgcaccgtgccctcgcctccggtcctcagcacaccagccgtgaccctgcgtcataacagcggtacaagggtgaacaaagaacatcgagaggaagacaatatgccgaagaaggggactaaatctaagaaggagaaggtggacgatgtgcccaatgaacaagaaaataagcttccagactacctggagctccagcgcacacgtgtcgtctgcaatgctgatgcccccattcatgtagacacatttactactcttctttcgtgtatttgctgatcaccttcaatattcactgattttcgcatgaaattagtcttgcatacggacttaatttctcatagatgcacatatattttacgttatgcatctaattgattacttcacaggatatggaaagtggttttttacaattaattttgtgtgcaattttttcttctgataaaggactgaacatgttactctttaccaataccttttttgccatcttgttaagtgcactgttgaattttctgctattcatacaaattttctgtgaaaaataatcattttggttcttactgtttttttagtttgattt

SEQ ID NO: 125303 - DNA, 3447 bp, Zea Mays
atgaggatagcttttctcgtgctgttggttctctccctgtttctcctccctaatgggatcggcaaaagcttagccgcaaggccttcggtcgtgaatattgggtcgattcttcggttgaactccaccactggaggtgtttcagatgttgccatccgtgcagcagtggaggatatcaactcagaccccacagttctaaatggaacaacgttacatgttcaaacgagggatacaaactgcgacgacggttttcttggcatggttcaagctttgcagttcatggagactgatgttattgcgatcattgggccacaatgctctcctattgcacatatcatttcgtatgtcgcaaatgagctccaagttcctttgatgtcctttgcatcggatgcaactctgtcatcaatccagttcccgttcttcgtgcggactatgcccagcgatctctaccaaatggcagctgtggcggcagttattgattactaccaatggaagatagtcactgccatatacgttgatgatgattatggccgaaacggcattgctgctttggatgatgaacttactgcaagacgctgcaaaatttcattcaagattgggttccgttccaatgctaaaaaaagtgatcttctgaatctgttggttactgttagtaatatggagtctcgtgttattattctccatactggttcggaacctggactcaagcttctgtcacttgctaatggactaaacatgatgggcaacggctatgtatggattgctactgattggctttctgcttatcttgatgctaattcatcggtatctgctgaaactataaatggcatgcaaggtgttctgactgtacgtccacacacccctaaatcaaaggtgaagagtaatctggtgtccaagtggagcagcttaagcaagaaatacaaccacagcgatctccgcaccagtgcttacggtttttatgtttatgatagtgtgtggactgtagctcgggccctggatgccttctttgatgatggtgggaggatttcctttacaaatgactcaaggctgcgtgacgaaaccgggggaactcttcaccttgaagccatgagtgtttttgacatgggaaacaaattactgaataagattagaaatgtgaacttcactggggtgtctggccaagtgcaatttaatgctcagtttgaactcattcatcctgcctatgatatcataagcataattggcaacggcatgcggaccattggtttttggtcaaactatacaagattgctatcgaccgtccttcctgaagacctatattcgaagcctcctaatacttcgcttgccaaccaacaactctatgatgtcatttggcctggtgagactgcacagaggcctcgaggttgggcttttccttccaatgccaaggagttgaaaattggtgtccctaacagatttagctttaaagactttgttagcaaagataatgctactgggtcaatgaagggctattgcatcgatgtcttcactcaagcattggcattgcttccttatccagttacatacaggtttataccttttggcaatggtactgaaaaccctcattatagccaacttgtgcagatggttgctgacaatgtaagtgtggacatgcattttttccctccacatttcatcatgtatagtagtgataagagtaaacttattctgcaggattttgatgcagcaataggggatatcgtaattacaatgagccgaactaaagctgttgatttcacccagcccttcattgagtcaggcctggttatcttgtctccaataaaaaagcatataacaaattcttgggcattcttgcagccatttacattggggatgtggtgtgttacagggttgtcttttcttgttgtgggtgtggttatttggattcttgagcatcgaataaataatgatttccgcggctcgccgcgacaacaaataataactattgtttggttcagtttttcgactctgttttttgcacatagagaaaacacaatgagtaccttaggacgtggtgttttgctcatatggctatttgttgtattgatcattcaatcaagctacactgcaagtcttacttccatcctaaccgtgcaacagcttgatacatctataagaggacttgatgacctgaaaaatagtgattatcctattggtttccaagttggttcttttgtcgaagaatacatgattaaggaactgaacatctcacagtcgaggctaaaagctcttggttctcctgaagagtatgctgaaaatctcaagctaggtcccaagaaaggaggtgttatggctattgttgatgagcgcccctatgttgagctgtttttgtcaacttactgcaagattgctgttgctggctcagatttcaccagcggtggatggggctttgcatttccaagggactcccctctgcaaatagacctgtccaccgcaatcctgacactgtcggagaacggggagctgcagcggatccatgacaagtggctcaagacaggcgactgctcaacggacaatgctgagttcgtggactcgaaccagctccgcctcgagagcttcatgggcctgttcctcatctgcggcgcggcatgcgtcctcgccctgctcatctacctcggcatcacgatacgccagtacctgagacacgaacagccggaaaaagaaagagaggggtggaaatgggatattccattcctggtacccttccaggcttccacctgtgctttctttatggataacgatgatgatgactatgaggcggccgttgtgggcgcgccattccggaccctacactccagctccactctcccatggcttcctccgccctgccttccagaaccttgcaccgccgcgcgctcccctcgtctacgccgtgccaccctgcgacggagaccttcgcccccggcgccgtctcccggcggcgagcagccgtgcggctcctctccgccgggttcctgaccgccgtcgcgccgccgccgtcgctcgccgcgaggaggggacgcgttgtcgtgccaccggaggactacgccactgcacccgatggtctcaagtactacgatcttgtcgaagggaagggaccaactgctgagaagggctcaaccgtgctggtccacttcgactgcatttaccgtggcatcaccgcggtgtcgagccgtgagtcgaagctcctggcggggaaccggagcatcgcccagccttacgagttcatcgttgggtcgctgcctgggaaagaacgcaagcgggatttcgcggacaacgccaacgggctgtactcggcgcaggcggctccgaagcctccggccgccatgtacaccataaccgaggggatgaaggtggggggaaagaggagagtgattgtccctccagagctggggtatgggaagaggggaatgagtgagataccgcctgacgctcctttgaactggacctcga

SEQ ID NO: 125304 - DNA, 3450 bp, Zea Mays
atgaggatagcttttctcgtgctgttggttctctccctgtttctcctccctaatgggatcggcaaaagcttagccgcaaggccttcggtcgtgaatattgggtcgattcttcggttgaactccaccactggaggtgtttcagatgttgccatccgtgcagcagtggaggatatcaactcagaccccacagttctaaatggaacaacgttacatgttcaaacgagggatacaaactgcgacgacggttttcttggcatggttcaagctttgcagttcatggagactgatgttattgcgatcattgggccacaatgctctcctattgcacatatcatttcgtatgtcgcaaatgagctccaagttcctttgatgtcctttgcatcggatgcaactctgtcatcaatccagttcccgttcttcgtgcggactatgcccagcgatctctaccaaatggcagctgtggcggcagttattgattactaccaatggaagatagtcactgccatatacgttgatgatgattatggccgaaacggcattgctgctttggatgatgaacttactgcaagacgctgcaaaatttcattcaagattgggttccgttccaatgctaaaaaaagtgatcttctgaatctgttggttactgttagtaatatggagtctcgtgttattattctccatactggttcggaacctggactcaagcttctgtcacttgctaatggactaaacatgatgggcaacggctatgtatggattgctactgattggctttctgcttatcttgatgctaattcatcggtatctgctgaaactataaatggcatgcaaggtgttctgactgtacgtccacacacccctaaatcaaaggtgaagagtaatctggtgtccaagtggagcagcttaagcaagaaatacaaccacagcgatctccgcaccagtgcttacggtttttatgtttatgatagtgtgtggactgtagctcgggccctggatgccttctttgatgatggtgggaggatttcctttacaaatgactcaaggctgcgtgacgaaaccgggggaactcttcaccttgaagccatgagtgtttttgacatgggaaacaaattactgaataagattagaaatgtgaacttcactggggtgtctggccaagtgcaatttaatgctcagtttgaactcattcatcctgcctatgatatcataagcataattggcaacggcatgcggaccattggtttttggtcaaactatacaagattgctatcgaccgtccttcctgaagacctatattcgaagcctcctaatacttcgcttgccaaccaacaactctatgatgtcatttggcctggtgagactgcacagaggcctcgaggttgggcttttccttccaatgccaaggagttgaaaattggtgtccctaacagatttagctttaaagactttgttagcaaagataatgctactgggtcaatgaagggctattgcatcgatgtcttcactcaagcattggcattgcttccttatccagttacatacaggtttataccttttggcaatggtactgaaaaccctcattatagccaacttgtgcagatggttgctgacaatgtaagtgtggacatgcattttttccctccacatttcatcatgtatagtagtgataagagtaaacttattctgcaggattttgatgcagcaataggggatatcgtaattacaatgagccgaactaaagctgttgatttcacccagcccttcattgagtcaggcctggttatcttgtctccaataaaaaagcatataacaaattcttgggcattcttgcagccatttacattggggatgtggtgtgttacagggttgtcttttcttgttgtgggtgtggttatttggattcttgagcatcgaataaataatgatttccgcggctcgccgcgacaacaaataataactattgtttggttcagtttttcgactctgttttttgcacatagagaaaacacaatgagtaccttaggacgtggtgttttgctcatatggctatttgttgtattgatcattcaatcaagctacactgcaagtcttacttccatcctaaccgtgcaacagcttgatacatctataagaggacttgatgacctgaaaaatagtgattatcctattggtttccaagttggttcttttgtcgaagaatacatgattaaggaactgaacatctcacagtcgaggctaaaagctcttggttctcctgaagagtatgctgaaaatctcaagctaggtcccaagaaaggaggtgttatggctattgttgatgagcgcccctatgttgagctgtttttgtcaacttactgcaagattgctgttgctggctcagatttcaccagcggtggatggggctttgcatttccaagggactcccctctgcaaatagacctgtccaccgcaatcctgacactgtcggagaacggggagctgcagcggatccatgacaagtggctcaagacaggcgactgctcaacggacaatgctgagttcgtggactcgaaccagctccgcctcgagagcttcatgggcctgttcctcatctgcggcgcggcatgcgtcctcgccctgctcatctacctcggcatcacgatacgccagtacctgagacacgaacagccggaaaaagaaagagaggggtggaaatgggatattccattcctggtacccttccaggcttccacctgtgctttctttatggataacgatgatgatgactatgaggcggccgttgtgggcgcgccattccggaccctacactccagctccactctcccatggcttcctccgccctgccttccagaaccttgcaccgccgcgcgctcccctcgtctacgccgtgccaccctgcgacggagaccttcgcccccggcgccgtctcccggcggcgagcagccgtgcggctcctctccgccgggttcctgaccgccgtcgcgccgccgccgtcgctcgccgcgaggaggggacgcgttgtcgtgccaccggaggactacgccactgcacccgatggtctcaagtactacgatcttgtcgaagggaagggaccaactgctgagaagggctcaaccgtgctggtccacttcgactgcatttaccgtggcatcaccgcggtgtcgagccgtgagtcgaagctcctggcggggaaccggagcatcgcccagtagccttacgagttcatcgttgggtcgctgcctgggaaagaacgcaagcgggatttcgcggacaacgccaacgggctgtactcggcgcaggcggctccgaagcctccggccgccatgtacaccataaccgaggggatgaaggtggggggaaagaggagagtgattgtccctccagagctggggtatgggaagaggggaatgagtgagataccgcctgacgctcctttgaactggacctcga

SEQ ID NO: 125305 - DNA, 3429 bp, Zea Mays
tcctctgtcttttccaacaataatagtataatacaggcagctcacctccaagataaaatggcctgacgaaatgagcttcagggaaggccgccgccgcctactcctcgtcctcctcttcctggggtgtcgacaagccgcggcacgctcccacggtcggagacgaccaagatttcctcttttccgaggggagcacgagcacgagcaccaacgccgaccccgacctgacggctcgcacacacatcgataatttgccaacttctgcataagttcgtagcagcctctgtaacattttggccaaaatgaggatagcttttctcgtgctgttggttctctccctgtttctcctccctaatgggatcggcaaaagcttagccgcaaggccttcggtcgtgaatattgggtcgattcttcggttgaactccaccactggaggtgtttcagatgttgccatccgtgcagcagtggaggatatcaactcagaccccacagttctaaatggaacaacgttacatgttcaaacgagggatacaaactgcgacgacggttttcttggcatggttcaagctttgcagttcatggagactgatgttattgcgatcattgggccacaatgctctcctattgcacatatcatttcgtatgtcgcaaatgagctccaagttcctttgatgtcctttgcatcggatgcaactctgtcatcaatccagttcccgttcttcgtgcggactatgcccagcgatctctaccaaatggcagctgtggcggcagttattgattactaccaatggaagatagtcactgccatatacgttgatgatgattatggccgaaacggcattgctgctttggatgatgaacttactgcaagacgctgcaaaatttcattcaagattgggttccgttccaatgctaaaaaaagtgatcttctgaatctgttggttactgttagtaatatggagtctcgtgttattattctccatactggttcggaacctggactcaagcttctgtcacttgctaatggactaaacatgatgggcaacggctatgtatggattgctactgattggctttctgcttatcttgatgctaattcatcggtatctgctgaaactataaatggcatgcaaggtgttctgactgtacgtccacacacccctaaatcaaaggtgaagagtaatctggtgtccaagtggagcagcttaagcaagaaatacaaccacagcgatctccgcaccagtgcttacggtttttatgtttatgatagtgtgtggactgtagctcgggccctggatgccttctttgatgatggtgggaggatttcctttacaaatgactcaaggctgcgtgacgaaaccgggggaactcttcaccttgaagccatgagtgtttttgacatgggaaacaaattactgaataagattagaaatgtgaacttcactggggtgtctggccaagtgcaatttaatgctcagtttgaactcattcatcctgcctatgatatcataagcataattggcaacggcatgcggaccattggtttttggtcaaactatacaagattgctatcgaccgtccttcctgaagacctatattcgaagcctcctaatacttcgcttgccaaccaacaactctatgatgtcatttggcctggtgagactgcacagaggcctcgaggttgggcttttccttccaatgccaaggagttgaaaattggtgtccctaacagatttagctttaaagactttgttagcaaagataatgctactgggtcaatgaagggctattgcatcgatgtcttcactcaagcattggcattgcttccttatccagttacatacaggtttataccttttggcaatggtactgaaaaccctcattatagccaacttgtgcagatggttgctgacaatgtaagtgtggacatgcattttttccctccacatttcatcatgtatagtagtgataagagtaaacttattctgcaggattttgatgcagcaataggggatatcgtaattacaatgagccgaactaaagctgttgatttcacccagcccttcattgagtcaggcctggttatcttgtctccaataaaaaagcatataacaaattcttgggcattcttgcagccatttacattggggatgtggtgtgttacagggttgtcttttcttgttgtgggtgtggttatttggattcttgagcatcgaataaataatgatttccgcggctcgccgcgacaacaaataataactattgtttggttcagtttttcgactctgttttttgcacatagagaaaacacaatgagtaccttaggacgtggtgttttgctcatatggctatttgttgtattgatcattcaatcaagctacactgcaagtcttacttccatcctaaccgtgcaacagcttgatacatctataagaggacttgatgacctgaaaaatagtgattatcctattggtttccaagttggttcttttgtcgaagaatacatgattaaggaactgaacatctcacagtcgaggctaaaagctcttggttctcctgaagagtatgctgaaaatctcaagctaggtcccaagaaaggaggtgttatggctattgttgatgagcgcccctatgttgagctgtttttgtcaacttactgcaagattgctgttgctggctcagatttcaccagcggtggatggggctttgcatttccaagggactcccctctgcaaatagacctgtccaccgcaatcctgacactgtcggagaacggggagctgcagcggatccatgacaagtggctcaagacaggcgactgctcaacggacaatgctgagttcgtggactcgaaccagctccgcctcgagagcttcatgggcctgttcctcatctgcggcgcggcatgcgtcctcgccctgctcatctacctcggcatcacgatacgccagtacctgagacacgaacagccgggaccagcgatctccgtggacgcagggtcgtcgacgtcgaagcgcagtctccgaaaattcatctctttcgccgatgacaagcagccgccaccgaagaaaaagcgggccatgagcctctcgagaagttcaatgccaacgatgccgatgagtaaccgtcctggggctgatattgatgtagaaagctagtgcttgtgtatacgttttttacctgggatacatcatctttgggccaatctatgcgtccttcatatatattatgtataggaaattagagccaaaggctgtgtagtggattgtatttgttggtttttagcaccccaaccgcccacggttaacaagtcgtccgagtttggcagaactgtcaaattgtatagagtgagtcaagtagtcaacccttgttcacgaaccattgtgaatggaatatatgtttgtttcagttgatttgttctttcagatttct

SEQ ID NO: 125306 - DNA, 931 bp, Zea Mays
tcctctgtcttttccaacaataatagtataatacaggcagctcacctccaagataaaatggcctgacgaaatgagcttcagggaaggccgccgccgcctactcctcgtcctcctcttcctggggtgtcgacaagccgcggcacgctcccacggtcggagacgaccaagatttcctcttttccgaggggagcacgagcacgagcaccaacgccgaccccgacctgacgcatttccaagggactcccctctgcaaatagacctgtccaccgcaatcctgacactgtcggagaacggggagctgcagcggatccatgacaagtggctcaagacaggcgactgctcaacggacaatgctgagttcgtggactcgaaccagctccgcctcgagagcttcatgggcctgttcctcatctgcggcgcggcatgcgtcctcgccctgctcatctacctcggcatcacgatacgccagtacctgagacacgaacagccgggaccagcgatctccgtggacgcagggtcgtcgacgtcgaagcgcagtctccgaaaattcatctctttcgccgatgacaagcagccgccaccgaagaaaaagcgggccatgagcctctcgagaagttcaatgccaacgatgccgatgagtaaccgtcctggggctgatattgatgtagaaagctagtgcttgtgtatacgttttttacctgggatacatcatctttgggccaatctatgcgtccttcatatatattatgtataggaaattagagccaaaggctgtgtagtggattgtatttgttggtttttagcaccccaaccgcccacggttaacaagtcgtccgagtttggcagaactgtcaaattgtatagagtgagtcaagtagtcaacccttgttcacgaaccattgtgaatggaatatatgtttgtttcagttga

SEQ ID NO: 125307 - DNA, 1118 bp, Zea Mays
cttgtaacagctttttcagacatgttaagctgtttagttgctctacttatgagtaccgttttatgcagtgcaacactgcttccttctataaaacgttttcttccaaaagagtggaatgataatctcattgtctggcgtgctccacttttccactcactctcggtggagttcacaaagtcccagattgttgcttcaatacctggatttttcttctgcttgtggtatgcgtcaaagaagcattggcttgcaaataatgttctgggattggctttctgtattcaggggattgagatgctgtcattgggatcatttaaaaccggagccattctcttgggtggactttttgtgtatgacattttctgggtgttcttcactccagttatggtcagtgtggctaaatcttttgatgctcctataaagcttctgtttcctactgcggatgatgcacggccattctccatgcttggccttggtgacattgtaatacctggcatttttgttgcacttgccttgcgctttgatgtctcaagaggtatcaagaagcgttacttcaacagcgcattttcgggatacgccgtgggtatggcggtgaccatcattgtaatgaactggtttcaagctgcacagccggctctactgtatctcgttccaggtgtgatcggattcgtcgccgtacactgtctctggtacggagaagtgaaacagctgctggagttcgacgagtcaaaagctgaggcggaggaaggcggtgcagaaggagagcaagatggtgatggttccaaagccagcaaaaaggtggactagcatgatttagttccgggaggtaaaaaagaggacagggagacatttttcgtgtaaggtcgtcttgcagctagctagctaaacgggcttgttgccctctctaatacttacttgataacttagaaaatggttcaacatgatactagttttttgtttgtttgttttcctttgcggatcatttatttggctcgttaaggaattctctcaccagtcgccagaaccctgactgggcccgccgcgacgcattcatgccatgcttactttgcttctttgcaggcaagaatttcattatggactatatttttaccgccgtgctt

SEQ ID NO: 125308 - DNA, 1593 bp, Zea Mays
ggaaaacgcagacagacgcagccccagatttcttttccatcaaaacaccccccgttcccctgctcccattccgccccggatttcgatttcgtcctcccttcgccgcccgcgccaatactttcctctgccggggctgcaccggcagcgcggggtcgacaacagctcgagatccggtgactgatctcctttgtttctcgggcatcttgctagtcttcttccagattgcttcctaataatgatgacacatgaatgggctgccaatttggctcttgctggtctgagcttggcgccgcttgtggttaatgtaaacccaaatgtgaatgtggtactgacagcatgccttactgtctatgtgggttgctaccgttctgttaaaccaactccaccctctgagaccatgtccaaggagcatgcgatgcggttccccttagttggaagtgctatgcttttatcactgtttcttctattcaagtttctctcaaaagacttggtcaacgctgtgctcactgcctactttttcattctaggcattgttgctctctctgcaacactgcttccttctataaaacgttttcttccaaaagagtggaatgataatctcattgtctggcgtgctccacttttccactcactctcggtggagttcacaaagtcccagattgttgcttcaatacctggatttttcttctgcttgtggtatgcgtcaaagaagcattggcttgcaaataatgttctgggattggctttctgtattcaggggattgagatgctgtcattgggatcatttaaaaccggagccattctcttgggtggactttttgtgtatgacattttctgggtgttcttcactccagttatggtcagtgtggctaaatcttttgatgctcctataaagcttctgtttcctactgcggatgatgcacggccattctccatgcttggccttggtgacattgtaatacctggcatttttgttgcacttgccttgcgctttgatgtctcaagaggtatcaagaagcgttacttcaacagcgcattttcgggatacgccgtgggtatggcggtgaccatcattgtaatgaactggtttcaagctgcacagccggctctactgtatctcgttccaggtgtgatcggattcgtcgccgtacactgtctctggtacggagaagtgaaacagctgctggagttcgacgagtcaaaagctgaggcggaggaaggcggtgcagaaggagagcaagatggtgatggttccaaagccagcaaaaaggtggactagcatgatttagttccgggaggtaaaaaagaggacagggagacatttttcgtgtaaggtcgtcttgcagctagctagctaaacgggcttgttgccctctctaatacttacttgataacttagaaaatggttcaacatgatactagttttttgtttgtttgttttcctttgcggatcatttatttggctcgttaaggaattctctcaccagtcgccagaaccctgactgggcccgccgcgacgcattcatgccatgcttactttgcttctttgcaggcaagaatttcattatggactatatttttaccgccgtgctt

SEQ ID NO: 125309 - DNA, 1566 bp, Zea Mays
agacagacgcagccccagatttcttttccatcaaaacaccccccgttcccctgctcccattccgccccggatttcgatttcgtcctcccttcgccgcccgcgccaatactttcctctgccggggctgcaccggcagcgcggggtcgacaacagctcgagatccggtgactgatctcctttgtttctcgggcatcttgctagtcttcttccagattgcttcctaataatgatgacacatgaatgggctgccaatttggctcttgctggtctgagcttggcgccgcttgtggttaatgtaaacccaaatgtgaatgtggtactgacagcatgccttactgtctatgtgggttgctaccgttctgttaaaccaactccaccctctgagaccatgtccaaggagcatgcgatgcggttccccttagttggaagtgctatgcttttatcactgtttcttctattcaagtttctctcaaaagacttggtcaacgctgtgctcactgcctactttttcattctaggcattgttgctctctcgtagtgcaacactgcttccttctataaaacgttttcttccaaaagagtggaatgataatctcattgtctggcgtgctccacttttccactcactctcggtggagttcacaaagtcccagattgttgcttcaatacctggatttttcttctgcttgtggtatgcgtcaaagaagcattggcttgcaaataatgttctgggattggctttctgtattcaggggattgagatgctgtcattgggatcatttaaaaccggagccattctcttgggtggactttttgtgtatgacattttctgggtgttcttcactccagttatggtcagtgtggctaaatcttttgatgctcctataaagcttctgtttcctactgcggatgatgcacggccattctccatgcttggccttggtgacattgtaatacctggcatttttgttgcacttgccttgcgctttgatgtctcaagaggtatcaagaagcgttacttcaacagcgcattttcgggatacgccgtgggtatggcggtgaccatcattgtaatgaactggtttcaagctgcacagccggctctactgtatctcgttccaggtgtgatcggattcgtcgccgtacactgtctctggtacggagaagtgaaacagctgctggagttcgacgagtcaaaagctgaggcggaggaaggcggtgcagaaggagagcaagatggtgatggttccaaagccagcaaaaaggtggactagcatgatttagttccgggaggtaaaaaagaggacagggagacatttttcgtgtaaggtcgtcttgcagctagctagctaaacgggcttgttgccctctctaatacttacttgataacttagaaaatggttcaacatgatactagttttttgtttgtttgttttcctttgcggatcatttatttggctcgttaaggaattctctcaccagtcgccagaaccctgactgggcccgccgcgacgcattcatgccatgcttactttgcttctttgcaggcaagaatttcattatgga

SEQ ID NO: 125310 - DNA, 1864 bp, Zea Mays
cgacggtgaaggataaacttgtgtcatgcgtgtttgacctagctacctcattatgctagaaaatgaaaaaagagcgtgctatacctggctatcttactgggtgggaaagagaaaaataatcacgctagtatgaagaaattgacgtcaactgcatttacggagttcctaccgagttgctaaatgtggagagtaaatagagttgaatagcaactaagtaaatttagcaagtctatttagagaaccattggagaagcatttttctgttcatttcttaaatttaagatttagagagttgtttagagaactattgaagttgctcttagaggcccttgttgtcttgttgaagagttgaagacaccgcagttccggaaacttctgtagcagctgaaatagtacggacgtgtttgaacatgtacaggatctcgaggccacatctgtaaaacgaccacccctcacgcggaagcggagactggaaatcgggagggagaccggagacgagaccgccggagatggagccgagatctgcaatctacagatccggcgccttccttctcctcgccgccatccttgcggaggtcgtcatccctgcatccgccatcggagacaagtgcgccgcctgcaaggccgttgctgcggagctagagattggaatttcgagtgagaagccgagaaatcacttggacttgcgcaaccgcttaaattctaaaggccagagggaggggaaggtcattgattataggtaaaaaaacagcatgatcacatacttatttttagtgacaaaagcgatgcatattgggaaaatatttagtggaacaattcatgatttaacattccacatggagaccctttgatcttgacacacatcgtttggcctcacatacttatagcaatttatcgacatattttgttgcttacttttgtcatgttatgtactttgttctgtatacatggtgcagggtcagtgagcttcgggttgtggaacttctggatggcctatgcgataagatgcaagattataccttaaagaaggcagggattaaagatttataattgttttataatttgcacttgacactatcttattggtgctgcatcccttttctatgtatcaagtgttataaacatgccataaatatgaactgttttttcactttttagcgcactttgaatacgctaaacatttagctacctaacatgttttttgtatgcagttggaatcaggcgaaaagggatgggttaaagtaacagactggaatagctttcaaactgaaaataaggcagcagcaagagctcactccaaaaaattgtccaccttctgtggaaggctactggaggaaacggaggatgagctctctgagtggatcaaaacaacctccacagaatcagaatatgtaagcaaggccctttgtgaagatattagcaaacactgccgatctacaagtgctaccatccagattgatgatgagctatgacatgccgggggcaggtcgttgtttcgcaaaaagcaaaacaggcgacaggttggaaaatgttaaagaacacagctctagtagtccctgacaccatttagagagacatgcagctgccaattctgattgtttgtgttgcactcatatttcctgtaaacaaaagcttagactgatctgtagagaaagcaactggacatcaatttttgcataccgatgaactacagtttaaaacggccggttgaattatcatgtcaggggctataggaaatttgaatgcttctattctaaggtcttgttgttgagtactgagtatagtttgatgactgcatgttggtcaatgacagcatcaaagattacatgcatttttttgggaaaagatgatgtgcattttagat

SEQ ID NO: 125311 - DNA, 1448 bp, Zea Mays
cgacggtgaaggataaacttgtgtcatgcgtgtttgacctagctacctcattatgctagaaaatgaaaaaagagcgtgctatacctggctatcttactgggtgggaaagagaaaaataatcacgctagtatgaagaaattgacgtcaactgcatttacggagttcctaccgagttgctaaatgtggagagtaaatagagttgaatagcaactaagtaaatttagcaagtctatttagagaaccattggagaagcatttttctgttcatttcttaaatttaagatttagagagttgtttagagaactattgaagttgctcttagaggcccttgttgtcttgttgaagagttgaagacaccgcagttccggaaacttctgtagcagctgaaatagtacggacgtgtttgaacatgtacaggatctcgaggccacatctgtaaaacgaccacccctcacgcggaagcggagactggaaatcgggagggagaccggagacgagaccgccggagatggagccgagatctgcaatctacagatccggcgccttccttctcctcgccgccatccttgcggaggtcgtcatccctgcatccgccatcggagacaagtgcgccgcctgcaaggccgttgctgcggagctagagattggaatttcgagtgagaagccgagaaatcacttggacttgcgcaaccgcttaaattctaaaggccagagggaggggaaggtcattgattatagggtcagtgagcttcgggttgtggaacttctggatggcctatgcgataagatgcaagattataccttaaagaagttggaatcaggcgaaaagggatgggttaaagtaacagactggaatagctttcaaactgaaaataaggcagcagcaagagctcactccaaaaaattgtccaccttctgtggaaggctactggaggaaacggaggatgagctctctgagtggatcaaaacaacctccacagaatcagaatatgtaagcaaggccctttgtgaagatattagcaaacactgccgatctacaagtgctaccatccagattgatgatgagctatgacatgccgggggcaggtcgttgtttcgcaaaaagcaaaacaggcgacaggttggaaaatgttaaagaacacagctctagtagtccctgacaccatttagagagacatgcagctgccaattctgattgtttgtgttgcactcatatttcctgtaaacaaaagcttagactgatctgtagagaaagcaactggacatcaatttttgcataccgatgaactacagtttaaaacggccggttgaattatcatgtcaggggctataggaaatttgaatgcttctattctaaggtcttgttgttgagtactgagtatagtttgatgactgcatgttggtcaatgacagcatcaaagattacatgcatttttttgggaaaaga

SEQ ID NO: 125312 - DNA, 1339 bp, Zea Mays
atttcttaaatttaagatttagagagttgtttagagaactattgaagttgctcttagaggcccttgttgtcttgttgaagagttgaagacaccgcagttccggaaacttctgtagcagctgaaatagtacggacgtgtttgaacatgtacaggatctcgaggccacatctgtaaaacgaccacccctcacgcggaagcggagactggaaatcgggagggagaccggagacgagaccgccggagatggagccgagatctgcaatctacagatccggcgccttccttctcctcgccgccatccttgcggaggtcgtcatccctgcatccgccatcggagacaagtgcgccgcctgcaaggccgttgctgcggagctagagattggaatttcgagtgagaagccgagaaatcacttggacttgcgcaaccgcttaaattctaaaggccagagggaggggaaggtcattgattatagggtcagtgagcttcgggttgtggaacttctggatggcctatgcgataagatgcaagattataccttaaagaagttggaatcaggcgaaaagggatgggttaaagtaacagactggaatagctttcaaactgaaaataaggcagcagcaagagctcactccaaaaaattgtccaccttctgtggaaggcatggccgcatgcccgcatggctaaacaaactcttcaggcaccgtgtgctttaaagcataactttattggttgtgtaaagataacacgactttctgcgatttatgtaataattataccaactgtttgattgaatgagctaaccagcttcacttgctacacaggctactggaggaaacggaggatgagctctctgagtggatcaaaacaacctccacagaatcagaatatgtaagcaaggccctttgtgaagatattagcaaacactgccgatctacaagtgctaccatccagattgatgatgagctatgacatgccgggggcaggtcgttgtttcgcaaaaagcaaaacaggcgacaggttggaaaatgttaaagaacacagctctagtagtccctgacaccatttagagagacatgcagctgccaattctgattgtttgtgttgcactcatatttcctgtaaacaaaagcttagactgatctgtagagaaagcaactggacatcaatttttgcataccgatgaactacagtttaaaacggccggttgaattatcatgtcaggggctataggaaatttgaatgcttctattctaaggtcttgttgttgagtactgagtatagtttgatgactgcatgttggtcaatgacagcatcaaagattacatgcatttttttggg

SEQ ID NO: 125313 - DNA, 386 bp, Zea Mays
tcttcgccaatgtcgcaggtgcctgccacatgtgattcatttgatgctgttattgcttcgttgattgcccatgaacaaccaagtaaccaaccaaaggtattgaatccatccctttaggtagccgaggaaacttgccatacatttcccttccataatcaaacttcacaggcatagttcagtccctggcaacagcattgctgctatgacctcatcagtctcgtgtgcaatttcagaaactgacacagatgatcaggtacacttgttgttgtaatcttttgtctgagcacaaacatttcttgttgcttatgagcgttttgtttctgcaacaatgtgctactaatggttggaaagtggaacgaaacaatcaaacatcaagacagagctct

SEQ ID NO: 125314 - DNA, 1989 bp, Zea Mays
aactcacctcatcatcatcactcccccgtccttgatctcctctctctctctctctgtcgccaagagggcgccgccgccaccaacgcaacgcgcgccgccgcagatctccgccaccgacgcgccggccatggagtacgagcgcattgagaagccgttccccgtccagcagggcggcgggttctcgcccaagcggctgcgcgcgatgctgctgggggtggacaagcgccgcaaggggcaggacggcgccgccgaggaggacgaggacggcggcggcgactacggcgccctgccgaaggcccacgccagatccggcgccggcgacggtggtggcggtggaggcgccacgtgcgaagaatacaaggacgtggacgtggtgagcaccacctcagagttctcgtcctcgctggagacagcgggtgggcaccggccccgggacgctcaccccgtcgccacgggttctaggaccagggtgccgcccgaggaggactcgtgcgactcggagagcgtggcatccaacttcgagttccacaaggagcggcgggcagcggcgtcggcggcggcgtcggtcgtccctccattctcaaagcccgccccgtcaaagtgggacgatgcacagaagtggatcgccagcccgacggcgaactgccctggcaggggtggcgcggctcctgcgccgaagaagacagagaaacctggctccggcatcgggaggctgccgctgccggcgaccaaggtcgtggtagaggccactgaggagatagataccaagaggatggatccgagccaggagaagcgagagattgggtggcagaaagcggcgaggtgggccccgcccgacccctgtccggaggcggagccctgcccaacaaagaccacactactcgctgtagaaactacagtggctgctgcttcagcagctgttaatttcaaccgccatgatgcatccaccacgcttcagagcgcagcaacatgcatacctcctccaacaacggtccggtcagtgtcgatgagggacatgggcacagagatgacgcccatcgcaagccaagagccgtcccggaccgggacgccggtgagggcgacgagcccaaactgctcccagccaacgactccacggaggacgctcggtggccccagcgcagtcggctccttcatcagccacggaggagaatgcagcagctcggagctgagcgagcaggagctgcagaccaaaaccaggagggagatcatgctccttggcacgcagctaggcaagaccagcatcgcggcatgggcgagcaagaaggaggaggagaaggacgcctcgctctcgctgaaaccggtgcccatggaccagtcgacgcagaacataaccgcgatccgtgcggctgcgtgggaggaggcggagaaggccaagtatttagcgagattcaagcgagaagagatcaagatccaggcttgggaggaccatcagaaagcccagatagaagctgagatgaggaaaatcgaggtcgaggtggagcggatgcgtgcccgcgcgcaagacaagctgatgaccaagctcgcgtcggcgaggcacagcgcagacgagaagcgtgccacggcggagctgaaacggaaccgcgcagccgcgaggaccgctgagcaggcagagcacatcaggaggaccggccgggtgccgccgtcgtttggctgctggaactggtgctcatgaagtgcccatggaagatgagtcgcccgttgagaatgagtcgcttgtaagctgttgtaactatatatatatatatatacacacgtatgtaaggtgtgagatccatgcgtcctgtgctgtggtggttactgtgtaagtgtcacagatgtaccgaattcaaggccgagcttggattcctagtgcacatatgtgataaacttcacaccaagagacctccatgctagttgtgactgaatttgatttgtgctctacttgatgcttatactaacagtccgcactgtgatagagctagatatagc

SEQ ID NO: 125315 - DNA, 1947 bp, Zea Mays
aactcacctcatcatcatcactcccccgtccttgatctcctctctctctctctctgtcgccaagagggcgccgccgccaccaacgcaacgcgcgccgccgcagatctccgccaccgacgcgccggccatggagtacgagcgcattgagaagccgttccccgtccagggcggcgggttctcgcccaagcggctgcgcgcgatgctgctgggggtggacaagcgccgcaaggggcaggacggcgccgccgaggaggacgaggacggcggcggcgactacggcgccctgccgaaggcccacgccagatccggcgccggcgacggtggtggcggtggaggcgccacgtgcgaagaatacaaggacgtggacgtggtgagcaccacctcagagttctcgtcctcgctggagacagcgggtgggcaccggccccgggacgctcaccccgtcgccacgggttctaggaccagggtgccgcccgaggaggactcgtgcgactcggagagcgtggcatccaacttcgagttccacaaggagcggcgggcagcggcgtcggcggcggcgtcggtcgtccctccattctcaaagcccgccccgtcaaagtgggacgatgcacagaagtggatcgccagcccgacggcgaactgccctggcaggggtggcgcggctcctgcgccgaagaagacagagaaacctggctccggcatcgggaggctgccgctgccggcgaccaaggtcgtggtagaggccactgaggagatagataccaagaggatggatccgagccaggagaagcgagagattgggtggcagaaagcggcgaggtgggccccgcccgacccctgtccggaggcggagccctgcccaacaaagaccacactactcgctgtagaaactacagtggctgctgcttcagcagctgttaatttcaaccgccatgatgcatccaccacgcttcagagcgcagcaacatgcatacctcctccaacaacggtccggtcagtgtcgatgagggacatgggcacagagatgacgcccatcgcaagccaagagccgtcccggaccgggacgccggtgagggcgacgagcccaaactgctcccagccaacgactccacggaggacgctcggtggccccagcgcagtcggctccttcatcagccacggaggagaatgcagcagctcggagctgagcgagcaggagctgcagaccaaaaccaggagggagatcatgctccttggcacgcagctaggcaagaccagcatcgcggcatgggcgagcaagaaggaggaggagaaggacgcctcgctctcgctgaaaccggtgcccatggaccagtcgacgcagaacataaccgcgatccgtgcggctgcgtgggaggaggcggagaaggccaagtatttagcgagattcaagcgagaagagatcaagatccaggcttgggaggaccatcagaaagcccagatagaagctgagatgaggaaaatcgaggtcgaggtggagcggatgcgtgcccgcgcgcaagacaagctgatgaccaagctcgcgtcggcgaggcacagcgcagacgagaagcgtgccacggcggagctgaaacggaaccgcgcagccgcgaggaccgctgagcaggcagagcacatcaggaggaccggccgggtgccgccgtcgtttggctgctggaactggtgctcatgaagtgcccatggaagatgagtcgcccgttgagaatgagtcgcttgtaagctgttgtaactatatatatatatatatacacacgtatgtaaggtgtgagatccatgcgtcctgtgctgtggtggttactgtgtaagtgtcacagatgtaccgaattcaaggccgagcttggattcctagtgcacatatgtgataaacttcacaccaagagacctccatgctagttgtgactgaatttgatttgtgctctacttgatgct

SEQ ID NO: 125316 - DNA, 2554 bp, Zea Mays
aactcacctcatcatcatcactcccccgtccttgatctcctctctctctctctctgtcgccaagagggcgccgccgccaccaacgcaacgcgcgccgccgcagatctccgccaccgacgcgccggccatggagtacgagcgcattgagaagccgttccccgtccagcagggcggcgggttctcgcccaagcggctgcgcgcgatgctgctgggggtggacaagcgccgcaaggggcaggacggcgccgccgaggaggacgaggacggcggcggcgactacggcgccctgccgaaggcccacgccagatccggcgccggcgacggtggtggcggtggaggcgccacgtgcgaagaatacaaggacgtggacgtggtgagcaccacctcagagttctcgtcctcgctggagacagcgggtgggcaccggccccgggacgctcaccccgtcgccacgggttctaggaccagggtgccgcccgaggaggactcgtgcgactcggagagcgtggcatccaacttcgagttccacaaggagcggcgggcagcggcgtcggcggcggcgtcggtcgtccctccattctcaaagcccgccccgtcaaagtgggacgatgcacagaagtggatcgccagcccgacggcgaactgccctggcaggggtggcgcggctcctgcgccgaagaagacagagaaacctggctccggcatcgggaggctgccgctgccggcgaccaaggtcgtggtagaggccactgaggagatagataccaagaggatggatccgagccaggagaagcgagagattgggtggcagaaagcggcgaggtgggccccgcccgacccctgtccggaggcggagccctgcccaacaaagaccacactactcgctgtagaaactacagtggctgctgcttcagcagctgttaatttcaaccgccatgatgcatccaccacgcttcagagcgcagcaacatgcatacctcctccaacaacggtccggtcagtgtcgatgagggacatgggcacagagatgacgcccatcgcaagccaagagccgtcccggaccgggacgccggtgagggcgacgagcccaaactgctcccagccaacgactccacggaggacgctcggtggccccagcgcagtcggctccttcatcagccacggaggagaatgcagcagctcggagctgagcgagcaggagctgcagaccaaaaccaggagggagatcatgctccttggcacgcagctaggcaagaccagcatcgcggcatgggcgagcaagaaggaggaggagaaggacgcctcgctctcgctgaaaccggtgcccatggaccagtcgacgcagaacataaccgcgatccgtgcggctgcgtgggaggaggcggagaaggccaagtatttagcgagattcaagcgagaagagatcaagatccaggcttgggaggaccatcagaaagcccagatagaagctgagatgaggaaaatcgaggttcgcagactgtttcctgtcaattttcctgttaataacgatgggcgatagatccctgatggattctccacgttaccgagacacacatgcattttcacctcttgagttttaacttgtgaaagtttaaaacacagaggcgaaaagttagcggcctagatcccacacctgctgcggctactatccgtctgaactcaatggcattgccctctctaggctatcatttcatttggacactcccgatgaagatgcaatgcattctcaaatttagcatgagatataacttacagccaggacactagttttcgactgcacctgcacatagcggttggcgtcagtatccatttggatttgacagtagcaagtagtccaagtgttgtttgttcttaatacaggacggcaagtgtttctaggctactgtactcaaatgaggcagcctcgttgtgctgtgccaccactctgtgattcagttcttctgttcagtttgccatagatgttcaggttcagaagaacatacaaacccaaagggtgcagcgctgagctgtgtttgtggatactgcattgttggtatcgatagttttaaccatggcccgtgctttgcgttcctttcctcaaggtcgaggtggagcggatgcgtgcccgcgcgcaagacaagctgatgaccaagctcgcgtcggcgaggcacagcgcagacgagaagcgtgccacggcggagctgaaacggaaccgcgcagccgcgaggaccgctgagcaggcagagcacatcaggaggaccggccgggtgccgccgtcgtttggctgctggaactggtgctcatgaagtgcccatggaagatgagtcgcccgttgagaatgagtcgcttgtaagctgttgtaactatatatatatatatatacacacgtatgtaaggtgtgagatccatgcgtcctgtgctgtggtggttactgtgtaagtgtcacagatgtaccgaattcaaggccgagcttggattcctagtgcacatatgtgataaacttcacaccaagagacctccatgctagttgtgactgaatttgatttgtgctcta

SEQ ID NO: 125317 - DNA, 111 bp, Zea Mays
ccacaacgtcaaaccaacaaaactgcattccatatcaaactgatttaggttctaaacaatcacacgtgcaactatctttcctataaaaaaatgaatggagtgcaacaatcc

SEQ ID NO: 125318 - DNA, 2645 bp, Zea Mays
cacagatctccatctcgagttctcgacccaaaccccccggttggccgcttcacctagtcggggtcggtcgggtcctcctcctgccgtccagtccacaaaccgccacgcctctcaaagattcgattccctcctccctcccactcccacatggccggcgagctgcgccaccgccgcgtgccgtcggaggacggggacgagggcgccgccgcctctcaaggacccgatccagccgccggcaacggcaaggccggcacggcgtctgagggggcggagccgcggcgcggcaagagggacgcgctcgggtggctggagtggggccgcgggtggatggccgtcgtgggggagttcctattccagcgcatcgccgccagccacctcgccaacccgctcgagctgcccccgctcgacggcgtctccgtcgtcgtcaccggcgccaccagcggcatcgggctcgagatcgcaaggcagctcgctctcgctggggcacacgttgtgatggctgttagaaggcccaaggtggcacaagacttgattcagaggtggcagaaccaaaattcagaaacaggaagaccactaaacgctgaggtgatggaacttgacctactctccctcgactcggtcgcaaattttgctgacgcttggaatgctcgtatggcacccctacacgtgctgatcaacaacgctggcatcttcgctataggagaaccccagcgtttctcaaaggacggacatgaagaacacatgcaagtgaaccatcttgcacctgcgttactggcgatgctgcttataccttcccttctccgaggttctcccagcagaattgttaacgttaattcgatcatgcacactgtaggttttgtcgacgctgaagatatgaacttgagaaaacataaatatagaagttggttaggatactcaaatagcaagctggcacaggtaaaattcagtagcatgcttcacaagaaaattcctgcagaggctggcatcggtgtagtttgcgcttctcctggaattgtcgacacgaacgttgcaagagatcttcctaagattgtcgtagccgcgtaccatttgattccctacttcatatttgacgctcaagaaggtaaagtcaagttaccgaacttgtgctgtcacctcccgtcagtcagtcagtcaacagcttgtgcatcttctgatacacgcaaatgttctgttttgcgtcccgttcaggttctaggagtgcactgtttgcagcatccgatccccaagtcccggaatactgcgagacgctcaagtcggaggactggccagtttgtgcctgcattaactatgactgtagtccgatgaatgcgtctgaagaagcgcacaatcttgagacctcgcagctggtctgggagaagacactggagatggtcggccttccgccggatgccctggagaagctcatcgccggagaatcagttcagtgccgttacggacaacaggatacaactttttagttagcagtttagaggtggtttgttcggttgttatgtcattttgatcctaaatttgcagggaggaaaacacagggaagggagaaaaagaatttgttgacagctaccaatctttgctctttttctgtatgtgtgcaagatgttgtgaaggaggcgtagaaacacatctcccccattatttgactattcctaatcaatgatatacttgagacagaaattaagagatacttatcctgggtccattttcccccctctaccaagcatcttttttgctggcgttatagagacggtttaaagatttagttcatcgaattcttttcctgctatgtatgtgtctcacaaagctaatggcaaaatctcggacaccaagaacaggaacggcctccacaggccactcacgaacggggcaaagggcacaaggcagcaaaggacacatttgccagctagagggttaagatccacatattaattacatgcatcacccttcaatagaacaaagcaagttgatgacgactgctggaagcaactgttacagcataaacatgacgcgagttgcgaaacttgattcctcctctccagggacctactaactgatactctgatctgccgcccaatgcatgaaacggcatggcgattggcgagtcaacaccccaaggcagctagctgcccctaagcattaggcggccagagctttgggtcttgagttgtgtccacgatggtcggaggcagccactgccacattgccatcccagggaaaggtgcagggattggagcacttttgttgcctgcagcttgctgtggcggcacaaatggagcaaatgcagccgggtggtatgaagctggatgagggagatggggaacatatcctgtaggagctacactcatggctttgacttgctgctccagcctatctttctctaccttcagcctcactttctcttcgcggagctcattcttctcctcctgaaacaataatagaacatttccttaattcgaacaaacaaatttggtcggacagtaggcttcttatagatgcgtgggaggttacactgtcctgtccatgcctaaacttgcatgtttaaaaatggccaatctagtctagtctagaaactaaattggaccaaacaatggctgcagacatggttatgagttcagtaggtttgcctactt

SEQ ID NO: 125319 - DNA, 2538 bp, Zea Mays
cacagatctccatctcgagttctcgacccaaaccccccggttggccgcttcacctagtcggggtcggtcgggtcctcctcctgccgtccagtccacaaaccgccacgcctctcaaagattcgattccctcctccctcccactcccacatggccggcgagctgcgccaccgccgcgtgccgtcggaggacggggacgagggcgccgccgcctctcaaggacccgatccagccgccggcaacggcaaggccggcacggcgtctgagggggcggagccgcggcgcggcaagagggacgcgctcgggtggctggagtggggccgcgggtggatggccgtcgtgggggagttcctattccagcgcatcgccgccagccacctcgccaacccgctcgagctgcccccgctcgacggcgtctccgtcgtcgtcaccggcgccaccagcggcatcgggctcgagatcgcaaggcagctcgctctcgctggggcacacgttgtgatggctgttagaaggcccaaggtggcacaagacttgattcagaggtggcagaaccaaaattcagaaacaggaagaccactaaacgctgaggtgatggaacttgacctactctccctcgactcggtcgcaaattttgctgacgcttggaatgctcgtatggcacccctacacgtgctgatcaacaacgctggcatcttcgctataggagaaccccagcgtttctcaaaggacggacatgaagaacacatgcaagtgaaccatcttgcacctgcgttactggcgatgctgcttataccttcccttctccgaggttctcccagcagaattgttaacgttaattcgatcatgcacactgtaggttttgtcgacgctgaagatatgaacttgagaaaacataaatatagaagttggttaggatactcaaatagcaagctggcacaggtaaaattcagtagcatgcttcacaagaaaattcctgcagaggctggcatcggtgtagtttgcgcttctcctggaattgtcgacacgaacgttgcaagagatcttcctaagattgtcgtagccgcgtaccatttgattccctacttcatatttgacgctcaagaaggttctaggagtgcactgtttgcagcatccgatccccaagtcccggaatactgcgagacgctcaagtcggaggactggccagtttgtgcctgcattaactatgactgtagtccgatgaatgcgtctgaagaagcgcacaatcttgagacctcgcagctggtctgggagaagacactggagatggtcggccttccgccggatgccctggagaagctcatcgccggagaatcagttcagtgccgttacggacaacaggatacaactttttagttagcagtttagaggtggtttgttcggttgttatgtcattttgatcctaaatttgcagggaggaaaacacagggaagggagaaaaagaatttgttgacagctaccaatctttgctctttttctgtatgtgtgcaagatgttgtgaaggaggcgtagaaacacatctcccccattatttgactattcctaatcaatgatatacttgagacagaaattaagagatacttatcctgggtccattttcccccctctaccaagcatcttttttgctggcgttatagagacggtttaaagatttagttcatcgaattcttttcctgctatgtatgtgtctcacaaagctaatggcaaaatctcggacaccaagaacaggaacggcctccacaggccactcacgaacggggcaaagggcacaaggcagcaaaggacacatttgccagctagagggttaagatccacatattaattacatgcatcacccttcaatagaacaaagcaagttgatgacgactgctggaagcaactgttacagcataaacatgacgcgagttgcgaaacttgattcctcctctccagggacctactaactgatactctgatctgccgcccaatgcatgaaacggcatggcgattggcgagtcaacaccccaaggcagctagctgcccctaagcattaggcggccagagctttgggtcttgagttgtgtccacgatggtcggaggcagccactgccacattgccatcccagggaaaggtgcagggattggagcacttttgttgcctgcagcttgctgtggcggcacaaatggagcaaatgcagccgggtggtatgaagctggatgagggagatggggaacatatcctgtaggagctacactcatggctttgacttgctgctccagcctatctttctctaccttcagcctcactttctcttcgcggagctcattcttctcctcctgaaacaataatagaacatttccttaattcgaacaaacaaatttggtcggacagtaggcttcttatagatgcgtgggaggttacactgtcctgtccatgcctaaacttgcatgtttaaaaatggccaatctagtctagtctagaaactaaattggaccaaacaatggctgcagacatggttatgagttcagtaggtttgcctactt

SEQ ID NO: 125320 - DNA, 2448 bp, Zea Mays
gtcacatttgatttgattctgtgcgtatgtcttggtttattaactaatgacttaatagaccaagacatgcacacagaatcaaaccaacaatcaaacccttttatttgttccatcatatctatgggaggaatctaattagtacgtaaccctcctatgatacaataataataaataataataataataataataatgaatacaacacatgcaatggagcaagtggacgacgggcagcatacgcaggaaggcgtgtcgacggagcgcgcgttcgaggcagacccgatcccatccttgtcggagacgatcacggcacgggcgatagcggccagcttcatcctgggcgtcgccctctgcgccgtcgccatgaagatcagcctcaactcgggcttcctcccgtcgctcaccgtcccggctggcctcgtcggcttctacctcgtccgggcgtggatccgtgccctcgactgctgcttccaggtgccacaccagctgccattcacgcgccaggagaacaccgtcatccagacgtgcgttgtcgcctgctctgcaataacattcagcggagggtttggcacgtacatcctcgccatgggcaagaacgcggccggaggagacgtcagggacggcaagaacatcgtggagccgagcattggccgaacggttgctttcctcttcctcgtcagtttctccggcatgttcgtcctcatgccgttcaggaaggtcatgatcatccggcaccgcctcacgtaccctaacggaatggccacggcgcacctcatcaacagcttccacacccctcagggagccagtaaggcaagacagcaagtggagatgctgtttaggtcactgggaggaaccatgctgtggaacatgttccagtggtttttcgctgctgcaaagggctgtggcttcggagtgttccctatctttggcctcgaggcatataaacacggattctacttcgacttctccatgtccaacatcggcatcggcatgctgtgcccgtacaccatcaccgtgtccatgttcatcgggagcgtcgtctcgtgggggctcgtctcgccgtacctcgcgaccaaggcgggcgtctggtactcttcgcacctcagccccagcagcctcagcggcatcaggggctacaaggtgttcatcggcgtctccatgatactcgccgacggcctcttcaacttcctgtccatcgtggcgtacacgctgcacaccatgcgcaagaggcgcagcaggcagcagccgataataatccaaggcggcggctgcggtggcggtagtgaagccgacgacggtgacacgcagccgctaccgttccactgcctcaacgctgctgccgagcaaccgaagaagagcttcgatgatcgccgccgggcgcaggtgtttctgcgggaccatatatccaactcggtcaacatcgcgtgctacgtcctcctgtcgatggtctccgtcgccgccataccgtacctctacccgcagatgcggcgcgcgcacgtcgccctcatctacctcgccgcgccggtcgtcgcgttctgcgacgcgtacgccttcggcgtgacggacatgaacctgtcgagcacctacggcaagctcgccatggtgctcgtgggctccagcgtggggcgcaacgacggcggcgtcgtcgccggcctcgtggcctgtgggatcgtgatggggaccatgtccaacgccaacaacctgatgcaggacctcaagacggggtacctgacgctgacctcgccgcacaccgtgttcatcagccaggccatcggcacggcgctcgggtgcgtcgtcaacccggtcatgttctgggccttctacagggtggtgcagaacggcgacaccgacgtcttcgacgcgccctacgcccgagtgtaccgcagcatcgccatgctgagcgccgggcaggacgggatacccatgcacagcctctggctctgcaagctcttcttcgcgctggcgctcgcgctcagcgtgttcagggaggtggccatgtggaagcgctggcgtgtggcacgctacattccgagcatcatctgtgtggccatcgcctttgtggtgccggcgcgcatacccatcgacatgttcgtcgggagcttggtgctgtacctgtggaggcgtgccgaccctagcaaggcgccgacgttctcgatggcggtggcgtcagggatgatctgtggggacgggctagggatgctcttgtcatccacgatggcactcatgcatgcgcgggcgcccatctgcatcaagttcatgtctcgtaccgataatgtaaagctagatgccttcttagctacactgcctgtgacatagctagctccgtgcatgtatgcaatgtatcataggagggaacccattccgtagttgtgggttgtatctacttgcaaactcgtcgttgtagtctaaaattgtgagtgaatatagatttcatttgcacatttgagt

SEQ ID NO: 125321 - DNA, 237 bp, Zea Mays
caggggcttgttctgctgtgttgcaattggtctgtgggctggtctgattattggttttgtcacagaatactacactagcaatgcatacagtcctgtgcaagacgttgcagattcctgcagaactggtgctgccactaatgtcattttgggtcgtgctcttggatacaagtcagttatcatcctgattttcgctatcgctgttagcatctatgttactttctccattgctgcaatgta

SEQ ID NO: 125322 - DNA, 1599 bp, Zea Mays
atggagtatgcccatgcgtggtggtcttgtattatttctcttgttcctggcgacgacatgcatgcgtcttcattattattctattcagcagaagcatcacatgtttgccttcatgttgagccgggtggcaatcttcatccccagcgacgcgtcgcacttggcgaggaggtctatccagatggacctgagctcctggctgacctttgggtgtccgagcgagtcggcgaatcgcctcacgaatcggtcctgtcggtcggcgtcccaggagcggtacctctcccctggctgcttgaagtcgttgggcttgcgtatggttgccttctccctcctccccgcgaccggcctgggcggcagtggcgtgggcggcgccgcctgccgcagcggcgcgtgcctggacgggtagtagtccacctcctcgtcccggtgcatgaagttcatggcgccgtcgtagtggttgttgtggtgcgcgcagcgcggcgcgttgacgggcagcatcaggtagttgggacccagcctgtagcgctgcgtgtcggcgtaggcgaacacccggcactgcagcatcttgtcgtccgagtagtagatccctggcaccaccagccccgggccgaacgccagctgctcgttctcgttgaagaagttgtccacgttcctgtccagcaccagcctccccacggggcggagcggcagcaggtcctccggccacgtcttggtgtcgtccagcgggtcgaagtcgtactgctcctccgtgtccggctccatcacctgcacgtacagcgtccactccgggaagctccccgccgcgatggagtcgtacaggtcctgcgtcgcgtggctgtggttccgtcccccgaccagcgccgcctcctcgtccgtcaggatgcaccgcacgccgcacgtcggcttccagtggaacttgacgtactgcgccttccccgccgcgctcacgaacgtgtacgtgttcacgccgaacccttccatgtggcggtagtcggacggcacgcccacgtcgtcgaagaggaagaagaaggtgtgcaggctctcggggaggtgcgacaggaagtcgaacacccgccagtactcctgcacgtgcgaccgcgggttgggcttgaacgcgtggatcacgtcggggaacttgatgccgtcgcggatgaagaagacggggaagttgttgcccagcaggtcccagttgccctcgcgggtgtagaacttcacggcgaacccgcgcgggtcgcggatcgtctccggggacccccgctcgtggatcaccgtcgagaagcgcacgatcacgggcgtccgcacgccgggcgcgcgcaggaagtcggcgcacgtcagcgacgtcacgtcgtgggtgcactcgaagaagcccttggcggaggccccgcgcgcgtgcaccacgcgctccgggatgcgctcgcgcgcgaagtgcgccaccttctcgatcaggtggtagtcctccagcaggatgggaccgcgaggccccacagtcagcgcctcgttgtcgttccacacaggagcgcccgcgttcgtcgtcgtcaccgtcgtgtcgtggctgctggacggacggaacttggtaggatccattgtgattcagctagctag

SEQ ID NO: 125323 - DNA, 1175 bp, Zea Mays
ttccttccgtattgccacagccacaccgggccgcctctcctcctccctcggacagggagagaccctttccatccaagctagccaaaccctagccaccgtcggttccaatctgccaacgtctcgtccgctggttggtggctcggcggcatggcctcgtccgcctacgccgcttgggacgccgcggaggaggcggacatcgacgcctccgcatcgcaggaggagctcatcggccgcgcccgcttcatctcccgtgacaatgaggaggagggggagggggagggggaggaggaggaggaggtcgaggtgttcagcacgccgcctctcacgcatcaggacccgcagagtcagggggaagaagtcatcgtcatgtgctccatccccttcacccagcctgaccccacccctccccccgctcccgctccctcccctccctcggacagtaagagtcgccgtccggagcgggtcaaattgaagccgcggaagaaggtctgcaagaggaagagggtctgcaagaggaaggtgagaagagccaacaagatcaggtctccgactccgagccgcagccccgaactggaccctctcgccagggccgtgctcatgatcccaaccgctccttctacaatcaccggtggtgaggatatcctcgaggttgctcgcagccgcggcatcttctagatctactagttgcctgtgtattttgtgcattgtagcgtagtcccttgtgtttctgccgatcaatccatatgctatggcctggctggattttgtgcattgtccatcgactgcatatgaccttgcttgaaggaaactagttagcagcagagcagtgctctttaattcagatgatacacacagacttacgtcgtcgtcggcggcggcggcgtcgtcctgttgatttcttcagcaaaggtacaacgatcatgccgggaacctgagtttatcactgtctatcctcatccatctgtcgtggcacatcacaatcatggttccttccaactttgctcggtatctcccaggattattattgatcgccaggcgcgcagttctttattgtgattgcagttttttttcccctcttagtttacaagctaacgagggtgaaaaaatcgtaggactatcatgtatggagctatcgataaggcacatggggggaaaataaataaataaataaataa

SEQ ID NO: 125324 - DNA, 2010 bp, Zea Mays
tgaactgtaaaaggtacgaggggccaaacaggaaaagtgagcccaaaccctagacccatggaagcgtggccgcctctagcccccgcggcggccgcagccgccaccccggtcgctgcctccgacgatgcggcggtcactcccgccggttccggggcgtggggaccagcggcaacggcgcagcggaaggccgtggagcaggagtcagcggcgcaggcggtgagccgcatcgtggcgagctgcgccaactccagcggcgtggcggtcgccgtggtggacgccaacgccgttatctccggcgcccccgccctctccacatccgcgggggcgccttgtcaccgtgccggaggtgctcgaggaggtccgggacgcggccgcgcgccgacggctcggactcctccccatccccgtcgagaccgttgatcctgcgcccgagttcgtgaagaaagttaccaagtttgccagggagacaggagacatccaaacactttcagatgttgatatcaagattattgctttggcttacatgttagaagctgagatccatgggagtagccatttgcgggagcaccctcctcctctgcttgaggtgaatgtcagaaagctgtcagaagctccactgcctggttggggctctaatgtgcctaacctgaaagagtgggaagaattggatcagatgtcagaagctggtggagatatcaattctagaatacttcctctgaaggacattgagaatcaagatctcccgatgagcgagaccaacagtgtgtgtgaggcacaggaggatacagaggaccagccttcagagaaggatgcacctgttgcatgggaagaggatgagaataatgtaggttggatgcctgctgttagccgcagcacacacagaagatatttgcggaggaaggcaaggcgtgatgccctcaaagaatctggacaaagttttgagacgagttctgttgctgcatcaattgatagcgataaagttctctctgaaaatggagggttggagcatggtctgacttcaacaggtggcctctcttctgtccctgagaaaatcagtgcaagttctgatggttttgaacttcaagcagaccctgaaattgctggagaacagttgcattctgaccagctatcttatggtgatgatactgatgcatgtaccaaagaattggacaaactagatataaaaggtgaggatgagggaggtgatgatgcacattccgtagactatgagagcagcgaacagagttgggccctgaggtccttatctgaatcaactatagcatgtgttactagtgattacgcgatgcaaaacgtcatcctgcagattggcctccggctcatagcaccaggtggcatgcagatacgccagatgcataggtgggttttgaggtgccatgcttgctataaggtgacccaagaggttggcaaaatattttgtccgaagtgtggcaatggtgggaccttaaggaaggtctcagtgacagttggtgaaaatgggatcactatggcttcacggcgcccacgtgttacacttcgaggcacaaaattttcgctcccaatgcctcaaggtggaagagatgccataactaagaaccccattctacgtgaggaccagcttcctcagaaggttcttcatcctaaattgaagaagtccagcaaggcggatgatttcttgggcgttgaggacatattttcgcacagtggtgataagaaggcgtcactgaaacctccagttggcaaggcactggcaatgttcagcgggaaaaggaatccgaacgacaaccacttctctcgcaagaagcactaagctgtccccttttcatgcacacctaatggtaccctagtttgtaagcaagaagagtggctgagagggggagtctatcgtattcatgtacgaacacatatataagcatgttaagctatgcagttttgcagcatccatgcatggtttacgtgctggtgtttctaattccaatggatttgaatttttttatcttgaatattcacatg

SEQ ID NO: 125325 - DNA, 2282 bp, Zea Mays
tgaactgtaaaaggtacgaggggccaaacaggaaaagtgagcccaaaccctagacccatggaagcgtggccgcctctagcccccgcggcggccgcagccgccaccccggtcgctgcctccgacgatgcggcggtcactcccgccggttccggggcgtggggaccagcggcaacggcgcagcggaaggccgtggagcaggagtcagcggcgcaggcggtgagccgcatcgtggcgagctgcgccaactccagcggcgtggcggtcgccgtggtggacgccaacgccgttatctccggcgcccccgccctctccacatccgcgggggcgccttgtcaccgtgccggaggtgctcgaggaggtccgggacgcggccgcgcgccgacggctcggactcctccccatccccgtcgagaccgttgatcctgcgcccgagttcgtgaagaaagttaccaagtttgccagggagacaggagacatccaaacactttcagatgttgatatcaagattattgctttggcttacatgttagaagctgagatccatgggagtagccatttgcgggagcaccctcctcctctgcttgaggtgaatgtcagaaagctgtcagaagctccactgcctggttggggctctaatgtgcctaacctgaaagagtgggaagaattggatcagatgtcagaagctggtggagatatcaattctagaatacttcctctgaaggacattgagaatcaagatctcccgatgagcgagaccaacagtgtgtgtgaggcacaggaggatacagaggaccagccttcagagaaggatgcacctgttgcatgggaagaggatgagaataatgtaggttggatgcctgctgttagccgcagcacacacagaagatatttgcggaggaaggcaaggcgtgatgccctcaaagaatctggacaaagttttgagacgagttctgttgctgcatcaattgatagcgataaagttctctctgaaaatggagggttggagcatggtctgacttcaacaggtggcctctcttctgtccctgagaaaatcagtgcaagttctgatggttttgaacttcaagcagaccctgaaattgctggagaacagttgcattctgaccagctatcttatggtgatgatactgatgcatgtaccaaagaattggacaaactagatataaaaggtgaggatgagggaggtgatgatgcacattccgtagactatgagagcagcgaacagagttgggccctgaggtccttatctgaatcaactatagcatgtgttactagtgattacgcgatgcaaaacgtcatcctgcagattggcctccggctcatagcaccaggtggcatgcagatacgccagatgcataggtgggttttgaggtgccatgcttgctataaggtgacccaagaggttggcaaaatattttgtccgaagtgtggcaatggtgggaccttaaggaaggtctcagtgacagttggtgaaaatgggatcactatggcttcacggcgcccacgtgttacacttcgaggcacaaaattttcgctcccaatgcctcaaggtggaagagatgccataactaagaaccccattctacgtgaggaccagcttcctcagaaggttcttcatcctaaattgaagaagtccagcaaggttagtgctctagcatttctttctttttttcgtgtactgaaaagtcatttcagaataaggtaatgaggatacatgcacaacaaactgtggactacttaatgaacaaaacaataacaaaaaaaggttatgttatcctgttgtatattacttctatattatatgtggtctatattgtcaagtacgcatttcctcgtttgtcattgtgtacaacaagttatttggtagcagttttggtgaggttggtttaggaacaaagatctgactgtcagcttcactataggcggatgatttcttgggcgttgaggacatattttcgcacagtggtgataagaaggcgtcactgaaacctccagttggcaaggcactggcaatgttcagcgggaaaaggaatccgaacgacaaccacttctctcgcaagaagcactaagctgtccccttttcatgcacacctaatggtaccctagtttgtaagcaagaagagtggctgagagggggagtctatcgtattcatgtacgaacacatatataagcatgttaagctatgcagttttgcagcatccatgcatggtttacgtgctggtgtttctaattccaatggatttgaatttttttatcttgaata

SEQ ID NO: 125326 - DNA, 837 bp, Zea Mays
atgaggctggaggtggatgcgcatctgggcaggcttaggggcggtgtcaccggcctggagagctacgccttgtcgggcaacggccgtgcgatcggaggtgcgcacctgggcatgtcgcttgatgtcatgttgattgagattgatgagaggttcaacgccctgaagctgctcatgggctccgtgttccggcaggccaaggagatgcttggttcggtcaactcgtcggtgtctgatctgcagtcggagaatgagctgcagctggaagtgttcggtgccatcataggagagtgcgtcaatggcctgcaggaggagctagagaggaagctgtacgcgcagatgagcatcacaaacaccatgagcaggaactggaaggaagccataactcagtttgccaccatgttgattgctgcatctccacgtctacttaatgtgggggatccttcctttggcaagtccttggtggcaagcaagaaaaggctggttggagatgtggaagaacaacttgagccagataaaaacgatgatggggtgcaagcaacgcagcagcagctagagctcacaaaagagaacactgaagcaagagcttcaacatgttccacctcccaagagcttcaacatgttctgctccggtggctcaggaggcaagcgtcgcacccgccccgattttgattccaaggacgaatacaacattcccgccggactggcgatcaccgtacctcctgtgcctcgaggtggagccgcccgtctgcgactcgcgcagaccacatctaacgcgtgcggcgctcgtccggctcacgggcaagcaccccttcaacttagaaccttcggtgtcgtggc

SEQ ID NO: 125327 - DNA, 630 bp, Zea Mays
atggcagacaatctttggtatccacaaaatgagaagggtcacatccttcaaccacaattgatggtacgtcgtgatgatgaagaaaagcttgattttaaaggtggaaatgttcatattataacaagcaaagagggctgggaccagaagattgcaggagcaaatagagataagaaaactaaggggaggcggagcactctatcacctaacaagctgtcgatccgaggacaccgaagacgcgatgtgtttgcttgcccgtggtttgagcttggatccaggcacggacgattgaaggagtttgcagatgccgatcttgggccgaaggaaaggtgttgttggtcgtcggtggtcgttgatgctcgcgacagtcgacaacgctgcctgctgcctgctttgtggagggaaactgccagatgtgagggagaaggaggggagggggcgggcatgaacctcccgttcatcgcgtcagggtggggcggggagcagagcgcagggatggttgccagcatcggggtggggacgagaagggacgataggggagtcgggcgcgagggagaaggggaggagggggaggggaacgagcgggttgagattcgagggccgaggaaggggagagggaacagtgggctgtag

SEQ ID NO: 125328 - DNA, 1904 bp, Zea Mays
tcctataaatacgtcgcctttccatgttggatgtcattccattccagcaggcaacagcagctatagtttccaagggaaagggatacatcacctgctgctctagctctgctatagcgctagcagcaatataatggcggccgtcggcgccccgggcagctctctgcacggagtcacggggcgcgagccggcgttcgccttctccacggagcacgaggaggcggcgagcaatggcggcaagttcgacctgccggtggactcggagcacaaggcgaagagcgtccggctcttctccgtggccaacccgcacatgcgcaccttccacctctcctggatctccttcttcacctgcttcgtgtccaccttcgccgccgcgccgctggtccccatcatccgcgacaacctcaacctcaccaaggccgacatcggcaacgcgggcgtggcctccgtgtcgggctccatcttctcccgcctcaccatgggcgccgtctgcgacctgctgggcccgcgctacggctgcgccttcctcatcatgctgtccgcgcccaccgtgttctgcatgtcgctcatcgacgacgccgcgggctacatcgccgtcaggttcctcatcggcttctccctcgccaccttcgtctcctgccagtactggatgagcaccatgttcagcagcaagatcatcggcaccgtcaacgggctcgccgccggatggggcaacatgggcggcggcgccacgcagctcatcatgccgctcgtctacgacgtcatccgcaagtgcggcgccacgcccttcacggcgtggcgcctcgcctacttcgtgccgggcctcatgcacgtcgtcatgggcgtcctggtgctcacgctggggcaggacctccccgacggcaacctcaggtcgctgcagaagaagggcaacgtcaacaaggacagcttctccaaggtcatgtggtacgccgtcatcaactaccgcacctggatcttcgtcctcctctacggctactgcatgggcgtcgagctcaccaccgacaacgtcatcgccgagtacatgtacgaccgcttcgacctcgacctccgcgtcgccgggaccatcgccgcctgcttcggcatggccaacatcgtcgcgcgccccatgggcggcatcatgtccgacatgggcgcgcgctactggggcatgcgcgctcgcctctggaacatctggatcctccagaccgccggcggcgccttctgcctctggctgggacgcgccagcaccctccccgtctccgtcgtcgccatggtgctcttctccttctgcgcgcaggcggcctgcggcgccatcttcggggtcatccccttcgtctcccgccgctccctcggcatcatctccggcatgacgggcgccggcggcaacttcggcgcggggctcacgcagctgctcttcttcacctcctcaacctactccacgggcagggggctagagtacatgggcatcatgatcatggcgtgcacgctacctgtggtgttcgtgcacttcccgcagtgggggtccatgttcttcccgcccagcgccaccgccgacgaggagggctactacgcctccgagtggaacgacgacgagaagagcaagggactccatagcgccagcctcaagtttgccgagaacagccgctcagagcgcggcaagcgaaacgtcatccaggccgatgccgccgccacgccggagcatgtctaagtctactactaataagatggatcgatccatcatccatgttcacctgctacctacctctacgtgtatgccttgtaacgcgccggaccggagcacttgtttgatacaaaagcacatgttaccaacacatagttgagatgtgccaacgatattcatcatgatgagtgattaccaaaaagatatcatctttggtttacagttg

SEQ ID NO: 125329 - DNA, 607 bp, Zea Mays
aatctggagagttccagtgagactacgaatcgtccgccgtcttctgaaaaggtcactcaaaggcccgccgtctgcagcgctggcgaccgcagagccggcgaccaccgtgcgtcctgtctcctcgtctgctccgtccatctccacagcttgtgcaggtcgctgaaacacttggatcaaaacagagcttgagatgaagcactacaccctgaaggatcagggtgtttatgctcttccatctactgcaaaatccaattggaaggatatctactgcatctacttccaaaacagcatgatgcaatacttgacgacaaaggaaaaggtccaaccgttacaattgaatctccacccaaaaggttcaaaatggacctctacgtattaaagaaaggtcggacacaagatcttccaacaactgaagattttctcagattatcagcagcttttaggttgtagaatgtcctttatataattatatataactgctcaacttttatgaagacatttcatgtaaatataacaaggtagcttgaaatgttgcaacaaacatactaccttctgccagtgctcatttaactctattttactttatacaaatctgctatgctctaaa

SEQ ID NO: 125330 - DNA, 610 bp, Zea Mays
aatctggagagttccagtgagactacgaatcgtccgccgtcttctgaaaaggtcactcaaaggcccgccgtctgcagcgctggcgaccgcagagccggcgaccaccgtgcgtcctgtctcctcgtctgctccgtccatctccacagcttgtgcagaacaggtcgctgaaacacttggatcaaaacagagcttgagatgaagcactacaccctgaaggatcagggtgtttatgctcttccatctactgcaaaatccaattggaaggatatctactgcatctacttccaaaacagcatgatgcaatacttgacgacaaaggaaaaggtccaaccgttacaattgaatctccacccaaaaggttcaaaatggacctctacgtattaaagaaaggtcggacacaagatcttccaacaactgaagattttctcagattatcagcagcttttaggttgtagaatgtcctttatataattatatataactgctcaacttttatgaagacatttcatgtaaatataacaaggtagcttgaaatgttgcaacaaacatactaccttctgccagtgctcatttaactctattttactttatacaaatctgctatgctcta

SEQ ID NO: 125331 - DNA, 2283 bp, Zea Mays
cccggctccctcgcgctcctaccccggcccccaattccaatctcgccgccgccgggttgccgtcctgtgctccgcttcgcaccgccgcaccgctaggaacagcccgtgctggagctgggggaacgaacatctcaacctccgtcacccccataccgtacaagtattcctatggagacgatctcatcttgtcccatctgcaacatacaagttcttacggctgagctggaatggcatgccaatagccactttgatgatgatcaactccaaatggacatggaattagcacatcagatgtcagttgctgaatcaagtacagatgccatgaacgacccaaaacattatagtggatcattcactagtgactctaacgctctaggggctctatcgagtcatagtggatactcgcaccattacagtgagctactggatgaacaaatctcttgcttggtccgagcacaaattcgaagcaaagttcaagaggtggaaggcggtattttgagcttgttgaggagctgcttggagtcagaagcgggttcctcgacaagtatgatatcgtgctatattgaccatcatcagagcctttcatcagaagataagggatggggatgtggatggaggaacattcagatgctgagctctcatctattgaagcaaagaccagaagctagagaagtattatttggtggttctggatttgttcctgacatcccttcactccagaggtggcttgagattgcttgggacaaaaaatttgatacaattggctccagccactttcataacaaaatttatggtgccaagaagtggatagggaccacagagtgcgctgccctcttccgctcctttggtctccgtgcaaggattgtagattttgatagcacagaatcatctgacctccatagtaacaacggaagccgtgcagcgagccaagtacgaggacctatggacaagttcttgataaagaataagcctccaaaatcatcatctgaactttgtcgagaggatgctgaaagtacgagaggccaacaggcccttgttgactgggtttggaactactttgcaagtgagcgctctgacagattagccacacagcgtgtcactgttagcaataaaacaccattgtatttccaacatcaaggtcattcaaggacaatagttgggattcaaaagaaaccggatcgtcgtggatctcaagaacaatacagccttttgattttagatccgggccatgtaagttacagttagcattcattctattggtctgaaactgttttccctttatcgtcagttagttgtgatttagtttcacgttctatttgaagctcagcttatggtgtaagttggttggtttcaaagctcagagggtattgtgctatttgatatttcattcctcatgcctttttgctgaacaaaccactttgacgacctccaacataaaaccttgagcccctcctgcttctcatgtgaatcgatgactcctgtggtattgatttagaaagcagcagcagcagcctaaatttcaaaagcacctgccccacattcaaatgttgtttttgatgcgttgcaacatattgtggattatattttctctgctttggttccttatttcgtacgcatagtccattttgaaacttgtagaatagactttgaatcgctgtttctccgccagtacggccatccaaatgtttccccttaatgccgcagagaactgcagatctagaaaggtgtctaagaagcaaaaaaggatggcagcgtctggtgaagagaggcgtccacacgctcaggaagccacagtatcagctgtgttatgtggatcctggaattgctagttcagaagaggtggagcgactgaagactattgatggcacactagtcaggttttaggttcctgttactttgacctaacaagacatgcttggttgactcgtcgagatgctaagtgaagcttgctgcttttcaacaatatttgaaaatctgcgtggtggtattctggagggataggttgtagtctgcgggatcttgatggtggttgtggcagtcggcaattttgccaacactatgtatacactggtggtactgaagctgaggtttaaagcaaagatgaagagagcaaagggcagacaggatcccccacatcaaaactgacaggcatgatcgttcctggaacacaaggatgcagcagctgctggcaccatctcttctcttgctgagctggatatggtggccgcaacccgccttggcgatggacctcgccgccttctccgcgatggcggcgcgcacctg

SEQ ID NO: 125332 - DNA, 1733 bp, Zea Mays
ccccccccccccccaaacgcccgctctccctcctcccattgatccttctccactcggcaataataatggcggacacgcagccgccgccgctcccctactcgtacgtgccgctgccggccgccgacgccgcgtctgccgacgtttccggcgccggcagcaggaggcaggccctctgcgcggcggcgctcgggctcctcgccgtggccgcgctcgccggcgtcgtccccgtccccggccgcggcgcggtgggaatgccagagacggcctcgtcgccgaggagcagcagcaggggccccgaggccggcgtgtcggagaagacgtccggcgcatgggacggcaggatccgtggcgcggcggcggcgggcggcggcgggaacgcgttcccgtggagcaatgccatgctgcagtggcagcgcacgggcttccacttccagccgcaaaagaactggatgaacgaccccaatggccccgtctactacaagggctggtaccacctcttctaccagtacaaccccgacgccgccgtctggggcaacaagatcgcgtggggccacgccgcgtcccgcgacctcgtccactggcgccacctcccgctggccatggtccccgaccactggtacgacaccaacggcgtctggacgggctccgccaccacgctccccgacggccgcctcgccatgctctacaccggctccaccaacgcctccgtccaggtgcagtgcctggccgtccccgccgacgacgccgacccgctgctcaccaactggaccaagtacgagcgcaacccggtgctgtacccgccacgcggcatcgggcccagggacttccgcgaccccaccacggcgtggctcgacccctcggacggcgcctggcgcatcgtcatcggctccaaggacgaccacgaccacgaccacgcgggcatcgccgtcgtctaccgctccagggacctcgtgcacttcgacctcctcccgggcctgctccaccgcgtcgtaggcacgggcatgtgggagtgcatcgacttctaccccgtcgccaccaccggcggcgtcgacatgtccgacacaagtatcggcacgaacgacgtcctgcacgtcatcaaggccagcatggacgacgaccgccacgactactacgcgctcggcaggtacgacgcggccgccaacgcctggacgccgctggacgccgccagggacggcgtcccgcggacggtgctgctggacaccaagacgggcgccaacctgctgcagtggcccgtggaggaggtggagacgctgcgcgccaactccaccgacctcagcggcatcaccgtcgaccacggctccgtgttcccgctcgacctccgccgcgccacgcagctggacatcgaggcggagttccagctggaccgccgcgccatcgccgcggcgctggacgacgacgtgggctacagctgcagcaccagcgggggcgccgcggcgcggggcgcgctgggccccttcggcctgctcgtcctcgccgaccgccgccgccgcggcgagcagacggccgtctacttctacgtggacggctccctcgccacacacttctgccaggacgagtcccgctcctcccgcgccaacgacgtcgtcggcagcgccgtccccgtgctggaggacgaggccacgctctcgctgcgggtgctcgtcgaccactccatcgtcgagagcttcgcgcagggcggaaggtccaccgccacctcgcgcgtctatagctag

SEQ ID NO: 125333 - DNA, 5544 bp, Zea Mays
agaccacgggtggcgcgatgcgacgtcggctgtcgtgctcgtgaccgcagccgcgccttcccgcctccacctcctcctgcgattccgatccgccgccctgtccggccggccggtaagccccgcctccgccctgttccctcggcacccatttttcatttcaactgagaggcggaggaaccaacccaggcacccaaccaaccctagatccaccgcttctgccacacgagagggagagatagacctctccgatctaattccgcatggcctcctcctcctccttcgcccccgacgaccagaccgacgccgacttcttcgacaagctcgtcgacgacgacgaccccgccaccagcctccccgacgacccacccatcccagagccgcaggcgcctcccgagggttcaggcaagggcggcgccggcgtccacactgcggtcaagcaggtgcagtgggcttccttcggaggtggcgcggacgacggtcctgacccatttgctcatctctcgggaggcgccggcgacgacgacggcttcctcgtgaccacggccgggacccagacggcctcggatcacgccttctttggcgggacccagagcttggccgccgaggtgacggaccaggacttcttcgccgggagcaactcctccaatcagcataatgtcagtggtcagcacgaccagggcggcggcagcactgcagtggattcagcagatcccatgtctttggaggccatgtaccctgggtggaagtatgatgaggcctcccagcaatggtaccagcttgacgacagtgtaaattcaactgggaatgcagctcaggtgctggacaacagcactcggtatgcacagcagcagcagcagctccacgcctcttatctgcacaattcagtgcattcagggcttgagacaattgctgaggagggcactaccgcaaccggtgctgtctcaagttggggccaaggggctgcctcagagtacccacccaacatgctcttctatgcagagtaccctggttggtacttcgacaccaacacccagcagtggcactccctcgagttataccagcaggccgccatgcaggctggaacagctagcatgggccagactgttattgcaaacgacggtgttgctgcaacttcctctctgacaggctataatgccgcacaaaatgaggaccttgctgcccatgatcaggtcacccaacacaactcattctcgaatagtttcgctcatcagaaccaatggcagattaccgatgcatttggtaacaatgtacgatctgaatgtgctacagagaacagcctggctagtagttcctatggttttcaacaacacaggaatgctgattctaccagttcatctacgaaccaacgggctggttttaatgcagctgaaactgttactgatcactatggtggacgcaagggcgttgaatcgccaagtattcagagcggttatagcacttctgacattcaacaatccagtcacaaggcattcgaaccttacacgggttatcaggaccattacaaagcatttgaacctgccacaggtcaccatgccagtaacaacatgttcaaacagtccacaggtaaccagggaggttacaaggcgtttgaacctgccatggataaccagagtggctacaaggcatatgaaccttctatgggtcaccatagtgcttcctgggaacccgtgccttccacgggtcaccagactgatttcaaggggtccggagcttcaactgttcatcaggccggatacaaagaatttgaaacttctacaggttacaatacaagtttaaaggcatttgaaccttcttcatctcaacatgctggttacatgggttcccaatctaactacatgggatttgacacttctacaaaccaccatggttatggcgatgcaaatgttgttgcgagcactcaaggctttgtcccaatgcaaaccacataccagggacagacacaagcaattgcaaactcacaagtgcacctgtcaaatagctatttgggtattgacaactccatgaactttaatcagcagcaatttctgggtgcaaatgcctcaaacttgcaattcagtcactccccacatgatggtagagctggacgaccaccacatgctctcgtttcttttgggtttggagggaagctcatagttatgaaagaagctagctccatgcccgcaagctttaacaatggaattcagggtaactctagtggcacagtttcagttcttaatctgtcagaggtggtcatggataaaattgattcttcaagcatcactaatggtagtgcacttagttatttccatgctctgtgccgccaaccagttcctggtcctctggttggtggaagtgctgcatcaaaggatgtaaataagtggattgatgaaatgattgcatggtacgattcttctagtgaactccagagaagtgatactcgcaagttgcttatttcattgctgaagatactgtctcagcactatggaaaactccgttcaccttttgcgtctgacccatcacaagaggagacagatggtccagaaatggcagtaactaagctattttcatcgtttaaaagtactgttaatatgggagattatggatccattgtttcttgcatgaaaaatattccttcagaaagtcagatgcaggctgttgcacaggaggtccaaaatcttctagtttctgggagaagaaaagaggcccttcagtgtgcccagggaggtcaactttggggacctgcaatcatactggcattgcagctcggtgatatgttttatgtggatacagtgaagaaaatggctcacttccattttgtatcggggtcccctctgcgaacgctatgccttctgattgctggacaacctgcagatgtttttaatgtagataacaatgtcaacattgactatggtacatcccatcaacctatggagcctggtcctaatggtatgttggatgattgggaggagaatttagctattattactgcaaacagaacgaaaggtgacgatctagtaatcacccatcttggtgactgtctctggaaagaaaaaaatgagattgcagctgctcattcgtgctatttagttgccgaactaaatattgattcatactcggaaagcgcaaggttgtgcctcattggtgcagatcacttgaagtgtcctcgaacatttgccagccctgaagccattcagaggacagaggtttatgaatacgcgaaggtgcttggtaattctcagtatatcctactaccctttcagccatataagctgatatatgcatacatgcttgttgaagtggggaaggtttctgattctttgaggtattgccaagcgtctatgaaggtattgaaagcctctggccgtgcccctgaattggaggtgtggaagcaattaatttcttcactggaggagaggatacgcactcaccagcagggtggatatggcacaaatcttgccccagcaaaactagttgggaagatttttacctcgcttgataaatctatatcccgcatgatgggtacaccatctgcaccacttccaccattgccacatggatctgttagcgatagagagagccactctatgcctgaagcagcaaaatttataaatagccaatcagtaatggccatgtcatcgctaatgccatctgcttcaatgcagtcaatgactgagatagcagagaatagtgatggcactggcaggaaaatggcacacaacagaagtgtttctgagccagacttcggtagaacatcaaaacagggtggtggatcagatggcacacagagcagtgcagcaggatctggcagttctcgatttggttggctagtgcagaagactatgggattagtgtcaaaatctcaccgccaggcaaaattaggggatcagaacaaattttactatgatgaaaagttgaagcggtgggtggaagaaggtgctgtggttcctgccgaggagcctcctcttcctccccctccaacaaaatcatctttccagaatggtatgccagaccataagttgaatggccacatgagcgtaggccatgctcccagtggagtcacagaatggaaatcctcaaattattcagagcaaggtctgggtatgccgccaattccacctagccaaaaccagttttcttctcgtgggcggatgggtgtccgatccagatatgttgacacattcaataaatcaggtgcatctggagcggtgccatcatataacaaaccagctgctccatccgtgacaccaccagctggtgccaagttcttcataccgactgcagcacctgttgctgcagatcagatgatgccacaccaagcagcagagatacacagtgaaaccatgcaacaggatgagagggcagcctcaccgcctgctggaacatcattctcttcaaccccaccacccacacaattttcatcgcccccaccacacacgcaattctcgtcaccaatgcaatcaacaatccatcggcaatctagtatggcgaacatctccaccccttaccagagttccggggtatcatcattaagcagcgacacctcattctcaaaatcacgagctgcatcctggagtggaacatactctgagcagttcagtgcttttgcgggcacaagatcacccgatggacagacggtgcgctcaccactcatgcctggcaaaccatcacacagtcgttccaacagcaactcatcagtgcagctcaatggattgacagaggatcttcatgaggtcgagctctaattggcggctgctcagcatgactgtcgtcttttatccaccacaaaaggcagccataacaacccctgataaaccccttcccaagcgggtgacagaaaaaaaaggtgcccacgaaatgctgatcacgggggacgctgcagttggaatgggcatgtgggacttttgcacgagattctggggtgcgctctaaaccaccaaggtatgtcagacatgtactaacagaaatagaaatgcggggggttttggacattttgtagctatatatatatatatgtgtgtgtgttttgttttatgttttagagagaagggaaagagttgggctggcctcgtttacaggtgagaaaaatggagcaggagccgcatgcagatgcccttgtacagataatctgcgcctacccagttttttttttttttaaaaaaaaaacgcgaacaagttcacacccgcactccattttgatgttcgtttctgggcgaaggatagaagagaaggtgcgttctagtgtgacaagtatggctctgtagagtactgttgttttggtgtactgcactagccgcagtatattgtctctgttttattctttgggtacgaatcgattctttcatcttgaaacaattgtgttacgccttgttgtgtattcttgtgccctggccgatgtggcggatgcaattgtacgtgttcttcaggtcttggttgtgctgtcgctatatccttgagcacacgtgtgtgctgagctgttttgttgacaatgcgcatcgtaatactggatctttttttaataaactacacgatttgcagttagttgtt

SEQ ID NO: 125334 - DNA, 464 bp, Zea Mays
ctactttaactacatatgaataaaagttcgtgttgtttgtaggattattttccatccgagtcgatgaatgctactgtaaagctagtcagagggaagcttgataagatacaatctggtggtgataattccagtacctcagcagcatccaggaaaccaggggttgataagcgcaggcgaatttgattgcagataatgccgagcacgcgttcaatgttttggtgtaatgttgatattagcataacataccaggattttaatggacttttttctatcaattttctcactcacattctaggccattaagttgtttatgtttcagggtggcggtgctatactatatggttagctagaattgctggaatatcgataaccgagttaagttaaaaatgcctcgcgtttagttttcccagctgtaatgttatgttactcttgcaatcaattgcatcggaattctcatattttat

SEQ ID NO: 125335 - DNA, 1004 bp, Zea Mays
ccgccaccgccaccgccgtcccgctccacgcgtccgcaccctctgcgcggcgccggtcgagaactcgtgatgccccgcgaccgcgacgagccagccgccgtgcgcgtctacaccgtctgcgacgagtccaggtacctgatcgtgcgcaacgtgccgtcactcggatgcggtgacgacctcgccagtctcttcgggacgtacggccccgtggaggagtgcacgcccatggatgcagaggactctgagccctacactgacgtcttcttcgtcaagttctcacaggtcaacaacgccaggtttgcaaagaggaagcttgacgagtctgtgtttcttggcaaccgcctgcaggtgacctatgcccctcaatttgagagccctcaagataccaaggagaaactggaagttaggagaaaagaagtccttggccgaataaaatcatctgctggcagacctgaaggatcatctccagctcagggatcatctagtgggaatcaccaccaaatgaactctaataagagggaatatatgaagacaattcatgcttctcctattgaagatcctcgtttcagtcatgtgtcctcagacaaggattattttccatccgagtcgatgaatgctactgtaaagctagtcagagggaagcttgataagatacaatctggtggtgataattccagtacctcagcagcatccaggaaaccaggggttgataagcgcaggcgaatttgattgcagataatgccgagcacgcgttcaatgttttggtgtaatgttgatattagcataacataccaggattttaatggacttttttctatcaattttctcactcacattctaggccattaagttgtttatgtttcagggtggcggtgctatactatatggttagctagaattgctggaatatcgataaccgagttaagttaaaaatgcctcgcgtttagttttcccagctgtaatgttatgttactcttgcaatcaattgcatcggaattctcata

SEQ ID NO: 125336 - DNA, 1099 bp, Zea Mays
ccgccaccgccaccgccgtcccgctccacgcgtccgcaccctctgcgcggcgccggtcgagaactcgtgatgccccgcgaccgcgacgagccagccgccgtgcgcgtctacaccgtctgcgacgagtccaggtacctgatcgtgcgcaacgtgccgtcactcggatgcggtgacgacctcgccagtctcttcgggacgtacggccccgtggaggagtgcacgcccatggatgcagaggactctgagccctacactgacgtcttcttcgtcaagttctcacaggtcaacaacgccaggtttgcaaagaggaagcttgacgagtctgtgtttcttggcaaccgcctgcaggtgacctatgcccctcaatttgagagccctcaagataccaaggagaaactggaagttaggagaaaagaagtccttggccgaataaaatcatctgctggcagacctgaaggatcatctccagctcagggatcatctagtgggaatcaccaccaaatgaactctaataagagctaggctcaagctcttcaatttaactgttctcttgagcaaaatgtagaagtgtcagcctgatttttctcctaaggttcattttacacacattcagggaatatatgaagacaattcatgcttctcctattgaagatcctcgtttcagtcatgtgtcctcagacaaggattattttccatccgagtcgatgaatgctactgtaaagctagtcagagggaagcttgataagatacaatctggtggtgataattccagtacctcagcagcatccaggaaaccaggggttgataagcgcaggcgaatttgattgcagataatgccgagcacgcgttcaatgttttggtgtaatgttgatattagcataacataccaggattttaatggacttttttctatcaattttctcactcacattctaggccattaagttgtttatgtttcagggtggcggtgctatactatatggttagctagaattgctggaatatcgataaccgagttaagttaaaaatgcctcgcgtttagttttcccagctgtaatgttatgttactcttgcaatcaattgcatcggaattctcata

SEQ ID NO: 125337 - DNA, 1192 bp, Zea Mays
ccgacgcactgacccgcagtcccgcacaaccaccaccaccaccaccaccatggccgccgcgccaacaagctccggcgactcgccgccgcctgcgcagccggagtacggttccatctcctccatggtagcctcgtctgcctcctccgctgcagccgcggtcgcggacttcacccgctgggccgagaccttcggcaccgagaaggccgacgccgccaaggctgccctaacctccgccaccaccttggccacctcatctgcctccgaggcggcttctgcttcctccaaggccgcgtcctccgcatatgcggccgcctccgacctcaccctcgtcgccaaggaggagctggaatggttcaagacggagtactctgctcacgagcagattgtgttcggcaagatcaaagagggtgtcgtcatggcgataatgcatccaggcattgctgcaggctctgcaacccttgcagggattatccttttcaaaaggccaaggagctaccttattcaacgagtacggcacatgtttgttagcaaggagaccctactttctggagtacaggctgaagtgaatcacatgcggcagactgtgaatcttgtatccaatgaacgccaaaagctgttggatagagcagcaactgcagagaaaagattccaaaaaggatggaatacactcagggaagaagggcgttccattcaacacgagttgcgtgagattagtgatattgaaaaccaagcagtaggtctgaagggaattcttgatcagcttcccagagcacatgcatctgaatttcggtcgaagatgtctggcctagcttctcaggttaagaaggagaagcgagtgctcaacgccgccctcacgaagattgtgaactacggtgtccccatctgactgccactccagccagttgttctgagggtccattgtattgtatcagatttttgtgaaggaagacatgttcgatgtgtagggtgaacgctatactgcccacttggtttcgagaaaaggaaaagagaataagttgtgacccgtgcagatttctaatgtcgcaaaagcaacatctttgaaacctgagtaacagatgacattttgctatggtttttttttgttggcttattgacatgttcaccgccgtcagctgccgtatgcctgggaatcgtaaaagtggaatgaaatttttggttgaaatcatgcgag

SEQ ID NO: 125338 - DNA, 1089 bp, Zea Mays
ccgacgcactgacccgcagtcccgcacaaccaccaccaccaccaccaccatggccgccgcgccaacaagctccggcgactcgccgccgcctgcgcagccggagtacggttccatctcctccatggtagcctcgtctgcctcctccgctgcagccgcggtcgcggacttcacccgctgggccgagaccttcggcaccgagaaggccgacgccgccaaggctgccctaacctccgccaccaccttggccacctcatctgcctccgaggcggcttctgcttcctccaaggccgcgtcctccgcatatgcggccgcctccgacctcaccctcgtcgccaaggaggagctggaatggttcaagacggagtactctgctcacgagcagattgtgttcggcaagatcaaagagggtgtcgtcatggcgataatgcatccaggcattgctgcaggctctgcaacccttgcagggattatccttttcaaaagtaacatgttttccttggaacatcattgctctgtggtgctatattgaatttcagctcttttcattatactttcattggttgcttttgctgatgcacaatgtaatttggtaattgcatgaggaattctatccatacatgcacttaaagaacatagggttcattatgactacatgctaaaccacattgttttatttaactcgattgtacttttcatactctagaattgatcctttattgtgttcttacaaatgattgaaatgttttgaaaccttggtcttcttagaatatgatgcacgtcaggccgtcagcacgtatcttattctggtcggattaaaagaactttgaaaaaatagtcagtgatttgagaattgatgaaatttattaaagctgctacgaagttttgttcaaattatctattctctacttagctgcctagtatttgatggtacatatcccgaggtaataagcttgccgttcattggaaatttgatccaatataatttcaagaaggctgaaaattggtcctgtatattaaatgaaatgcgaatgaatccttgcagggccaaggagctaccttattcaacgagtacggcacatgtttgttagc

SEQ ID NO: 125339 - DNA, 1265 bp, Zea Mays
cctttcctcacttcacggtactttcgtcgggtcagatgattttaccaatttaaattttgtgtatgcagcgtccttagtgtccacttcatggccatgctcgaatcgtatcatctcaagttctatagatcttcacttcccctgcttgttctacaatcctgactgatatttctttttatcatattagggccgagatgtatatatactgggttccgcaaatgttggaaaatctgcatttatcagtgcaatgctaagaacaatggcgtacaaggacccggtagcagcggcagctcaaaaatacaagccaatacagtctgctgttcctggaacaacccttggccctattcaaattgaagcatttttaggcggagggaaattgtatgatacacctggagtccaccttcaccataggcaggcagcagttatccatgctgatgatctgccttctcttgcaccacaaagtcgtttgaaagggcgatgttttccggctaatgatacagatgttgaattgagcgggaattcattgttctgggctgggctagtccgcattgatgttatcaaggctcttccacgttcacggctgacattctatgggcccaagaagctaaagattaatatggtcccgacaacagaagctgatcaattttacgagactgaagttggggtcacattgactccgccaactggtaaggagagagctgaaggatggacagggcttcaaggggttcgcgagttgaagataaaatatgaggaacgtgacaggcctgcctgtgacatcgcgatctctgggcttgggtggatttctgtggagccatcaggtgtgccttcaaacagcgctgaggaagtttatgatggcggtgagctgcatctggtggtacatgtgcccaaaccggttgaggtcttcatgcgtcctccattacctgtcggcaaagcagcgtcgcaatggtaccggtatcaagagctgacagaggaagaagaggagctgaggcctaaatggcattactgatgctgctctgtttctctagggctggctctagcagtagtacagatttctgtaatccaaatatttagcagagtgttaggacctggtgatgaaatggattcagaaaacaagttttgaataaatctgtctctggtggtgtctatttagcactttgctttggcatgaggaaagaggaatcctcccatgtcctgcacatgtactcggaatgaaggaccttccagacaaggtattgaagagatttaccaatttaatttcggcaacaaaa

SEQ ID NO: 125340 - DNA, 2010 bp, Zea Mays
tccaccgtccgtcccttccgttgcgccggcccggataaggtaaggagaggataccttcactgctctgcggctgctccgccacgccgccgtccatcgtccatcgtccatggcgtcaccgcaccttcctttcctctccttccccaaaacattaccgccgctacctcccccactcaagacccacgcccaccgcacctccctagccgccgctcctgctccgccgcccgccccgcctgacggcgcggggcccgccgcgcccacgcgtggggaccgcttcctcggccgccagctggccaccgaggccgccgcgcgcgtgctcgcgcccgaggacgccgacaggcggcgccgacgcaaggagaagcgccgggccttggcacggaagccctccggcctcgcatcctgctacggctgcggcgccccgctgcagacggcggaggaggccgcgccgggatacgtcgacccggacacgtaccaactgaagaagaggcatcaccaacttagaaccgttctatgtgggaggtgcaagctgctgtctcatggccacatggttactgctgttggtggccacggcggttatccagggggcaagaagtttgtttctgcggaacagctcagggagaagctgtcatacctccgtcacgagaaagcgctcatagtcaaattggttgacatcgttgacttcaatggaagtttcctggcacgtgtacgcgattttgctggtgctaatcctattatacttgtgataacaaaggttgatctccttcccagagatactgatttgaattgtataggcgactgggttgtcgagtcagttgtcaagaagaagcttaacgtccttagtgtccatttgacaagctcaaagtcattggtcggtatcacaggggttatatcagagattcatcaggaaaggaagggccgagatgtatatatactgggttccgcaaatgttggaaaatctgcatttatcagtgcaatgctaagaacaatggcgtacaaggacccggtagcagcggcagctcaaaaatacaagccaatacagtctgctgttcctggaacaacccttggccctattcaaattgaagcatttttaggcggagggaaattgtatgatacacctggagtccaccttcaccataggcaggcagcagttatccatgctgatgatctgccttctcttgcaccacaaagtcgtttgaaagggcgatgttttccgaacatgatgttatgttcaggctaatgatacagatgttgaattgagcgggaattcattgttctgggctgggctagtccgcattgatgttatcaaggctcttccacgttcacggctgacattctatgggcccaagaagctaaagattaatatggtcccgacaacagaagctgatcaattttacgagactgaagttggggtcacattgactccgccaactggtaaggagagagctgaaggatggacagggcttcaaggggttcgcgagttgaagataaaatatgaggaacgtgacaggcctgcctgtgacatcgcgatctctgggcttgggtggatttctgtggagccatcaggtgtgccttcaaacagcgctgaggaagtttatgatggcggtgagctgcatctggtggtacatgtgcccaaaccggttgaggtcttcatgcgtcctccattacctgtcggcaaagcagcgtcgcaatggtaccggtatcaagagctgacagaggaagaagaggagctgaggcctaaatggcattactgatgctgctctgtttctctagggctggctctagcagtagtacagatttctgtaatccaaatatttagcagagtgttaggacctggtgatgaaatggattcagaaaacaagttttgaataaatctgtctctggtggtgtctatttagcactttgctttggcatgaggaaagaggaatcctcccatgtcctgcacatgtactcggaatgaaggaccttccagacaaggtattgaagagatttaccaatttaatttcggcaacaaaa

SEQ ID NO: 125341 - DNA, 2033 bp, Zea Mays
ccgtccgtcccttccgttgcgccggcccggataaggtaaggagaggataccttcactgctctgcggctgctccgccacgccgccgtccatcgtccatcgtccatggcgtcaccgcaccttcctttcctctccttccccaaaacattaccgccgctacctcccccactcaagacccacgcccaccgcacctccctagccgccgctcctgctccgccgcccgccccgcctgacggcgcggggcccgccgcgcccacgcgtggggaccgcttcctcggccgccagctggccaccgaggccgccgcgcgcgtgctcgcgcccgaggacgccgacaggcggcgccgacgcaaggagaagcgccgggccttggcacggaagccctccggcctcgcatcctgctacggctgcggcgccccgctgcagacggcggaggaggccgcgccgggatacgtcgacccggacacgtaccaactgaagaagaggcatcaccaacttagaaccgttctatgtgggaggtgcaagctgctgtctcatggccacatggttactgctgttggtggccacggcggttatccagggggcaagaagtttgtttctgcggaacagctcagggagaagctgtcatacctccgtcacgagaaagcgctcatagtcaaattggtaaacaacttgtcagatcactccattctcatgtctctgctcactcattctaccttccgtgcgtgaaggttgacatcgttgacttcaatggaagtttcctggcacgtgtacgcgattttgctggtgctaatcctattatacttgtgataacaaaggttgatctccttcccagagatactgatttgaattgtataggcgactgggttgtcgagtcagttgtcaagaagaagcttaacgtccttagtgtccatttgacaagctcaaagtcattggtcggtatcacaggggttatatcagagattcatcaggaaaggaagggccgagatgtatatatactgggttccgcaaatgttggaaaatctgcatttatcagtgcaatgctaagaacaatggcgtacaaggacccggtagcagcggcagctcaaaaatacaagccaatacagtctgctgttcctggaacaacccttggccctattcaaattgaagcatttttaggcggagggaaattgtatgatacacctggagtccaccttcaccataggcaggcagcagttatccatgctgatgatctgccttctcttgcaccacaaagtcgtttgaaagggcgatgttttccggctaatgatacagatgttgaattgagcgggaattcattgttctgggctgggctagtccgcattgatgttatcaaggctcttccacgttcacggctgacattctatgggcccaagaagctaaagattaatatggtcccgacaacagaagctgatcaattttacgagactgaagttggggtcacattgactccgccaactggtaaggagagagctgaaggatggacagggcttcaaggggttcgcgagttgaagataaaatatgaggaacgtgacaggcctgcctgtgacatcgcgatctctgggcttgggtggatttctgtggagccatcaggtgtgccttcaaacagcgctgaggaagtttatgatggcggtgagctgcatctggtggtacatgtgcccaaaccggttgaggtcttcatgcgtcctccattacctgtcggcaaagcagcgtcgcaatggtaccggtatcaagagctgacagaggaagaagaggagctgaggcctaaatggcattactgatgctgctctgtttctctagggctggctctagcagtagtacagatttctgtaatccaaatatttagcagagtgttaggacctggtgatgaaatggattcagaaaacaagttttgaataaatctgtctctggtggtgtctatttagcactttgctttggcatgaggaaagaggaatcctcccatgtcctgcacatgtactcggaatgaaggaccttccagacaaggtattgaagagatttac

SEQ ID NO: 125342 - DNA, 1172 bp, Zea Mays
gtgtgaattaattcacagcatacatagatagagctccattaattctagggtattgtagtgctgcaacatcgatcagctagctgctggcgtatccatttgattcagagcgtccatccattatgggctggggtgactgcaagcctacggcaacaatggtgtccgtcgttgtggtgttcgcggtgctcaacacgctgacaaagatggccttcaaccaagggatgcacaccactgtcctcatcacgcttcgtcagctcaccgccttcctcttcctcgcaccaatcgcctactaccgggagaggaagacacggcctaagatgacacttgagatctttgtctatctcttcttcagtgcagtgcttggtgcctcacttacccagtggctgttcttcgtggggctacgatacaccacagcaacatttgcatgtgccttcatcaacatgactcccatgttcacttttctcgtagcactcccttttgggatggagaaactggacctcaagactggagccggcatagcgaaggtgattggcacagcagtagggttcacaggagccatcgtgcttgcgctctaccaaggtccatcactgaccaaaccctcaccagcccaagcagcagcagcccaccatgttcttgctcaccatcagtgggcgattgggtctgtggccctgctcgcaggcgcagcgtgttggtccttttggttcatccttcagtcgagactggggaagaagtatccggctctctactctggaaatgcgctcatgttcttgctcagcttccttcagatggctgctgtggggctggccacggagaggaaggacctctcggtgtggatcctcagaaccaagctgcagatcatcactgtgctctttgtggggatcatggggtctggagttggtttcttggccatgtcttggtgcatcgagcaaagaggtccagtcttcaccactgcattcacgcctctcatacaactcatagcaggagctatcaacgtcgtcgctctccatgaacagctccatgttggaagcgccctgggctctgctctggtaattgctgggttatactttgtcctctgggcaaagaccaaagaggcggcatcagatgctcctccaaccaccaatattgttaaatcaaagcaagcaacgacggaacaaggagagagtaattatgtatga

SEQ ID NO: 125343 - DNA, 491 bp, Zea Mays
aggtgagtgcccgtgcgttgcaacggaaccgtataataacacgataacttatgtatatatgtgtgttatattgttatgagaaaatatttcggaatccatttgtgatcctatccatacataaattttgttattttaatctaataacatacatccattccatgccacagatttttcttcttcgttcatccgaccatggtgcgcttcctgtcccgttgcctcacttgagccagcttgttctgggtggaacaccattgcttccaagtctttctttacgccgcaaggattttctccatctggttcatcatcaagatcagtgctattacccacataagtttgctaaggcatgattaacacaacataacagacctgcataaaaaccataggaaacaagatgccacgaacaaaaggaaaaaagcataaatccaattgcaactggactaatctgtgttacagagtcaaaaatgtttgcacagatcagtcgagcccaagca

SEQ ID NO: 125344 - DNA, 947 bp, Zea Mays
aatacataataaatgaataaggcttttattgattgtgtttcttctcttcatgcatgtaacaaggccggaaccggaaaccctagaacatatatatatacgtacgtatccaacagcagcacatacatatacatgtaaggaaattaaaataatttgatatagtacgtacgccttggaaagacctgcatgcggcgtggcatcaatataatataaattataatatgcatgcagatcgatgcaagaaggtcgagaagcgatcgatcatagtagatagcatgcatatatatatataataattaatcgattcatgcggcggcggcggcgacggcggcgtggtgtgtgaatccgaaggcgatgtgcgccatccgaccgtactccctgtcgtgcgcggcgacggggacatcctcctcctcgcccttccacgcgtcctcgcagctctcggaggcgcccattgcggcggtcagctgctccatggccttgccgtagatcttcgccttgaggttgtccagcgcgtcgcggaggaggtcgtcgatcttggactcggtgctggcggcgtggtcgatggccatcctggtggccagcaccgccagcccgtgcatgttcttgttgccggcctccttgctgcgcgggtcggcgcccagcgacgccatgcagtggtcgtaggccacgccggcgtgcgtctcggacgcgccgcggcacgcctcctccacgctcaccggggtcgcgcactgctgaggcggctcgccatcgtccaccgccgtgccagcagcggcggcggcgatattatcatcagcaggcaccaactccactaccgcctgcgcaacaccaaccagaagcagcaggcggagaccgagcagtaccagcgtcacacgccggctgctgctactgctgctggcacgggtcattttcgacctaattacttagctcggatggacgatgttccctgctgc

SEQ ID NO: 125345 - DNA, 1093 bp, Zea Mays
atgtcgatgagcctgcacgcctcgtatgtcgtcgtcccatccctagtctcattctcatcccatccaatgttccccgccgcacgctgctccgtccctggtctctacccccacccgaacgcagccgcctgccgccgtgcgccgccgcccaccgccgtgtcagccaaggcgcgccgctcgagccgaggctcccgccgcgaacgctcgtgggacgacggcggcggatcggattccgacgtcgacgacggcttcttcggccaagagcagggcgaggaggatgagccaacgccctcccccgccggacgtcccgccccagcagcgccccagctgcgggggtccgacgtgctgcgcgcgctgcagagggccgccgcggccaaggaggccgccaggaacaagaagaagccggcggcgcgccagcggcaggggaaagagaggccggcgggtggcgacgtggaagcccgggaggtgaggcccgtggtgataaggcccgagtggacggcgaggatccgggagctggagctcagggtgcagcagctcgccgccgacaagtagcaccgctaccggtagtcagtacagtgcagaaggaaacgaagctaaacagttggattttttttagtacagtgcagaaaccaccgaccaaccagtctcatcgtctttgcgctctcgaattcgttcactgtgtgtctgtcggtctgtctcaaagatggattttttttagaaccaaatgatgagacacacaattctgctgcccacgtgctagcagttgcattccagctcagaagcactccaaaacggcaaaactgatgctaggttgaagaattttttatttcgactgtagtttttatagtattttgttgctaggttgaagatttttttttattttgactgtagtttttatagtattttgtctttataaattatagctgcatcaatgattgagctgaacatgatgttcgattaagaccagagatttttctattctaccagcaacgcatccaggtctctctgctgctttcaccacttccagagcttttcagatttatcaatatatacagtgatgttcagtaaacaccgcactttttctgaagctactgac

SEQ ID NO: 125346 - DNA, 2254 bp, Zea Mays
gggccttctggatgcttcctctcccaaaacaacctgtcgctgtcagccgatcgatcgttgaccgatctctctttccactcctctcttaaaccctagccgctgcgcacaacaacctgctactcaatttgatcaaccgccatccattctcctcctccgttgcagctgcggcatccatccagtagtccgaccaatccatggcttcagcgttcgggaccgcctccacttgcggcattaaacatgcacctgccggcgttgcgcttgctgcgcccatgaagcacctttccctcgtctcgccctcgctggtttcgcttccgcgcaagatgaggccgcgaaggaagtacaacttcagggtaaacgctgcaaaggagctgcatttcaacaaggatggctcggctatcaggaaaatgcaaaatggggtcaacaagcttgcagatctcgtcggggttactcttggaccaaaggggcgaaatgtagtcctcgaaagcaagtatggctcacctaaaattgtcaatgatggtgtcactgtggcaaaggaggttgaacttgaggaccctgttgaaaatattggtgctaaattggtccgccaagctgctgctaaaacaaatgacttggctggtgatgggacaaccacttcggttgtccttgctcaagggatgattactgagggtgtaaaggttgtagctgctggtgctaatccagtgcagatcacccgtggtattgagaaaacagccaaagcactagtcagtgaactccaaaagatgtccaaggaggttgaggacagtgagcttgctgatgttgctgcagttagtgcgggaaataactatgaaattgggaatatgatagctgaggctatgaaaaaggttgggcggcagggagtggtcacacttgaagaaggaaagagtgctgaaaataacctctattctgttgagggaatgcagtttgaccgtggctatatttctccctactttgtgactgacagtgaaaaaatgacagtcgagtatgagaactgcaagcttctccttgtggacaagaaaattaacaatgccagagatcttatcactatcctggaggatgctattagaagtggatatccaattctaatagtggcagaggacattgagcaggaagctcttgcaacccttgtggttaataggcttagaggtgcattgaagattgctgctattaaggcccctggttttggagagcgcaaaagtcaatatcttgatgacattgctactctcactggaggcactgtcatcagagaagaagttggattatccttagacaaggcagacaatgcggtcctaggaactgctgctaaggttgtagttaccaaggattcaacaacaatagtgggagatggcactacacaggaggaagtgaacaaaagggtgacacaaatcaagaaccagattgaggctactgaacaagaatatgagagagaaaaactaaacgagaggatagctaaactctctggtggtgttgctgtcattcaggtaggagcacagacagaaactgagctcaaggaaaagaaattgagggttgaggatgccctgaatgctacaaaggcagcagtcgaggaaggtatcgttgtaggtggtggctgtacccttttgaggcttgcatcaaaagttgatgcaattatagagacccttgagaacgatgaacagaaggttggggctgaaattgtaaggaagtccttgagctatccacttaaattgattgcaaaaaatgcaggcgttaatggcagtgtggttactgagaaggttcttgccaatgagaacttcaggtatgggtacaatgcggctacaggggagtatgaggacttgatggctgctggtatcattgatcccaccaaggttgtgaggtgctgcttggagcatgctgcatcggtggcgaaaaccttcatcacctctgatgccgttgttgttgacgccaaggtggctgagcaagcaccatcatctcctgcaaacccaatggcaatgggtggtggctcaggttttgggttctaaattgttcagctgcccttcgttccatcgcagcgacagaatcttagtttcgagatataataataaattggatgatgttagtttcgagatattagttggatgttgttattgttgtctcaaattataaaaaatcaagtgcaagtaaccaagacagctgaaaaaaatagttttgatgagatgctgcttcgtttttcttttctactataaacataaactgagaatgaaaataaataaataaataaata

SEQ ID NO: 125347 - DNA, 1040 bp, Zea Mays
agtttagtttctaaaaaagaatgctactttttgattaatgttgtattttatatgcccgaactgtttttcctttacaaggttggggctgaaattgtaaggaagtccttgagctatccacttaaattgattgcaaaaaatgcaggcgttaatggcagtgtggttactgagaaggttcttgccaatgagaacttcaggtatgggtacaatgcggctacaggggagtatgaggacttgatggctgctggtatcattgatcccaccaaggttgtgaggtgctgcttggagcatgctgcatcggtggcgaaaaccttcatcacctctgatgccgttgttgttgacgccaaggtggctgagcaagcaccatcatctcctgcaaacccaatggcaatgggtggtggctcaggttttgggttctaaattgttcagctgcccttcgttccatcgcagcgacagaatcttagtttcgagatataataataaattggatgatgttagtttcgagatattagttggatgttgttattgttgtctcaaattataaaaaatcaagtgcaagtaaccaagacagctgaaaaaaatagttttgatgagatgctgcttcgtttttcttttctactatattggtgtgttggaaatagttttgatgagatgctgcttcgtttttctactataatattgcaagtaaccaagcagccagtgttcagctatgcacttgccatcctctggcaatacaagttggtcccaattttaaacatagtatccaaccagttttaaaccggacgtgtacactgatgtttgcaaactaaaacctaacaaataataaaaagaacggaacggatggagtacattttaaccagctggataaaattaaattagtactggtacatacaatgcatggacactcgattcttatatgccagcccagccttagttctaaaatacacacaaccaataccaactaggatacgaataagcaaatcaattagacaatcaatatacactgattatcagtgattgatttgatcagctaaaaaaaaaaa

SEQ ID NO: 125348 - DNA, 2635 bp, Zea Mays
gggccttctggatgcttcctctcccaaaacaacctgtcgctgtcagccgatcgatcgttgaccgatctctctttccactcctctcttaaaccctagccgctgcgcacaacaacctgctactcaatttgatcaaccgccatccattctcctcctccgttgcagctgcggcatccatccagtagtccgaccaatccatggcttcagcgttcgggaccgcctccacttgcggcattaaacatgcacctgccggcgttgcgcttgctgcgcccatgaagcacctttccctcgtctcgccctcgctggtttcgcttccgcgcaagatgaggccgcgaaggaagtacaacttcagggtaaacgctgcaaaggagctgcatttcaacaaggatggctcggctatcaggaaaatgcaaaatggggtcaacaagcttgcagatctcgtcggggttactcttggaccaaaggggcgaaatgtagtcctcgaaagcaagtatggctcacctaaaattgtcaatgatggtgtcactgtggcaaaggaggttgaacttgaggaccctgttgaaaatattggtgctaaattggtccgccaagctgctgctaaaacaaatgacttggctggtgatgggacaaccacttcggttgtccttgctcaagggatgattactgagggtgtaaaggttgtagctgctggtgctaatccagtgcagatcacccgtggtattgagaaaacagccaaagcactagtcagtgaactccaaaagatgtccaaggaggttgaggacagtgagcttgctgatgttgctgcagttagtgcgggaaataactatgaaattgggaatatgatagctgaggctatgaaaaaggttgggcggcagggagtggtcacacttgaagaaggaaagagtgctgaaaataacctctattctgttgagggaatgcagtttgaccgtggctatatttctccctactttgtgactgacagtgaaaaaatgacagtcgagtatgagaactgcaagcttctccttgtggacaagaaaattaacaatgccagagatcttatcactatcctggaggatgctattagaagtggatatccaattctaatagtggcagaggacattgagcaggaagctcttgcaacccttgtggttaataggcttagaggtgcattgaagattgctgctattaaggcccctggttttggagagcgcaaaagtcaatatcttgatgacattgctactctcactggaggcactgtcatcagagaagaagttggattatccttagacaaggcagacaatgcggtcctaggaactgctgctaaggttgtagttaccaaggattcaacaacaatagtgggagatggcactacacaggaggaagtgaacaaaagggtgacacaaatcaagaaccagattgaggctactgaacaagaatatgagagagaaaaactaaacgagaggatagctaaactctctggtggtgttgctgtcattcaggtaggagcacagacagaaactgagctcaaggaaaagaaattgagggttgaggatgccctgaatgctacaaaggcagcagtcgaggaaggtatcgttgtaggtggtggctgtacccttttgaggcttgcatcaaaagttgatgcaattatagagacccttgagaacgatgaacagaaggttggggctgaaattgtaaggaagtccttgagctatccacttaaattgattgcaaaaaatgcaggcgttaatggcagtgtggttactgagaaggttcttgccaatgagaacttcaggtatgggtacaatgcggctacaggggagtatgaggacttgatggctgctggtatcattgatcccaccaaggttgtgaggtgctgcttggagcatgctgcatcggtggcgaaaaccttcatcacctctgatgccgttgttgttgacgccaaggtggctgagcaagcaccatcatctcctgcaaacccaatggcaatgggtggtggctcaggttttgggttctaaattgttcagctgcccttcgttccatcgcagcgacagaatcttagtttcgagatataataataaattggatgatgttagtttcgagatattagttggatgttgttattgttgtctcaaattataaaaaatcaagtgcaagtaaccaagacagctgaaaaaaatagttttgatgagatgctgcttcgtttttcttttctactatattggtgtgttggaaatagttttgatgagatgctgcttcgtttttctactataatattgcaagtaaccaagcagccagtgttcagctatgcacttgccatcctctggcaatacaagttggtcccaattttaaacatagtatccaaccagttttaaaccggacgtgtacactgatgtttgcaaactaaaacctaacaaataataaaaagaacggaacggatggagtacattttaaccagctggataaaattaaattagtactggtacatacaatgcatggacactcgattcttatatgccagcccagccttagttctaaaatacacacaaccaataccaactaggatacgaataagcaaatcaattagacaatcaatatacactgattatcagtgattgatttgatcagctaaaaaaaaaaa

SEQ ID NO: 125349 - DNA, 2379 bp, Zea Mays
atgctcagctcttcgacgtctaggcgggagagcaaaagcagcgacctcttcagggccgctgccatggccctccgggatgctgccaacaagaccgctggcattgagccgaacaaagcagcatccaacaacaacgtcgccaccgtcgctgctgtatcgatcaaggaggccatcgccgccgtgcgccatgagggttggatggtccgctacggtcgcaggaagatcggcaggtcattcttccacactcgctacttcgtgcttgacaacagactgcttgcgtactacaagaagaaaccaaaggacaacatggttccactcaactcgctgctaatagacgggaattgcagggtggaggaccgtgggctcaaaacactccatggacaaatgatttatgtcttgtgcatttacaacaagaaagaaaaggagcaccagataacgatgggagcgtatgatattgaggatgcaatggcatggaaaaagaagatagaactcatcattgatcagcaacaagactctatgacagctaagaaccgtaaggcctttgcttcaatggactttgacatggaacttggagggcagtttttgttttcagatcatgacagcacagctgaagatgacgaggaaaggcccactttgactcgcaaaactactatagggaacggcccccctgattcaatacatgactggaccaaagagcctgacattggtgtgtccaatcagaacgaccccaatcaattttgctccaagaagaattggcgactacttagatgccaaaatgggttgcgcatttttgaagaacttctggaagtagattaccctgcacgaggctgcagcagagctatgagggctgttggtgtagttgaagccacatgtgaagccatttttggtcttataatgagcatggatgtaacaagatacgagtgggactgtagcttccgtaacggtagtttagttgaagaggtcgatggtcacactgcaatactatatcataggctgcatctacactggtgcccaatgctagtctggccacgagatctttgctatgctcggtattggcgtcgtaacgatgatggaagttacgttgtgttgttccgatcaacagagcatcttaaatgtggtcggcgacgaggatttgtgagggcattcattgaaagtggaggtttcaagatttctcctctcaagtgtcgcaatggaagacctcgtactcaggttcaacaccttatgcaaattgatctgaagggatggttcctgaactactctctttcctttcagtatcattctttgttgcagatactaaactgtgttgcaggactatgtgaatatttttcccaaacagatgacatccatataaccccaaggattcctgtaatggaaagcatgttcgatgcggattcagaaccaaaaaatcgtaagcttcaagaatttgacactaaggcaaatagaaacatgggaatgattgacgaagaatcagatgatgacgatgattatcaagttcctgaagctaatatagaggaagacgtgaacaaatctcatcatgatatcaagcgcacagatgagcctacagaaaaaattgatttatcttgttttttgagtattcttcatcgtgatcccgaggagaaaagtcgcaattgttggacaatacctgatagcaagatcttcaaagttcgtagcaaaaacttcccacaagacaaatcaaagatacctgcagcaagttatctcatggagcttgcagccattgactggtttaaggacaccaaacgtatggataatgttgccaggcaaaagggttgtgttgctcaggttgctgctgatcgagggatgcatacatttgttgtcaacatacaaattcctggatcaactcagtacagcttggtcatgtattttgtcacaaataccttgagaaagggatccttactacaacgcttttttgatggcgatgacgaattccgcaatagcagactaaagcttataccatccgtccctaagggctcctggatagtgcgacagagtgttggaagcaccccttgtttgttgggaaaggctgttgattgtagttatgttcgaggtcctgcgtacttggaggtggacgttgacattgggtcttcggcggtagcaaatggagttttgggtattgtgtttggtgtggtgacgacgttagtagttgatatggccttcctaatacaggccaacacatacgaggagctaccagagcaggtgataggcgcagctcggttggctcatgttgaaccggccacagcagtagttcctgatcttagcaacacatcaaacgacagtagcaacagcaacaatgacaacaacaacaacaacaacaacaacaatgggtcctcagaggatgatttgtccaagaaaacaaactaattt

SEQ ID NO: 125350 - DNA, 1713 bp, Zea Mays
atttaaaattgtattcttatttataataatgtgttggataacctaagaaaaggtcaacaacaaatttcatagatatctattttaaaataataaatttgtccttacagtttaaatactcattttaatccaacgggaggtgatgtgtggatccaacaaaacagcggaatacaacggcacgtgcggactcaaacaacatactacataacaataatactcgatctagtagtagtagcaaataatacaatatatagcttgaaaaaacaattataattgttcaggtgtggatgtgatgtgatatgacgaaacgacgacccaggcaggcaggcatgcaatcaatgcacggtggtggttccattggtggcgccgccattgctgtacggcattgcagctggtgcgccgtcatcgtcgtctcctgcaaccgtcgccgctcccggagaagaggggatggaaatgaaacgatcgtcgagcatctccgacgatccccgggcgccgtggtccgtcgtgacgctgacgctgacgcctcccgccttgggatgcggcagcagcgccccggacacgtccccccagtagtcggggttggccacgtaccactccatggtcttcctgaggccatcctcccagcgcgtcctctcgcgccagccgagccccttgagcttctcgtcgtcgaggaagtacctctggtcgttgaagggcctgttgtcgacgaactggatggcctcctccgggcgcaggccgaagaggccgctgatgtccctggccacgtccatcaccgtgcgctccttcttggtgccgatgttgtagacgtggcccacctcgccgcggtggaggacgacctcgaacgcctcggccacgtcgtcgcagtagaggtagctgcggacgttggagccgtcgccgtggatgggcaggcgctggcccctcatggccagcagcatgaacttggggatgagcttctccgggaactggttgggcccgtacacgttgttcccgcgcgtggtgatgacggggaggccgtagctccggccgtacgccatcaccagcatctcggccccggccttggtggccgcgtacgggttggtgggcagcagctgcgacgcctcgtggttgcccaccacggcgtcgccgtcagtctcgccgtacacctcgtcggtgctgacgtggatgaagcggcggatctgggcggcggtgcggcaggactcgaggaggacgtgggtgccgtagatgttgttcttggtgaactccaaggagttgccgaaggagttgtccacgtgggtctgcgccgcgaagtgcatcacggtgtcgatgccctcggtggccaggatgaagctgacgaggtcggcgctggcgatgtcgcccttgacgaacttgaagttgttgccgccggagcccatgacggggaggaggttcttgaggttggagcagtagtcaagcttgtccagcaccaccaccttgtactcagggtacctgttcacgatgcggatcgccacgtgggacgcgatgaaccccgcggcgcccgtgatcaggatcctcttgggcttgtacggtgttgtcgccgccattaattcgatggatggatggatcgatcgatcgatagtcttcttcctcctccagtcctcctcttcttcttacacagctagctcgctgctctgcctgctaggagctagctagggagtatagtatataatggacatggatgatgggaggattaatcgcaat

SEQ ID NO: 125351 - DNA, 594 bp, Zea Mays
ttattatatatggatcggattgcttgctctcagcagccacacagtattgctcatggctgcttgtgttccgacggtggatgcggaggaagcatgcgccctcctcagctcttccacacaccactatctggatgtcaggatgtgggaggattttgacaagggccatgtcgccggtgctcggaatgttccctactacctctccgtcactccgcatgggaaggagaagaatccccagtttgtggaacaggtttccgcgctctacgccaaggaccaaaacttgattgtgggttgccgctctggcatccggtccaaactcgccactgcagacctcgtcaacgcggtgatttatgccatttcccattggctccgtacatgggcggtgctacgattgttggtgcaggtggtcaaggacttttatttccaggcctatgggtggcgacctagtcatcggattgattgccactagagtgtctgtatttctttaattttaggctgtgtgattcttgatgagcagaggcaggaagaattttcataaacttgtattaatttgatacaatgcgtttgaaattaataaagtcttcctattccaaaaaaata

SEQ ID NO: 125352 - DNA, 594 bp, Zea Mays
gcattattatatatggatcggattgcttgctctcagcagccacacagtattgctcatggctgcttgtgttccgacggtggatgcggaggaagcatgcgccctcctcagctcttccacacaccactatctggatgtcaggatgtgggaggattttgacaagggccatgtcgccggtgctcggaatgttccctactacctctccgtcactccgcatgggaaggagaagaatccccagtttgtggaacaggtttccgcgctctacgccaaggaccaaaacttgattggttgccgctctggcatccggtccaaactcgccactgcagacctcgtcaacgcggtgatttatgccatttcccattggctccgtacatgggcggtgctacgattgttggtgcaggtggtcaaggacttttatttccaggcctatgggtggcgacctagtcatcggattgattgccactagagtgtctgtatttctttaattttaggctgtgtgattcttgatgagcagaggcaggaagaattttcataaacttgtattaatttgatacaatgcgtttgaaattaataaagtcttcctattccaaaaaaata

SEQ ID NO: 125353 - DNA, 1711 bp, Zea Mays
gcattattatatatggatcggattgcttgctctcagcagccacacagtattgctcatggctgcttgtgttccgacggtggatgcggaggaagcatgcgccctcctcagctcttccacacaccactatctggatgtcaggatgtgggaggattttgacaagggccatgtcgccggtgctcggaatgttccctactacctctccgtcactccgcatgggaaggagaagaatccccagtttgtggaacaggtttccgcgctctacgccaaggaccaaaacttgattgtgggttgccgctctggcatccggtccaaactcgccactgcagacctcgtcaacgcgggcttcaccaacgtgaggaacctacaaggcggatacctttccttgctccgaagcgcaaactagctagcttcctgcttatttgttcgcatgcttgtaataagcaataagtgagtcagaggaagctagcgtcaactcacagccgcaagcccctttggttcgacgctccagtagttcatccatgattttaacatgcccaccctgagcagccagatggagtggggtagggtagcaacaagagaaacaaaaagagaacattaaaggttaatatatatcctaggacatatcattctaaaggcccagtatgaatatcattctggaatctggagcaataatggtgtgtttggtttagctgtatatggtgtttatttgtgtagaatatacagtatatttattagttgaagcacgtgaaaccaaggggtaagataaaggaaaatagtcgtatataaccagtgacaaaagtacttgatgaggaactagaattgagaatcagataattcagaatgaattaagatagtaaaatttccaaggcagacatatgggcttaatatgagcacatatttttaaagagtgaagacagtcataccagcttaagatgggcagtatattttgatataaaatcgcacccagaccaagtagtagttcatcttggcccgagtgcaattttattgtatttggtgtttatttgtgtgtgatgcacgcgcacaattcatgtgaaccaacacgtgatgcaatgtgtatgttgtagtctgcccatacatgcgtgggcgaaatatcctagagggagtcgccatactgcacgaaaccattcatgagttgcataggaaaaggctaagtggggttattcttaaaatttattttgagaaggcatacaacaaggtcaaatggccattcttattccaaactcttcggatgaaaggatttgcgcccaagtggatttcttgggttagatccttcattatgggaggtagtgttgcggttaatgtcaacgacgacgtgggaaaattcttccaaacaaagaagggattacgccaagtcgatcccctgcctcccatcctgttcaacatcgtagcagatatgctagcgatcttgattaacagggctaaagaacatgggcaagtcagtggggtagtgcctcacttaattgatggaggcttatctattctgcaatatgcagatgatacgatcattttcatggaaaacgacttagagaaggctcgtaatatgaagttgttgttaggcgcttttgaacaaatctcaggtctcaaaataaatttccataagagtgaagtattatgctttggagatgcccaagattctttagagagttatttggaattgtttggctgcaaacatggggattttcctctaaaa

SEQ ID NO: 125354 - DNA, 1125 bp, Zea Mays
gcattattatatatggatcggattgcttgctctcagcagccacacagtattgctcatggctgcttgtgttccgacggtggatgcggaggaagcatgcgccctcctcagctcttccacacaccactatctggatgtcaggtgcgtgcctgctgatcgatcatccatccatcacatgatgcatgtgatttatttgtactagcaggatgtgggaggattttgacaagggccatgtcgccggtgctcggaatgttccctactacctctccgtcactccgcatgggaaggagaagaatccccagtttgtggaacaggtttccgcgctctacgccaaggaccaaaacttgattgtgggttgccgctctggcatccggtccaaactcgccactgcagacctcgtcaacgcgggcttcaccaacgtgaggaacctacaaggcggatacctttccttgctccgaagcgcaaactagctagcttcctgcttatttgttcgcatgcttgtaataagtgagtcaacatatgcttgaaagatctgttcatgaagaagcagcatcaactccatcatgaaaaatgattaatgacactgcaaatgtgcatacccaacaactttactatctaaaaatgcaggcaataagtgagtcagaggaagctagcgtcaactcacagccgcaagcccctttggttcgacgctccagtagttcatccatgattttaacatgcccaccctgagcagccagatggagtggggtagggtagcaacaagagaaacaaaaagagaacattaaaggttaatatatatcctaggacatatcattctaaaggcccagtatgaatatcattctggaatctggagcaataatggtgtgtttggtttagctgtatatggtgtttatttgtgtagaatatacagtatatttattagttgaagcacgtgaaaccaaggggtaagataaaggaaaatagtcgtatataaccagtgacaaaagtacttgatgaggaactagaattgagaatcagataattcagaatgaattaagatagtaaaatttccaaggcagacatatgggcttaatatgagcacatatttttaaagagtgaagacagtcataccagcttaagatgggcagt

SEQ ID NO: 125355 - DNA, 717 bp, Zea Mays
agccacacagtattgctcatggctgcttgtgttccgacggtggatgcggaggaagcatgcgccctcctcagctcttccacacaccactatctggatgtcaggatgtgggaggattttgacaagggccatgtcgccggtgctcggaatgttccctactacctctccgtcactccgcatgggaaggagaagaatccccagtttgtggaacaggtttccgcgctctacgccaaggaccaaaacttgattgtgggttgccgctctggcatccggtccaaactcgccactgcagacctcgtcaacgcgggcttcaccaacgtgaggaacctacaaggcggatacctttccttgctccgaagcgcaaactagctagcttcctgcttatttgttcgcatgcttgtaataagcaataagtgagtcagaggaagctagcgtcaactcacagccgcaagcccctttggttcgacgctccagtagttcatccatgattttaacatgcccaccctgagcagccagatggagtggggtagggtagcaacaagagaaacaaaaagagaacattaaaggttaatatatatcctaggacatatcattctaaaggcccagtatgaatatcattctggaatctggagcaataatggtgtgtttggtttagctgtatatggtgtttatttgtgtagaatatacagtatatttattagttgaagcacgtgaaaccaa

SEQ ID NO: 125356 - DNA, 763 bp, Zea Mays
ttattatatatggatcggattgcttgctctcagcagccacacagtattgctcatggctgcttgtgttccgacggtggatgcggaggaagcatgcgccctcctcagctcttccacacaccactatctggatgtcaggatgtgggaggattttgacaagggccatgtcgccggtgctcggaatgttccctactacctctccgtcactccgcatgggaaggagaagaatccccagtttgtggaacaggtttccgcgctctacgccaaggaccaaaacttgattggttgccgctctggcatccggtccaaactcgccactgcagacctcgtcaacgcgggcttcaccaacgtgaggaacctacaaggcggatacctttccttgctccgaagcgcaaactagctagcttcctgcttatttgttcgcatgcttgtaataagtgagtcaacatatgcttgaaagatctgttcatgaagaagcagcatcaactccatcatgaaaaatgattaatgacactgcaaatgtgcatacccaacaactttactatctaaaaatgcaggcaataagtgagtcagaggaagctagcgtcaactcacagccgcaagcccctttggttcgacgctccagtagttcatccatgattttaacatgcccaccctgagcagccagatggagtggggtagggtagcaacaagagaaacaaaaagagaacattaaaggttaatatatatcctaggacatatcattctaaaggcccagtatgaatat

SEQ ID NO: 125357 - DNA, 607 bp, Zea Mays
tgaagaggtttggttgctgcgaaaactgaaacaacattgtctcgtcctaacttctttacaaaggacaatcgcccgtttaaggtctcggatacaatatttgaaggaaggggatgcaaatacaagttttttccatatgcaggcttgctttagaaaaaagagaaactttatttctcatttggaggatgagggcgggactgtgactaatcatgaccagatgcaggagctgttggataatttcttttcagatcttttggggactgaaatccagagacctttcactcttaatttgctaaattgccacagggatccagttgacctaagcgatttagaatctcctttctccgaaagggaggttcaggatacgattgcaagccttcccaatgataaagcacctggtcctgatggtttccctgggaggttttacaaatctgcttggcacatcattaagacagatattatggctgtgctggactttcttcgttttggaaatgctcacagtttggggctgctgaattcagcatatcttgtgcttatccccaaaaaacggatgccttgtcagccagggattttcggcctattagcctaattcacagcttcgctaaattgg

SEQ ID NO: 125358 - DNA, 525 bp, Zea Mays
aggacaatcgcccgtttaaggtctcggatacaatatttgaaggaaggggatgcaaatacaagttttttccatatgcaggcttgctttagaaaaaagagaaactttatttctcatttggaggatgagggcgggactgtgactaatcatgaccagatgcaggagctgttggataatttcttttcagatcttttggggactgaaatccagagacctttcactcttaatttgctaaattgccacagggatccagttgacctaagcgatttagaatctcctttctccgaaagggaggttcaggatacgattgcaagccttcccaatgataaagcacctggtcctgatggtttccctgggaggttttacaaatctgcttggcacatcattaagacagatattatggctgtgctggactttcttcgttttggaaatgctcacagtttggggctgctgaattcagcatatcttgtgcttatccccaaaaaacggatgccttgtcagccagggattttcggcctattagcctaa

SEQ ID NO: 125359 - DNA, 836 bp, Zea Mays
gaagccgtgagacagacagaagcccagaacttaaacctggaagcctggaggatggaacgggtactagcttgctagggttcgtgtccggcggcggcgactgcagctggaacgccggcggcgcagctcagtggatgctcccatcgaccattcccaggttgtagtcttgtgatcttgtccttggaggtacacacaaagactggtagacacagacgacctctgccgatggctggtgccccaaaagctcgacttgtatataattgcaagttatagattatattgcatacaggtgacatattagtttatatgtatttttcagtgtttttatatctaattttagaggagcagactgttcaaccaatgatggcaggtggtcgtgtacttgatccattttgtactcgccttgaccctaccatggtagaagcactggtctgcaccaaagattggatagctggagcaagaaaaggttatatagtagtaccttatatttatttacaatttaattagtcattagttgtgatcaatttgtaatattgtgaacttgtgatctttgtgatcaacctgttatattgtgaacttgtgatctttgtgttcaacttgttatactgtgaattgtgaatttgtggtctttgtgatatttgtaaactttgttgtattgtgaacttgttatattgagatattttcatatttatatggttaccgattgtaattaaggttccgaccggtaccgatgtatttttcgtaccgaactttcgattccgatgtttccgaaataccgatatcgtttccatttccgaagttaccgtttccgatttcgtttccgataaaaaatatgaaaa

SEQ ID NO: 125360 - DNA, 497 bp, Zea Mays
gaagccgtgagacagacagaagcccagaacttaaacctggaagcctggaggatggaacgggtactagcttgctagggttcgtgtccggcggcggcgactgcagctggaacgccggcggcgcagctcagtggatgctcccatcgaccattcccaggtggtcgtgtacttgatccattttgtactcgccttgaccctaccatggtagaagcactggtctgcaccaaagattggatagctggagcaagaaaaggttatatagtagtaccttatatttatttacaatttaattagtcattagttgtgatcaatttgtaatattgtgaacttgtgatctttgtgatcaacctgttatattgtgaacttgtgatctttgtgttcaacttgttatactgtgaattgtgaatttgtggtctttgtgatatttgtaaactttgttgtattgtgaacttgttatattgagatattttcatatttatatggttaccgattgtaattaa

SEQ ID NO: 125361 - DNA, 520 bp, Zea Mays
gaagccgtgagacagacagaagcccagaacttaaacctggaagcctggaggatggaacgggtactagcttgctagggttcgtgtccggcggcggcgactgcagctggaacgccggcggcgcagctcagtggatgctcccatcgaccattcccagaggagcagactgttcaaccaatgatggcaggtggtcgtgtacttgatccattttgtactcgccttgaccctaccatggtagaagcactggtctgcaccaaagattggatagctggagcaagaaaaggttatatagtagtaccttatatttatttacaatttaattagtcattagttgtgatcaatttgtaatattgtgaacttgtgatctttgtgatcaacctgttatattgtgaacttgtgatctttgtgttcaacttgttatactgtgaattgtgaatttgtggtctttgtgatatttgtaaactttgttgtattgtgaacttgttatattgagatattttcatatttatatggttaccgattg

SEQ ID NO: 125362 - DNA, 512 bp, Zea Mays
gaagccgtgagacagacagaagcccagaacttaaacctggaagcctggaggatggaacgggtactagcttgctagggttcgtgtccggcggcggcgactgcagctggaacgccggcggcgcagctcagtggatgctcccatcgaccattcccagactgttcaaccaatgatggcaggtggtcgtgtacttgatccattttgtactcgccttgaccctaccatggtagaagcactggtctgcaccaaagattggatagctggagcaagaaaaggttatatagtagtaccttatatttatttacaatttaattagtcattagttgtgatcaatttgtaatattgtgaacttgtgatctttgtgatcaacctgttatattgtgaacttgtgatctttgtgttcaacttgttatactgtgaattgtgaatttgtggtctttgtgatatttgtaaactttgttgtattgtgaacttgttatattgagatattttcatatttatatggttaccgattg

SEQ ID NO: 125363 - DNA, 974 bp, Zea Mays
gaagccgtgagacagacagaagcccagaacttaaacctggaagcctggaggatggaacgggtactagcttgctagggttcgtgtccggcggcggcgactgcagctggaacgccggcggcgcagctcagtggatgctcccatcgaccattcccaggtttggttctccctcatccggtcctcctccatgtctccatggctgaatcactatcgttctcttctcacgcacgtcatgttgtcaaatccatcactggctttagctcccgtgatctgatcaacagcaaaacgaactcactacacactatgccactatggcatggagtttaattatgagacaatgtaaagactagagcgagtccactaatcacgggtggccaaagaaattcacccgaccaggccttcagagtttagtattttactattattcgtcaccaccctgctacatgattacttgtatataaatagagggcacacgacaccatcctgtaggttgtagtcttgtgatcttgtccttggaggtacacacaaagactggtagacacagacgacctctgccgatggctggtgccccaaaagctcgacttgtatataattgcaagttatagattatattgcatacaggtgacatattagtttatatgtatttttcagtgtttttatatctaattttagaggagcagactgttcaaccaatgatggcaggtggtcgtgtacttgatccattttgtactcgccttgaccctaccatggtagaagcactggtctgcaccaaagattggatagctggagcaagaaaaggttatatagtagtaccttatatttatttacaatttaattagtcattagttgtgatcaatttgtaatattgtgaacttgtgatctttgtgatcaacctgttatattgtgaacttgtgatctttgtgttcaacttgttatactgtgaattgtgaatttgtggtctttgtgatatttgtaaa

SEQ ID NO: 125364 - DNA, 1102 bp, Zea Mays
actaaatgtttttacttgtggatgtgtggtgtctataaggcattaagatccaaagaggaggagctgaaatggccacgaaacacatatatagccagtaaaggagtttattaattgtcgagcttagctgataaaagccaatttgtggccaggtattagttgagcaggcaacgtttgggaaggtgtctgctgattcaatgtgttgttggtttgtttttgcttatacctttttcagatcacttttgagggggagcggacagtggtagatctgtacaagttcatcaagaaacatgctagcatccctttcaagttgaagcgccaggagtcgagaaccgagagcactcgggcggagggtgtgaagagctctggtacgaactcaaaggacgaactgtaaagagctcagggttggatgtgtgttggagtggatcagggtgaaagtttccatctcaatacaagtagatcgatcttggtggatgcgagtgcagtgttggcctgagggaggagcagcagagatgagtgcttactgcttagagagaggaatgaaatcagcaactaatcaaataaaatcaaattccattattccttttatgcgtctgttttgctgtctttactttctttcatcagtatacaatacatggagactggatgtatagctggagtgactctacgcagggctaccatgcagatgcggcacaccgcctcctcggccgcgatgtcctcttgctcttggtcttcctggtcgaccatcctaccagaggtgatgatgaagaacagaccagcgaaggtgacacgttcactacgaagaagcaacaggagggagtagctgtccagacacggccacgtcgacagaagcggaacaacgtgagagtggagtgtatatatgggcctaaatgggtcgtttaactgggccgtggagcttatatgcttccctatctctggaaggagggtatcgagaaaccagtaaacaaacactacggcagctatagccgcccccttccctatcttcttccgcacgccgatctcccctgctctcctatccctatcttccatggagcgctaacaatctggtatcagaggtcagacaagttggatcccatcagcaact

SEQ ID NO: 125365 - DNA, 2535 bp, Zea Mays
gcctgcccactgctcagtccactgcccagcacggatctcatctcaccagctgcccgcgcatccaattcctctcgctggacggctgcagcacatcatcaggtgagaccgtgagagggaatgggatcaacaacaatgtcccctccatcttttcccgtcgtcctcctgctcctcctcctcgccaccatagccgcagccgccggaagcaacatggatgaggaggtggtggacgacctccagtatcttattgacaactccgacgacatccccaccaacgatcccgacgggtggcctgagggagactacgacgacgacgaccttctcttccaagatcaggaccaggacctcacaggccaccagccggagatcgacgagacccacgtcgtggtcctcgccgccgcaaacttttcctccttcctcgcctccagccaccatgttatggttgagttctacgcaccttggtgtggccactgccaggagctcgccccggattacgccgccgccgccgcgcatctcgccgctcaccaccaccaggcccacctcgcccttgccaaggtcgacgccaccgaggaaaccgacctcgcccagaagtacgacgtccagggcttccccaccatcctcttcttcatcgatggcgtccccagaggctataacggagccaggaccaaggaagccatcgtcgactggatcaacaagaagctcggcccagccgtgcaaaatgtcaccagcgtcgacgaggcccagagcatactcaccggagatgacaaagccgtccttgccttcctcgacacactatccggtgctcacagtgatgagcttgctgctgcttcgaggctggaagatagcatcaacttttatcagacttcgactcctgatgttgctaagcttttccatatcgatgcagcagcgaagcgtccatccgtagtgctgctgaagaaagaggaggagaagttgaccttctatgatggggagtttaaagcatcagccattgctggttttgtgtctgctaacaagcttcctttggtgaccacactaactcaagaaacttccccttctatttttggcaatccaatcaagaagcagattttactatttgctgttgcaagcgagtccaccaaatttctgcccatctttaaggaagcagcaaaaccatttaagggaaagttattatttgtctttgtggaacgagacagtgaggaagttggtgaaccagttgccgactactttggtattactggacaagagaccacagttcttgcttacactggtaatgaagatgctaggaaattttttcttgatggtgaggtgtcacttgaagctataaaggacttcgctgaaggtttcttggaagacaagcttacaccattctacaaatcggaaccagtgcctgaatctaatgatggggatgtgaaaattgttgttgggaagaatctggatctaatagtttttgatgaaacaaaagatgtacttcttgagatatatgcaccatggtgtggtcattgtcaatcgctggaacctacttacaacaatctagccaagcatctacgtagtgttgactcccttgtggtagccaaaatggatggtactaccaatgagcatccacgtgcaaagtctgacggatacccgacgattctcttctatccagctgggaagaaaagctttgagccaatcacttttgagggggagcggacagtggtagatctgtacaagttcatcaagaaacatgctagcatccctttcaagttgaagcgccaggagtcgagaaccgagagcactcgggcggagggtgtgaagagctctggtacgaactcaaaggacgaactgtaaagagctcagggttggatgtgtgttggagtggatcagggtgaaagtttccatctcaatacaagtagatcgatcttggtggatgcgagtgcagtgttggcctgagggaggagcagcagagatgagtgcttactgcttagagagaggaatgaaatcagcaactaatcaaataaaatcaaattccattattccttttatgcgtctgttttgctgtctttactttctttcatcagtatacaatacatggagactggatgtatagctggagtgactctacgcagggctaccatgcagatgcggcacaccgcctcctcggccgcgatgtcctcttgctcttggtcttcctggtcgaccatcctaccagaggtgatgatgaagaacagaccagcgaaggtgacacgttcactacgaagaagcaacaggagggagtagctgtccagacacggccacgtcgacagaagcggaacaacgtgagagtggagtgtatatatgggcctaaatgggtcgtttaactgggccgtggagcttatatgcttccctatctctggaaggagggtatcgagaaaccagtaaacaaacactacggcagctatagccgcccccttccctatcttcttccgcacgccgatctcccctgctctcctatccctatcttccatggagcgctaacaatctggtatcagaggtcagacaagttggatcccatcagcaact

SEQ ID NO: 125366 - DNA, 119 bp, Zea Mays
ctgtaatatgtcctttgttctatgggccggtggccggctaaccatctctacattaaaaagtactcccttcgttccaaactagtattcgttttagatcttaatttttatgtctatattca

SEQ ID NO: 125367 - DNA, 786 bp, Zea Mays
ctgctactagactgcgcgcggagctgagctgaactgcccacgccacgcagcgcagacgcagtctcatcatcaagtccggagggagagccggagaaccggttcagccagcaaaatgaggagctccgtctgtgagcgcagcctcatcatcgagagcgacgacgacgacgacgaccatccccaatcccggtcatccgccgccgcccgcagcagaagacgccaccaccaacaggaggaggactccgccgcaggatccgactcccattccggttcctcctcgtcctcctgcggcaccccgcgcggtccggccaccgactcctcctacacccagcaatggccacagagctacaggcagtccatcgacattcttagtggcgtgcagtcaccaaatctgagcttcttgggaaatgggaaccccaactctaagcagattgtccaactcttttcggggtaaaacccctgaaatcatctccaatcttgttaagccacttcttcgccccactacaagtgatgaccaccaacaccaccaccagcagcctgaagaaagaaagagttctcagtaccttctgccttcgagaaaaccatctttgcaacagattcctgaggatcaaaagccagtgccagttgctcatgaggtgtctccgtatcataaatgcacttacacccaggcagttgtgaatggtaagcatctacgactgatttatttatgatgtttatgacacatgcctgcctcttttccgctccttttcaactcaacatgatagatagggccctcaatcacctgtatca

SEQ ID NO: 125368 - DNA, 399 bp, Zea Mays
atgccggacgcactgatgctagacggggtgtgtactccccaaaccaaacagctcggtaaagattactgtaacggtagtcctaaatgggatgaatacttgatacctcgaactgtctttgtccgaacaaccatttttcatgactccgatcaagcacccacgtttttggcctcgggagccgggggaagagaaggaagtttgctaaaggatcttaaatattgcgtctttggacttgggaacacgcagtatgagcattttaataaggttgcaaagatggtgcatgagctgctacaagaacagggtgggaaacgccttgttcctgttggccttgccttggagacgatgatgagtgcatcgaggatttcaccgcatggtcagatggtgatgagctcgcagatataa

SEQ ID NO: 125369 - DNA, 666 bp, Zea Mays
atgtcaacaccacacattgattgcttgctggatggactaaagccaatacaggttgctgctttgagaaataaccgtgaatttctggaacttcttttagcattaactatcccatttctaagtgtgtcaaattggagttttgatggaatcacaaaatacatgttgtctaaagctgctgtgggagagtcacaagtaaaagaagctacatctctgaattcagccagtttagccggaccgcaatctgctgggtcacaagtaaaagaagctacatctctgaattcagccagtttagccggaccgcaatctgctggggtgtcatctagcgcaaaaggggattcgatggaagctaatttgagaggttatgatgcctataaaaatgaaaattacattggagcggtggatgcttacacacaggccattgacttggatcctagcaatgccacactctggtcaaacaagagcctttgctggttgttgcttgggatggctgaaactgccttggaggatgcaaagcaatctcgaacattgagaccagattcggggatagcttgctacagggaaggtgcggcattgcacgagctacagaggttttttgaagctgcaattgccttttatgaaggggctaatcttaaaccagagaaccaagaatatctcagcgccttcatgtag

SEQ ID NO: 125370 - DNA, 352 bp, Zea Mays
ctaaattactcatattcctttttgctggtaaaatatgatttttttttcctgagatggagtttcactcttattgtccacgctggagggcaatggtgccatctcagctgtctgcaaactccgcctcccaggttcaagtaattctggtgcttcagcctccggaatagctgggattacaggcacatgccaccacacccagctaacttttgtatttttagtagagacagggtttcatcatgttgtccaggctggtctccaactcatgacctcaggtgatttgcccgcctcacctgcccaaatttttaggattacaggcgtgagccaccgtatctggacgttgaaatgcttcatggaa

SEQ ID NO: 125371 - DNA, 229 bp, Zea Mays
ttgccacccgtgagctattttttttttctcgaaagcgcaggagaactgcgcgatattatattaaagaagaaggacaattacagaagaaaataaaagggcgcctatggcggccagtaacaggcatacagaaacccatccatgtctaaagaagaacctaacacaaataaccacaatgccacccgtgagctatagcacacgattttatggaaacctagaccctaaatcctat

SEQ ID NO: 125372 - DNA, 3014 bp, Zea Mays
tatttatttttttactaattgctaattcatgactggtatcatatcgaagctaaacctctgtttagttagtggttgttgtttagtaaaataatatattttgttaattaagttggtatattagagaggatgagatatatagaatgaattttagaggatattcttgaagacaggaaggatataggagacgaaatttttgatgtgaacgaggaatatttttttattagaagacgctactagaaacagtcttaaaacttcaaagcatccgtcctcacggcggagtgcgtttggcgctttcctggctttatggacggctggaaagagagagcggtggatggcatcgattcgtccgctacgtaaagctttggtaatataatactccgtactactccatacggcagcactcagtggtaatataacacactcccagtctcggctctcaagcaggtcgcccagcttccacggccgccgccctccccccgtcccttgccacatcccggttcgctgacgccgtcctccgcccagcacaaagcagtcaacaaagaactagcagatggttttgtgttttcaaagtcacaaaccaaccatccagtcaacaagtcaaataccccttgggaacactacagagtttgccaaaactcatgacatttcagcaagcttttggaaactttggttaccctcatttcctagctctttttcattcaattcatcggtatctgaaccaaggtcctctgtggatccttgggcatcactcacttttgaaggaagtaaaacagcatttttcttgtagccccatacaagcatcgaaatattgtcctgtggtgttataagcccgtcctccctggtgcagtttctctgctctttcaatgtctgttgatctgtgagctttatgtactccagcaaaatcttctcatgatctggccgccatccaaatggtaacggcgtgtaatcaggatcaggaaccatcgacatccttgtatactgaagaccatcaattgaatcaacaaggcccattctcagcaaattgtgatactctggcgactggcctttcttatccttcaatggccgactaagatttcttgacgcgatcttatagacctttgcccttgaccgcaacttgtacttggcagcatataactttgccagtgacccccttataatgtaagagcagaagttgacaaccttcttgcggttatcagcgtagcgataccactctgccatcgtcagcaaaagcttattcatctgagaatttgtgtgagattgtgtggcgtggaacatacggaagcatggttgtggatctggttcgcggtctcctttcaaaaactcaagcttccggaattgtttgatgcactgcttcagactagctgtcactgagagcagtgtaccaactcccttctcactaatgatcttgcctcctgtagcagtgtaacgcagtgttgggtacacaactcgacggcacagcacatggtcaaggaacatgactccttttgtgatgtgctcaatagggaggctctcgttatcaagtttgatcctgaatcgctgatcacaaaactcaactagctgcttccggagcaccgccacatccgctcttggccccctcacaccaatcaagaaatgcccgccgtatcgaatgtagtccaccttccttgtcttgtcagggccagtcgtgggaacaaactctggccatgatgtattgccctgctcaataccatcatcccctcccacaacatcggacttggatggcttgtaaaactccttaatcctctcttccatccacttatcaaactcatccaggcacacattggcaagcaacgggctcagcaccccacaatggccccaatcaggctgtgtctgtgcttcctctggtgcaaacccaaaaaacgtctgcagccagtaagggtcaggcttcggctccccctctggcagcaccttcttcttctggtatttcctcttggtcttcttcttctttactgcagcatcatcgcttgcggtcaccaccgaggtgagcagggccgaacggatcaaatcaaccacttttttatcacgcacatcacggataagcgcaccgaccacgagagcaggatcaggcgagtgcaggagtggggagaggtcgcccttgatataccagaggtacggagcaaagctgcggcggatggtgcgaatcgcggcatgcggggatcgacctgggcggaaggcgaaggactttggcgagaacctggcttcgtagacgggctcgagcaggagtaggagcagctcctgcacgacgcggtcctggaagggcgatgggccgggggttgtaaggagggcgcggagcttgcgcttggagagggtggcagggtccggcgcgttggcggcgcgcggggactggaggatgggggtgaggcggttgccgaagcggaagcggccgtcgagtacggcgttgcggagcgttaggagggaggcgagcgtggaggccgggatggaggagcgcggcagataggagccggtctcgtcagcgtacgccttctggtaggcgagcacccacagctccaggcgagagaggaagggggtgagtggctgcggcggtgtgggggtacaagagctggaggtggaggcggcggcgcggaaggaggatacccaaagggaagcggtgattgccaccgggtcatcgcggaggagctgcgtcgggtccaagaggttcccgttcccggaaccgacgccgccgatgcccccgacgataccacggtttgtggaggtggtggggtcggcgacgaactggtggcgtcgcaggggcgcgggtgggtagggatgaggataggcaatggaggagaaggagcggaggcggaggagggatgtgacaagcgcgcggcgaggcggctgcatcggaggaggctaaaaccctagcggtggccgtggccggcggcgtcgtggggtttgaatgtttgatgggtaagcgccgagtggtggcgctggtgcgtgcacggcaacggcggcgcggctgagttgcggcggggagggatgccgaacgccagagcccc

SEQ ID NO: 125373 - DNA, 416 bp, Zea Mays
tcgacaagcaaagtgtcctggctactacgccatgttagcagagaaaatataaaccagttctgattacatctagctattgaaaagtccatcctatgttcattagcctctcagcagaaatcggctggatgcttcctccccccaattcatctgtcccaccacaaaccacccaatcaatgccaaaagcagaaaacactgtgccatattcctaggtttcactttagttgaccctttcagcttttgcagctcattctccatcagtttcaatgcagcagctgtcgatttcttgttttcctcaatttcaaccatggctgccttcatcaaatttttcacgttatccagctcttccatcactaactccaggttggacagctttttcttcatctctctgatggaattggttagagattcaacggctt

SEQ ID NO: 125374 - DNA, 924 bp, Zea Mays
aggatatgcgtcgtcgtggtgcgtgcctagcatgcatgcatgtgacgacctctcctcctcgctgtctctctgtatctgcaactgcaagcaaggaaattaattaaaagaagatcggcgccatggcggcaacgacgacggggatgcagatgatgcaggtgcagcaggcggcggcgttgctgctgtgcttggttgtgttggcggcgtctacgcgggtcgcgctgggcaactgccgcgacgactgcatggctgcatgcaacggctggaccatcgtctgccagctctcctgtgccagcgcatgctacggagaagtcgggatcacaaccttaggtacgtcggctgtattagcgaaagcagaagcgcctgcatcagcaccacaagcagcacaagagcgaggcgccgccgccggcgtgtccgcgctcagagggttcaagctatcatcaccgacgacccgtggccgtggatgaattaattaaggccccatgcatcatgcatgcatgcctaagctacctcccatttctttgcttctacaatgcatgcatgcagatattaattaatcatcatcaatcagcatgtacaaacgagccctacgtactactgtagtacatacgtacgtacgtactccctccggtttcctattagttgtcgtttaggacaacgacacggtctccaaaatataactttgaccaatgttttttgttaaaatacaaatgaactcttaatacatttatacttttataaaaatactttttatgataaattggtgcatataaatattaggttccaaaactaaataacaaaatagttatttgtagtcaaaattttataagtttgactcgaaccttatccaaaacgacaactaataggaaaccggagggagtacgtactagcaatgcaattgagttattaagtgtatccatcgtttcg

SEQ ID NO: 125375 - DNA, 7262 bp, Zea Mays
ccagatgctacatgtcttcttaaaatcactgttttcaagtcgtccgactaatcgtggttagtcgcgattagtcaggcaggtcgcctggtagtggccgatcagccggacgactcgactagagtatcaagtcgtccaggtcgtccgactagtcgtcgattaggcgtgattagtcgtccgatagatcatggttattgaagcggtaaaacgttaaaacgttatgaaccaacttttcaacgtttaaacgaacgttgaaacgtcttttcagacttgacatagaatttcaaatatagaataagttcatacataagttgaaattgaaattcactgtcagcaaatagagattgattcaatgtgagcaaaatcaataaatcttggggctggcgcagaggtgaggcagagtggctggcgcagaggttacaggttagtccctcaatgctggtctatgaagcaatgggcactggcggttggcggctggagcactgggcagccacactggcggctggcgcagaggtagcgtgtggagcactagagcaaaggcgactggcgcactggcctgtggagcagtggcgtagagccggctggcgcactagcgcactggcctgtggagcactggagcggcggcgacgcactggtctgtgaagcaatggagcggcggcgcactgccctgtgggcggagggagggggggccggcggcgtacctggagggcggctgaggacggccgacggcgatgtcattggcgcggtcaccatgatctcggatgtcgcaaccattcgtacaaagatgcgccagactcaaacagcaaagagatccgtcactatacaaaatgagagctgtactccccttgaggttgtgctgtggggtgggcaggcaacctccttcccggctgatcagattagtattgccggccaggactcactccagattattatctttgttggtactcttgctagatcctatgctggtaccacttcactgacaggtggatcgtcttgcaaatggtacgtgaatccgcaggttccagaggcaacaagccttgcagccagcttgcagcataaaaggagcccaattatgtctgctgctggttcgacgcagcgtgtgccgaggatttctaccgctgagcataagaaaaaagttgagtggttggtaacagttaccgttcttaagattgatcaactatggtggtacgagtcctgtagaaagtgcctcaagaaaacaaagcctcatggtgatgcctataaatgctcggactctggttgtggccatgttggtccgcctaatccaaggtacaggttgctcatcacagcaggcgatgagataggcgagactgatttcatactatttggacgtatggcacagcgcattgttaagaaaccacttgacatcttgatcgcggataatccagccggatttattcctgatgaaataactaagctgatggaaaaggtgtacacattcaacgttaacacggttgtcgccgagattggtgatggaggtcaggttccaatttcacccagtggatcccaaccttcatcaatttcgtctgcgtgggctgcatccaagtctacatcagcagactctgtcccaactggaggtacctcttctcagacaccacagagcaccaaaaactacagcaaggataagtctatgcacttcgatgtagcgtgcaagatcgccaacgccactatcaaaagtaacgatagaaatgtctgtgaagcttacgttggttcaagcatcgtcaggttatctgctccttgcttgaccaatccttcacaaacctgcaatctgaacacgtcacaaatgatgtcttgccttttgtggatgtacatcttgcgtgaaacgccacgtttcgggcgttctacggcggcccagcccaattcaccaaacctggtcgcgctcacgtttagggcaccagaccgcgctcaagtccaccgttctctgcccccagaccgcgctcaagtccaccgctctctgcccccaggccgctccaggccgccgctcctccccgtgcagcctcctccaggccgccgcggctcctcccgtcctccgccgccgctccaggccgcggctcctccgccgcagctccaggccgccgctcggccgcgctcaaccgcgccaggcgcccaggccgccgctcagccgctcccgctgtctgccggccactacagagacagccctgcctccagccctgcttcactggtgactggtgagtaccatcttaatttgctgaaggaagaaggattgagacaatttgaggtagctgtagaggccattgcacagtatggtacggggttcaaaccccctagtttccatgagctacgagaacatttgctcgcgaaggctgtcaaagagatatacagtgagaagaagaagcatgaggaccctgatcctacgttttagctagtcagtcagttagttgcatgtatctgtagcttgcacacggctcctaaatttgtgggtgtcgtgccatataaaggcagtgagactcgctcactcgcctggttcctcggacggatcatgagttcgtgcagcgtggggatgaatgcgctaaacgcacggtccgggagacgatggattttcgttagtttttctgcatgcaatcagtactcaataaaaggaggaatatatgcaccaaaagacgttgtcgtttcattgtagcacaaaatagcctgagtctgaaactgtcccaatgcgtgtgtgagttcgtctgtatcaaagagggtgaggtgagtgcttcttctccggctcaggtgatcgctagctcagatccaacacttggtaccaaggcttgcgcattgatccgacatgtcggcccccacggccaagagtgtcgggggaggaagaaggaacagcaggttcagcaaagttagcaggcccatgtggcccaagacgacgagtcgtcccttcttctcgcccatgttgctgaagtcaccatcaactcctcgccaaggcaggactagtggcgaagactgagcgacgcggcggtgatcagcaacccgtcgagcaccacggaggcgtgctttccagaggagcacgtccatttggtggaggagaaggtcttcgccgcgctcgacgacacggagaaccaggatccacggcattggatctttgacataggggcatctaaccacatgacggggtgccacgacgccttctctgacctcgacatgggcatctccagcacagttcgattcggtaatggatagacggtgtgcatcaaagggcgcggcaccgtgctctttgagtgcaagaacggcgaacattgcgccctctccaacaccttcatctcgcatctcactgccaacattgtgagttgtgggcagttggatgagaacaaggagatattgatcaaggccggtgtgatgtgcatccgagacaaacaccatcgtcttctcgccaagatccgactggggccggggcggctgtacgtgctcaacctcaccattgcacgtacagtctgcctagctgcccacacgaaagaggacacgtggtgttggcacgtgcgcttcgggcacacaaactttggcgccctccgcaagatgggcagggagggactcatccgtggtctccctgtcttgaatcaggcggagcgactctacgacacctgtgtcatcggcaagcaccaacgtgacccattcccgactggaacacaaaggcgctccaccaagccactcgagttgctccatggagatatgtgcggaccgatcactctgacgacaaccagcagtaacagctacttcttgttattggttgatgaatatagcaggttcatgtgggtggcactcttgcccatgaaggtcaacgcaccagaacccatcaagcagtcgcgaaatgcaagagtggccacaagcttctcgccctgcgtaccgattgcgggggagaattcacgtcggcgcggttcaccgagtattgcgccgagctctgtgttggccaccagctgacggcgccgtacacgccacagcaaaacggcgtcgtcgagcgacgaaatcaaactgtcatggccatggccaagacgatgctcaaggcaaaggatctccctggcatgttctagggggaggccatcaacgcagttgtctacatcctgaatcaaacgacgacgaaggggaccgacggcaagacctcgtatgagctctggaacggggcagcgccctcggtgcatcacatgcgcacgttcgggtgcgtgacgcatgtcaagatcgtcgaaccgtacttgaagaaactcgacgactgccgcaagcctatggtcttcgtcgggtatgaaccaggctccatggcatatcgtgtctacgacccgacgtcatgtcgtgttcacgtcagtcgtgatgtgatattcgacaaaggcgcgcggtggaactagagcaaggactctatggtcgttggggacgacatcgagatcgagtccatgaatcgcgagcccccggtgaggtgaccatgctccagcctcgacacgagcaaggagctgcagtgccttcaacgtggcgtctgcccgccagcttcaccaaccccacccatcatcttcgcctcgccaccgagtagatcgctggagcgcgtgggcacggatcacggcaacagtgctcccctccggttctagaccatcgacaacgtcgttgggtcagcctctacgcccagtctggtgcggcgagaacttgaggaagacctgcagctggtgagtgagatcgagccaaccacctttgagcaggcacaaaagatggagtgcttgagggaggccatgctcgacgaaatgacctccattgaagagaacaacacttgggagttggtcgatcccccacttcatcagtgcccaaatggacccaaatgggtctataaaatcaagaaggacgccagcggcatcatcaccaagcacaaagcctggctcatcgcaaaaggctatgtgcaacgtcaagggatcgactacggtgaggccttcgcaccggtggcgaggctcgagtctgtccagctcctgctagcactcgtagccaatgagggttggcccatccaccatatggacgtaaggtcggctttcctcaatggcgagctgcgagaacaagtctatgtcgcccaacctccagactttgttgttgctagacaggaacagaaggtgctacggctagtgaaggcgctctatggccttcgacaagccccacgcgcttggtacggcaagctggacttctcactgggttcacttgggttctgacgttgtgcctatgatcatgtcgtgtacacccgcggcctagacacggataggctgatagtcggcatctatgtggacgaccttgtcttcgctggtggcaacattggagaactagtcctagaccgagattgtaatcagtcaaggtgcgtacgcagcgaagattttggagatggccagtcagacgagttgtaatcccagccaaacccccatggagtcacacctcaaactcagtaagttcagtgtttgctctaaaattgatgcaactgagtataggaagatagttggggcactacgctacctggtgaacacaaggccagatttggcatatgcagtggggatatatatcaaggtttatggagagacctactactaagcacctggttgttgtcaagtgtatactgcgttatgttgtaggaacgaaggaacatggatgccattattagaggaaagaagggggagctttgcttctgggctacagcaacagcgatcatggagcagatgtcgacagacggaagagcaccaccggcatcatgttcttctttggcaatagtgtggtgacctggtagtctcagaagcagaaggttgtggcgttgtccagctgtgaagctgaatacgtcgcagctacgacagcctcgtgctagggagtttggctagcacggctcctgacagaaatgaagggagaagagcctggcaatgttaccctgaagaacgataaccagtccgcgattcaattgagcaaaaatccagtctaccacgatcgcagcaagcacatcgacgtcaagtatcactacataagggagtgcatcgacgaaggtcggatagaagtggaatcagtggacacaaaactgcagctggctgacatactgacgaaggcgcttgggagacatcagtttctggtcctgcgttccaagattggcctcgtcaacatcagcgaggtgataaaggttcagggggggacttgttagttgaaccctgatcctacattttagctagtcagtcagttagttgcatgtatctgtagcttgcatcgcacggttcctaaatttgtgtgcgtcgtgtcatataggaggcagtgatactcgctcactcgcctggttcctcggacggatcatgagttcgtgcagcgtggggatggacgcgctaaacgcacgcacgatggattttcgttagtttttctgcatgtaatcggtactcgataaaaggaggaatatatgcactagaagacgctgccatttcattgcagcacaaaatagcctgagtctgaaactgtcccagtgcgtgtgtgagtgcgtctgtatcagagggtgaggtgagtgcttcttctctggcccaggtgatcgccggctaaggtccaacacaattatgaggcactcttttggtgttgctcttacaatacatgcagcagagcagtaacagaatgtcacaacagccataacagctgtaagataatttgtgctaaggaagcacatacaattgacataacaggaggaagaagtaactatgggagtttgccaatgttgggggatatctccgagcatgtcacaagagtacagatccctgtggcttccatggagagggattcctaaaaatttaaccccatatgtttgcaaccagacatcctgtattcctgtccagatttataccaaaccccgatagcccaataccaacagtctagttccaggtcatattccatgctccatcccaatgaatccaccactgatgttctaccaacagagcaatcaaaagtaacaaccactgctgcttgcactattccatggatgaaatgcttccagttccaaaacatggaacagaaacaaatgtgcaagcactcaacaaaatttgtgcggtatctgacaaaattggaagcatatgaagcacgcacctctctcataagctgaaacagcacattctggcatgattgggcgccatcaaccctaagcacccccgcggtgtccgcggcgtcacccccggcggctatcacggacgacacctcctgaatgcaccggagcgcgacccgctcacgcgtaaactccggggcgcccgcgaggggcttcgacgaggcccccaccagaa

SEQ ID NO: 125376 - DNA, 849 bp, Zea Mays
atggccgccatcagccctagctacgcttgccctggttccagcagcttgacgctgccccatcttctctgctcctctctccatctctacagcttgccagccgccactcccagcctctcctccctggcgctcacccctgccctagccatggacaccatcaggtcgtccggtctccagcccgtcctcgccaccaaccacgctcgcccggatctgcgactctctggtaccagccggccattcctgtgctcagcgtccagccccagctcgcccaaccctcacccaatggtccagtatagaatgcatccatgcctctcagagtttccatccaactgcttttatgaaggcacactgcaaaatggagtgactgttaatgagaggcaatcgtctggaattgattttccttggcctgttccaaatcgcccaatgttcttctatgtgcagatgggacaagaagaaatcagtgctagtgggacatcgtatctcaatagaactgaagctgcaaatgttgaaaaaattgtaacaacttttttaagaagtggtgttgtaccaagccagatcggagttatcacaccttatgaagggcaaagggcatacattgtaaatttcatgtcaaggaatggctctcttcgccaacaactttacaaggaaatcgaggtcgctagtgtagactcatttcagggtagagagaaagactacattattctatcttgtgttagaagcaatgagtaccagtgtaagcagttgatacatgaaaccatcaaggctctattgatgtggaatattcctggatgggatctattgttcatttatttgtatctctggagggaggccctagaggtatataacttgtga

SEQ ID NO: 125377 - DNA, 106 bp, Zea Mays
gatggacctcatctcaccaacagaggaagcggcggtgaaaactcagcccacgcaggctaccgcggcgcaaatataatgtaccatatcggccagccaaaggttacgg

SEQ ID NO: 125378 - DNA, 213 bp, Zea Mays
atgaagtgccgccagggtcggaaagcaagcaggaccaaagtgtgggccacgaagagggttcagaggtgttcgtcagagactcaagagcctgttagtggcgttttcaagcctggtggcggacgacgtatggtggaattgctcgccggagtcgctggtagccgaggatccggcttgcgtcgggggtgggagtccctgcgccatattcgtcggtga

SEQ ID NO: 125379 - DNA, 1575 bp, Zea Mays
gccaatccaactcccgtcttccttcttcctcttccttgttcgaatccaagtaacctacccaaaccgccaacccccaccccaaggaaggaaccctagtaccctacccgtgagaaccgccgccgcacaaccccggacgtggtggcaggcgaccgatccggatccatcatcccaagcttcctttctgtctcctcttcatccatctccacaaggataatcaaggaaggaaggccatggttttgttcgaacttgacccggacatcatccgatggggtcttcaccatctcctccccgctccggctggatactctcctcattgtcgcacccaaaccacccctaccacaccttgtacagcttttgctcgccctcctcatcagcccatcggagacatgggtacctcaagctccgttgagatcaaggtcgagcatgtcgatggggttgacaacgacgcgatcatcgcacaagccctccaggaggaattgtccaatgtcgccttcgccgaagcgtccgggccaacctctgccgctgacaatcaacaacattctgctgttctcacgcagcaatggcttcgcccacgcgccgtgcatgtagaaccagcttctcaagaggcagggaccagggaggaacctttcagcacctgctcaagccctggagatgacaataacgtccaggacagccagcaatgcttgatagagctcatggataacttctctgtcattgacggtgaagtgggcaaaagattgaacaacatggttcctgttcctcatgttcctaaaactaatggagagattccttctgttgacgaagccatttcagatcatcaaagacttcttgacaggttggtggtgtacggtttggttgatctcaaggttaaaggagatggcaactgccagtttcgagcgctgtcagatcaattttaccgaactcctgaacatcacagatttgtccggcagcaagtggtgaagcagcttgaatcgcatcctgagatttatgcaggatatgtccctatggactacagggaatatctcaaaaagatgtcaaagagtggagaatggggtgaccacgttacattgcaggctgctgcagactcgtacggtgtaaagatcttcatcctgacatcattcagagatacatgttatattgagattcttcctgttgttgagaaatccagaagagaggttttggctatctaaactcagaagtcctgttgtgcagttatatgcttgagtttttgggctgaggtgcactacaactccatatatcctgaaggagagttgccggttttggagtttgacaacaaaaggaaaaggtggtggcccttctagctaggattcccaggacagactagatagagcagctttaacagactgaggcctttctgttgggctgtgacactgactgatgacgaaaacgagcccatgggtggtggacggaactgcattggccttgccctccttgcccacacgatagacatgtacagtgcgtagtagatggtactatttgcctacttggtaacccattctcagatatatcttttatctctattactataataaagcaccaacacgtaatgggccg

SEQ ID NO: 125380 - DNA, 1536 bp, Zea Mays
gccaatccaactcccgtcttccttcttcctcttccttgttcgaatccaagtaacctacccaaaccgccaacccccaccccaaggaaggaaccctagtaccctacccgtgagaaccgccgccgcacaaccccggacgtggtggcaggcgaccgatccggatccatcatcccaagcttcctttctgtctcctcttcatccatctccacaaggataatcaaggaaggaaggccatggttttgttcgaacttgacccggacatcatccgatggggtcttcaccatctcctccccgctccggctggatactctcctcattgtcgcacccaaaccacccctaccacaccttgtacagcttttgctcgccctcctcatcagcccatcggagacatgggtacctcaagctccgttgagatcaaggtcgagcatgtcgatggggttgacaacgacgcgatcatcgcacaagccctccaggaggaattgtccaatgtcgccttcgccgaagcgtccgggccaacctctgccgctgacaatcaacaacattctgctgttctcacgcagcaatggcttcgcccacgcgccgtgcatgtagaaccagcttctcaagaggcagggaccagggaggaacctttcagcacctgctcaagccctggagatgacaataacgtccaggacagccagcaatgcttgatagagctcatggataacttctctgtcattgacggtgaagtgggcaaaagattgaacaacatggttcctgttcctcatgttcctaaaactaatggagagattccttctgttgacgaagccatttcagatcatcaaagacttcttgacaggttggtggtgtacggtttggttgatctcaaggttaaaggagatggcaactgccagtttcgagcgctgtcagatcaattttaccgaactcctgaacatcacagatttgtccggcagcaagtggtgaagcagcttgaatcgcatcctgagatttatgcaggatatgtccctatggactacagggaatatctcaaaaagatgtcaaagagtggagaatggggtgaccacgttacattgcaggctgctgcagactcgtacggtgtaaagatcttcatcctgacatcattcagagatacatgttatattgagattcttcctgttgttgagaaatccagaagagttatatgcttgagtttttgggctgaggtgcactacaactccatatatcctgaaggagagttgccggttttggagtttgacaacaaaaggaaaaggtggtggcccttctagctaggattcccaggacagactagatagagcagctttaacagactgaggcctttctgttgggctgtgacactgactgatgacgaaaacgagcccatgggtggtggacggaactgcattggccttgccctccttgcccacacgatagacatgtacagtgcgtagtagatggtactatttgcctacttggtaacccattctcagatatatcttttatctctattactataataaagcaccaacacgtaatgggccg

SEQ ID NO: 125381 - DNA, 1527 bp, Zea Mays
gccaatccaactcccgtcttccttcttcctcttccttgttcgaatccaagtaacctacccaaaccgccaacccccaccccaaggaaggaaccctagtaccctacccgtgagaaccgccgccgcacaaccccggacgtggtggcaggcgaccgatccggatccatcatcccaagcttcctttctgtctcctcttcatccatctccacaaggataatcaaggaaggaaggccatggttttgttcgaacttgacccggacatcatccgatggggtcttcaccatctcctccccgctccggctggatactctcctcattgtcgcacccaaaccacccctaccacaccttgtacagcttttgctcgccctcctcatcagcccatcggagacatgggtacctcaagctccgttgagatcaaggtcgagcatgtcgatggggttgacaacgacgcgatcatcgcacaagccctccaggaggaattgtccaatgtcgccttcgccgaagcgtccgggccaacctctgccgctgacaatcaacaacattctgctgttctcacgcagcaatggcttcgcccacgcgccgtgcatgtagaaccagaggcagggaccagggaggaacctttcagcacctgctcaagccctggagatgacaataacgtccaggacagccagcaatgcttgatagagctcatggataacttctctgtcattgacggtgaagtgggcaaaagattgaacaacatggttcctgttcctcatgttcctaaaactaatggagagattccttctgttgacgaagccatttcagatcatcaaagacttcttgacaggttggtggtgtacggtttggttgatctcaaggttaaaggagatggcaactgccagtttcgagcgctgtcagatcaattttaccgaactcctgaacatcacagatttgtccggcagcaagtggtgaagcagcttgaatcgcatcctgagatttatgcaggatatgtccctatggactacagggaatatctcaaaaagatgtcaaagagtggagaatggggtgaccacgttacattgcaggctgctgcagactcgtacggtgtaaagatcttcatcctgacatcattcagagatacatgttatattgagattcttcctgttgttgagaaatccagaagagttatatgcttgagtttttgggctgaggtgcactacaactccatatatcctgaaggagagttgccggttttggagtttgacaacaaaaggaaaaggtggtggcccttctagctaggattcccaggacagactagatagagcagctttaacagactgaggcctttctgttgggctgtgacactgactgatgacgaaaacgagcccatgggtggtggacggaactgcattggccttgccctccttgcccacacgatagacatgtacagtgcgtagtagatggtactatttgcctacttggtaacccattctcagatatatcttttatctctattactataataaagcaccaacacgtaatgggccg

SEQ ID NO: 125382 - DNA, 1440 bp, Zea Mays
attcttcgaggaaacctaggtgattgcaatgtcgttttgatgatgatgattcccgaccattttatctgcacagggataatcaaggaaggaaggccatggttttgttcgaacttgacccggacatcatccgatggggtcttcaccatctcctccccgctccggctggatactctcctcattgtcgcacccaaaccacccctaccacaccttgtacagcttttgctcgccctcctcatcagcccatcggagacatgggtacctcaagctccgttgagatcaaggtcgagcatgtcgatggggttgacaacgacgcgatcatcgcacaagccctccaggaggaattgtccaatgtcgccttcgccgaagcgtccgggccaacctctgccgctgacaatcaacaacattctgctgttctcacgcagcaatggcttcgcccacgcgccgtgcatgtagaaccagcttctcaagaggcagggaccagggaggaacctttcagcacctgctcaagccctggagatgacaataacgtccaggacagccagcaatgcttgatagagctcatggataacttctctgtcattgacggtgaagtgggcaaaagattgaacaacatggttcctgttcctcatgttcctaaaactaatggagagattccttctgttgacgaagccatttcagatcatcaaagacttcttgacaggttggtggtgtacggtttggttgatctcaaggttaaaggagatggcaactgccagtttcgagcgctgtcagatcaattttaccgaactcctgaacatcacagatttgtccggcagcaagtggtgaagcagcttgaatcgcatcctgagatttatgcaggatatgtccctatggactacagggaatatctcaaaaagatgtcaaagagtggagaatggggtgaccacgttacattgcaggctgctgcagactcgtacggtgtaaagatcttcatcctgacatcattcagagatacatgttatattgagattcttcctgttgttgagaaatccagaagagaggttttggctatctaaactcagaagtcctgttgtgcagttatatgcttgagtttttgggctgaggtgcactacaactccatatatcctgaaggagagttgccggttttggagtttgacaacaaaaggaaaaggtggtggcccttctagctaggattcccaggacagactagatagagcagctttaacagactgaggcctttctgttgggctgtgacactgactgatgacgaaaacgagcccatgggtggtggacggaactgcattggccttgccctccttgcccacacgatagacatgtacagtgcgtagtagatggtactatttgcctacttggtaacccattctcagatatatcttttatctctattactataataaagcaccaacacgtaatgggccg

SEQ ID NO: 125383 - DNA, 650 bp, Zea Mays
ttgtgtatatatatgatatgaaactcaagtgcgtgcacttgcttttgcagtacggtgtaaagatcttcatcctgacatcattcagagatacatgttatattgagattcttcctgttgttgagaaatccagaagaggtaatgtttattttctaatttaattgttatcgagttgttgtacctgccctcacatcaaaatctgagtattgtttgcctaagtaaaccttctcactctgtatatatctcgggcatatttcccaatgggtgtttttgttgatgagcagaggttttggctatctaaactcagaagtcctgttgtgcagttatatgcttgagtttttgggctgaggtgcactacaactccatatatcctgaaggaggtactagatgtcgccatttagtgtgttgatgtatgtttgttgagtgtttaatttcgttgtcttctgttgctgcagagttgccggttttggagtttgacaacaaaaggaaaaggtggtggcccttctagctaggattcccaggacagactagatagagcagctttaacagactgaggcctttctgttgggctgtgacactgactgatgacgaaaacgagcccatgggtggtggacggaactgcattggccttgccctccttgcccacacgatag

SEQ ID NO: 125384 - DNA, 2172 bp, Zea Mays
ctccttctcacatcacatgggactggactgggagtgccaatgcctccagcccagcttgcctgccacctggtcttgaccctctcctggataggaggagcagcagccagagggacatcaaactgtgctgcctgcgtgtgtgtcttctttcttgcctctcccttcttcaacctttgctagcttgccagggagggagtccatgaattccagcagaagcctcctctcttcgcccctctttgctagctcgtctccaaacttcaggagcagtgcttccgtctcctcctccccatccccatcccgcaccacaggtatatatagcccttgtatgtgtttctaatctgcagatactattgtccctgggcactggcagagctcatccgctaccatctggcagcagttccaatgatacatgacaccagcagcagcagagcatccacggcgtgccactactcgccgtcgcttgtggcagaggagcagcttcacggctccaaagacaccttgaccttgaagggcgagaaggctttgctcgagttgcttctaggcatggctctggaccagcacgttgacggcaggaagctcattacccaacaggaggctgaggatagtgatttcgagagctatttgagagaagcaacaagccgagtgctttaccagccaacattcatcagtgaagaggatgatgatgatgattctgtttcggagagctcttcagcatcattggccaaaccagctggaacattggatcttggcaagctgacagaggaaccacagcagtgtggatccaaaccattcgtatgatcaagtgtttattagatccactcggttactggagaggagatccaagaaacgcaacggcggccacagggctttggataatggtgtggcgtgcagtggtgtgaactcaaagagaaaagacaagtttggcagagttcttgatccagacgagccttttaggttgtttctacgggatcgagagacgacagagttcttgacagcgaaagaggagaaacagatgttcagtcaaatacagaatcttatgaagctggagggggctcagcgtaacctgcaagctcagtgtggtcgtgaaccaacagttgaagagtgggctcaagccgtaggaatgagctgcagggagctgcaatcctgtgtgcgcaccggaagacggtgccgagagaagatggcccgctccaacttccgccttgtgatacatgttgctaggaaatatgaaggatgtggccttgacattcaggacctggttcaggatggatgctgtgggttgatgaaaacctttgagaagttcaacccgagcaagggatgcagattcccgacctacgcgtactggtggatacgccagtcgatcaaaaagtccatcttcaagaattcaagactaatccggttgccggagagtgtgtatgcacttttgaggaaggtgggcaaagcgaggatggaatgcataatggacggggagcagccgacgaacgaggtggtggcaaggcgtgctggcatcacgattgaaaagctggcgaaactgagagcgaaaaccaggaaagtacggtccatgcaggatcgagtctggtcagacgacggtgtgacataccaggagatcaccgaggaccccaacattgaaggtcctgaggtgagcgtggacaggctgatgatgcggcagcaggtgcgcagcttcctgacggggatcctgagcccccgggagaaggagatcatcgagcaccggttcggcatccacgacggccagcccaagaccctgcatgtcatcggcgacatgtacggcctgtccaaggagaggatccgccaggtgcagaacaaggccctggacaagctcagaaacagcatctcagcacagggcttccacgtctactttgatttgctaacttaagactcttcaacacgcaaacattacatgtacaatgacattccattctgccaatgggtatattatgtatagatagacgaagaattcatgtttttttcctttcccttttgccatttgacattcattcatccttgtactcaacaatggatactcatacatggttgtttgaggagcaaagcttactttaaatgtatggatgtacgtttaagtgcacatatgtttatgaaacctctctttgtttcagtgtttctgcacagcacctaatggcaacattgaagaaactcgca

SEQ ID NO: 125385 - DNA, 2080 bp, Zea Mays
gggagtgccaatgcctccagcccagcttgcctgccacctggtcttgaccctctcctggataggaggagcagcagccagagggacatcaaactgtgctgcctgcgtgtgtgtcttctttcttgcctctcccttcttcaacctttgctagcttgccagggagggagtccatgaattccagcagaagcctcctctcttcgcccctctttgctagctcgtctccaaacttcaggagcagtgcttccgtctcctcctccccatccccatcccgcaccacagcagttccaatgatacatgacaccagcagcagcagagcatccacggcgtgccactactcgccgtcgcttgtggcagaggagcagcttcacggctccaaagacaccttgaccttgaagggcgagaaggctttgctcgagttgcttctaggcatggctctggaccagcacgttgacggcaggaagctcattacccaacaggaggctgaggatagtgatttcgagagctatttgagagaagcaacaagccgagtgctttaccagccaacattcattgaagaggatgatgatgatgattctgtttcggagagctcttcagcatcattggccaaaccagctggaacattggatcttggcaagctgacagaggaaccacagttggatgtaccacagcctcaccgccgcagtgtggatccaaaccattcgtatgatcaagtgtttattagatccactcggttactggagaggagatccaagaaacgcaacggcggccacagggctttggataatggtgtggcgtgcagtggtgtgaactcaaagagaaaagacaagtttggcagagttcttgatccagacgagccttttaggttgtttctacgggatcgagagacgacagagttcttgacagcgaaagaggagaaacagatgttcagtcaaatacagaatcttatgaagctggagggggctcagcgtaacctgcaagctcagtgtggtcgtgaaccaacagttgaagagtgggctcaagccgtaggaatgagctgcagggagctgcaatcctgtgtgcgcaccggaagacggtgccgagagaagatggcccgctccaacttccgccttgtgatacatgttgctaggaaatatgaaggatgtggccttgacattcaggacctggttcaggatggatgctgtgggttgatgaaaacctttgagaagttcaacccgagcaagggatgcagattcccgacctacgcgtactggtggatacgccagtcgatcaaaaagtccatcttcaagaattcaagactaatccggttgccggagagtgtgtatgcacttttgaggaaggtgggcaaagcgaggatggaatgcataatggacggggagcagccgacgaacgaggtggtggcaaggcgtgctggcatcacgattgaaaagctggcgaaactgagagcgaaaaccaggaaagtacggtccatgcaggatcgagtctggtcagacgacggtgtgacataccaggagatcaccgaggaccccaacattgaaggtcctgaggtgagcgtggacaggctgatgatgcggcagcaggtgcgcagcttcctgacggggatcctgagcccccgggagaaggagatcatcgagcaccggttcggcatccacgacggccagcccaagaccctgcatgtcatcggcgacatgtacggcctgtccaaggagaggatccgccaggtgcagaacaaggccctggacaagctcagaaacagcatctcagcacagggcttccacgtctactttgatttgctaacttaagactcttcaacacgcaaacattacatgtacaatgacattccattctgccaatgggtatattatgtatagatagacgaagaattcatgtttttttcctttcccttttgccatttgacattcattcatccttgtactcaacaatggatactcatacatggttgtttgaggagcaaagcttactttaaatgtatggatgtacgtttaagtgcacatatgtttatgaaacctctctttgtttcagtgtttctgcacagcacctaatggcaacattgaagaaactcgca

SEQ ID NO: 125386 - DNA, 2077 bp, Zea Mays
gggagtgccaatgcctccagcccagcttgcctgccacctggtcttgaccctctcctggataggaggagcagcagccagagggacatcaaactgtgctgcctgcgtgtgtgtcttctttcttgcctctcccttcttcaacctttgctagcttgccagggagggagtccatgaattccagcagaagcctcctctcttcgcccctctttgctagctcgtctccaaacttcaggagcagtgcttccgtctcctcctccccatccccatcccgcaccacagttccaatgatacatgacaccagcagcagcagagcatccacggcgtgccactactcgccgtcgcttgtggcagaggagcagcttcacggctccaaagacaccttgaccttgaagggcgagaaggctttgctcgagttgcttctaggcatggctctggaccagcacgttgacggcaggaagctcattacccaacaggaggctgaggatagtgatttcgagagctatttgagagaagcaacaagccgagtgctttaccagccaacattcattgaagaggatgatgatgatgattctgtttcggagagctcttcagcatcattggccaaaccagctggaacattggatcttggcaagctgacagaggaaccacagttggatgtaccacagcctcaccgccgcagtgtggatccaaaccattcgtatgatcaagtgtttattagatccactcggttactggagaggagatccaagaaacgcaacggcggccacagggctttggataatggtgtggcgtgcagtggtgtgaactcaaagagaaaagacaagtttggcagagttcttgatccagacgagccttttaggttgtttctacgggatcgagagacgacagagttcttgacagcgaaagaggagaaacagatgttcagtcaaatacagaatcttatgaagctggagggggctcagcgtaacctgcaagctcagtgtggtcgtgaaccaacagttgaagagtgggctcaagccgtaggaatgagctgcagggagctgcaatcctgtgtgcgcaccggaagacggtgccgagagaagatggcccgctccaacttccgccttgtgatacatgttgctaggaaatatgaaggatgtggccttgacattcaggacctggttcaggatggatgctgtgggttgatgaaaacctttgagaagttcaacccgagcaagggatgcagattcccgacctacgcgtactggtggatacgccagtcgatcaaaaagtccatcttcaagaattcaagactaatccggttgccggagagtgtgtatgcacttttgaggaaggtgggcaaagcgaggatggaatgcataatggacggggagcagccgacgaacgaggtggtggcaaggcgtgctggcatcacgattgaaaagctggcgaaactgagagcgaaaaccaggaaagtacggtccatgcaggatcgagtctggtcagacgacggtgtgacataccaggagatcaccgaggaccccaacattgaaggtcctgaggtgagcgtggacaggctgatgatgcggcagcaggtgcgcagcttcctgacggggatcctgagcccccgggagaaggagatcatcgagcaccggttcggcatccacgacggccagcccaagaccctgcatgtcatcggcgacatgtacggcctgtccaaggagaggatccgccaggtgcagaacaaggccctggacaagctcagaaacagcatctcagcacagggcttccacgtctactttgatttgctaacttaagactcttcaacacgcaaacattacatgtacaatgacattccattctgccaatgggtatattatgtatagatagacgaagaattcatgtttttttcctttcccttttgccatttgacattcattcatccttgtactcaacaatggatactcatacatggttgtttgaggagcaaagcttactttaaatgtatggatgtacgtttaagtgcacatatgtttatgaaacctctctttgtttcagtgtttctgcacagcacctaatggcaacattgaagaaactcgca

SEQ ID NO: 125387 - DNA, 2081 bp, Zea Mays
ggagagggagaggactggactggtactcgcagtcgcactagtgctaggcgcatccggcatccccatcccttgcctccgaatcggatcgccgcccccgctgccgctgccgctgccgccgagcggaagcagccatcaccccaaaccctagccagccatccaactatggagccgcccgccgccgccgccgccgactcctcgcccgatccgacgccgcaggaccagtttcctgccccgtccccttctccctccgcctccccggccaagcgctccgcctggaagcacccctcccccaacggccccgccgtcatggatgccaaccactggcccgcgctctccgacgccgccaagggcatcaagctcccagactcctcgtcttcctcgcctgcgcccgtcgccgccccatcggccgttgccaattcctccagttcgcaaaagcacggcgcccatcacgtccgccacaagtccgccaggcgtggcggcggcggggagcactctccacgagaccatcctgaccggaccacagccacgggttgggaccacgccggcggcggtgggggtaggggtgcccagaggaaccataataacggaggcggcaggagaggcaacgccgccgctgcctctgccgccggaccttctcaccatggtgccggtggcagcggcggaggtggaggctttggtgccaggcgaagaggggcctacgagccgcccttctatcgtggccctccaccaccagtgggcatgggccactacatgcgaggtgccccaccaccaccacctcctccgccgcccatgaccgtcgctccaccgttcatgggcccgccaccgccgccagtctcacccatgcgccccttcgctggaccaatggtgttccatgacatgtcatctcctgtatcccccatatacttttatgggccaccaccaccagaggctcttaggggactggctattgcgcctcctatggttggtccacctgcttatccttacttccaagcgcagcctgagccacagcctgagcctcagcctgatgctgagcctgacgtagaagaggaacgtgtcaagctgctcaagcagatagagttctacttcagcaaggagaacctgtgctcagatgtttacttgaggcagcagatggatgatcaaggctgggttgatatatctcttatagctggcttcaaaaaggtccaagggctaaagaaggacctgcaatatataaaagagacggtgcagtcctcatctattctggaaatgaaggataacaagatcaggaagcatgatgactgggtgaaatgggtgatccctcgtgagagcaatcctgatgtcccgtcaagctcagcatctgtaccaaggcctgatgtcaataatctgacggcacatcttggaggcatggatctgcaggattctgctagctctgctggcgctgtggagccgaagcataatgatgtggtccagaacggatcgccttctggtaatgaagaggctgcagtagctgaggacagctctgatcagcagtagttacaacaaggcagtggtttggattcacaccatgactgcaggggttttgtcggtgcgcgaatgacagggcacaagtggtaacttttttttggcaacttttggaggggaggcgagaggcgtattagactgacaagcgaacgtgtttactggcgttcaggtaagattttggtttaccttgttatattcaggggtagcgatgaagatttggggcagttggtggaatggagatgaagcagaatagtgggaaaacgaaggtggtgatatctggaggcgcctaggaccgaggacaaagattatgtgtgataagttagtagcccccctgtggttgtttactggggggggttgcgtttgcacacgggcgcttggatgctatcatgctgttgttacgatgaactagttggttttcgtctgcgttaggatgggggatgttgtaggacctccgattttttttatggaggagctgaacttggagagccagggagttttttttttttttggacttgttgttttgtggcatgatggtgttaaattgaagtaagaagatgctcattctgctgtatggtattgat

SEQ ID NO: 125388 - DNA, 1339 bp, Zea Mays
atgactccttcgcttctcctctccctcctgctggtggcggcgaggtgctgccatggctggtcgtcgttccagaagccggcggtgactgcggtgatcgctttcggagactccattgtggacccggggaacaacaacgggctgcatacggtgatcaaggccaaccatccgccctacggcaaggacttgttcaaccacgaggccaccggacgctactccaacggcctcattccaaccgacctaattgcccaggagttgggtgtgaagctgctgcttcctgcctacttgggcgtggatctgagcccggaggacctgctcaccggcgtcagcttcgcgtccggcgccaccgggttcgacccgctgactcccctcgtagtgagcgtcatctcgctggagcagcagctcgcctacttcgacgagtaccgcggcaagctggtggatatcgccggcgaggatgagacggcgaggatcatcgacggcgcgctgttcgtagtgtgcgcgggcaccgacgacgtggccaacacctacttcacgacgccgttccgcagcgcggagtacgacatcccgagctacgtggagctgctggtgggcggcgccgaggagttcctccgcaacgtcagctccaggggcgccaggaagatcggcttcgtggggatgccgcccgtggggtgcgtgccgtcgcagcggacgctgggcggtggcctcgccagggcgtgcgagcccaagcggaacgaggcggcgcagctgtacaacgccaggatccaggagatggtcgccgacgccgaccgagacttggcgacgaccacggtggtgttcctggacatctaccgcgtcctggacgacctgatggagcgcggggacaagtacggcttctctgagaccaccaggggatgctgcggcaccggcaccatcgaggtcacgggactctgcgactcccgcttcgtctccgtctgcgacaacgtctcgcagcacgtgttcttcgacagctaccaccccaccgagagagcctacaggatcatcgtcaaggacatctttgacaactacggacaagtgctcatcggatgatatatatatctaccttgcttgagcgatcgagcatgcatgttcatcttcttcatctttatgtacgttcggctagctggcccaaagcctcaaggaggcccatttatcttcttcttactcctcctcgccccaagaataattaattgtaagcatgatctgcggaatcagacggggatggtctggtggaagtctacatatgggccgctggcacgatacaaacccaccaattgatttggtttggtttggcccatatggccacttcctatccatccatccatcc

SEQ ID NO: 125389 - DNA, 1996 bp, Zea Mays
cctcgatcgacgccgacgctgctgcctcccgcggcgcagcataaaaatggggagcggcggcatccgtaacgccaggccctcctcctggctcgccgccgtggccgccgctgccgcaccaccaatcgcccacgccgtcctcctcacctccggccacctctcctcccgtgcctccgccaactccctcctccgcgtcgccccctgctcctccgcctgcgcgctcatcctccgcctcctgctgctccaccgcctccgacccgaccacatctccctctccttctccctgcacgcctgcgcccgcgtcgtccccaccaccagccgctacccgctcacggtcacgggcctcctccactcgctcgccctaaggcttggccacgcccgcgacgtctacgtcgccaacgccgccgtatcctcctacttcgccgcctccgacgtcgcctccgccgaccgtctcttcgcggaggtctccaccgacgtcgccgacgtcgtcacctggaccacaatggtcaccggccacgccagtgccggcggcctgggccgggcgaggcacttcttcgacgccatgtccgagcggaacgtcgtatcctggaacgcgatgctgagcgcgtacgcccgcgccgggatgctcaccgaggcgcgggacctgttcgacgcgatgcctaccaggaacgccgccacctggagctgcatgatcagtggcctcgtgctgtcgggacgctgctgggaggcgctggggctcttcggtgacatggtccacagcagcggcatcgtgccgaacgagcccgcgctggtgagcgtggtctcggcgtgcgcccagatgcggtcactggaacacggcgcgtgggtgcacgcgtacgccgaacaggagctgcagggggcgatgagtgttgtcctcgcctccgctatcatcgacatgtacgggaaatgtgggggtatccacagtgccatcagggtgtttgctgccatgcccatgaggaacatctactcctggaacgcgatgatcactgggctcgcgatgaatggtggcgaacgacaggccctgtcgctcttatggaagatgcagatggttggcgttcaaccaaatgacataactttcatcgggttgctgagcgcttgcacccactctggtcttgtgaatgagggccgccggttgtttgacagtatgatcgaggactttgggatacagccattcccacaacattatggtcttatggttgatttgattggccgctctggtcgtgtcatggaggccttgtatttcgtcaagagcatgcccgtggagccacaccctggcttatggggcgcactagctagcgcctgcaagatgcatggcaaggtcgagcttggtgaggaggttgccaagaagctcattgaactggagcctcgccatggcagccgatacatcctgctgtcaaacttgtatggctctgtgaatagatgggatgacatggcctctgtgcgtaagatcctcaaaaggcgcaaggtgcccaaaggcactggcaatgcagtggttgggatgacatcggcatcctgtatgtcgaatggttgaatgcactctcgatagtgatatgtacaaatttgggactacttttcattgataggggcattaagatttttgcaacgattggaactgcggccaatgagaattatgagatcgatgaagcctagaggagaatggggctgaaaaaagaacttctcaaatataaatgtttggttgatatgtcatcatatgccacctaattgtttgaacaacactcagtaattgcatttactgggagtggaagtgcaagaaactagcaagaagtgcagactgatgcgtgaatactgatcaaagggggctggaactcgagaacaatgagtggtgtagtatgatcagttcagagttaggcaattcagttagtgcaaggatatttcaaattagttacccgacctcttttttttattgcatattgatatctagaataagatcgatccaaatcacttgaatgctaattttgtc

SEQ ID NO: 125390 - DNA, 1715 bp, Zea Mays
ctctcaatctcatttcatatctctatatgtccgattatttatgtggtgtcttggtagctagctcggagcttaattttaattcgcagctgcgcagtagtataaaatcgttgttggccctttgctttccctctccctcgttgtccatggccctcgagtcatggctcaccaaggtccgctcggccatgtcctctgcctctggaggttcgggggcgccatcgaggccccggaagcagagcaccgtcggcatcctcgccttcgaggtcgccagcctcatgtccaagcttctccagctgtggcgagccgtgggtgacgctgccgtcgcacgcctccgccacgagaccatgaacctccacggcgtccgcaagatggtctccgacgacgacgacttccttgtcggcctcgcccgcgccgagctcgtggacacgctcagggccgcatccgactccgtgaccgcgctcgccgcgcggtgcgcggaccccagcctccgcgacttcagggacgccttcctggagctggccgacaccggccgcgaccggcaccgctggacggcgcccagctggaaggagatggacgcgagggcgagcaggatggggaagcaggtggccaccaccgccgcgctccggagggccatggaggagctggccgaggccgagcacggcctccggaagcttgtcgtcctccagtgcgccgccaacagcctttcggcgagcaagatctcggcggcgtcggagcagcagcaggtggtcttctccaagaggcaggaggtgaagcacctgaagcagacgtccctctggggctccaccttcgacgctgtcgtcgcgtcgctggcacgggcggcgttcaccaccctcgcgcgcatcaaggccgtcttcggcgccggccgggagcagcgccacccgccgctgtaccgcagcctgacactctcctcggcggtgcacccgtcaggcgacgcgcggtccccgccgtcgcgcaagtccatgtcaatggaggaggtgctgctgttcgacgtggacaaccagccgtcgttcgctccgaaacggcaggtgcggggcggcgggttcctggaggacagctcggcggcactgacgcccccggcggggacgctgggcgcggcggcgctgtcgccgcgctacgccgggctggtgatctcgatcgagcggatggcgcggtcgccgctgctggtgggccccgaggagcgggacgagctgtacgggatgctgacggcgagcgtgcgcgcgcagctccgggcgcggctgcgcggcgcggtgcccgcggcggacccggggctcgcagggcagtggtgcgcggcgctggctgggatcctggagtggctggcgccgatggcgcacgcgacggtgcggtggcaggcggagcgcagcctggagcagcggggcgggagcggcaacggcagcgtgctgctgctgcagacactgcagttcgcggagcgcgacaaggtggacgcggcggtggtggagctcctggtggggctcaactacgtgtggcggttcgagaaggagatgagctgccgtgctatgctcgcctcgcccgcccgcccgcccgtccgatgacgatgcatccatggattatggatggtggtggtgatacgaatgatgcaagcacatctgcatctgcatctgtttgttgctcattctggatggatctgttgatgacgaataaataataagctaaggcaggtacacatggttagttgactc

SEQ ID NO: 125391 - DNA, 3764 bp, Zea Mays
tcatgtgagtttgaccatttcatttgtctccctgcactgggcacgcgtggggggatattggtggcttggaaggggggcacttgtaaggttcttcagaccagagtagactctttttcagtatatgttcaagttgatcatatttctggtactccttggtggtttactggggtgtatggccctcaaccagatgatcagaagttgcagttcttaaatgagttgcgcacaattcgctcggcatgttttggaccttggattattggtggggactttaatcttatatatcgagccgaagacaagaacaatagtaaccttgatagggctgtgatgggtagattccgtcgtattcttaatgagttaaatctgtcggaactgccattgatggggcgcaaatttacttggtccaatgaacgagcaagtcccacgcttgttcgtttagactgagtctttcacacttcaggctggggggattatttctcggactgtgttttgcaaagttcagcaacattcatttcagaccactgtcctcttctgttggggctgcatgagtattcccagggcaggagacggtttcactttgaaagctattggccaaaattggaaggttttatggagaaggtagaagaatcttgggtacagccagtgggttccttttgtccactgcaacattttgcagtgaagttaaaaagtctttcgaaacacttgcagtcctggagtcagcggagtgttggcaatgttaagaatcagctcttagcagctaaggaaatcatgcaccagctagaaattgcaggggattctagggctctgttgcctctggaggagtggcttcggcgacggctaaagctccactctttagctttatcctccatggagcgcactatggccagaacaagaggtggccttcgctggttgaaagaaggcgaagctaatacatctttttttcaccaacaggcacgatataggaagaagaaaaatttcattgccacactgaaagtagcagacagaatcttggtagagcaggaggaaaaacaagaagttgtgtgggatttttataataatctcttggggactgctgtgcaaaggaactgctctctcaacctggctgcttttcatattccaacccgaaaccttgagcagttggaaagggatgtcactgaggcagaggtatgggccactattaattctatcccttcagacaaggctccagggcctgatggatacactgggcgcttctataagcatgcatggccaattattaaaggggatttcatggcagctatggggaggattctgttgggtgatgtttcaaatttgcaccttcttaactcagctttggtgactttacttcctaagaaatctgatgctgcagagataaaagattttaggcctatcagccttattcatagttttgctaaaattgttaccaagttaatggcaaaccggcttgctcccacgcttcctgagctgatatcccctaaccagagtgcttttgtaaaagggagaagcatacaagacaactttattatggtgcaacaaacagccagagcaatccacaaacaaaaaattcccaaagtgcttctcaaactggatattggcaaggcatttgattctgtttcttggccatttctgctggaagttcttgggcatcttggtttcggtccagtatggtgcaatcttatctccaagttattgtgctcatcctcgactagggtgatggtgaatggagaacctggaaagctcatttgccaccaaagaggattaaggcaaggggatcctttatctcctatgatgttcatcttagttatggatgttttgaattcacttttctcgcgggctagcgatatgggcctgctgcagcctctcttgagaaacagaaatgggcaaagagtctccctgtatgcagatgatgtagtgatgttcatgcagccaagagaggaggaagtgcttatggtgaaagaaatccttagaatttttggagaagcttcgggattggtcacgaacttgagcaagtgcagtatgactcctattcagtgtgacgatccagagcttgtggagattaggagcatttttccttgcaaggttttgccttttccctgtaagtatttgggcttgcctatgtcaattaggaaactcccgagatcctccttcaatgagctcattgataaaattgctgacaagcttccgggatggaaggctgctattattagcccggctgggagagctactttgattaagtcggttctcactgcaatccctatttatcatttgattgcccttaactgccccaaatgggtaattagagctattgacaagattcgcagggggtttttatggaaaggaaggacagatgttagaggaggccattgtgttgttggttggtccaaggtttgcaggcctatcagtagggggggcctcggaatccacaatttggaggtgctaggctggtctctgaatatgcgttggatgtggcttaaaaagacctagcctgaacggccatggtcagattttgacgttcaggtgcatccaaatgcagcagcatttttctcagtctctgtttgctctattgtgggtgatggcctgaatacgttgttttggactgataaatggttacatgggaaatctgtgggtgagcttgctccagctctcctgagtcgcatccccatgaaaattcagaagagcaaaacggtgtacgaggctttgctgaataatagatgggtgtcagaccttactggcagtttgccggctgatgtgcttatgggtttcttttgtatatgggacgtcactcggggtattcatttgcaacctggaatttcagatcagcatagatggctgtcaacggccaatgggcagtattcatctaagtcagcttatgatcatttcttcgctggttccgtttattttgaaccgtccgagcgaatttggaggacatgggcacctcagaaatgcaaattctttatttggctagcatcccttaacaaatgttggaccgcagataggctggctcgtaggggattggaccatcctgacaaatgtcttctttgtgatcagcaagaggaaacagcacaacacattctggtggcttgcgtttttgctagagacatttgggcccagattttgaacaaggtgggactgctgcctttggctccagaaataacagatgtggttttccaagattggtggaggaaggctgagcagaaagtgccaaacagtaaaagaaaggggtttaattccctagttatattggtgtcttggcggttgtggaaacaaaggaatgcttgcgtgtttgatggggtatccccgagtatccgcagcatgttgcaagagattcatgaggatgttaagctttggggaatggcaggagcaaaagatattaggcaattgtggccttaatttagatggggtggtgggggttgcccccccccttgtttcttgtttcttttattttggttctttcttttttctttttgtcccccttttctcgtttgctgccttctcgggcactttgttttcctagtccacttgggacctttttttcctcttaatataataacgtgcagttctcctgcgtgttcgagaaaagctgtatccaaaactgcgccagtttccacacacaaccattgcaatgttgatctgcttgttacagccagaattttaccatcaggagagacgttcatgtggtcatattggcaaacagaaccttttgagtcatgaaatggaattggcataactctcaaggtctttggatcctcatcaaggtggtaccttac

SEQ ID NO: 125392 - DNA, 809 bp, Zea Mays
ctctctctcaccggatcggattctcacaccacaatgcaacaacctagctgggactgggactgggactccgagctgctcctgctggtcagtggcgagaagaaagcggcgtagccagttattagcatgtcgtcgtggctgcactactccgacggccagcggcggtcctggaagagcagctgggcggcgcgcgccctgtcgtcgtgctcgctgccgccgcccggcctgctggccttcttcgccatcgtcgttttcttcctcgccgtctccgggtacgtggactacaagaccatcgagcgccgcgccgagatcggcgcccgcgtctttgccgcgccgctcgccctggccaccgtcttcctcctcttcgtcgcgctcagctggcgccgtaggtactgggccaccaggaggaggaaggcggcgcaccactacccatggtcgtcgtcgtcgtcgtcgcagcacgaggcggacgcggtggcgccgtggggcgtgttggcggcggtggccatactgctgctcatgatgacgttccagcagtccgtccactccatgtggttcaggccgctctgggactccgactactacgacccctaaaagcaggttgatcgagctgagtagtacttactcgctagctacgaatccaatcctcctctttttttttcttcttcttctaaaataaaaatgagatatatttgtgtatgctttgttatataataattattatattattattaagtacaatatatctattagtatacttttgtattgtgtatgttgttaatattgatatagctacgtcgtgtaatgacttggtt

SEQ ID NO: 125393 - DNA, 3625 bp, Zea Mays
tgcagctacgtgagacatgccatactgataccacacattggcgtattttggcagcaactccccgcgcgcagctttcttaaaccccgaaaaccaaaaataaaaatccccctttcttctcccccgactcccctcttccttctttctcgtccgatcagagtcacttccacctagccgccgccgccgccgccgctaccagagtcaccgcggccgctgcttctagggctgcgccttctcgcgcctccggagccttccctgctccccgcgatccccgctgccccccatccccacccccacaagcttccttgacctgctcactccaaacgctgccgccatggcggagaagctcagggatctgagtcagccgatagacgtgacgctgctcgatgccacagtcgccgccttttacggcactggatctaaagaggagaggagcgccgctgatcagatactacgtgatctacaaaataatccagacatgtggctacaagttgtacatattctgcagaattcccagaatctcaacaccaagttctttgcactacaagtacttgaaagtgttatcaagtacaggtggaatgcattgcctgttgaacaacgtgatggcataaagaattacatatccgatgttattgtgcagctttctagcaatgaagttacctttcggcaggagaggctttacgtcaataaactcaatattattttggtgcaggtcctgaaacatgagtggcctgccagatggtcatccttcgtacctgatcttgttgcagctgcaaagagtagtgaaactatatgtgaaaattgcatggctatattgaagcttctaagtgaagaaatttttgacttctcaagaggtgaaatgacacaacaaaagatcaaagaactgaagtcttcacttaatagtgaattccggctcattcatgagctatgcttgtatgtcttatctgcaacgcaaaggccacagctcatccgtgctacattggcgacactccatgctttcttatcatggatcccaattggattcatttttgagtcaccgttgctggagacattactgaagttcttccctatggctgcttatcagaatcttacacttcaatgcctaacagaggttgcagcacttcagtttggtgatttttataacgtgcagtatgtgaagatgtatacatttttcatgattcagttgcaggctattcttcctcctgaaaaaatcccagatgcatatgctaatggttccactgaagagcaggcatttatacaaaatctcgcactcttcttcacatccttttttaagaatcacatgcgtatactggaaacaactcaagaaaacagtgctgctttgcttatgggtctcgagtaccttattggaatttcatatgttgatgatacagaggtttttaaggtctgcttggattactggaatgtatttgtcttagagctatttgaagcacacaatgaaatggaacctgcagcagccgtaagcatgatggggcttcagacgcgaatggttcctggaatggtagatgggactgtcactgctgttcatcagaggagacaactttactccgcttcactctcaaaactgcggatgctgatgatttgtcgaatggcaaagcctgaggaagtacttattgttgaagacgaaaatggcaatattgtacgtgagacaatgaaagacaacgatgttcttgttcagtacaagatcatgagggaaacactgatctatttatctcatcttgatcacgaggatacagagcaacagatgttgaagaaactaagcaagcaattaaatggagaagactggagttggaataaccttaatactctctgttgggctattggatcaatatcagggtctatggtagaggagcaggagaatagatttctggttatggttattcgtgatttgctaaacctatgtgaaatcacaaagggaaaggacaataaagctgtgattgcaagtaacatcatgtatgttgttggtcagtatccaagatttctcagggcccattggaagtttttgaaaactgtggtcaacaaattgtttgagttcatgcatgagatgcatcctggagttcaggatatggcatgtgataccttcctgaaaattgttcaaaaatgcaagcgcaagtttgtgacacaacaggtgggcgagaatgaaccatttgtttctgagcttctgtccaaccttgctacaacaatcgcggatcttgagccacatcagatccatacattttacgaatcagttggccatatgattcaagctgaatctgacaacactaagagagatgaatatctcaagagattgatgagccttcctaatcagaagtgggcagaaataattggacaggcaagccaaagcattgatatcttgaagaaccaagatgttatcagatcagttctcaacatcctacagacaaacacaagtgttgcgagctcccttggaccacacttcttcccacagatttctctaattttcttggacatgctaacagtctacagaatgtacagtgagcttgtatcaagcacgatcgctgaaggaggaccatttgcctcaaggacatcatttgtaaaactattgagatctgtcaagagggaaaccctaaagttgatcgagacttttgtggacaaggcagaagatttaccgcacttaggaaagcagtttgttccaccaatgatggatcctgtccttggtgattatgctagaaatgtacccgatgcaagggagtctgaagttctgtctttgtttgcaacaatcattaacaagtacaaaggggaaatgcttgaggatgtgcctcgtatatttgaggctgttttccagtgcactcttgagatgattactaagaactttgaagattatcctgagcaccgcctcaaatttttttctttgctccgtgcaattggcacccattgcttccaagcattaatccagctttcaagccagcaattgaagcttgtgatcgattcgattaattgggcgttcagacataccgagagaaatatcgcagagactggccttagtctattgttggaaattttgaagaactttgaggcttcaggattccaaaatcaattctacaaaacctactttttgacaattgagcaagagatttttgcagttctcacagacacattccacaaacctggtttcaagcttcatgttttggtgctccaacacttattttatgtggttgatagtctaactgagcctctatgggattcttcatcagtaccatatcaatatacggataatgccacgtttgttcgagattacaccataaaactcttaggaacatcatttcctaacatgactgtagctgaggtgaccaagtttgtggatggccttcttagttcaaaacttgatcttccgagcttcaaaaaccatattagagatttcctggtgcagtcgaaggagttctcagctcaggataacaaggatctatacgcggaagaggctgctgcccaaagagaaagggagcgccaacgaatgcttgccattccggggctgattgcccctagcgaattgcaagacgagatgactgggaatggactagtcagttttgccgcaggggaggttcctggaaccgctgttgggtcttcagcagctgtgcttgcctggatgtgttaa

SEQ ID NO: 125394 - DNA, 4062 bp, Zea Mays
tgcagctacgtgagacatgccatactgataccacacattggcgtattttggcagcaactccccgcgcgcagctttcttaaaccccgaaaaccaaaaataaaaatccccctttcttctcccccgactcccctcttccttctttctcgtccgatcagagtcacttccacctagccgccgccgccgccgccgctaccagagtcaccgcggccgctgcttctagggctgcgccttctcgcgcctccggagccttccctgctccccgcgatccccgctgccccccatccccacccccacaagcttccttgacctgctcactccaaacgctgccgccatggcggagaagctcagggatctgagtcagccgatagacgtgacgctgctcgatgccacagtcgccgccttttacggcactggatctaaagaggagaggagcgccgctgatcagatactacgtgatctacaaaataatccagacatgtggctacaagttgtacatattctgcagaattcccagaatctcaacaccaagttctttgcactacaagtacttgaaagtgttatcaagtacaggtggaatgcattgcctgttgaacaacgtgatggcataaagaattacatatccgatgttattgtgcagctttctagcaatgaagttacctttcggcaggagaggctttacgtcaataaactcaatattattttggtgcaggtcctgaaacatgagtggcctgccagatggtcatccttcgtacctgatcttgttgcagctgcaaagagtagtgaaactatatgtgaaaattgcatggctatattgaagcttctaagtgaagaaatttttgacttctcaagaggtgaaatgacacaacaaaagatcaaagaactgaagtcttcacttaatagtgaattccggctcattcatgagctatgcttgtatgtcttatctgcaacgcaaaggccacagctcatccgtgctacattggcgacactccatgctttcttatcatggatcccaattggattcatttttgagtcaccgttgctggagacattactgaagttcttccctatggctgcttatcagaatcttacacttcaatgcctaacagaggttgcagcacttcagtttggtgatttttataacgtgcagtatgtgaagatgtatacatttttcatgattcagttgcaggctattcttcctcctgaaaaaatcccagatgcatatgctaatggttccactgaagagcaggcatttatacaaaatctcgcactcttcttcacatccttttttaagaatcacatgcgtatactggaaacaactcaagaaaacagtgctgctttgcttatgggtctcgagtaccttattggaatttcatatgttgatgatacagaggtttttaaggtctgcttggattactggaatgtatttgtcttagagctatttgaagcacacaatgaaatggaacctgcagcagccacgcgaatggttcctggaatggtagatgggactgtcactgctgttcatcagaggagacaactttactccgcttcactctcaaaactgcggatgctgatgatttgtcgaatggcaaagcctgaggaagtacttattgttgaagacgaaaatggcaatattgtacgtgagacaatgaaagacaacgatgttcttgttcagtacaagatcatgagggaaacactgatctatttatctcatcttgatcacgaggatacagagcaacagatgttgaagaaactaagcaagcaattaaatggagaagactggagttggaataaccttaatactctctgttgggctattggatcaatatcagggtctatggtagaggagcaggagaatagatttctggttatggttattcgtgatttgctaaacctatgtgaaatcacaaagggaaaggacaataaagctgtgattgcaagtaacatcatgtatgttgttggtcagtatccaagatttctcagggcccattggaagtttttgaaaactgtggtcaacaaattgtttgagttcatgcatgagatgcatcctggagttcaggatatggcatgtgataccttcctgaaaattgttcaaaaatgcaagcgcaagtttgtgacacaacaggtgggcgagaatgaaccatttgtttctgagcttctgtccaaccttgctacaacaatcgcggatcttgagccacatcagatccatacattttacgaatcagttggccatatgattcaagctgaatctgacaacactaagagagatgaatatctcaagagattgatgagccttcctaatcagaagtgggcagaaataattggacaggcaagccaaagcattgatatcttgaagaaccaagatgttatcagatcagttctcaacatcctacagacaaacacaagtgttgcgagctcccttggaccacacttcttcccacagatttctctaattttcttggacatgctaacagtctacagaatgtacagtgagcttgtatcaagcacgatcgctgaaggaggaccatttgcctcaaggacatcatttgtaaaactattgagatctgtcaagagggaaaccctaaagttgatcgagacttttgtggacaaggcagaagatttaccgcacttaggaaagcagtttgttccaccaatgatggatcctgtccttggtgattatgctagaaatgtacccgatgcaagggagtctgaagttctgtctttgtttgcaacaatcattaacaagtacaaaggggaaatgcttgaggatgtgcctcgtatatttgaggctgttttccagtgcactcttgagatgattactaagaactttgaagattatcctgagcaccgcctcaaatttttttctttgctccgtgcaattggcacccattgcttccaagcattaatccagctttcaagccagcaattgaagcttgtgatcgattcgattaattgggcgttcagacataccgagagaaatatcgcagagactggccttagtctattgttggaaattttgaagaactttgaggcttcaggattccaaaatcaattctacaaaacctactttttgacaattgagcaagagatttttgcagttctcacagacacattccacaaacctggtttcaagcttcatgttttggtgctccaacacttattttatgtggttgatagtctaactgagcctctatgggattcttcatcagtaccatatcaatatacggataatgccacgtttgttcgagattacaccataaaactcttaggaacatcatttcctaacatgactgtagctgaggtgaccaagtttgtggatggccttcttagttcaaaacttgatcttccgagcttcaaaaaccatattagagatttcctggtgcagtcgaaggagttctcagctcaggataacaaggatctatacgcggaagaggctgctgcccaaagagaaagggagcgccaacgaatgcttgccattccggggctgattgcccctagcgaattgcaagacgagatggtagattcgtagtgttccttgttttgattctgctttctctaatgtagcttcctgtttgttggtctggcctcgggagccctcgtctttcaagtgcgagttttcttccagggtggtgaaaggtggctgctgtaattttatttttggttacctccacatgatgctgattccaagatttgtggttgtagactgggaatggactagtcagttttgccgcaggggaggttcctggaaccgctgttgggtcttcagcagctgtgcttgcctggatgtgttaacagcggctcttaacattggtgcgtgtgctttgcccatggtatatcatcgtggtacagcattgtatgcttcttcagttgaagctcatagatggatccaggctgataggaaccttgatatatctgtactgtactattctcagatatctcatatatatatttttctttgcattggtgcatttctcaatgtgtagatttgctgtctcatcgacaagctgtgtatcgagaaactgttcggtatttctgccagctgtggaggcacattcgaaaacggaa

SEQ ID NO: 125395 - DNA, 876 bp, Zea Mays
cgtacaaattctcagtatactcaaagtattggacgcccagcccagcccaccagaagaggacaaaccagattcgattcctcctcctgtcctccatctccccaattcgcacggccatcggaccatggattccggcgtgcctgcctctgcgcctgcccctcccaaacacaagacatgccggaagtgcaaggcgagctatgacccctcggccaacacgcgcctctcctgcaggttccacccttccttcttcgtctgccgccgccacgacgaccagaagaggtgcctagtccccacccaccctatcatctcatccgtcgtctgggtagtaagtacgatctgatccatctaggtactacgagctccgcgacggcgatcctccctacgccgccaagttctacgactgctgcggcgccgaggaccccgacgctccgggctgcaccactgacttgcaccgttcctacgacgacgcccaagactagcaaacctttgctgcttccacaggcctcatcttaatctcaagtctcatctaccgtttcgcttttgcatcccctccttatcctctctagtcagctatcaaattaaaccatctatgtacacttaaataaattttgcttcagatatgttacctactggagctttttttttcctttttttttgcaattgatcaaacatatctctcttcatctatacaccgtctgtttggttggcttgcctctcaggatgctttaagtatcatacgagtctgactccacatctgcacgtaggtaaccaaacacacacctcgcacacgtaaagcctggaaccaaacacatgaatactaaactggaacataaggcgccccctatctgaactcccaaaaaaagccagcaattcataaaa

SEQ ID NO: 125396 - DNA, 844 bp, Zea Mays
cgtacaaattctcagtatactcaaagtattggacgcccagcccagcccaccagaagaggacaaaccagattcgattcctcctcctgtcctccatctccccaattcgcacggccatcggaccatggattccggcgtgcctgcctctgcgcctgcccctcccaaacacaagacatgccggaagtgcaaggcgagctatgacccctcggccaacacgcgcctctcctgcaggttccacccttccttcttcgtctgccgccgccacgacgaccagaagaggtactacgagctccgcgacggcgatcctccctacgccgccaagttctacgactgctgcggcgccgaggaccccgacgctccgggctgcaccactgacttgcaccgttcctacgacgacgcccaagactagcaaacctttgctgcttccacaggcctcatcttaatctcaagtctcatctaccgtttcgcttttgcatcccctccttatcctctctagtcagctatcaaattaaaccatctatgtacacttaaataaattttgcttcagatatgttacctactggagctttttttttcctttttttttgcaattgatcaaacatatctctcttcatctatacaccgtctgtttggttggcttgcctctcaggatgctttaagtatcatacgagtctgactccacatctgcacgtaggtaaccaaacacacacctcgcacacgtaaagcctggaaccaaacacatgaatactaaactggaacataaggcgccccctatctgaactcccaaaaaaagccagcaattcataaaagtttatgtcatacaaactttgattcagtaattctgatt

SEQ ID NO: 125397 - DNA, 1388 bp, Zea Mays
ccaccagaagaggacaaaccagattcgattcctcctcctgtcctccatctccccaattcgcacggccatcggaccatggattccggcgtgcctgcctctgcgcctgcccctcccaaacacaagacatgccggaagtgcaaggcgagctatgacccctcggccaacacgcgcctctcctgcaggttccacccttccttcttcgtctgccgccgccacgacgaccagaagaggtactacgagctccgcgacggcgatcctccctacgccgccaagttctacgactgctgcggcgccgaggaccccgacgctccgggctgcaccactgacttgcaccgttcctacgacgacgcccaagactagcaaacctttgctgcttccacaggcctcatcttaatctcaaggacttcaagggaaggtggtgcatcacttttaacagcaagggcacgtgggtatagatctgatcggcgcgatttttttctttctttctttccggacagcggcaccgcaccgggagggcgtcctcgccgacgtgccgccgtccaacaagctggtcttcatcctggcggggcagtccaacatggccggccgcggcggggtggtggcgaaccgctgggacggcgtggtgccgggcgactgcgcgccgtcccccgcggtgctgcgtctctcgcccgacctgcgctgggaggaggcgcgggagccgctgcacgccggcatcgacgccgccaaccacgccgtcggggtgggccccgggatggcgttcgccaacgcgctgctgcgctcgggccgcgcggggggcgccgtggtagggctcgtcccctgcgccgtgggaggcacgcggatggcagagtggggcaggggcaccgagctctacgccgagatgctgcgccgggccagggtcgccgtcgagacggggggccgcatcggtgcgctgttgtggtaccagggggagagtgacaccgtccgctggtccgacgccaccgagtacggccgccggatggggatgctcgtccgtgatctccgcgccgatcttggcatcccgcacctcctcgtcatccaggtcgggttagcatcgggcctaggacagtatactcaagtcgtgagagacgctcagaaagggatcaaacttcgcaacgtcagattcgttgatgcgatggggttgccattgcaagacggccatctgcatctaagcacccaagctcaagtccagcttgggcgtatgttggctcagtcctatctaaattatggtacatcccaactctagctagtacttgtgagatagaaattcctgccctgtttggacgattcattgagaacccattcttataattattgttgtatggaatcaacttgttactgctcgatgcaatatcttcatcacaactcagatc

SEQ ID NO: 125398 - DNA, 740 bp, Zea Mays
ctcaaaatctctgtctgtcggcccgccagaccccagacctagaccctccaaaaacaactcaacaacaatgctgctcctcctcctcctgctcgtcgcctcctcctccctgtcccaggagggcgtcctcgccgacgtgccgccgtccaacaagctggtcttcatcctggcggggcagtccaacatggccggccgcggcggggtggtggcgaaccgctgggacggcgtggtgccgggcgactgcgcgccgtcccccgcggtgctgcgtctctcgcccgacctgcgctgggaggaggcgcgggagccgctgcacgccggcatcgacgccgccaaccacgccgtcggggtgggccccgggatggcgttcgccaacgcgctgctgcgctcgggccgcgcggggggcgccgtggtagggctcgtcccctgcgccgtgggaggcacgcggatggcagagtggggcaggggcaccgagctctacgccgagatgctgcgccgggccagggtcgccgtcgagacggggggccgcatcggtgcgctgttgtggtaccagggggagagtgacaccgtccgctggtccgacgccaccgagtacggccgccggatggggatgctcgtccgtgatctccgcgccgatcttggcatcccgcacctcctcgtcatccaggttggtgtgtgtgtgtgtgtgtggtaggagtagttagttctttcccgttctcacaagcaatcaagcaagcaagcaacct

SEQ ID NO: 125399 - DNA, 1184 bp, Zea Mays
ctcaaaatctctgtctgtcggcccgccagaccccagacctagaccctccaaaaacaactcaacaacaatgctgctcctcctcctcctgctcgtcgcctcctcctccctgtcccaggagggcgtcctcgccgacgtgccgccgtccaacaagctggtcttcatcctggcggggcagtccaacatggccggccgcggcggggtggtggcgaaccgctgggacggcgtggtgccgggcgactgcgcgccgtcccccgcggtgctgcgtctctcgcccgacctgcgctgggaggaggcgcgggagccgctgcacgccggcatcgacgccgccaaccacgccgtcggggtgggccccgggatggcgttcgccaacgcgctgctgcgctcgggccgcgcggggggcgccgtggtagggctcgtcccctgcgccgtgggaggcacgcggatggcagagtggggcaggggcaccgagctctacgccgagatgctgcgccgggccagggtcgccgtcgagacggggggccgcatcggtgcgctgttgtggtaccagggggagagtgacaccgtccgctggtccgacgccaccgagtacggccgccggatggggatgctcgtccgtgatctccgcgccgatcttggcatcccgcacctcctcgtcatccaggtcgggttagcatcgggcctaggacagtatactcaagtcgtgagagacgctcagaaagggatcaaacttcgcaacgtcagattcgttgatgcgatggggttgccattgcaagacggccatctgcatctaagcacccaagctcaagtccagcttgggcgtatgttggctcagtcctatctaaattatggtacatcccaactctagctagtacttgtgagatagaaattcctgccctgtttggacgattcattgagaacccattcttataattattgttgtatggaatcaacttgttactgctcgatgcaatatcttcatcacaactcagatccatcactgtcttggactttttttctttctctgtcttcctttattggttctttgataatgagcagaggcgacgtctgttaagccttttattctatgtccaatcatatttatttgcccttttttctttttgtggggtgataggacatgcacactctccaacccctaaaccatggtggctgcaaatcgttttggt

SEQ ID NO: 125400 - DNA, 763 bp, Zea Mays
cctcccctcatcgccgtaataacaaagcgcccgcgccgcagccctcagctcccactcattcttctccctgcctctctttctcactcatcgctcgtggagttgcagccatggctgctccggtcgccgcatactccccggcgctgcgggtccaagtgaaagcagccatggatgcagcgtcgtcgttccgagtattggcatctctcagtttccccgggcaaagagcaagctttccatcgattcggatgcagaagcgctctcaagtgtcctgttcgctggcaaaacaagaaacagttgagaaggtcagcgagatcgtgaagaatcagttagctctacccgaagacaccggagtaacaggagagacaaagtttgtagacattggagccgactcactggacacggtaacagtactctgtttgtttgtctgatgatctcaaacaaacaaacaaacaaagaatctggtgtgttgttactaggttgaaatcgtgatggggcttgaggaagcgttccaaatcagcgtggacgaatcgagcgctcaagagatccagacggtggaggacgctgctgctctcatcgacaagcttatcgcggagaaggacgcttgaaacgctgtccggaggagggatgacgatgggtggttttgatttgagaccatagtgctccttattgcaattattagtcagaaaaaaaattacccagtttcttttctttcttcttcttcttctatcataatatgaaatatgtatgcatatgcatgccttttggt

SEQ ID NO: 125401 - DNA, 2141 bp, Zea Mays
cctcccctcatcgccgtaataacaaagcgcccgcgccgcagccctcagctcccactcattcttctccctgcctctctttctcactcatcgctcgtggagttgcagccatggctgctccggtcgccgcatactccccggcgctgcgggtccaagtgaaagcagccatggatgcagcgtcgtcgttccgagtattggcatctctcagtttccccgggcaaagagcaagctttccatcgattcggatgcagaagcgctctcaagtgtcctgttcgctggcaaaacaagaaacagttgagaaggtcagcgagatcgtgaagaatcagttagctctacccgaagacaccggagtaacaggagagacaaagtttgtagacattggagccgactcactggacacggttgaaatcgtgatggggcttgaggaagcgttccaaatcagcgtggacgaatcgagcgctcaagagatccagacggtggaggacgctgctgctctcatcgacaagcttatcgcggagaaggacgcttgaaacgctgtccggaggagggatgacgatgggtggttttgatttgagaccatagtgctccttattgcaattattagtcagaaaaaaaattacccagtttcttttctttcttcttcttcttctatcataatatgaaatatgtatgcatatgcatgccttttggtggtttgggattattataataaataaaactgccgccgagagatgagagacggtacccaattctcttcgattcggaacatgttcatggtttacttcaagtttgaccaagagcaatccgcccgctgctcttattgtaaatgtaaagacgattcaaaacgacacacacaaatcagaacttttgttcttatataatgatgattcactcattcattcagtgaccggattgatcttcatggcgtccattatgttctttccttggagcttactagacagcaccaggcggacgtagtcctcgacgccaatgctcctgtacctcgctggctcatcaccatcgacaatcgtctcctcaagcggcgcgtaagtgtcgccgaacctggcggagtggaaggctgcgacggacacccggtggtgggtggggctaaccagcgcccggtgctcgatgctcttgtacctgccgttggtgagcacctcgacgacgtcgccgacgttggccaccagcgctccggggatggggtcgacgctgatccacgcgccgcgcctcctgatctgcagccccgggacggcgctgacctggagcagcagcgtgaggccggcggcgtccgagtgcggcgacaggcccagcaccctgcccctgccgtgcgggcacgccgggtagtagttgacgcgcacggcctgcgcgtcggcgaccctggccagcctcgcggcgtccgccacgcccaggttcgcggccatggacgccagcaggcgggcggccacgcgctgcacctcggcagagtagcgcgccagcgagtccccgaacgtggccgggcgcgccggccagaagcgcggggcccggtactcgggcggctgcgtggacaggaaaagcatgtcggcccagtccagcttctggtcctcggagaccacgaaggcctgcccgtacccctcgatcccgccgggctcctgcgccaccgcgcgcttgtcggcgagcgggaggcggaagaaggcctgcaggtctgccttcacgtccgcgaccaccgcgtcgggcaccccgtggttgatcacctggaagaagccccactcctcgcaggccgccttcagtttggcggactcctcgtctccgtgcgacgacgggtccaggagcctcgcgaggtcaactaccggcaccgaggaggccgcgtcgccgttggcgtctgcgccgtcgacgtcgtcgcggaggtagcggcttagcacgggcggcgtgagttcgtcgccggggcgcgcggccaggtcctgcacgttgggcaccggcagcgagccgcccaggttgcgcggcttggcgtccatatgggagttggtggtgttggaactggaactggagatggtcgtccatccgtgaccgtgagtgagtgacttttcttccgtcgcagccgcagccggccgccggtctgcatcaacaacagctgctactttggttggtggccggccaggcctccattt

SEQ ID NO: 125402 - DNA, 2494 bp, Zea Mays
cccctatcctctctcctcgcccaccggaaacgcaacgcaacgcaacgcaaccagagggggaggggggggggggggaaagccggagccgactgcccgcaccacccacaggaacgccgcggggcaggggggcaggaggaagacgccggcggcggcggcttaaaagggcagggcgccattacctgcttccctgtcttccccttcccctcatgtactatagtactgcgctgcgccctttcatttacccggagtagtaaacgagaagaggaataattgtgtcgcaaactaatccgtttcgccgctgcctgctgcttgagccaatcttccgcgggtcggggccgatgacctgccaactggtctgtttcacttgccattttggataggatcgctcgttttggaattaactttatgctaacagaatctaggtgtcattaagctagattaagcttgctgcttgacttagtagtgtaaatctgtaaagaaaattacctggtttgggtttagtctctataaaagaaatggaacagaggaatgttctggcattgggtgaacatgttctaaaagctactgtttggaagcggaagcataagactgctatggagcaccctgaaggcaatgatgtgatggtgttctctcagcatgatcaaagaaagcaccctgtgatatttgacgacagagctaaatgtaagaagtctaaattaatttcctgtgggagtggagttatattggagtcatattggaactttaagacaagtgggctgcctgtgcgcgtgcttttctaccaacatggtgactggagtgattttccagaggatgttgtaaatctagcacaacaggacttccagttgaagaagccaattacaactgctgtgttccagaacaagcacatcctgttggacttcattcacatgatttgcatagattatgagatgaccatagacaaaccactagcatgggttgatgataatggcaaacgcttctttccagatttatctgctgggctctacacatctaaaccatctcagcatgagaatggtgaagctgatgagtgtgatggaacgcctacaagtgtagctgaaagttctagttcggtatctgttggtgaagtagtttctcatggtaagaggatcaatgatattgcagaggacaacatgagagcacataacatattgtatgaagctgttggtgaaaatatttcaggtccttcattccatttgaatgaatattctagtggaaccatacaagctactggcaagccaaacgattgtcgacgtattgattcagctgtgcggaatttgttgctcaaaggattaggtcagccgtttagtgaggaagatattattggtatctatagaacaccactgctagatcagcgagggcaagttcgttgtggtctcttccagaaggagatcgaagagaccaggagtcgtcgggggaatgcaaatgtacgttatgcttggcttccttgctcaagatataccatggagcagatggcaatgcggggtgctctggaaatcgcgaagcctcataaggggtccatttgtggtgttgggacttgtcttgctcctgcaaactgtacaaattcatgtgccagatattctgattttcatgaagatggcatcatcagaatgatgttgtgccgtgtaataatgggtaatgttgaggttgttttgcctggatcaaagcaatttcagccatccaatggaagttttgataatggtgtggatgatcttcaaaatccacagaattacatcgtatgggatgctaatgtgcataaacacatatatgctgaatatgctgttattgtccaagcacctctcgtgaccaatgaatgttcgggcttgaaggatagcgtgcccaacatatctgagatcataagttctggttctcgagacaatctaaccaaggaggataggttcgcgccttgtggtgtcgaacaagaagcacctaggctggggcgtgctccaagggccccctcctcaccatggatgcccttttcgatgctttttgctgctatttccacgaaagtgcctcgttcggacatggagttggtcatcagatactatgaagaattcaagaggaagaggatgagccggagcgacctggtggtacggatgaggcaaatagtcggtgataagatattggtttctacaataatgaggcttcaccaccagaagaagcccccatcgatggcagcagcagcagctgggctagcaagagcactcgcaaggggggaagagggagggggagtagccgagtaagattagtttaagccgccttgtcttttgagaaatttatggagcacatatgctttgtcgacatggccagacccaaggtgtcaaaagggagggagatgagctgagcaactgttgtagtgtagtctcaaactcaaagcgtttaggtcttgacatttgacaaactaaaactcagaaacattatcatgagtagtgtttttttttcgtttctctttcctggatttaactattgttattgctat

SEQ ID NO: 125403 - DNA, 2760 bp, Zea Mays
cccctatcctctctcctcgcccaccggaaacgcaacgcaacgcaacgcaaccagagggggaggggggggggggggaaagccggagccgactgcccgcaccacccacaggaacgccgcggggcaggggggcaggaggaagacgccggcggcggcggcttaaaagggcagggcgccattacctgcttccctgtcttccccttcccctcatgtactatagtactgcgctgcgccctttcatttacccggagtagtaaacgagaagaggaataattgtgtcgcaaactaatccgtttcgccgctgcctgctgcttgagccaatcttccgcgggtcggggccgatgacctgccaactggcaatggccacagagaagagccaaagacatgatgggtattttttacaacacggacgtgctggtaatgtctgtggcggaggcagggttggcttctgtctgttatggtgttctgctgcctccccgtgtggctgtggcagccatcagctctaccaggagcagctgtatccagagatggtgtgaagcacacacaattctactctgcgcagggtctgtttcacttgccattttggataggatcgctcgttttggaattaactttatgctaacagaatctaggtgtcattaagctagattaagcttgctgcttgacttagtagtgtaaatctgtaaagaaaattacctggtttgggtttagtctctataaaagaaatggaacagaggaatgttctggcattgggtgaacatgttctaaaagctactgtttggaagcggaagcataagactgctatggagcaccctgaaggcaatgatgtgatggtgttctctcagcatgatcaaagaaagcaccctgtgatatttgacgacagagctaaatgtaagaagtctaaattaatttcctgtgggagtggagttatattggagtcatattggaactttaagacaagtgggctgcctgtgcgcgtgcttttctaccaacatggtgactggagtgattttccagaggatgttgtaaatctagcacaacaggacttccagttgaagaagccaattacaactgctgtgttccagaacaagcacatcctgttggacttcattcacatgatttgcatagattatgagatgaccatagacaaaccactagcatgggttgatgataatggcaaacgcttctttccagatttatctgctgggctctacacatctaaaccatctcagcatgagaatggtgaagctgatgagtgtgatggaacgcctacaagtgtagctgaaagttctagttcggtatctgttggtgaagtagtttctcatggtaagaggatcaatgatattgcagaggacaacatgagagcacataacatattgtatgaagctgttggtgaaaatatttcaggtccttcattccatttgaatgaatattctagtggaaccatacaagctactggcaagccaaacgattgtcgacgtattgattcagctgtgcggaatttgttgctcaaaggattaggtcagccgtttagtgaggaagatattattggtatctatagaacaccactgctagatcagcgagggcaagttcgttgtggtctcttccagaaggagatcgaagagaccaggagtcgtcgggggaatgcaaatgtacgttatgcttggcttccttgctcaagatataccatggagcagatggcaatgcggggtgctctggaaatcgcgaagcctcataaggggtccatttgtggtgttgggacttgtcttgctcctgcaaactgtacaaattcatgtgccagatattctgattttcatgaagatggcatcatcagaatgatgttgtgccgtgtaataatgggtaatgttgaggttgttttgcctggatcaaagcaatttcagccatccaatggaagttttgataatggtgtggatgatcttcaaaatccacagaattacatcgtatgggatgctaatgtgcataaacacatatatgctgaatatgctgttattgtccaagcacctctcgtgaccaatgaatgttcgggcttgaaggatagcgtgcccaacatatctgagatcataagttctggttctcgagacaatctaaccaaggaggataggttcgcgccttgtggtgtcgaacaagaagcacctaggctggggcgtgctccaagggccccctcctcaccatggatgcccttttcgatgctttttgctgctatttccacgaaagtgcctcgttcggacatggagttggtcatcagatactatgaagaattcaagaggaagaggatgagccggagcgacctggtggtacggatgaggcaaatagtcggtgataagatattggtttctacaataatgaggcttcaccaccagaagaagcccccatcgatggcagcagcagcagctgggctagcaagagcactcgcaaggggggaagagggagggggagtagccgagtaagattagtttaagccgccttgtcttttgagaaatttatggagcacatatgctttgtcgacatggccagacccaaggtgtcaaaagggagggagatgagctgagcaactgttgtagtgtagtctcaaactcaaagcgtttaggtcttgacatttgacaaactaaaactcagaaacattatcatgagtagtgtttttttttcgtttctctttcctggatttaactattgttattgctatttcgtggatatctgggcactgaaggccgtgctattgttggttaatgatggtatgattaa

SEQ ID NO: 125404 - DNA, 2862 bp, Zea Mays
ctgtatctatgatttgtgggtctgagtttaaaatagagaagttcacaactgagagtgacaaaatagcaaattttcctttaaaatgaccgcgcgttttttttaaaaaatgaccgcgcagtagctttggctgaaaaagaaaagaaaaataatcttccttcttccacgatagtcgatacggagcacccataacgttacttttattttgcagttcagcggttcagccccctcaagtcgaggtcgaggtactccgcctccgcaatgccgcccccttccgcctccgcctccccctccgcctcccgcttcgcgaagcactggatagctgacgtcctcgccggcgaagaatccgtcgacttctccctgctcaaggttctggtgggggcctcgtcgaagcccctcgcgggcgccccggaggccacgcgtgagcgggtcgcgctccggtccattcaggaggtgttgtccgtgatagccgctgggggtgatgccgcggccacggcgggggtgcttagtgttgatggcgcccggtcatgcgaggatgggctgtttcggcttatcagagaggttggaagtttcggagaattggagaaggatttgcttccacctttcagtcaagacatccaggaaaatatatgtaccaagaagtttacattaccaggaatttctttccagttgctagaaagagttgagccatggatagcatctatggccccacaaccccaaatggaacacaatggcactgaacaatgtgtcaatgatcagtcactgcgcagcagccacggatgtgtaaatatagagaagcctgtgttccatacagacaatgctggggttcagcaagagaccatggcagatgtagtcaatgaaagtgaaacaggaaatctccaaaaggatccacctgcaccaacttttatttttcaccaaccgtgtatgcctgaaagcaggtcttacgtccctccgcaagaagatactatagatgctgttggtctaggcgctaggtcctcagaaaggagtcctattgtggaggggaacatgtccgttggatctgtgcttgcttcagatggctgtgatgtacctttgcagggaagcattactgagccctttttccagcaggataaacatgaccatactgttatagttggaccaaaatcttgtaagcgaaaatctccaattccatcttactgtgctcatggagatggggcagatggtggtggctccagcaatcagtcatctaaggtttccattcgtgaaggacctagcactcatgccacagtaacttcaggttttgacagaatcagcgatgtcttaccaacagatgcacctgaatctgagcatttgcctgagtgcataactgcacaggatacaaccatttcacagcctgacagcaggaaagctcatttgagtgctctgcaacaggaaaggggtgagaaagtaacccaagatctggaagatatctctgcaaatattgggtcagtggaaaaggaccatattcatggggatctgactttgccatctgccagtgttttactttctataagctgcaatggtgctaatcaaggaagtaaatatgaaaccaaccttcaaccagggactgctacagaggatatgatggctttcgaagagcagaatgcagacaagtctcacttagaagtcagtggtatcaacaaggctaatcaagctctgcatgatgatggcggcgtcatgaaaaataatacagtacatggtgggttgattgtgcagactgctccagtgtctcaaaattgcaatgtaaccttacatgataaaacttcagagcaggaaaatgaaaagaacattcaaaaagataattgccatacttatgttccaggctcttctcaggataggggtggagaaagtgcaaagaaaacaacaaatgaactaaagtctggggacatttcttcaaaaatatgtgttcatttcaatgttcaagacatcaatgatactctggaggacttgtctcaacaaggtttgtgcataaaatgtggtgaaggtggtcagttgttggaatgcaatggctgttttttagccgcccatagcagctgttttggttcatcggcgacatttgaaggaaccaattttttctactgcccggtatgcttgtataagaaagccactgaagcatataaaaaggcaaagaaaacatattgtgaaactaggaagaaccttgttgctttccttggcacagcacaagccaccaatcaacctgacaaacaactaaatggagctcagccaggagctgccaacagagatgaagagcctcatgatgagcaacattctaaagggtgtggcgcatcaaaaggggcccatgaaaatgaagtatacaatcttgctcatcaggatgaagagcatcatcagcagaggaagaagcagaaaataaatgctataggtaagagttatcctaaggaggtactcactgagaaggttattttccagaactctgatcctgcatccattaataaacattcagtgctccagaataacaataaaacaccagttaaggatccagagaaaaagcagcaagcggtcaacgaagaagctcgcaaagaaggtggtaatgacaactcatctcatgaaacaggagcttcatctccgagaagatgtgatcctccttcgaatcaggacgttgaggctgaccaggacgatagccttacaacttctaatcaatctggtggttctgatgaaatagaagctacatcttctaatgactctgccaagcaatcatcacccccttggcgtggtatgggacacaacaaaaaaggattgcacgaaaaggagccagctgtatcaagtaaatctggaaaagtaaaaaaggttaatcgatacagctttgctagatttactaaacatgactga

SEQ ID NO: 125405 - DNA, 3024 bp, Zea Mays
caagacatccaggaaaatatatgtaccaagaagtttacattaccaggaatttctttccagttggtaagttaaaagaaaatctcaatattataagtagaacaatggcaaattgaatttgtaattttctcttcagctagaaagagttgagccatggatagcatctatggccccacaaccccaaatggaacacaatggcactgaacaatgtgtcaatgatcagtcactgcgcagcagccacggatgtgtaaatatagagaagcctgtgttccatacagacaatgctggggttcagcaagagaccatggcagatgtagtcaatgaaagtgaaacaggaaatctccaaaaggatccacctgcaccaacttttatttttcaccaaccgtgtatgcctgaaagcaggtcttacgtccctccgcaagaagatactatagatgctgttggtctaggcgctaggtcctcagaaaggagtcctattgtggaggggaacatgtccgttggatctgtgcttgcttcagatggctgtgatgtacctttgcagggaagcattactgagccctttttccagcaggataaacatgaccatactgttatagttggaccaaaatcttgtaagcgaaaatctccaattccatcttactgtgctcatggagatggggcagatggtggtggctccagcaatcagtcatctaaggtttccattcgtgaaggacctagcactcatgccacagtaacttcaggttttgacagaatcagcgatgtcttaccaacagatgcacctgaatctgagcatttgcctgagtgcataactgcacaggatacaaccatttcacagcctgacagcaggaaagctcatttgagtgctctgcaacaggaaaggggtgagaaagtaacccaagatctggaagatatctctgcaaatattgggtcagtggaaaaggaccatattcatggggatctgactttgccatctgccagtgttttactttctataagctgcaatggtgctaatcaaggaagtaaatatgaaaccaaccttcaaccagggactgctacagaggatatgatggctttcgaagagcagaatgcagacaagtctcacttagaagtcagtggtatcaacaaggctaatcaagctctgcatgatgatggcggcgtcatgaaaaataatacagtacatggtgggttgattgtgcagactgctccagtgtctcaaaattgcaatgtaaccttacatgataaaacttcagagcaggaaaatgaaaagaacattcaaaaagataattgccatacttatgttccaggctcttctcaggataggggtggagaaagtgcaaagaaaacaacaaatgaactaaagtctggggacatttcttcaaaaatatgtgttcatttcaatgttcaagacatcaatgatactctggaggacttgtctcaacaaggtttgtgcataaaatgtggtgaaggtggtcagttgttggaatgcaatggctgttttttagccgcccatagcagctgttttggttcatcggcgacatttgaaggaaccaattttttctactgcccggtatgcttgtataagaaagccactgaagcatataaaaaggcaaagaaaacatattgtgaaactaggaagaaccttgttgctttccttggcacagcacaagccaccaatcaacctgacaaacaactaaatggagctcagccaggagctgccaacagagatgaagagcctcatgatgagcaacattctaaagggtgtggcgcatcaaaaggggcccatgaaaatgaagtatacaatcttgctcatcaggatgaagagcatcatcagcagaggaagaagcagaaaataaatgctataggtaagagttatcctaaggaggtactcactgagaaggttattttccagaactctgatcctgcatccattaataaacattcagtgctccagaataacaataaaacaccagttaaggatccagagaaaaagcagcaagcggtcaacgaagaagctcgcaaagaaggtggtaatgacaactcatctcatgaaacaggagcttcatctccgagaagatgtgatcctccttcgaatcaggacgttgaggctgaccaggacgatagccttacaacttctaatcaatctggtggttctgatgaaatagaagctacatcttctaatgactctgccaagcaatcatcacccccttggcgtggtatgggacacaacaaaaaaggattgcacgaaaaggagccagctgtatcaagtaaatctggaaaaggtattgggaaacaggatcaacatatgcatacttcacgaaggaaaaaaaaaatgcacacctgcaaaagcgctattccaatcctgttgcgccacctggaagacgcaaacaactctgttggacagaaaaagaagtagctattttgagggatgggatggcaaaattctctccacataataatggtaaaataccatggacccagatactgcaatatggccgtcgtgtgtttcacaagacgcgcctgccatgtgatttgagggtcaagtggaggaacatggagaggaagaaatctgatgccgtcgacatggaacactgatgtggtactagaacatagcggaacactgatatggtactaatagcgaatggaggagggtttcttctaaaatagtattttgatgcacagggtgggcatccttttgtgactggttgtgtcaacctagacctactatgcccgtgagagagattgctaaagagtcaactttcttttggaactgaaccctgcactctagatgatgataacatccggtagctgtgtttcttaaggcaactgtgtgtgtttcatccggcagctgccagtgcctcgcccaatgttctcgaatgaggtaggcgtcgtatgctctaaacacatcacgaataatttcttccagcgtgttttcttcttcttcatctttttagtgaacgcaaccttgtaagtcacgttgcagaagctataaaaacagttagtgaaacctttaaccgtagaaatgaaata

SEQ ID NO: 125406 - DNA, 3057 bp, Zea Mays
caagacatccaggaaaatatatgtaccaagaagtttacattaccaggaatttctttccagttggtaagttaaaagaaaatctcaatattataagtagaacaatggcaaattgaatttgtaattttctcttcagctagaaagagttgagccatggatagcatctatggccccacaaccccaaatggaacacaatggcactgaacaatgtgtcaatgatcagtcactgcgcagcagccacggatgtgtaaatatagagaagcctgtgttccatacagacaatgctggggttcagcaagagaccatggcagatgtagtcaatgaaagtgaaacaggaaatctccaaaaggatccacctgcaccaacttttatttttcaccaaccgtgtatgcctgaaagcaggtcttacgtccctccgcaagaagatactatagatgctgttggtctaggcgctaggtcctcagaaaggagtcctattgtggaggggaacatgtccgttggatctgtgcttgcttcagatggctgtgatgtacctttgcagggaagcattactgagccctttttccagcaggataaacatgaccatactgttatagttggaccaaaatcttgtaagcgaaaatctccaattccatcttactgtgctcatggagatggggcagatggtggtggctccagcaatcagtcatctaaggtttccattcgtgaaggacctagcactcatgccacagtaacttcaggttttgacagaatcagcgatgtcttaccaacagatgcacctgaatctgagcatttgcctgagtgcataactgcacaggatacaaccatttcacagcctgacagcaggaaagctcatttgagtgctctgcaacaggaaaggggtgagaaagtaacccaagatctggaagatatctctgcaaatattgggtcagtggaaaaggaccatattcatggggatctgactttgccatctgccagtgttttactttctataagctgcaatggtgctaatcaaggaagtaaatatgaaaccaaccttcaaccagggactgctacagaggatatgatggctttcgaagagcagaatgcagacaagtctcacttagaagtcagtggtatcaacaaggctaatcaagctctgcatgatgatggcggcgtcatgaaaaataatacagtacatggtgggttgattgtgcagactgctccagtgtctcaaaattgcaatgtaaccttacatgataaaacttcagagcaggaaaatgaaaagaacattcaaaaagataattgccatacttatgttccaggctcttctcaggataggggtggagaaagtgcaaagaaaacaacaaatgaactaaagtctggggacatttcttcaaaaatatgtgttcatttcaatgttcaagacatcaatgatactctggaggacttgtctcaacaaggtttgtgcataaaatgtggtgaaggtggtcagttgttggaatgcaatggctgttttttagccgcccatagcagctgttttggttcatcggcgacatttgaaggaaccaattttttctactgcccggtatgcttgtataagaaagccactgaagcatataaaaaggcaaagaaaacatattgtgaaactaggaagaaccttgttgctttccttggcacagcacaagccaccaatcaacctgacaaacaactaaatggagctcagccaggagctgccaacagagatgaagagcctcatgatgagcaacattctaaagggtgtggcgcatcaaaaggggcccatgaaaatgaagtatacaatcttgctcatcaggatgaagagcatcatcagcagaggaagaagcagaaaataaatgctataggtaagagttatcctaaggaggtactcactgagaaggttattttccagaactctgatcctgcatccattaataaacattcagtgctccagaataacaataaaacaccagttaaggatccagagaaaaagcagcaagcggtcaacgaagaagctcgcaaagaaggtggtaatgacaactcatctcatgaaacaggagcttcatctccgagaagatgtgatcctccttcgaatcaggacgttgaggctgaccaggacgatagccttacaacttctaatcaatctggtggttctgatgaaatagaagctacatcttctaatgactctgccaagcaatcatcacccccttggcgtggtatgggacacaacaaaaaaggattgcacgaaaaggagccagctgtatcaagtaaatctggaaaaggtattgggaaacaggatcaacatatgcatacttcacgaaggaaaaaaaaaatgcacacctgcaaaagcgctattccaatcctgttgcgccacctggaagacgcaaacaactctgttggacagaaaaagaagtagctattttgagggatgggatggcaaaattctctccacataataatggtaaaataccatggacccagatactgcaatatggccgtcgtgtgtttcacaagacgcgcctgccatgtgatttgagggtcaagtggaggaacatggagaggaagaagtgggcaggctactgatgctgatctgatgccgtcgacatggaacactgatgtggtactagaacatagcggaacactgatatggtactaatagcgaatggaggagggtttcttctaaaatagtattttgatgcacagggtgggcatccttttgtgactggttgtgtcaacctagacctactatgcccgtgagagagattgctaaagagtcaactttcttttggaactgaaccctgcactctagatgatgataacatccggtagctgtgtttcttaaggcaactgtgtgtgtttcatccggcagctgccagtgcctcgcccaatgttctcgaatgaggtaggcgtcgtatgctctaaacacatcacgaataatttcttccagcgtgttttcttcttcttcatctttttagtgaacgcaaccttgtaagtcacgttgcagaagctataaaaacagttagtgaaacctttaaccgtagaaatgaaataccctataagcat

SEQ ID NO: 125407 - DNA, 961 bp, Zea Mays
ccggcgctctcgggccgagaggcgacctccagtccaggtcgccaggaacccagcccagcccagcccagcaaagagagagaccacctctcctccaccaacgccgcagcaaccaccaaccagcaatggcgactccgacgccaccaccgctcgtccttatcctcctgctcctcgtcgcctccttcccttcccccccacgtgccacggcctccgcctccccgttcgatgccgcgctggccgcgctccagtcgcgggtgggctacgccttccgcgcgccggccctgttacgccgcgccatgacgcactcctcctactcccacgagaacggccgcgcgctcgccgtcctgggcctcgcggcggcggagtccgccgccgcgctgcgcgccctcgccgccgacgcggacgccgcgccctccgccgtgtcgcgcgccgccagcgaggccgcgtccggccccgcgtgcgccagggccggggcgcggatcgggatcccggacgtcgtgcgcgtctctggccagaccagcgcggccgcgccgaccgtcgtctgcagcgcgctcagggcgctcgtcggcgccgtagccgtcgacgccaacagcaccgatgccgccggggaggtgttctggaggctgcacgcgctcacctcatcggccgccgtcgccgcagtctgatcagccaactgcatcgcgggttgcacacttgcacttcatctcagttgctgtctcgagaaatatataaaaaaaaaatagagaggacacggtgaagaagaggaggtatagatagcaacgtttaagaatcttttctcttgtgatgttcaactgccactttgtaatgctatgctatgctatgctccactctactggtagtacgtttttccatccatctaggaatgtccattttggatctctggctgcaataaaataaatttgatgaaacatcttcggtgcaataaaatattttttttagaata

SEQ ID NO: 125408 - DNA, 1624 bp, Zea Mays
tgacgtcgaccagcggcacggagcggatcctgacggactcgatctcgccgaatgccgcgaactccttgatgagcaccttgcgcttggtccgcagcggcaggttccccacgaacacggtcctgagcagcttgctctcgtcgtcgaacgcctcctcctcgtcctccccggccccctgtgccgcgtcgtcgggagccttcctcttctccccaactctcgacggattctccgcgcctcgccgccgctcccggccggcctccaactcgtcccgcttccgcttgcgccgcgggccctcctccttgctcttcttattcttcttcgaggacggctcggcatccctggcgtcacggctgggttgcatggggaggggcgtcgtggcgggtgcaggagtcgcggggggctcctccgtagaggccttccggcggaacgggttgtccgcggagaagagggagcggatggacgcggccggggagtcgccgctcgcggcctcagaggctgggtccctgtgcttcttcgccatcggcggctgcgggtctcccgatgcggctgcgggttgcggcgggggggctcgcgaagaagagggcaaaacaccttgtcctcctcgttgggtggctcggaatagatgtggggtcgggaaagcctcatgaattcccagccgtccgatggactaccaacggctaggattattctgtgctctgtacatcgtccagcgaggctaggttacccttactgttccactccagtcggtcgaggagtagggttctagcgcctatctggtttctccctgcgccgccgccgccgccgtggacaaccggagcgtagtgggaggggatgatggagggaggtagccgcgcggatgggcggaatccgaaccagctccggccgttcacctgcaccgggaacccgctccaccgcgcccacggctccgcgcggtgggcgcagggcgacaccgtcgtgctggccgctgtgtacgggcccaagtcgggaacccggaagggcgagaaccccgagaaggcctccatcgaggtcgtgtggaagcccaagaccggccagatcggaaggcaagagagggaatatgagatgacactcaagaggacgttgcagagcatctgcttgctcacagttcatcctaacaccaccacctctgtcgtgcttcaggtaatgttcgcctggctggcagctgccatgctactcttaatttgcttctgttgttctatatacagttccaccattgctgttggctgtgtttggtgcaatgtagctaggtgcattatatactaaatcgtatatagtactacttttggcgaactgatggaaagtcagtgaacgtatttttttactcttatcagagccaattatatcagtcgcactgaaaatgccataaacaaagtaaaatgcgcctctcagttcccttattttaaccttaataactagctttctcagtgcatcccccagggtgcagacttgatgtgcttatgtgaaccgtgaactaatgaacaacttataataccgatgggaggtacaataattactaggataggatccccacttccaaaaggtttttttggctaatcatcatctctaagcacacccattgtacattctcttatgttggctaccgttgtcc

SEQ ID NO: 125409 - DNA, 2332 bp, Zea Mays
tgacgtcgaccagcggcacggagcggatcctgacggactcgatctcgccgaatgccgcgaactccttgatgagcaccttgcgcttggtccgcagcggcaggttccccacgaacacggtcctgagcagcttgctctcgtcgtcgaacgcctcctcctcgtcctccccggccccctgtgccgcgtcgtcgggagccttcctcttctccccaactctcgacggattctccgcgcctcgccgccgctcccggccggcctccaactcgtcccgcttccgcttgcgccgcgggccctcctccttgctcttcttattcttcttcgaggacggctcggcatccctggcgtcacggctgggttgcatggggaggggcgtcgtggcgggtgcaggagtcgcggggggctcctccgtagaggccttccggcggaacgggttgtccgcggagaagagggagcggatggacgcggccggggagtcgccgctcgcggcctcagaggctgggtccctgtgcttcttcgccatcggcggctgcgggtctcccgatgcggctgcgggttgcggcgggggggctcgcgaagaagagggcaaaacaccttgtcctcctcgttgggtggctcggaatagatgtggggtcgggaaagcctcatgaattcccagccgtccgatggactaccaacggctaggattattctgtgctctgtacatcgtccagcgaggctaggttacccttactgttccactccagtcggtcgaggagtagggttctagcgcctatctggtttctccctgcgccgccgccgccgccgtggacaaccggagcgtagtgggaggggatgatggagggaggtagccgcgcggatgggcggaatccgaaccagctccggccgttcacctgcaccgggaacccgctccaccgcgcccacggctccgcgcggtgggcgcagggcgacaccgtcgtgctggccgctgtgtacgggcccaagtcgggaacccggaagggcgagaaccccgagaaggcctccatcgaggtcgtgtggaagcccaagaccggccagatcggaaggcaagagagggaatatgagatgacactcaagaggacgttgcagagcatctgcttgctcacagttcatcctaacaccaccacctctgtcgtgcttcaggttgtgggtgatgatggttctgtatctttccacttgatgtagcagtaatatagtttggctgcttttatgtttattgtgtttgttgtcctgcattcaatattaaagcttcaaactttagtctactgactgttagctaatgatttttttgataaatttgctaggatcaattaggtagtaacttatagggaataatgtatgaaggcatgagcgaatcggtcacatcaactaggtttggaattagagagagttgaatctttgtcggatatctttggctcttccttgaaatgtagttcgttgccaaaacatcatgcgcactccaagaccttttaactcaaaatatgagtagcttctttttttcaatcgaagctagtccttgtttccttgacagtgcttagcttatgtcatgtgcaattaatgcttcttgtgctgctcttgcatttgctggaatccctatgaaacatctcgctggtaagttgagtatattttttagtgtcatccctttagactttgtagctaacaagtcaaaagcttatatttgctgcagtcgcgattagctgtggagtgatggacaatggtgtggttatcttagacactagcagagcagaagagcagcaagctaggtcgtttgctcacctggtgtttccgaactcgcgcaagtcagtcgaatcgaaggacacgacacagcgagatgaggagtccgagcgaggattgataacttgcatcacgcatggagcaatgtccgaggatgactatttcaactgcatagagaggggtgtcatggcgtcctcgaggatctcggatttcatgaggaagacactgcagaaggaggcttccagggatgcctgacctgagtagcaaatgtattagcacgactgagaagctgcctgcctgtgataggcgatggcgatggcaatggtgtgtagacagcagctgggtctctagttttgacggcatgtagtcgtgttagaatgaaggaggcaagggtgcgatggagtggaggtcaatcggcgtgtgatgccacgtcactagcttagctgcggatggtttggtggacttttgaggaacagataatgagattgtatgcacggcacgctgaaattttacttgaacgccgcccgattaaaacaatatccatactgtacgtgtgtcggtgggctgcaatgtgatgtgtgatatg

SEQ ID NO: 125410 - DNA, 2256 bp, Zea Mays
tgacgtcgaccagcggcacggagcggatcctgacggactcgatctcgccgaatgccgcgaactccttgatgagcaccttgcgcttggtccgcagcggcaggttccccacgaacacggtcctgagcagcttgctctcgtcgtcgaacgcctcctcctcgtcctccccggccccctgtgccgcgtcgtcgggagccttcctcttctccccaactctcgacggattctccgcgcctcgccgccgctcccggccggcctccaactcgtcccgcttccgcttgcgccgcgggccctcctccttgctcttcttattcttcttcgaggacggctcggcatccctggcgtcacggctgggttgcatggggaggggcgtcgtggcgggtgcaggagtcgcggggggctcctccgtagaggccttccggcggaacgggttgtccgcggagaagagggagcggatggacgcggccggggagtcgccgctcgcggcctcagaggctgggtccctgtgcttcttcgccatcggcggctgcgggtctcccgatgcggctgcgggttgcggcgggggggctcgcgaagaagagggcaaaacaccttgtcctcctcgttgggtggctcggaatagatgtggggtcgggaaagcctcatgaattcccagccgtccgatggactaccaacggctaggattattctgtgctctgtacatcgtccagcgaggctaggttacccttactgttccactccagtcggtcgaggagtagggttctagcgcctatctggtttctccctgcgccgccgccgccgccgtggacaaccggagcgtagtgggaggggatgatggagggaggtagccgcgcggatgggcggaatccgaaccagctccggccgttcacctgcaccgggaacccgctccaccgcgcccacggctccgcgcggtgggcgcagggcgacaccgtcgtgctggccgctgtgtacgggcccaagtcgggaacccggaagggcgagaaccccgagaaggcctccatcgaggtcgtgtggaagcccaagaccggccagatcggaaggcaagagagggaatatgagatgacactcaagaggacgttgcagagcatctgcttgctcacagttcatcctaacaccaccacctctgtcgtgcttcaggttgtgggtgatgatggttctgtatctttccacttgatgtagcagtaatatagtttggctgcttttatgtttattgtgtttgttgtcctgcattcaatattaaagcttcaaactttagtctactgactgttagctaatgatttttttgataaatttgctaggatcaattaggtagtaacttatagggaataatgtatgaaggcatgagcgaatcggtcacatcaactaggtttggaattagagagagttgaatctttgtcggatatctttggctcttccttgaaatgtagttcgttgccaaaacatcatgcgcactccaagaccttttaactcaaaatatgagtagcttctttttttcaatcgaagctagtccttgtttccttgacagtgcttagcttatgtcatgtgcaattaatgcttcttgtgctgctcttgcatttgctggaatccctatgaaacatctcgctgtcgcgattagctgtggagtgatggacaatggtgtggttatcttagacactagcagagcagaagagcagcaagctaggtcgtttgctcacctggtgtttccgaactcgcgcaagtcagtcgaatcgaaggacacgacacagcgagatgaggagtccgagcgaggattgataacttgcatcacgcatggagcaatgtccgaggatgactatttcaactgcatagagaggggtgtcatggcgtcctcgaggatctcggatttcatgaggaagacactgcagaaggaggcttccagggatgcctgacctgagtagcaaatgtattagcacgactgagaagctgcctgcctgtgataggcgatggcgatggcaatggtgtgtagacagcagctgggtctctagttttgacggcatgtagtcgtgttagaatgaaggaggcaagggtgcgatggagtggaggtcaatcggcgtgtgatgccacgtcactagcttagctgcggatggtttggtggacttttgaggaacagataatgagattgtatgcacggcacgctgaaattttacttgaacgccgcccgattaaaacaatatccatactgtacgtgtgtcggtgggctgcaatgtgatgtgtgatatg

SEQ ID NO: 125411 - DNA, 2052 bp, Zea Mays
tgacgtcgaccagcggcacggagcggatcctgacggactcgatctcgccgaatgccgcgaactccttgatgagcaccttgcgcttggtccgcagcggcaggttccccacgaacacggtcctgagcagcttgctctcgtcgtcgaacgcctcctcctcgtcctccccggccccctgtgccgcgtcgtcgggagccttcctcttctccccaactctcgacggattctccgcgcctcgccgccgctcccggccggcctccaactcgtcccgcttccgcttgcgccgcgggccctcctccttgctcttcttattcttcttcgaggacggctcggcatccctggcgtcacggctgggttgcatggggaggggcgtcgtggcgggtgcaggagtcgcggggggctcctccgtagaggccttccggcggaacgggttgtccgcggagaagagggagcggatggacgcggccggggagtcgccgctcgcggcctcagaggctgggtccctgtgcttcttcgccatcggcggctgcgggtctcccgatgcggctgcgggttgcggcgggggggctcgcgaagaagagggcaaaacaccttgtcctcctcgttgggtggctcggaatagatgtggggtcgggaaagcctcatgaattcccagccgtccgatggactaccaacggctaggattattctgtgctctgtacatcgtccagcgaggctaggttacccttactgttccactccagtcggtcgaggagtagggttctagcgcctatctggtttctccctgcgccgccgccgccgccgtggacaaccggagcgtagtgggaggggatgatggagggaggtagccgcgcggatgggcggaatccgaaccagctccggccgttcacctgcaccgggaacccgctccaccgcgcccacggctccgcgcggtgggcgcagggcgacaccgtcgtgctggccgctgtgtacgggcccaagtcgggaacccggaagggcgagaaccccgagaaggcctccatcgaggtcgtgtggaagcccaagaccggccagatcggaaggcaagagagggaatatgagatgacactcaagaggacgttgcagagcatctgcttgctcacagttcatcctaacaccaccacctctgtcgtgcttcaggttgtgggtgatgatggttctcttatgtcatgtgcaattaatgcttcttgtgctgctcttgcatttgctggaatccctatgaaacatctcgctgtcgcgattagctgtggagtgatggacaatggtgtggttatcttagacactagcagagcagaagagcagcaagctaggtcgtttgctcacctggtgtttccgaactcgcgcaagtcagtcgaatcgaaggacacgacacagcgagatgaggagtccgagcgaggattgataacttgcatcacgcatggagcaatgtccgaggatgactatttcaactgcatagagaggggtgtcatggcgtcctcgaggatctcggatttcatgaggaagacactgcagaaggaggcttccagggatgcctgacctgagtagcaaatgtattagcacgactgagaagctgcctgcctgtgataggcgatggcgatggcaatggtgtgtagacagcagctgggtctctagttttgacggcatgtagtcgtgttagaatgaaggaggcaagggtgcgatggagtggaggtcaatcggcgtgtgatgccacgtcactagcttagctgcggatggtttggtggacttttgaggaacagataatgagattgtatgcacggcacgctgaaattttacttgaacgccgcccgattaaaacaatatccatactgtacgtgtgtcggtgggctgcaatgtgatgtgtgatatgaaatgtttggtggtgcttgggcgtggcgtttgtttgttagcggtggttggtttaggtaggtcgcacagcccatccatgttgtgtagtacatgcacatcaggttggtagagctgtctaggttacatattcaaactgaacctctgcctaattcaggtttcgtattcctacca

SEQ ID NO: 125412 - DNA, 1945 bp, Zea Mays
ccgaacgcacgtgctcctcgtcggtcggaactcggaagggtacgccacgcgagagacgcggggagaagcaggcaggaagccaagaaagcaagcacagagccgagcctacagtccaacaagaggaggggagaactcgtcgcgccgcctccgcctccgcctccggtggttagttcctctctcctcgtcagctcaccgcccgccccacagaactctgccccgtgctttgccaccggtgactgcagaagcagctagccatggcggcggcggcggcggcggcggccttcgatgcctacaccgacaagaacgccatcttccgccgcctcaaggccaagcccgagaacaagatgtgcttcgactgcaacgccaagaaccccacctgggcctccgtcacctacggcatcttcctctgcctcgactgctcggccgtccaccgcagccttggggtccacatcaccttcgtcaggtcaacgaacctcgactcatggactccagatcagctgaaaatgatggcgttcggaggcaacaaccgggcacatgctttcttcaagcagcatggatggactgatggtggcaaggttgaggcgaaatacacatcaagagctgctgaactgtacaggcagatgctcaacaaggaggtcgctaagagtgccattaccgataatgccctgccgtcctcacctgtcactgcgtctgaggcttccaagccatctgatgactttcctgaattcaagctctcagacgcaccagcaccgccggcggagaatctgaatgggaagcatgaacccaagtcccccaaagctgctccacgttcaccaaaagctgctactcatcccacctttgccacttccgtgaagaagcccattggcgcaaagaaggttggaggcaagactggagggcttggtgttcgtaaactcacaacaaagccaaatgaaagcctgtatgagcagaaaccagaagagccaaaacctgctatacctgccttgactgctccaactgcaaaaggtggtccatccttgcattcacgttttgaatatgtggataacgaacaatcatctgtttcaagaaccgggggatctggatctcgtgtaaccggtcatgtagcaccaccaaaatcatctgacttcttccaagagtatgggatgggtaatggattccaaaagaaatcaagcaacgcctcaaaagctcagattgaggaaactgatgaagcaaggaaaaaattctctaatgctaaggcaatttcgtcatctcagttttttggtactcaaaacagagaagagaaagaggctcagctatcccttcagaaattcgcgggttcttcatccatttcaagctctgatctttttggccgtaccaatgtggacgattctaacctggacctaagcgctgcagatctcatcaacagaatatctttccaggcgtcacaggatctgtcttcactcaaggacatagctggagagactggaaagaagctgacatctttcgcctccaatttcatcagcgacctggacagaatcctttgagcaggcgaggccatgccagcaaagcatttttcctaccttgcaccagaatttcccttctagcttggattgggtcacggactcgcgggtgcatcaccgacagttgaaagtagttcttgcacagctacagctttgtagaggattcctattacgcatttgtattttgatctttgttgtgagaattgaaggtatttttattcgtgaatacttcacaacggtgaagcatacactacagtttacatacgttgaggttgcttgtatcttggaaggaaggttcatactatgtcctgtgcgtgtggtaaatgaaagatactcttgtcaaggttgactgtcatgataatggaattcgtatctggtcgttttcgtgccggcgtgtctaaagattcagccaacagcatgagaaagctgaccagatgtttgcggctgtc

SEQ ID NO: 125413 - DNA, 838 bp, Zea Mays
attatgctgaaatatttttcaccggacagatttccagctactttgttatgtgctctgactctagattcttttctttacagattgaggaaactgatgaagcaaggaaaaaattctctaatgctaaggcaatttcgtcatctcagttttttggtactcaaaacagagaagagaaagaggctcagctatcccttcagaaattcgcgggttcttcatccatttcaagctctgatctttttggccgtaccaatgtggacgattctaacctggacctaagcgctgcagatctcatcaacagaatatctttccaggcgtcacaggatctgtcttcactcaaggacatagctggagagactggaaagaagctgacatctttcgcctccaatttcatcagcgacctggacagaatcctttgagcaggcgaggccatgccagcaaagcatttttcctaccttgcaccagaatttcccttctagcttggattgggtcacggactcgcgggtgcatcaccgacagttgaaagtagttcttgcacagctacagctttgtagaggattcctattacgcatttgtattttgatctttgttgtgagaattgaaggtatttttattcgtgaatacttcacaacggtgaagcatacactacagtttacatacgttgaggttgcttgtatcttggaaggaaggttcatactatgtcctgtgcgtgtggtaaatgaaagatactcttgtcaaggttgactgtcatgataatggaattcgtatctggtcgttttcgtgccggcgtgtctaaagattcagccaacagcatgagaaagctgaccagatgtttgcggctgtc

SEQ ID NO: 125414 - DNA, 1730 bp, Zea Mays
cccgtcctctttccgccgcctgcccagacaccacagagcaatgcccggcggccgaaagcgtccggccccgttcgccggtttctccccattcgctcgctccctcatcttctccgccgccacgtcaagctgtccaaaatcgcgtcctctccccgacgcttccaccgccgccgaaacccctcgccaagacgacatgccgcggccgccgtccaagcgcgtgaagcgagccgagccctccagcgacgaggtggaggaccgcggcagcagcggaagcgaagaggagagcttcagcaccagcggcagcgacagcgatgacggggaggagtcctcggaggagctcgagacggtgcaagcggacttcgccttcttcgaccccaagccgagcgacttccatggcgccaggctgctgctcaagacgtacctcgactctaagccctgggacctcaccggcttcgctgatctcatcctcgcgcagaccactgtaggcacggttgtcaagttggccgatgacgaggaggaggaaggggaagggaacggtgttcagaaggccaattctagtactaacaatgacgacgatgatctgtttggtctcattagcgtgctcaatttgggacaacacgccgagcaaaaatgcattaaggatcttaaggagtatctgcttgatgtctgtcccgacaaaggtactaagaagcagctcagatctctgcttgaagagaaagcgtcgagcgtgggcctgctggtgtgtcgccgctttgtgaatttcccttatgaactcgtgcctaagctgtatgacgcgctctttgacgaggtttcctgggcaacagaagatgagccaacacaagaactccaggactccttccggttcaagcactacctgttaatcgtcagaatgcttgagaagggcaacccaggtgcactggtgagagttatctcattgagttaccaggtcggtttgaagcagcctctctgcatttgcgattaataatatttcaatgtgtgtgtccccttgtatgtgaatgagtattcattttttgtggattgctttggtcattactcgttgattgctgcgtgcagaggaagacccctccaaaacataaatcaaaggcgaacaaagatgatgacgaacctattatctatccaaagtttgaggatgaaatttttcacgagcttagctcatggtctttcacttttccaatacgttctgaagagtcagctcagcaggagatgaagaattacaaggagatgggcttagtgatggcaattaaagcaggcacagttccgaagttcagaaagaagctgggggatttggtgtccgaataggagcgtaattgaccgatgtggaattttgctgctgtccacgtggtttgaacatttccacattcagcttgttgtctgtaacgatgtgattctgactggagcttgaatggtggcaatggtattgacattgtcgttgatttgcaacaaggattctgttcgtgaactaatcaagtaaagagattttgagctgtgtttgtcctaaggcatgtcttgtagtggactagtggtagataagcacagccacaccctagtgtaactgaagtgggcactaggcagaacgccagggatgggagttgaagagtgctggcctcctgatcatcatggatgataacatcttcaggaaagtatcagcatgaagagatgttttcagactgaaactgcaggcatgggcaggtggaacgacttgtgatcacaag

SEQ ID NO: 125415 - DNA, 1725 bp, Zea Mays
cccgtcctctttccgccgcctgcccagacaccacagagcaatgcccggcggccgaaagcgtccggccccgttcgccggtttctccccattcgctcgctccctcatcttctccgccgccacgtcaagctgtccaaaatcgcgtcctctccccgacgcttccaccgccgccgaaacccctcgccaagacgacatgccgcggccgccgtccaagcgcgtgaagcgagccgagccctccagcgacgaggtggaggaccgcggcagcagcggaagcgaagaggagagcttcagcaccagcggcagcgacagcgatgacggggaggagtcctcggaggagctcgagacggtgcaagcggacttcgccttcttcgaccccaagccgagcgacttccatggcgccaggctgctgctcaagacgtacctcgactctaagccctgggacctcaccggcttcgctgatctcatcctcgcgcagaccactgtaggcacggttgtcaagttggccgatgacgaggaggaggaaggggaagggaacggtgttcagaaggccaattctagtactaacaatgacgacgatgatctgtttggtctcattagcgtgctcaatttgggacaacacgccgagcaaaaatgcattaaggatcttaaggagtatctgcttgatgtctgtcccgacaaaggtactaagaagcagctcagatctctgcttgaagagaaagcgtcgagcgtgggcctgctggtgtgtcgccgctttgtgaatttcccttatgaactcgtgcctaagctgtatgacgcgctctttgacgaggtttcctgggcaacagaagatgagccaacacaagaactccaggactccttccggttcaagcactacctgttaatcgtcagaatgcttgagaggaagacccctccaaaacataaatcaaaggcgaacaaagatgatgacgaacctattatctatccaaagtttgaggatgaaatttttcacgagcttagctcatggtctttcacttttccaatacgttctgaagagtcagctcagcaggagatgaagaattacaaggagatgggcttagtgatggcaattaaagcaggcacagttccgaagttcagaaagaagctgggggatttggtgtccgaataggagcgtaattgaccgatgtggaattttgctgctgtccacgtggtttgaacatttccacattcagcttgttgtctgtaacgatgtgattctgactggagcttgaatggtggcaatggtattgacattgtcgttgatttgcaacaaggattctgttcgtgaactaatcaagtaaagagattttgagctgtgtttgtcctaaggcatgtcttgtagtggactagtggtagataagcacagccacaccctagtgtaactgaagtgggcactaggcagaacgccagggatgggagttgaagagtgctggcctcctgatcatcatggatgataacatcttcaggaaagtatcagcatgaagagatgttttcagactgaaactgcaggcatgggcaggtggaacgacttgtgatcacaagttcttgaacgcagacatgtttgtttcggtttatttccagcttctggccgctagaagctgttgcggactgacaaatgtctagttttttcagtttgttttgtgagaatcgcttttataaaaactgtccaaaatcaacgtgaacatagaattgataaatctgtcactttctaaa

SEQ ID NO: 125416 - DNA, 2332 bp, Zea Mays
tccatggcggcctccgccgcggcgccgagcggcgcgccaccggctgggaagcgcccggcctccagcggacgggagggagaccagatggtcatcacgccgctgggcgccggcagcgaagtcggccgttcgtgcgtccacatgaccttcaaggggcgtactgtcctcttcgactgcggcatccacccggcgtacaccggcatggcggcgctgccctacttcgacgagatcgatccgtccgccatagacgtcctcctcatcacccactttcacttggaccacgccgcatcgctgccgtacttcctggagaagactacgtttaagggccgtgtgtttatgactcacgccacaaaggctatttacaagctgctgctctcggattatgtcaaagtcagcaaggtgtccgtggaggatatgctgtttgatgagagtgatattgctcgatccatggagaaaatcgaggttatagatttccaccagacgttggaagttaatgggatacgcttctggtgctacactgctggccatgtacttggtgccgctatgttcatggtggatattgctggcgtgcgcattctttacactggtgactactcccgtgaagaagaccgtcacctacgagctgctgagctcccacagttctccccagacatttgcattatcgagtccacttacggcgtacagcaacatcagccccggattgtacgtgagaagcgctttactgaggtcattcacaataccgtttcacaggggggccgtgttcttatcccggcatttgctctgggcagagcacaagaactgttacttatcctcgatgagtattggtccaaacacccagagctccataagattcctatctattatgcgtcccctcttgccaagaggtgcatggctgtctaccagacatacataaactccatgaatgaaaggataaggaaccagtttgcgcaatccaacccgttccatttcaagcacatcgagtccttgaatagcatcgataacttccacgatgtgggtccatcagtggtgatggctagtccaagtggcctccagagtggtctctccaggcagctttttgataagtggtgcacagataagaggaatgcatgtgttattccaggttacgttgtggaggggacccttgcgaagaccattatcaacgagccaagagaagtggcgctagctaatggcctcactgctcctcttcatatgtcggtccactatatctcgttttcagctcatgctgatttccctcagacaagcaactttctggacgaacttcggcctccaaatattattctcgtgcatggagaagcgaatgaaatgtcgaggcttaagcagaaacttattactcagttcgatggcacaaatacgaaaatcgtgtctcccaagaactgccagtcagtggagatgtatttcacctgtgagaaaatggccaagactatcggcaggctggcagaaaaggtaccagaagctggagagtcttccggtggcctactcgtgaagaagggattcacataccagatcatggctcctgaagatctccgtgtgttcacgcagttatctacagctaacatcatgcagcgcatcgcggtaccttactgtggttcctttgaagtcataaggtacagactggagcagatatacgagagcgtggagccagcggcggaagaatccgatgttccagcgctgatcgtgcacggaagagtgacggttcgcctggactcagaaagctatgtcacgctgcagtggctgtccgaccccatcagcgatatggtgtctgattctgtggtggctatgatcttgaacgtcggtcgtgaaggtcccaaagttgttccggtggaaggagcagtgaagaccaaagaggagacggctcaaaaggtggtgtatgctcttatggcttcacttttcggtgatgttaaagttgtggaggaagggagacttgtcatatctgtggatggaaatgtggcacacttggacgggaggagtggctatgtggaatgtgagaatgctacactgaaggaacggatcaagactgcgttccgccgcatacagggtgccgtgagaccaatcccacttgcctcctcttgatctgaggacagtgattgttgcatttcccagttgaacatagtagcattgtctgtttacattaggactaggataccagtttattttagaaaggacctggtggcccacatgtagaagtggcctggtatgtattgtacatttgtactgcacgctactcgagaggattgttgctctgggacttcctatgtcacatcacttgtaacaacaatgtaattcctaagttgaaccacatcgattgtttttcagt

SEQ ID NO: 125417 - DNA, 2233 bp, Zea Mays
cgattgctaggactcccctcccatgaaacatgcatcaaacacactgatggatcagtacattacatccacatgatgctgctaacagtttcagttacgcaaacaaacctcgagtgcctgcgcaaggaaggagattttgccctcagcaaacagagggtccccggcttctcccagcggcaggagacggcagcttccctcccaacacggcgcgcagcagcaagcctcgatccagagcactccgaccagcacggcgagttggcagttccatcgcataaggggagagttgacatatgccgccgccggatattgaccaagcatctgccgatttgcgctgcaaaattagaacaaaaaaaaatcaatagatccttccgcggccgacgtaatataggacaatagatcccgtggtctgagccggccagggcaaggcaagtggactcgacaggcaggagaagcgtgagaaggaagcgggggtgctgacctgtagagtagagatgctcctcgtcaactggtgtcaaggccacggagccggcggtcggccgcggcccgtgtcggagagggatgaggtggttggatggagcggctcgcggacgggagtggccgacgacgagacgagtctgtgagggctgggcggcgaatggaccagctggccgagcccgagtcagcaattgttgggctgggcctgggcctgttgggcccaaatggacagcattttatcctctagcccactcccagggggtgaggaggaagagggctttacactgaaccccagcgacccaggcgtcagcggcgtgatgcagttcctccgaggcagcggcggcgggggcgggggcggtgggttcccgggggtggcgtgggaggtgttgcggcggcacttctctaagaagcggtccgtggacgtgaggcggatcaaccccaaggtgcccaaggaggaggccgtcgccatttccggccgactcctccagatcctctccgaccatgggcccctcaccgtcggcaacacctggaaccacgccaaggtacaacgataaacacgctactgcccctacaaacctgtataaaatatccaaatcactctgctacaacatcagaaaagcagcctaatgcctttttgcgtaccagtagtggtagtaagataaactaggcactgtcttatggaataccacgaaagatggattcaatcgtagccccatcccaacagctatttgttgtggtatctggtacctttgcaattgcaacgtttcccttctgttccaaattttcaatccacggtacctttgctcaatatgcttggacccccacaagggtgtctatttttttttaaactctgtgaacttgagattaaattggatcatctcgtctctgtaatcatacgcacattctgctatacgatcacgttgctaaggaaccgaaatcgggattactttcttcacagtgtatgaatttaggtacctaatcagtcaatcagacaggcagagtggcaaataactcttccatgagatttgacaggcttgggttgcagtctgtagcatgtatacatgatcgttttacctccagttatatataagcgcctgcagatggttctgaaactgtcattgttacccactaaggcctgattcaggttagctttagctacagaagaatgtatagtatctgaacccgaaaatgaaatttaccctgcttgctgccttgtccagagctgtacactgaccctggcgtatttgtaccacaggatgctggcatcgctggtctgaacagcaagacgcacatgaagatcctgctgaaatggatgacggggagaaatgtcgtgaagctgacctgcgtgcacgtgggcaacgcgaagaagttcctctactccccgtccactgaaagcagcagcagcgccggcgcatcaccgtcatccacatcggcctcgcagtgacggtcagtcgccgttaagccttggtgtggttcttgatgttgctttgtggatcgatggaggttgcctctggtcatggtgatcccatgtttaaccttgatgacgaacattggaaaaagcattttgttttatggactggaatagtctgcaaacatcacgatagcaatattgttctgctgctcatcagctgaggatgctgccctgtcctgaactcctgattttgcttttgatctactatgtgatgatttgctcttccttttgtttggatttgattctcacttttttcccctctggaatgtgggaacgctgcatcgcattaag

SEQ ID NO: 125418 - DNA, 1145 bp, Zea Mays
atggacagcattttatcctctagcccactcccagggggtgaggaggaagagggctttacactgaaccccagcgacccaggcgtcagcggcgtgatgcagttcctccgaggcagcggcggcgggggcgggggcggtgggttcccgggggtggcgtgggaggtgttgcggcggcacttctctaagaagcggtccgtggacgtgaggcggatcaaccccaaggtgcccaaggaggaggccgtcgccatttccggccgactcctccagatcctctccgaccatgggcccctcaccgtcggcaacacctggaaccacgccaaggatgctggcatcgctggtctgaacagcaagacgcacatgaagatcctgctgaaatggatgacggggagaaatgtcgtgaagctgacctgcgtgcacgtgggcaacgcgaagaagttcctctactccccgtccactgaaagcagcagcagcgccggcgcatcaccgtcatccacatcggcctcgcagtgacggtcagtcgccgttaagccttggtgtggttcttgatgttgctttgtggatcgatggaggttgcctctggtcatggtgatcccatgtttaaccttgatgacgaacattggaaaaagcattttgttttatggactggaatagtctgcaaacatcacgatagcaatattgttctgctgctcatcagctgaggatgctgccctgtcctgaactcctgattttgcttttgatctactatgtgatgatttgctcttccttttgtttggatttgattctcacttttttcccctctggaatgtgggaacgctgcatcgcattaagcaatggagtgagttgtggtcgtgccttgctactgcttaattcatctatcagagaaatgtctctgtctgtcagatgcacttgacagaaatcttcaagctggaaattcatacggcacctgcagccgccgtaattagatatgtcggttctgtttgtaaaatttacttgtgaactttgaaagatgaaacgggaaattctgatctttttccgtacaagcagccatcaggcgtgcaaccgtacaagcaggagctactgccatcatctatgactgtcatttgtctgtaataaagataaagataatctaatttctgtttggaattgaa

SEQ ID NO: 125419 - DNA, 1925 bp, Zea Mays
ttaacagagtttttgcataaaaccacacacctggcaacagcaaatctaccagaccagtacgacttgagacaccggccacggccactaaaagagaggagaggggcagcaccaaaagagcaccggtgacggcgacggcgacgaaaaaaagacgtcgggcggcggcgcagactcgcacatggccgttggattagatgattttgcaagcttggccgttggattcaccatggatagccgcggtcatcctatgtcaacttcgatccgacgtgtcgtccttctattggtggcacatacgtcatagcgaccggcgtgcacatctgccaggcccacaggttcctcccatgggcgcccacaggtcagtgacacgcgcggtcattgcgaaaggcacgtcgccttctacccttctccgtcctccccgaacactccacccaacccaaccggggcattcaaccaccccgtgtgctccaaccgctcctcgatttgatcaccgattgcgggaggccgactagggtttaccggtgagcgcgcgcgcgagagagagagagagagagtgagggcggaggaaaggggagatggcgcaggcggtggaggaatggtaccggcagatgcccatcatcacgcgctcctacctcaccgccgccgtcgtcaccaccgtcggctgcaccctcgagatcatttcgccgtatcacctgtacctgaacccgaagctcgtggtgcagcactacgagatctggcgcctcgtcaccaactttctctacttccgcaagatggatttggattttctgttccacatgttttttctcgcacgatactgcaagcttctggaggagaactcatttagaggaagaactgccgactttttttacatgctcttgtttggtgctactgtcctaactagcattgttctgattggagggatgataccttacatttccgagacatttgccagaattctgttcctgagcaattcattgacgtttatgatggtttatgtctggagcaagcacaatcctttcatccatatgagctttctgggcctgttcacctttacggctgcatacttaccatgggtcctattgggcttctctatcctggtgggaagcagcacatgggttgatctcttgggtatgattgctggacatgtgtactactttctggaagatgtatacccacggatgactggccgccgtccgctgaagacaccgtccttcatcaaggcgctatttgctgatgacaatgttgtggtggcacagccacccaatgctgggattggtgctggtgcaaggtttggtgctatgggtctagatccccaggctcaatgatatgaattactttcagtgacctgaggctgtgactgatctgagatgcggcagtctgttcctctgcgcaagttgcggaactgtacaagtcattgttcttgtatttatacaggctagatgagaattcttgtgcataacaaaagattagtagtatccgaggcggccaaaagtttctcacctgttagcagggcccgaaggaaatggtttctgatgtgccaacaggccaaaacccctgtcgccgaaacttgttcttgcaacggtttaacatctgacctactactctttcatgcatcagtgagtttagtctaggaaactgttccaaccgaagttgaagtttgttgctttggcagcgagaatttgtatggagcgttatgatcgcagaattgtgcaaggaatggctcctaacattgtggatgcttggatggtggttcttttccctcctgatcatgttgtgctcatcgatgtggtctcctgcaaggcaagctgctatagaatactactggcggtttcattataaaacgtttcagttcaatgaaacagtatcggatgtataaataaaatgtttcagtttgatgaaacattatagtatatactcggtaagtcgtttta

SEQ ID NO: 125420 - DNA, 1238 bp, Zea Mays
cctttccctcccggctcccgccaccagcgcctgacgaagctgctgctgaccacccaagtgaacgccgcccgccaccgcaacgagctcggcgcctcctcctgcatgtttaccgcccccgacgtcccgccgctcatcgacccctcctgcggtcctgcccacgtcttcccgctcgcgctcaagtccaccaccgcgctccgtgcccagcgccgccgccgcttccacgcgctcgccgccaagtgtggcctcctctccagccccttcctcgtgtcccttctcatcgcgtcctacggcacacacggcggcggcagtggcggagccttctacgaactcacccgccgcatgttcgacgaattgcccgcccgcaacgccgtcgtttgggccttggggcgccatggtctcaggtccacgcccgggcgggcgacctcatggacgtcgcctccaccgcctcctgcttcaacaccgtgatcgctgcggttgctgagtccggggaacacccagcccaagccatcgaggtagtgggcaccacgatggacgcattgacgtcggtcaaggaggtgcacggctttgcagtgcggcaatgcatgtgcgcgatcgagatcccacattggtagctccctcatcgaagcatatgggcgttgcggttcttttgctgccactcagagtctcagagggtcctcaaccaggttcatgttcgggacgtggttgtttggagctctctggtttcagtttacgctttccatggtcgtgcaatctcgcttttccaacacatggaggaccaggttggtgttcgggctgacagcatcatattccttagtttgttagcggcctgtgtccattgatccctttctggtcgtgtagatgatgcgctgcagtatttccatgtgttgagcaggagatatggagtgggagcttgtgcagatcattattcgtgcatggtgtagacgtctacagctacatcaagcttatgaacttatacggacaatgccagcagtaaaggttacagcaaaagcctgggagctcttcttgctgcatgcaggaagcatggggatgtgcggttggcagaggttgccgggagagcattgcttgagatcgaaccagagaatgcatgaaattttgtttcgcttgcaaacatctactcggatcgtggcatgcatgaggatgcagagcgggtgagaagcaagatggagcaacgtggcgtgcagagactgcctggtagcggatggatgacacatcacaaa

SEQ ID NO: 125421 - DNA, 904 bp, Zea Mays
aaaccagaccagaaagaaggcaggtgaggtgaggtgatgcagatgacccggctggaagacctgacccctgctccatccatggagcattcctcgaggccgaccctggggtttcccctgggaactgctctcctgctcctcgtcatctttgccctgagcggcatgttctcgtgttgctaccactgggacaagctccgcgccctcctccggtctcggcatcccgacatgttcctggaggccgaggagcatacggccgtctccgtggcgtcgtcatcgccgccgagaaaggcggtttctggtcacaagctggagagatcgggggaagagcgcggtgtgcccgttattattatgcctggagacaaggtccccaagttcttggcgatggcgaggcccagccctcgcggccccgaagcagcagcagagaagaccaccgaatgtcgggatcatcaggaaccctccgtcagtatctgtatacatgatgaaagcacagttagctgttagcatgatttgatcgagtgtatatatgtgcaatttgcttgcttgctaacacatctctctctctctctctctctctctctctctctctctctcgtgtgttaaactagatagagtttgaaaggacaaaaacagtcctagctagctaggtaactggctgttgttgaatgctactgtacccagcctgtaatccaaagagcaaagggggctagtgaagaagaatgttcttttatttatgctctttaattggagcatggatcagtcctatggaagaagaagctatttattgttaggtatttgttggtgccgtgcacgtatgttgtgtgcacgcattttgtcgggggactaaaagcaaagcaaagcaaagggcactatcaccaagtgaatgctctgaaagaaaagaaaaagaaaa

SEQ ID NO: 125422 - DNA, 857 bp, Zea Mays
aaccgtccatcattctgccgatcggaccgtccattggactcacacgcggatcgacgggcccacccacacggatttaaaaggatcccgccgcggttgcatttggcactcatacatttcgactctcaactcccaaggtccctttttttttctcgatctggaagcgccgcagtagcagccatggacgtgagcggagcaggcggtaaggcgaagaagggcgcggcggggcgcaaggccggcgggccgacgaagaagtcggtgtcgcggtcctccagggccgggctgcagttccccgtcagccgcgtcgggcggtacctcaaaaagggccggtacgcgcagcgtgtaggcacgggtgcccccgtctacctcgccgccgtcctggagtacctcgcggccgaggtgctcgagctcgccggcaacgcggcaagggacaacaagaagacgcgcatcatcccgcgccacgtgctcctcgccatccgcaacgacgaggagctcggcaagctgctggccggcgtcaccatcgcccacggcggcgtcctccccaacatccacactgtgctcctccccaagaaggtggccgagaaggcggccaaggagcccaagaaggccgctaagtcccccaagaaggcgtagagtgatctcctgtcttagaacaatattaccattagcaatcgtgcagttagactagatcatgtttagtgtagatccgcaatgttcttgtccctgcagccatctggaacggtttatctagtacatccgtgcactttccttgctaattgcaaaaaaagcggtctaatcttttgtttcgtttcttgcgtacatttgcgatttatgctcgttaatacacttattaatatcac

SEQ ID NO: 125423 - DNA, 1593 bp, Zea Mays
atggacacttggaccacctgccttctctccttccttccatccattcctccctgtctccgccctcttctgactcccgtaggccgtggtgccgccgccgactgctgggactgccctacaccaagtgcccaggtcatcttcgggccattcgccggcgacgagcaccaccaggtgtgccaggttgaccgagctatggacagcctgtggcatcttggggacgagctccgcgggcagcccaaggtggtggaggaccgccagtggtctctcatgacgtccaagctggcggagatcaccaggtccaagggcgagaggatgaacaccgtccctgacgccaagcagtgggacaagacgtcctaccagcttcacgacgacagcaggatcggccacatcggcctcatgaacctggatctcaagatgaacgaggctgccgccatgaagctccccttccgtggcatgccgtataacatgaaccagatgtacctcaaggggagcaatgccaattccaatgtcaatgcgttcaagatgaatgttggagtcaacaagtactccaatagtccaaacgggaaagacgccaatgggaaaaacaatggcggcagtggcggcaacaacaacaatgggagcgccaacggcacttctgtggctgacaagcgcttcaagacattgccgacgagtgagatgctaccgaggaatgaagtccttggtggatacatctttgtctgcaacaacgataccatgcaggaggatctcaagaggcagctttttggtttgccagcaagatatcgtgattcagtccgagcaatcactcctggcttgcctcttttcctctataactacacaacccaccagcttcatggggtatttgaggctgccagttttggtgggtccaatatcgatcctactgcatgggaggataagaagtgtaaaggtgaatctagattcccagcgcaggtgaggatctgcattaggaagctgtgcaagccgttggaagaggattccttcaggccagttttgcaccattatgatgggccaaagttccgccttgagctctccatcgcggagacattgtcactgctagacctatgcgggaaggaaggcatctgagctgtcgaggaggtggtggtggttgccttgtgagcttctagtaaataccaatcatctttgtatgttttgtggatggtggttggcaacgttgtttatttatgcgcaagctgctgctggtttcgggatggaaggaaagacctggtccctgaaacaagctgcggagagtgagcctgtcagtgtattgtgtctggcgtggtcaagaaccaaatcaatgttggaccgaccgactgagagtttggagtgtgtatgttttgctattactcttatctctagtagagtgtgggtatacctgggcagaatgtgtccccaaaagttgggggcctgtctgtgtactgtgtgcgatggacgccctaagtaaaaaaagggcaggtgatggtcgtgctccaggtttgtgttttgtactctgttgtaccttgaacctcctttgcgttttgcctaatcagagaatgaatgcaaaaaaaaaaaaaaactgccagagtgttggctcctggttca

SEQ ID NO: 125424 - DNA, 1699 bp, Zea Mays
ctacggagaacgccaacaaagccctaacctgcacaacctttcccccctcgcaagcaaagccaaacagatctcctcgtcgtcgcctcgctgtctcctccgccgttgcctgcgatcccgatcatggagggcgacagtaccaacctcgacgcggctatagagtcgctcctgaacgtggagaagcagatgaggctggccggcgatgtcgccggcacgcggaaggccgtcatcgacatcgtcgagctctgctacaaggccggcgcgtggaagacgctaaacgaccagatcgttctcctctccaagaggagaggccagcttaagcaggccattactgctatggttcagaaagcaatggactacattgatttgacaccagacattgacacacgcgtcgagctaatcaaaacactgagcagcgtctctgctggcaaaatttatgttgagatagagagagcaagattgatcaaaaggcttgcaaatatcaaagaggagcagggaaagattgacgaggctgctgatttgatgcaagaagttgctgtcgaaacatttggctccatggcaaagacggagaaaattgctttcattcttgagcaggtccggctatgcctagatcgtcaagattatgtccgagcacaaattttatcaaggaaaatcagtactagagtatttgacgcagatccatcaaaggaaaaaaagaaaccaaaggagggtgacaacattgttcaggatgctcctgcagatattccttccctcctagaattgaagcgtatctactatgaactgatgattcgatattacttgcacaacaatgattacctggaaatctgtcgttgttacaaggctatttatgatatcccagcaataaaggaagatccaaccaagtggataccgattcttaggaagatctgttggtacttggtgctagcacctcatgatcctatgcaatcgagccttctcaatgctacactagaggataaaaacctttcagaaatcccaaatttcaggttattgctgaagcagctggttaccatggaggtcatccagtggacagcattgtgggaattctctaagcacgaatttgaaaacgagaagaatctgctaggaggagctttgggtgccaaagctgcagaagatttgaagctaagaataattgaacataatatcttggttgtgtctaagtactattcgagggttaccataaagaggcttgctgatctgctctgcctgagtttgcaggaggcagagaagcatctttcagacatggtgaactcaaaatctctgactgcgaagatcgacaggccgatgggagttgtgagcttccgggtagttcaggactgcaacggcacacttaactcgtgggctacaaacctcgagcagcttcttgaccttgtcgagaagagctgtcaccagatacacaaggagactatgatccacaaggcggtattgaaagcttgactgattggcgctggctgtttttgcttcatctgcaatcagatacctactcctgaaaagctgatccggctcctcattcaaactcagttctccagtcttcattctgggatagcaagaacgtcaattatttaaatattaattggtgctgccaagaaatctctgcatgtcagtcgccgtataaccacatcctcaatattcaagttgggtctatgtatctctaatctaatctattctacgagagctgtttctt

SEQ ID NO: 125425 - DNA, 1815 bp, Zea Mays
ctacggagaacgccaacaaagccctaacctgcacaacctttcccccctcgcaagcaaagccaaacagatctcctcgtcgtcgcctcgctgtctcctccgccgttgcctgcgatcccgatcatggagggcgacagtaccaacctcgacgcggctatagagtcgctcctgaacgtggagaagcagatgaggctggccggcgatgtcgccggcacgcggaaggccgtcatcgacatcgtcgagctctgctacaaggccggcgcgtggaagacgctaaacgaccagatcgttctcctctccaagaggagaggccagcttaagcaggccattactgctatggttcagaaagcaatggactacattgatttgacaccagacattgacacacgcgtcgagctaatcaaaacactgagcagcgtctctgctggcaaaatttatgttgagatagagagagcaagattgatcaaaaggcttgcaaatatcaaagaggagcagggaaagattgacgaggctgctgatttgatgcaagaagttgctgtcgaaacatttggctccatggcaaagacggagaaaattgctttcattcttgagcaggtccggctatgcctagatcgtcaagattatgtccgagcacaaattttatcaaggaaaatcagtactagagtatttgacgcagatccatcaaaggaaaaaaagaaaccaaaggagggtgacaacattgttcaggatgctcctgcagatattccttccctcctagaattgaagcgtatctactatgaactgatgattcgatattacttgcacaacaatgattacctggaaatctgtcgttgttacaaggctatttatgatatcccagcaataaaggaagatccaaccaagtggataccgattcttaggaagatctgttggtacttggtgctagcacctcatgatcctatgcaatcgagccttctcaatgctacactagaggataaaaacctttcagaaatcccaaatttcaggttattgctgaagcagctggttaccatggaggtcatccagtggacagcattgtgggaattctctaagcacgaatttgaaaacgagaagaatctgctaggaggagctttgggtgccaaagctgcagaagatttgaagctaagaataattgaacataatatcttggttgtgtctaagtactattcgagggttaccataaagaggcttgctgatctgctctgcctgagtttgcaggaggcagagaagcatctttcagacatggtgaactcaaaatctctgactgcgaagatcgacaggccgatgggagttgtgagcttccgggtagttcaggactgcaacggcacacttaactcgtgggctacaaacctcgagcagcttcttgaccttgtcgagaagagctgtcaccagatacacaaggagactatgatccacaaggcggtattgaaagcttgactgattggcgctggctgtttttgcttcgtaagtaagatactgtaccagcagaaggacggggatgctatttgttgctgaactcttgctgcacattatttgaattcttagatctgcaatcagatacctactcctgaaaagctgatccggctcctcattcaaactcagttctccagtcttcattctgggatagcaagaacgtcaattatttaaatattaattggtgctgccaagaaatctctgcatgtcagtcgccgtataaccacatcctcaatattcaagttgggtctatgtatctctaatctaatctattctacgagagctgtttctttgttttcgcattgtgcaatgtcagtggttttcgcc

SEQ ID NO: 125426 - DNA, 1800 bp, Zea Mays
ctacggagaacgccaacaaagccctaacctgcacaacctttcccccctcgcaagcaaagccaaacagatctcctcgtcgtcgcctcgctgtctcctccgccgttgcctgcgatcccgatcatggagggcgacagtaccaacctcgacgcggctatagagtcgctcctgaacgtggagaagcagatgaggctggccggcgatgtcgccggcacgcggaaggccgtcatcgacatcgtcgagctctgctacaaggccggcgcgtggaagacgctaaacgaccagatcgttctcctctccaagaggagaggccagcttaagcaggccattactgctatggttcagaaagcaatggactacattgatttgacaccagacattgacacacgcgtcgagctaatcaaaacactgagcagcgtctctgctggcaaaatttatgttgagatagagagagcaagattgatcaaaaggcttgcaaatatcaaagaggagcagggaaagattgacgaggctgctgatttgatgcaagaagttgctgtcgaaacatttggctccatggcaaagacggagttgtcacaggtccggctatgcctagatcgtcaagattatgtccgagcacaaattttatcaaggaaaatcagtactagagtatttgacgcagatccatcaaaggaaaaaaagaaaccaaaggagggtgacaacattgttcaggatgctcctgcagatattccttccctcctagaattgaagcgtatctactatgaactgatgattcgatattacttgcacaacaatgattacctggaaatctgtcgttgttacaaggctatttatgatatcccagcaataaaggaagatccaaccaagtggataccgattcttaggaagatctgttggtacttggtgctagcacctcatgatcctatgcaatcgagccttctcaatgctacactagaggataaaaacctttcagaaatcccaaatttcaggttattgctgaagcagctggttaccatggaggtcatccagtggacagcattgtgggaattctctaagcacgaatttgaaaacgagaagaatctgctaggaggagctttgggtgccaaagctgcagaagatttgaagctaagaataattgaacataatatcttggttgtgtctaagtactattcgagggttaccataaagaggcttgctgatctgctctgcctgagtttgcaggaggcagagaagcatctttcagacatggtgaactcaaaatctctgactgcgaagatcgacaggccgatgggagttgtgagcttccgggtagttcaggactgcaacggcacacttaactcgtgggctacaaacctcgagcagcttcttgaccttgtcgagaagagctgtcaccagatacacaaggagactatgatccacaaggcggtattgaaagcttgactgattggcgctggctgtttttgcttcgtaagtaagatactgtaccagcagaaggacggggatgctatttgttgctgaactcttgctgcacattatttgaattcttagatctgcaatcagatacctactcctgaaaagctgatccggctcctcattcaaactcagttctccagtcttcattctgggatagcaagaacgtcaattatttaaatattaattggtgctgccaagaaatctctgcatgtcagtcgccgtataaccacatcctcaatattcaagttgggtctatgtatctctaatctaatctattctacgagagctgtttctttgttttcgcattgtgcaatgtcagtggttttcgcc

SEQ ID NO: 125427 - DNA, 957 bp, Zea Mays
gatctcataactccaggctggcttatctcaataatcactttttttcctgttgtgatgtgacgtgggggaaaaaggttattgctgaagcagctggttaccatggaggtcatccagtggacagcattgtgggaattctctaagcacgaatttgaaaacgagaagaatctgctaggaggagctttgggtgccaaagctgcagaagatttgaagctaagaataattgaacataatatcttggttgtgtctaagtactattcgagggttaccataaagaggcttgctgatctgctctgcctgagtttgcaggaggcagagaagcatctttcagacatggtgaactcaaaatctctgactgcgaagatcgacaggccgatgggagttgtgagcttccgggtagttcaggactgcaacggcacacttaactcgtgggctacaaacctcgagcagcttcttgaccttgtcgagaagagctgtcaccagatacacaaggagactatgatccacaaggcggtattgaaagcttgactgattggcgctggctgtttttgcttcgtaagtaagatactgtaccagcagaaggacggggatgctatttgttgctgaactcttgctgcacattatttgaattcttagatctgcaatcagatacctactcctgaaaagctgatccggctcctcattcaaactcagttctccagtcttcattctgggatagcaagaacgtcaattatttaaatattaattggtgctgccaagaaatctctgcatgtcagtcgccgtataaccacatcctcaatattcaagttgggtctatgtatctctaatctaatctattctacgagagctgtttctttgttttcgcattgtgcaatgtcagtggttttcgcccaattcgtcaaatcgcattagaaatattcctgtgcttttacggtggcccactgagggctagtttgggag

SEQ ID NO: 125428 - DNA, 1870 bp, Zea Mays
ccgacaggcccatgggccatggatggcagttggcttgagccgcaagtctgggcctggaaacccagcgtgccgcacggtgccacggtcagatgagttaagccctaaacccatttccccctcgtctccactactctggtcgtcctcgcgccgccgcagcgacgccaccgccggtaatggcttccaccgttgtgctccggaacgcctgctcccgccgactcttctgctactccactctccgcgccgccgcaatattgggacccgccgcgccacctgatgcgcccgcggcggcgtcggcccagccgccaccgatggcaggaaccctctgggcgaggtccatggccactttcacgcgcacgaagccacatgtgaacgtcggcaccattgggcacgtcgatcacggcaaaaccacactcactgctgccattaccaaggttctggcagaggcagggaaggccaaagcagttgcttttgacgagatcgacaaggccccggaagagagagccagaggaatcaccattgcaacagctcatgtcgagtatgagactgctaaaaggcattatgctcatgttgattgtccaggtcacgcagattatgtcaagaacatgatcactggagctgctcaaatggatggtggtattcttgtcgtgtcagctcctgatggcccaatgccacaaacaaaggagcacattcttcttgcccgtcaggttggtgtaccttcccttgtgtgtttcttaaacaaagttgatgctgttgatgacccagagctactggaacttgtagagatggagcttcgggagctcctcagtttctacaagttccctggtgatgagattccgatcatccgtgggtctgcgttgtctgctttgcaagggaacaacgatgagataggaaagaatgccattttgaaactaatggatgcagttgatgagtacattcctgatcctgtaaggcagcttgataaggctttcttgatgccgatagaagatgtgttttctatccagggtcgtggaactgttgttactgggcgtgttgagcagggaacaattaaaactggcgaagatgttgagatcttgggtttgacacagagtggtcccttgaagactacagttactggtgttgagatgttcaaaaagatactggaccatggagaggctggtgacaacgttggtcttcttcttcgtggtctaaagcgtggtgatgtcgagcgtggccaggtggtgtgcaaacctggtagtctgaagacatacaaaaagtttgaggcagaaatatacgtcctgacaaaggatgaaggtggccggcacactgcctttgtcacaaattacacaccccaattctacttcaggactgctgatgtcactggaaaggttgagttgcttggtgagacgaagatggttttgcccggtgacaatgtaaccgcgaatttcgagttgatatcgcctgttcctcttgaaactgggcaaagatttgcgatgagggaaggagggaggacagttggtgccggggttgtctccaaagttattagctgatgagtttccactttcttgcccgtagcaatttagtaaagaaatgaatgctgacatgtttcttggaatgcatgggcaaaaaggcagagctggctggtctggccgccattcattctggacagtaccttgtgctttcttgttgaggtggctcatcataaagcatattttgtagccacttttccgagttgatattagtgggttcttaccaaatttaccgcgaaaattgctggtcatgttgggccgatgcgtcgttcttcgataggagatgaagtgctgttatcagtgtcagtgacatcttgaagcggcaagaaacgaagatattgaaatgtagaaaaataataaataaa
